United States Patent Application Publication US 2014/0057251 A1 - sequence listing, part 37

SEQ ID NO: 39587 - DNA, 1648 bp, Cannabis sativa
aaaaaaaaaaaaaaaaaaaatacaattttgcaattagttcaaatatttctagaaaaagatgataccatatgttaaagaatctcataaagattagcccatatataatatttatgggctactccttccattattaattgcttttgagatataacttcatgcaccttagtatacattcatctatgcctacttcattaaccatacactttcacattctaatatggtatcagagcaaaataaacataaaatctctaatgactatttgacccaaaaaaaagtcaatcgatgtatagccaaaaaagagccaccaaatcaaaaaatcgataaaaaaaagtagagccaaaagccaaaaagagccacttgtgatttagggatatagtgagccaaaaagagccactaaaaatctataaaattgatccaaaagtagagccgaaagagtcacttgtggttcagggataatgagccaaaaaaagcccttgtgattgagttgtccaagatggtaagaaaaaaaaagggtagattgcggcattgtaaagaccgcttaagatcaatattttgaattattaaataattaggtttaattacaatattgagttattatatattttgaagaattatttaaattcaatatgtaataattatgctatatgtggatttctcgttttctgtgattatgtttggtagcagtggaaagcgacgttgggccaatagagagtcacgttctgtatggtatagaattattttaatagcggggtctcgtgttaggctttggagttatcgggatttatgggtttggaaatgaccaaatacccttgaatattaataatcttttggtgtggtcaaaggggtaaaaaggacttttccttttatttactattttggcattttgtggacattaggatctgattcctatttattttttgagttagatttaattaggaatggattattttattaaaggaaacgctagagaaacctagaatatctctctctctctctctcttcaattccctctctcttttgagccacctagaagcagtaggaatttgggattaattattttaacccaagaaattcagcaaggttttatgactctacttaaggtatgattctctagtgtttctatccttgttttctttgagctctagcttgaatattgcatgagttatgattttaggggctgtgtggattagatttgtttgatgttctgaagttgagttatggttgtttatgtaatattaggttagattaattgattattaagaggttgggataaagttggagcttgtaagctcttacttggtgctttaatggtgtttttgtcttctggactcattgtggagttttattgcttagattgggtctattacggtgtgtacaggtgttctgaaaggtttcattgaatttggggttgaattgtggcgtgagggtcgatttttggtttttctgcacaaaaccagttaaccagttttgtgggacttgagaaaccggttaaccgttataagtaattactcctgaaaccgtagttcggtttattacttatcgtttgctttatcaagcaacgatagtgacatatgcaacttgtggttaacgagtggtaagggttggaaacgatcattaccgttatgagtaattactcttgaaaccacgg

SEQ ID NO: 39588 - DNA, 1604 bp, Cannabis sativa
aacatcctaaatatgaatttcttaagacaatgaaataaacacataagagattaagaaattcttacattgatggcaacaaaatataatgactccttccatttagatctgtagtccttgatttctgtttgtagcagagcattatcaagatttgaacttggatcttctctccttcaatttggttagagacattcttcctcactatgctagatattgctttgacatgagtgggcatactctcaattcaccataggcttcaaaatctttgaggaagaagaagagggaattcaaaaatagaagctctcttttttgttttctattttgtctgacaaatgagtctgataatcaattatcaaattgagaaaataagagccatcttatgctttttatagggaaggttaggtttagaatttaaatagaattaaaaaggattaaaaaaattaggtcaattgaacatccttggtcgaacccttaatgggcttataagatctcaattttaccattttatttaactcatctttcttttcacaaatgccatcaagtccattgatgagagtgaagcccctctttgttttgagatagacctcgatcagaagaagtagggagatggtacacaagatttaatgtttcaaactcaagccaatgccattaatgaggttatgacaaaggccaagttagttccaccgccaccagctctagaactagacgagccgtctacttcggttgctccaactgttgtaactaatgcatcagacattaaagcactagcagagaggatggatagacttgaggctcaataagattccttgatagtctcccagactgagttagtgaaaagctaaaccgatatgaggtgctcctttgtggatagtcagaaagagatgaaggagtttttaatggctcagttggcctacgtgatagagttattgaaagagaaggacagggaaccacaaccatcccaacctacagatgaccatcctcatgagagtgagtacgaagatgtgttcccaaaagattaggaacaagatgatgatgaggcacaatatactccaactgatgccattatcatggtcattggtgacataaaatcacaggacgatgtcctgcttctaaccagacccccaaaaggggtgccatttgtgagaaaaaggaagaagccttgctattttctagactacatagaggagaaaaagaagaagtgtcttcttccagagaatgtagacccagaaagaccactagaccgtaaattaatatgcacattcaagaggtgggtgcttggtaacatcccaaatattcgtcgtagatgttgatcttaaatttggccaaccgacaacagagtcaagtgtaatactgatgctttccacgtgttacacaattagaataataaagtaaatgaacgtaggattttatagagatttggcacccttagttagcaggtaatgacctactcctcttttagttgtattaataccgagagataatactattcagatcactatagtgatgggatctaaagtagctctctaaaggtacaatgtaggaatcagagttggcaattctcaagcatgaaaatagcagtgggcgtgtatgtgtgtgtgtgagagaga

SEQ ID NO: 39589 - DNA, 5865 bp, Cannabis sativa
  modified_base (4010)..(4019): a, c, t, g, unknown or other
attacatgttaaggtttatcgatccaggtgttattaaattttcatacagttggttttcatcatcacatgaagactttgtagagactgggatatcgagagagtgttccttttttttccccttgaaagatagagtcatgtttaaaagagagtatctctcacatatattgatctcatgattcttttctaatatttacttgtgagtttgattgaagatggttgctattattttcttacttggtatatatacttatttgcaatattgtttgattagcttatttagctaatatttgatgtttgagaatcgtacatttttgtttgattagcttaaatattattagctaatatttttttagataaatttcattttaatataacataatatgtacaaatacaaatcctatatatataaatacattattacttgtttaaattgcatcaatatgatcaaattttatttatattgcatcaatatcattttctttatattatataaatatattctttttcctaatcctttttgtacattgaaatatatatgattacacctaatttatcgttaaattaaatttgttcactaacaattaaattatatatttgagtttatacaattagcacaaaaagtatataatgaagctcaataacaactgattaaattaaagaaaaaccaaatatccactgagtccaacatacataaaacaaaagacaatacataaaactaaacataagagttctttgtcgaaattagccaaatacactgactttcatcatcacaatgatcatcatatacactcagctaattcctagacacaataaaaacacaacaagaaacaaacaacaagataaagaaatttcgcagaaattaaaatctaaaaaaaacatatataggataggttcgatcggttgaggactgatagatagtactcgatctcgattattactagtccataatcaatgaatggatcaaaaagctcatcaataccatttcctcacatgagtgggagagatggttttgtctttggcattctcttgagcaataatttggatttttggagagaatttccaatcttgaaagaggcgattgaaaatgacttcatttccagggtcaatgtacatattcatatggtccttgttctttgggtacaccagaatcatctcttccatttcaggtgaccttttaagaaacattctcaccaaatctatttcttggttaagaaatttaaaccctttcaacttcatcaccttcaagttttcgaaaatcgtactgaacgattcaatgaatggtttctggtgcagctcatagtaaagatccggaatcaaattgaaattgttaacctatacatatttatatatacataaacaagaaccaataacagacacattactaattaattatataaattaaccattaataatttttgtatatatatatatactcacatcaaggaataatttctgtaagctgggacattttccaacaaagtcagcaatatcaacggcattgcaaaaggtagtgtagtccataaacacctgaagttccttcaaatgccatagacagaagtccagactcccaaaactcccattgcgcattttagcacacgctccctgcagattaattacattaaagagggatttttgaatcctgtattagaacccaatcgaagaagatatatagatcatctatccaaaacaaacactcaaataagatttaaaaaggagaagctaaacacataacctgaaaatgtgctatccacacgtacgtgagaaataataataataatatatataatgaaagaaaaaagaattcaaatattatttatatatatatatacctccataacagtactggttatggtgagcgtggacacattataaagatttaaatggagaatcttttccacatagtaataaggagtgattcctgttctaggagtggagaaattgagcatgacgtccttcaacttagaagtgggtgggtcattattcatcaagatccgaataccttgaagaactgatcctgaatagtgaagtgactcgaggtttggacagttaacatcaatatagaacatatccatagaattcccaactttcaagctcttaaacttgaagttgtcgtcatgggtcattatccttatgacactaggcccagaacagtcagtcatgtccagactctccagattcacacagtgtttcatgatcctgtacactgtgaactcgcaaaacacaacctttctcagcaccaaagtggttatgaatcccaaacctgcagctgatctcaaacgaagccgagatgggagactgaatttgcagtatttgagcttcaaaacccttagggtttcagaatccaacaacgagtgatggaacttgaatatgttgagcgataagtcgcagtcgagatctagaactttgacacctttattgagagcaatcttgatccaatgagtgagtctgtgttctttatcggttgggtccattaagatttgcaaggtatcgatgttttcgccaatgtgattgtccataatgcgggtgacgacatcgatgaactcggttcggttgtggagttttctgtagaactcgttgccaaacaggaggtttcgacagtaacgccacgtgttcttgaaccgtttggacataacgctgagttgaaccagtattctggttggcaaataggtgaagatgtgtgcgagaacatcgtcacctacattaccaccatagcttgggataagtgatgaggatttcctaattattcgacggttattttcaacatgaggaacaccaacaccaacagccctcttccctgtgatgatcttattatgattctccttattattaggtttctggacaagaagagaggcttgggttaggctttttcgggcacggctgcgagtaattggagccattttttttttttttgacaaaagaaactgggattttttgctaagagtgtatactagtactggttatgcatgaaatattgaaaagaacaataatggaggcttaagggtacacaagagaaagaagaagaagatatgagtgaaggtgcattgtactgagtgaaacagtgggttttatattaattagtagaggccggagagtgtttaggggagttacatgatatttatgtattaaattcttcatttattattatatattttttttatttgttgggttctttctgagggggtacgaagataagaatggctatgcttttgccagttttgttttccttttctgccgttttgttgcgaaacgttgtcgtttgttgctagtagggctttatatcttgccttatatgatggttcctatacgtttttatgagtattttggcaaccaaaaaaaaaaaaaaaatggatactctattaattctggatacaaaacttttcttttctttttttacaaggacaaaacttttctttaatttctcagtagtacttaaaagaaaatggtcaaacgtaatctgcctctactataaatgtactttttttaaaagaaaaaatatatataaaaatagtcttgtttttggacactctaaccgtttttattattttggttagccataattctctaaaaattattttgttattgttaaggtatatgatacttgatactaattatactaataacagtatacacttaagaattagtgataccaataattctcatatcactataaaaaaatgttattttgtgacaacttttttaatcacaaaatattttttttgtgactaaatatgatttttagtcacaacaaaatgttatttgggattaaaacatggtatttagatacgattgtcactaatttagttttagtcacaataaattgtaattttttgattaatacctttagtcgtgaacattttagtcacaacataagaatgatgatttaaattagtcacaactttttcacttttagtcaaaagttttattgtcactaatttagttttagttacaataaattgtaatttttgtgattaatacctttagtcatgaatcttttaatcacaacataagannnnnnnnnnataattagttacaacttttttacttttagtcaaaaattttgttgtgactaaaaataaaaaattttatagtgtatataaaatatatattggccgtgtcatatggaagacatgttagtgaaaaagcaagtaccttttgtaatggctacttagcatttactatacaaaaattatccttctcaatgaaatatacatacagacaaaaaaattcattgtaatacttttatgatttcttgtttgtttatattttgtaactccataattatctggattattgtccagcaaaagaaattaactggtttagtgaagtgtgagaggcttgtttgacattatatatattcttttgaaagagaaatcctaaaaagcacctaagataagataagtatactattggtacaatttaagataagtacgtgctacaaaaaataacatactatactattggtacaatttaattagtacttcttatgatattttaatttaataaataatataaaatatttacaaagcagcaaataattattataatgtgcctgggcactttattaaagtacctaacagcaaaactttttttcaaaagtcacttttattatacaatgtatatctttgggaagagaaatgttattaggtatattttatggtgcacaacaacatcctcatatagtgttacgtgctagtggttaattagcagtttcctacattatttaataaattaaaatatgtaaaactcgatattaatttatatcaataataatatgtcacattttgtaatatttttagacaacataaaataccccttagtatttctttttgtggaaagtataattcaccacaaaagaaaaaaaaaagtacttttattttcatttctaatatagaaaatgtgaacccgtcgttcccaaaaacaaaagtagaataattacatatgtgaatcctgggctagagactcttgtagattgttctatttttttttttttttggatattataacgtacatttgaaacagcaagattatgaagcaaaaaagaacatttttcactcttttcttttgccagttaagatttgaaaacactgcatgcatggtaatgtgataattacatgaaaatgtctttttttgaaattataattcgcgttacacttctagtctagtctagttgtcccttagtcatcatttaccataagttgattttccttattgtaatatgacaatgcattaaattttaatattaatgataaacattttattgaaatattagatttttttttttaagatttgaaatttagtattttttttttccccttttttcaattttagaatcttatcatcatcaattactattggctgtcaattttttttctacttctagcttcttcttgttgttgttctttctctttctttttgaaaactgaaaattttaattaacttcaacccttaattttttaaataagaatatatccaacatactttagcacggttctcaaacaaaatatcttataattatatgttagcattttaattagttgtatatatatagtgcattcattcattcaaaagagagccacggccaattgctgaccagttcacaaacatttagatatataacactcttttcttaactaactattgtaaatgtttggtaagatggtacataattgaatataagactattattagcttaatataatgatatatatatatatatatatgatacatacaaacaaatcactggtttaattagttgagaatctctgtcgaatatccaaaataataattacataaaatattattttttgtaaaaaaaaaaattacatttttacatttaaagaattttttatatttttataatttttc

SEQ ID NO: 39590 - DNA, 4233 bp, Cannabis sativa
aaaaaaaaaatataaggacctagtttatgactctatagtagaaaacacataaatttcatccaacactaaaagtgcacttcttcgggttcattttcattccatacttctggatgatagagaaagcttcctctaaaacttcattgtggctcatggaggtttgtgactttaccagcatatcgtcgatgtagacctctatattcttccttagaacatctttgaacatcttgttgacaaggcattgatatgtggctctagtatttttcaacccaaatggcattaccatgtagtactaaatttccttattagttttgaagctagtatgttcctggtcaaccacatgtattttgatctaattatagccgtagtatgcatcgacaaagcttagaagttcataccctgaagtagcatcacccatttgatctattcacggaagtagaaagcagtctcttgggcatgtcttgtttagatctgtgatgtctatgcacattctctaggttccattcggctttgggaccatactggattgtctagccatactgtatacaatgcttcccagagaaactctatattagtcagcttgtctacttctgtcttcactatttctactcaaactagaattaatggtcttcttgtttgacaaactggttccacgataggatctgtgtttagagcatgaaaaatcacatgaggcctgagtccagtcatgtctaaattactccatgctaacacgtcattgttctcttttatagtagagatgatttttctctaacagtcggaggtatattctttttcactttaataactttagtgagatcttcatcgttgatgcacattttttctgtctcctctattggttcaattttgttttccatgcatacacatagatttagttcacattcttcccataccatccctagtgctggttgggtgcatgttctaggttcttcacgatttctttctcaaacgatcaaaatagttttggtcgagatattataacagcttcttgcaattttttgattttcctctgattgttctaatgcttctagtatcgcttggaaacttcaaacataagtgtcgaattgacattactcctccaaagtcaactaagataggtcatcctaggatgactgtaacaccctatttgtttagctacgctatagtaattttttacttacgctgcacacttttactaatcaaaggtttcttgaaaattgtgtcaaatttaaacttctaataaaaatttaatctttaagaaatatataacacaacataaaagtcgagatccaatttttaaaatttacaattgtttataaaatatattttatacacatgatgcaccgtgactataatatatagtcccaagtcatcttgagaccgaaatctcaaggtcaaaccatcttgatatgcaaaatcatcctcgagctctagactcactggtgctcaaccttagcctttcctttaaatatacattcaaacaatacctgtgagtcgatagactcagtaataaaagtacaaaacacataacataatagtgacttgtatctaggcacacatacacctatttatacggctttatatgcatcaaaagtgttcttaacaaaagtacgacctctgtaccacatgcacaaagtacttgccctgtactagtgtaggtagggctgaaccgtaccccgagtatcactgagtgttgtagcacatgcactacatactcgtcatactagtgttgttagcattgtgccacaccctttaaacatcatatattgtaccaatgcactccaaccgctactgcactagttttggtagtataaaaatcacataatatagcatgcaatttacatacatacaaacatacatgtacatgttttatactaatcttggctcatttctagattcaagtgtgttggtcaacctaaatagaaattcacgcgctgaacagatgccctatgtcacaattacataatttaggtatataacttgctaaaatcttttcgaggacctaaactcaaaactaaaggtttccctatcaataaatagcatggaaatatcctactcttgaggaaacatgaaaagttagtctcccaaaactgctcaaaaaatggttaactaagtttcaaaaaaatggtaaaccatttttggggtcctacctgggtaaacggttaaccgattttctgaagaaaatcccaagagcttcgaatcctgctcaaaaattcccaaaacttagccaaactttctagaatacctataaaaaaatccacaaacatcttccaagtgatgacagccaacaaatcacatagagagaaaagatgcaattattgagccaattttgagtttgaagttcaactccacatacaaccatcataacagcttaaaacaagctttaatgaactatatcacttagtcttttttttttcttttttattttcaccattgtagataagtggaggtcttttttaatgaactatattacaagtatctttattaacattttcatgagtatccactaagctggtatactaagcatatcttggttcttgagttcttcctttcttcgcacattcgattggccttggtgctttagaactccttttcttctaagaatggtttgaattcaattctagaaatctattttttggttcatttctatattcggtttgtgcactctctagctagagaaacttgtttgttcagtttgatatatggaagtaccaggtccataaacgatgggtgttgtgaacctagatttcagtagcaaaatagttggagcagtcatctatgacgtttgtattgtggaagtgtttgttgatggcgctagaagtactccataagcctgagagtattcatcttccaggtctatgaatccttgggcattaaataagaagataaataaagatttttcccttttcctttgaagcgcaccctataacaaggatccagtggttattgctgatcttaaagacaccatcgtcatgtcatcagtaacctttgtttttgcagcagaatccatcatacgctggatatacttcttgaggctttctcctagttgtttcttaatgttagttaaagagaaaacttctagctcaaaattattttctactatgaattgtttcttgaacattgcttttatatccttctagttatggaccgatcctaaagataacattttccaccagtcctccatggactttttcagagttaatgaaaagtagaggcacttcgaatcttcactagcttttgctacttgtagcatctggctatatttgaataaatggtctttcgggcccattcttccttcatacaattccatttgaggcattctaaagtgctctagcagctttgcatctatgattccattttgcatctggtatatcttttccatgagctttgttaactcttcaatttgatgctccaaattttgagatttatcatatagagattctcttcttttaacacgatcgtttatatgatttcttaggccgttgttgtgaggtccttctttctcgattctaaccttttcttttgggcattcggtttcctccgaagatcattcgtggaagacttcctcttctgtcgtctgatggcagacacacctctttaacatcatcactttgactaatagaatcatcactatatgtagctctacctcaagaataagtttggtcacctttccttgaggcacaatttcctttatttctcttttcaagttggttggaagatttggatttcttttgctatttagcttgagtagccttctttgaagtttcaccttaccttcctttccctttctccttatgaggattgttgatctcgcttctagtcaacgacagtgagtcaaaataaagcgattaaataagataaataatagaaaaaaaaaacagtaagtaaagagaacactgaaatttttagaggttaggccctgtgagaatggtaataccctactccatttttgttgtattggcttgagagacaaataacaaattatcctctctataaagctcttacaatggatctttgagtaattctcctttagaccgctctttctctcttaactgttcttgttgaatcaaatttgtctcaataaatagttagattgaaccgctatttataggggcttattacatgaagaatggattcccttaatctataataaaaaaaataggaaactatgttaatttgataatgacaatggaaagaatgggcctaagcttattgcctttattatgtgaactaatccca

SEQ ID NO: 39591 - DNA, 1852 bp, Cannabis sativa
  modified_base (1815)..(1823): a, c, t, g, unknown or other
ccccccccattgtgtatccactggccggccggccagcagtaggagtacccatggtcggccagagtacaacacttccttccccaggggagcgaagtgcccagaggtcgatcttcaaccggtagggaccgggagtgggtatatacacccaaaatcggggttcaaaaagtgaaaccaatcacttcagaaatctagatccaccaaactccagcaattggtacgatctacccaccattaacacacaattaacatcagttgactgtggagtcacgggcggccaaaccctaccttttctgggtctggccgaccatagaagcatcatgggcggccagaacctaccctttgtagatctggctggccatggaggagtactgggtggctagaccctacccaatgcaggtctagctggctaagcaaaacattcaggtgtaggcctggccggccaaggctaactcccatgcttgggaatggccggccagggtctgcaattcaacacgggtctagctgaccttcacaatacactctctcagggtatggtccgcaagtccttatctctctagaatttggagcctccccaaggagggtcagtcagtcaagtccccacagcaacagatccttctgtgcaaacacagttagaccaactcaggaacatgatctaaggaataattggcctgaagccttcagaccgtaaactttatcagtcaaggggatcactattctcggcatacataaattccttacccttgccaaagttcaaaatgccggtatggaaggtgtataccggacgagaagacccactggccacatcaaatacttcaagatgcaattcgatctctagaatgttactggtgatgtgcgctatcgtatattcccaaccacattatcggagaaagctcaacaatggtacttcaaactcatcccagggagattcaactcctgggatatgagaatcctacacacaattctcgtccttgagacttgtaccatcatagctggaagaccttgtcaaagtcaaacagcaacagtaggaacctctgaaggattacatccagaggtttatggccgaggctaccaaagtcaaaggccttacagaagaaggccaatatacagccatactgggggcatactcccattgagtgacttctaaaaagatatctggagaatctccactaacaacatgaggagttccttgatagagctgatgactttatcaaacttgaagaagccatacgataggcccaagcaagacatgtcaacaataggcagtcacgaggcacccagcagcctcaagacccaccaggtgcataggcagacaccaacaattctacctagacttctagtggtaaaagcactagaagcaagtgcggcaccaacagctctgggaggaacaatggaaaaaaggagaagtttaacacttctcccacgccacagaagaataaggagaagtacacctgcttcaccctcctaatagagaagcccgaggccatcttcatggccactcagagaacagtcccataccggaagccctttcctatcaaaagggatatgggtaagagggacatgtcaaaattctgcagatatcacaatgacttcggcgacgacaccaatgagtgtcaaaatttgaagagggagattgagtacctgataaggcataacaatccccacctgcatcattatgtataagatgaccaaacttaggcacaaggtgcccagaatggagatccactagtagatgaaagacaccttcgatattgatttcgaaccctccttcattgttcttcaaccaattttcccttagtgatagagtgccatgcccannnnnnnnnagtcaagtactcaatcatagtgcaaaaga

SEQ ID NO: 39592 - DNA, 2241 bp, Cannabis sativa
attaagtgcttgatgctacagagctttggttttatgcataataattgtgattattacactggcagggaatgccattgaagtagcccatgcagcagctaataggtggacaggtaattcattcatgcattgtttctattttacaattcttaagcccagtttttctcactgaaaatatgctttattgaggaattcaatatctaggcactcttttcgctttttgatgcttactgtcttctgactctgcagacaacatcttcacagtgcggcagtgggtctcaaacaatttccctcaggccaaagaggagcttgataacttgtacaaggaggtacatcagctaacttcatatatgttatgttccaaattttataaggcctttattcttaaagctgtaaaatttaactcaaacaatttcttgttgtatgccaacgctaaagcatcccattcttgagttttggaatcattagagctaacagattttgatatctgaatttgacatgtccagatactaacacacattgtaacatacttagtcatcaagctattcgtctatattcccaagttccatcatttgtcttagattttttgcctctaaatgcagataggaataaccgacgactttgactactttgagttgtcaccaatgccagtcagctctgtgaccgattagaggcttgaagggcaatacaggtcatgctttagctgatcagatgcaactctcgtacatatgaagactaagtaatgccaattgtgatgcagttttgtttttaccaagagttgttggcagcccctcacacttttaagacaacctgtttgtaatacctgctttggatttgcatatattcgtttcagctgtagaataatgcgacataaagtggtagctgaatatatttgatgtttaaatgaaatcaaaaccaggttcactccaaataattaattcttaatttgataaatggggagagtaacataaacaaatccatcttaatatgcctttacttaccaaaccccactcagcatttcattttagtatctttcatttcacctatttaactctcaattttaactgcaatgagtctataaattcagtttagttacttattttggtaaaaggaatactgctggaatcagctattatcaaaatatagaacttgactattcaaagctgctgaactgccatcgtggaagcctgtctgagatttcaaatttgatctctacgttaagccaacggtctgtttcatttataacagaaaattttgaaaatgaaaaataacaatataaagtggtgatattccacaactcagcagaacccagagaagtcagtaataataataatacaagcaaaacatattggtggcctggcatgtggggaagaagtataagggaatccactatttattggaggaggtccaccaattcatacacagctcgacaataactggagtttgaacgtgcagcctttatatatcctacacgtggcacaaatcaacggcgtagattcgggactcagaccccacatttgttgcaagcaatcataaacacagagtggccttgctctgtacaaagattctctcaggattggtcatagctttctttctcttcttccttttataaaaaccccaatagagctactgagatcattccttaagacgattattctcttcaaaaaaaataaatatatatccattttcttttttagaaaaaaaataaaaaatctataatggagatgttgagagttcagttcttggttatggcaactttagcacttgcaatggctctgttgcttccttctattaatgctcagagttctgctgcatcaccagctcctgctcctacaagtgatggtttgttctctttctcactcaagtcttttctttttcaaaaagttttctctttttcttttcttggttaggaaaagttctaatgtgtttttggggatttgtattttaaatttcaggggtagcactggatcaaggaattgcgtacggattaatggtggtagcactcttgctcacctatatcattcactgacttttcttctcatttttcttgagagaaagttataagattgagaagcatttgttgaactaatctcaatgcttcactaacaatcatgatgttttaccgtttatggatcctctgttaattctttgtatgagtattgagttattttttaagattcattattacataatatcttaccttgtctactttattgcttatgaatatattgcattatcttgaac

SEQ ID NO: 39593 - DNA, 1651 bp, Cannabis sativa
aattaagagagaaggtaaaaatgttgatgtgaccgtgttgttgtatatatgtaataaaattggtattttgtatgtttggtgtaaaaaattcaaaattctaaaaaaaagtaaaaaataaataaataataaaaagttaaaactctctgaaattcactatctcgagttgaaaaaaaaaaaaaaaaaaatctgaaccttgtactaaaagtaagaaaatcctaatgaatacttttttttttttgctaaagatgataatgaatacttgtgtgtcttgcataccaaaaaaaaaaacattagagagagagagagcactttggggactgtcggctgagattcttgttcccattaattgtactgaatatgtaaattgaaaaattagtaatttattagaaatgtcatgttaatcaaatacaattaattggatctttttagatttgtatataaatggataacagcctgtcttgtaattaacattaattaatacattagttgtaggtatataacatcacccaaaacatcaaaactccattccatttttattttttttccccattaaatcattgtttaattgaaaattattgtgactttatcaaaactgtcttattattttctattttctaataataagggtagttagttgtagtcttatttttaaagcttgtaagctggatttacattatcaaattcatatcgaagtttttctatcagcatccctcaccaagtgtcaataatataatcataacataatatctacgtctaaacccaccaaggagagccctatttcatttatatttaagcaagattctatttacaccctataaaagaataaatatactacaatatttaaaaaatttaaatttaaaatattttttagaaatcacttttaatgtttttaatttttttcttatattattttgtattaatttaaataattgctttaatttatgttcataatttttttaaatcatgttttttctaataaaatttcacataattttttatttaatttcttttttgtaagaatatttgaaatataatttatttttacttaatagatataatttttttaagaaaataaattgaaaaaaattaatataattaatgatatatattatgtaaaataaatatattaaaatagatgtatttataaatttttaaggtgtaaataaaactctactatatgaaatatttacttatatttaatttgtaaattacctttttagactcatatcatttggtcttataaagtaaaaagtaagttatatccgttttttttttgacaataaacgtgaacattcattaatcaaattaaaacagttagacctctcggtcattacaaaatagattccccgataaagaggaaatcagaatagagccaaacagttggtgggtgaaggcccactttgccacattattggcaacaaagttacaatacctactaacattagaaaagatacaacaaataaaagagggagatgacttgatacaaaatgagacatagttctcaagagtcgtgcattgattgtttgtctcgagtgactttcgataattacatacttataccctaaatctaaagccagcgaaatagccaaacagcaggccgcaacttctccacataacgcatccaagaagtccaaccgagaagtatcaaccc

SEQ ID NO: 39594 - DNA, 2426 bp, Cannabis sativa
ttttttttttttttttggtaaactttaatagtttttgaacttttattgatggggattttcttttgtatcctatagttgtatatttccataaaaaagtaagagtaaaaaatttagcaaaattagtaaccgactcaatataattttttttattgtatatgatcaattaataaaacaaattgtatttttacttggttatttgtttttaacagcaatttatttatttgtttttaaggtgtcaaacaccataaaaaatgacataccgcaattagtgcaattcaatatcgagtctcacacattttaatttaataaattatataggaaactgttagccactaacaacgcatcatatctgtgcgatgattgtgctggtgatgaagtgtgccatttcattgccaattgtaatgtccccaggtacttttggttttctagcaaatagaatatctcgcattaataattttaatcttggcactggaagagatgttgtctcttggcttcttaacctcccttttcatgcaacatttgatgcggaatgaaaaagatgagtttttttctttatggtgtaattttgtactataaattgtagattgttaggaatgatattttccataacaaagtttcgttggtgatggctatgcaacgtgatgctgtgaacaagtgtttccaagaacattatcctttgctaagacttggtaatgtgaacagtgagaagagtcgtggtacagaggttgttcgttggggtcttcctagaccaggccgtgtaaaatgctttgtggattatgcttcagcgaacgacgacagtgcagtgatggttgttatctttgatgaagatgggcttatcaagttgctgcggatgttgatttttactccaatagtttgcagctggtgcaagctctagtggagagtcagcggccgcactagaatctccatttctcctttactaatctgctttgcgatttggatagtagtagattttctgttaattggatttcgagaaggtcaaatgaggttgcctatgctcttgctagatggggtttgtttcacacttgtaatggtttacttcatttttgggaggtgagtccccatgtgctcactaaacttcttgttttagcttaatgaaatttgaacttttagcaaaaaaaaaaaataaataatactttttattttttgatagaactacttttactatttattgtgacatatgtgatcttaaaataaaaatcttactaacatatattttttccaagtgaaacaagttattgtcaacttcattttatacttattttctaaaattattatttgagtaataatatatgacatatttgagtaataatatgtgtatatattttatgctttaaattaaaattaataataatttaattctaaatgattttacttaaaggtttaattgacataatttttttaatatagtcaacattattttaattgccaattaatttaattcaattaccatttttttttaatcaacaaaaacaaatatctaaaatctaaattgaaatatagacttgtattgaaagcatcggtcttccataaccccggtcatcctttatctcatcttcccttaacagagaatatccatgttactgtccatgggagcgtggtggtgccacagtcaacgtcgccgcttctgcagtcgttttaactatcgtagatcgattccctatttcagactctcgttgagggcagtgggagcactaagtaagatctatacgactccgcttggtcgacttactccactccctccctccactccactccactccctcttcctcattcacttatattaagtcacttactccactccctcttcttcattcacttatattaagtcacttactccactccctcttcctcattcacttatatttttttgttttcaattatgtgaactgggtatttactttttaatggaaattatggattggtaatacattttattcctaaattttcagggttttaggttttttcctcctttcgacaaataattgagaacctatcgacgacccatcgagaaaggtttttcctaacattgagacattagtgtcgagattctttcgagaacgtattgacaacttgtcgagaaaggtcttccctgaccttgagacattagtgtcgagaatccatcgataacttatcaagaactcattgagaaaaatacgaatacacaaaaaaaccttgaacaatgagatctcgcaatttcagcaaaatttatataaaaaagaaataacaaccacataaatctaacaaaaatataatatattttacaattgtttaacaaaatattttaaaaaatacttacccattaatctaccatgaaaggaaagtagaggaggggcgacgattgagttgatgagagaaggttggacaactgagtataccctaatgctaaaagagagagagagagagag

SEQ ID NO: 39595 - DNA, 1165 bp, Cannabis sativa
atgttcaaataaatatttgaattttaattttattagaatagtaaaacctatatttttgctagataaaaaagaaaataaaattcatttttcaattatatttattcttgttggggtcattcttccacttttcacttaaagtctcatattagtaagatattattaactttaagcttaagttctcgcatttttatttttagttacagggaatatattaatttttttagttaattataactattcaataataatccaataattaatattagtgtaatcatcgtggttacatatgtaaccatgagtttatagttatactaaaacttctttctaggaatattacatataaacaaaaacctctattttggtacaaaaattagataccaatttcaactatttataatttaaaatactgttaaattattaagttcgcattaataaaatataatatctgtgtatattattggataaaacttagtacatctctctaaatgagtgttttgatagatattcatacaagttttttagtctaatttatgtttaatgattatgcacattgtacttatataggaccagatgtaaaattttcagaaaatataaataaagtaaatatattttatgtataaaactgtaattatgtaaatatgttaatcatacttttaaatcaaataattttggattaatattattttagattttgtgttttataaaaattattaatcaggccatcaattttgttaaatgacaaaataaatcttatatttttgtaaaattatataaaataaaattctgagttcaatttttaataattttttttagtaatttgtggtataaatacctaattttaactcttgattgtaaatatacctaagtttaatttttaacggtaataatacataagttatatttttaaaacttccgtagatatctgaccattaagtatcaagtcaatagccatgtagcagttcctaattagttcaggtcattaaatatttattttttatgtattataaaatttaaatataccaataaaaaataatatatggataatgagttaatatttaagagtgaggtatttacgaaagttttagaaatataacttaagtattaccgttaaaagttaaacttaaatattatgttaaatttaaatatttatattagaatttttttt

SEQ ID NO: 39596 - DNA, 3097 bp, Cannabis sativa
ctagaattcttgtagatagtggaaaagaatctacctccgacgctgaataaaaagattgtctccgtagttaaggaaaatggtgatgtactagcttggagtcattctgacgtgactcgaatcagtgcccaagtaatttgtcttgtgctgaacatagatcctaaggctgatctagtttgacaaaagtgaagccccttagatccagtgagatcaaaagtagtgaaggtggaagtaaacaagttgaccaacatccatttccttaaggaagctctatatcccatatggctagccaatctagtttaggtcctaaagcctaatgagacatggagaatgtgcatagacttcatagatttgaataaagcttgtctaaaagactactttctacttccatgaattcatcagatggtcgacgtaacctcggggtacaaactcttaaccttcatggatgcatactccgattacaattaaatcaaaattcatgtggctgaccaagaacatataagctttcaaactaataaaggaagttattgctacaaggtcatgtcgtttggattgaagaacgctgaagctacttaccaacgaatggttaacaaaatgttcaagaatgtactaggaaagaacatggaagtttatgtcgatgacatgctagtgaaatcaaagacttccatgagccatcacaaatatttagaagaaggtttttccattatctaggagaattgaatgaaactaaacccaataaaatgcacttttggagattcttcagggatattcttcatttttatagttaattctggagccattgaggcaaacccggagaagattaaagctcttttagatatgccttcacccagaaaacacaaggaaattcaaaagctaactggaaagattgcagcacttagtagattcatctctaaatcaacagataagtgcatccctttctttaatgtacttcgaggaaataataagtttgaatggacaactaagtgtgaagaagccttccacgaactcaaagaacacctaatgaaggctccaatattgtccatacccattaagggagagtcgttattcctatatctggcagtgtcaaatcatgttataagtgtcgccttagtgcgagaagaatgaaatgtacaacttccaatgtattacgtaagcaaaagattgctgggcacggagtctaaatatcctatgatttaaaagatttccctttgcttgttaattgcttcatgaaagttgagaccatactttcaaacgcatgtcattagagtactaaccaaccaccctctctgtcaagtattacaaaagccggagtcttcaggaagactcctaaagtgggaaatggagctaagacaatttgatatacagtatcaaccaagaattttaatcaaagctcaagctttagcaaatttcattgtggaatgcacggggataaatgatgatcctaaaatattgatcccagagttataagtctggatagtgtatgtagatagagcatcaaatgagaaaggttctggagccaaaatcattttactctctcctcaacggcttcaactccaaagttcacttcaatttgaattcaaagcttccaacaatgaagctgaacttgaagctatgattgcaagcttgaaattggctaaagatgttggcgccaagaacattgagttgtatagtgattcacagctggttgtcaaccaactttctggagagtactagacgaaaggagagaagatggctagttacgtagcaaagaaaagggagttattgcgatagtttaagcactattatgtgaagcaaatctccagggacaaaaatgtatttgtagacatgctagctaaattggcaacatatttagaagtggagaaatacggactagtccccattgcacatctacttactccaagcatggagacactgggggtgtcagccattgatcactcaacttcctggatggcgccaatactaaggtatctaaaatcgggtacactcccaaaagatagagccgcttcgcaaaagatccaatatcaatcccctagatatgtgatcatggatggaaagctatacagaagaggattatcgatgtcatacttaaggtgcatagctggaactgagataagtgttgttatgcatgagatacacgaaggattttagagagatcacacatccaaacccagtctttccaagaaatcattcaccaaggttatttttggccaaccatgaagaaggattgcactgaatatgtccacaaatgtgagcaaggccagcattattccaaagttccaagagctacaccaatagagataaccctcgtgaacagtccttggccctttaatgtgtgaggaatagacttagttggatcacttccaactgaaaaaagaggagtcaaattttacattatggttgttaactacttaactaaatgggtggaagctgaacccatgaacatagtaacttccaaaaaggccttagactctgtaatcaagaacatcgtgtgcagatatgggcttccacacaaaatagtgtccaacaacaaaatgcagtttgacggtgatcaattcactaatttttgtgtcaggcacgaaatcatcaccagcttttcaattgtggccagacctcaagcaaacagacaagtggaagttttcaacaagattttgaagacaaccttgaaagaagcttcaagcttgcaaagtacactggctagaagaacttccaagggttctttgggcctattgaacaattgaaagaacttccaccacacttgaatccatagtaccttcatataggagaaactgatgaccctaatcgaaaccatgctttacttcaagagtttttatatctaattgaaaaactttgagagcagacagaagttcaactccaaatgaaccaaaacaagattttcaaaaattttaattacaacgtcaaaagcagaagatttgaaattggtgatctagttttgagagaggtatttccaacgtcttaagagccaggagtgggggttataggacaaaactgggaaggtccatatgaagttcaagataaaattagtgatggcacctatcacttgagaaggcaagatggaaaaaaaattctaagagcatggaac

SEQ ID NO: 39597 - DNA, 1380 bp, Cannabis sativa
tttggtaggcaacaaagtgagttccatgcaatattccaacaagagtgtttccagactatacagcagacacacagaattaggtaactctttgacatttgtgtaagatgcatctaagtacctgagatattttaaatttccaatcgaatttggcaactctgtgatacagcagcgccttaacaacagtgtttccaaattgtgcaacacacaaatagaagcaggtaactctttgagtgtagtgttcgatgcatctaagtacctcaaatgctttaaattggtaatcgaatcaatatgctctccaacaaaagaaagagctcttagtcctccattccttaacacaatttcttgcacaaatgtttcaagaaataaaggtggaattgactctaatggtaatgcaattaggctgcgtaaattcttcattgtagttaagtcgtcaaattcttctatatattccacgctttccatgtaagatagatggcgagtcttgcgacttagcttatgcaagtcatttttacatctatcatatatgagacaactctgacccgatacatacacagcaagatcatgaatatgatcgtgcatagaaaaagaacgatttcttgtgtttctttgaaaaaatgatctcgatattaaagcatttaagtagtcttctccaacatcttcaattcttcttccttcttgaggttgcaaaagaccttctgccatccatattaaaattagtttttttctatcaacatcaccgaattcataatccttaggaaatattgatagataagaaaaacaaggtttcagataaggaggtagaaatcgatagctcaaccacaaagctggaacaattcctatgtcacgacagtcgtgtcttttccacacatcactttgcagtacatgcatccaatcttcacaagttcgcatcgatcgtaaaagaccagccattgattttacagctaaaggaacgcccttgcacttcttgacaatttttcttccggtctcttgcaactgccccaacaataccttctccttacggtcaacattatcaaaggcatgctcttcaaataattgccaacatccatcatcagacatggttttaagctcataaatttgaacatttctcgtcttcatcttcaatgcaatgtcttcattacgtgtggtcacaataacaataaccttgcttccttttgcaccagattgaaaagagcttttcaaaagaccccacagctcgtatttctcattccacacatcgtcgaagacaaaaagaaatttcttaccagccaaagcatccctcaagtctttcagaagttgatgtagctcacctgtttcatttcttttgccagtgattttcccaaaaataatgttacttagtttacaaacatcaaagtcatcaga

SEQ ID NO: 39598 - DNA, 2293 bp, Cannabis sativa
tgcttatttgaaatgtgtaagctgttagagaagcatgatacgttttgatataaaattattaaatatgtatatgcatgtgcagtaatgcttattatcattgattctagttcgaaatattttaatgatggaaagaatggtcgcaagtgtattggaaggtgtacccaaggcaatctagtaaggataattgtgagcttactaggctcggagttagcgatgtgagtgtgaatcctccatcaccatatgttgtgatgtaagagaccatctgggttgtaaagatagaaggatttacacggttaactcaggtcagcgtggtgacagagtgagataccaagttggaccgattggcagttgcctttaatgaagtggctgctaaggtcgttaggaaagttaaattcattcgatggttggaagaacatatcgcgcgtgatgtggttttaattgctaaataacctaggttcgttcgaatctatgctcaagtgattgagttgacccttgctgctgagagtgcgaaagattgaattcacaaagagaaatacaatgagaagagatttaaggaagtaaacatctaatgttggatttggaagggtgctgaccctaatgatcccaagaaaaagagctaatgacccaccagttatgagtcctagtaagataatttatggtaacgaaggtttccaacgtggtggaaacgagaattggcagacttatccagaatgtccaaggtgtaagagacgccatcaaagcaagtgtcaaactagggcctatttctagtgtgttgtaataggtcaccagaaaagaaattgccctcagttagtacgaccagaacaaaagaaagatgatactcttgttcctgctcgggtattttccttgacctaagaagaggccgatgctggtcctttcactgtgacggatcagttttatattgttggcactttattgaccgttttgattaattttggtgcgacacattcttatattttaagtagagtacttgggaacttggatatacctagtgatgttttgtagcatggtttcagtactttgttgcctattggagaattggtaatctccagcaggtgggttagatcctttctagttctggtggaaggaagggaattgtcagctgatttgattgacttaaatctagaggattttgatgttatactgaggatggactgacttgcaaagtataatgtgaccatcaattgtaaaagaaatatggtaacttttgaaccagagtgtgaggacccatttgtgtttgtgggcaaggtgtaaggatcctagataccattgatctaagcacttaaagcgagagatattttatgggattgatgcatcaacttttagttagtgtggtgaatattacgaaaggaacattagtgggaccgagactcaatctcgtggtccgagagtttctagatgcattcctagagaagctactagtgttactacccaagcgaaagattgattttgaattgaactgacactgggagcaaaatttacacttaaagttctgtattggatggtaattggagagttgaaagtttagttataggggatgttaggcttgaaattgctagaccgagtaccttatcttggggtacgtcgatttttttatgtgaagaagaaggacgaaaccttatgagtgtgtattgaccactgggagttaaatgaattaacggtaaggaataagtatcctttgctaaggatagatgatacgttgatcaattataaggaaagactgtcttctctaagatcaatcttcgatctggttattaccagttggagattcgagaggaggatattcccaaaatagcttttcgtatctgatgacttcataattatcatcattaatagaattctattttcttctgacataaaggaagcgtatgagggatatttttggatggtgttgcaacgtctctaggagcataagcttttgctaaatacaagaaacgcgagttttaccggccccaagtaagtttcttagtacatgaggtgaacatagatagtatcttgatagacccggtgatgattgaagcaattcagaattggctttggccaggtctgcaaatgaggttagaaattcttggggtcggtaggatgctaaaatttctacacccttagcggaagttaaatcaaaagaattgaaagtttgtatggattaacaagtgtgaaggtagcatttaagaattgaaatagaggtcaatgattgcaccagtgttaatatttccagtcagtgaggagaacctcaccaaagttagccaatattacaaaatagtataatttgttagaa

SEQ ID NO: 39599 - DNA, 2549 bp, Cannabis sativa
tcttctttaatttagcaaaggttttatagatttatgatttagagttttctatattaaagcactgatttatatatttcttaagtgtattataaaccctaacaataagacttaaaacaccttatgaaatgtgataaacagaattctcaatctaatgcatttaagaacatttgggtgtacatatgtacactaagaacctagatccatgagcagggctagccctaggctagattaatgtgagttaagaccgtgtttagggccactcaagctgagaccccaaataaagataaattatagtatcttaaaaaattattttttttaagacccaatacaactcatactcaagatccgtcctaattataaattgtaattttatcattctactaagaaacttatacccttgtgaaggtcacttagtaaaatggtatagaaaattatgtgtttgatgtggcctatgtaagaatttatattattgaatataattatatattgtgacaagtgatgagaaaacagttttgaactccttgaatgtggagcacccgttaatctcgttttaatattaaaattaaattgaataaaacaagaattattatgacaagtaataaaggacagctctatcatgatattgcacatagcaaataattgatctatagtactaacaatcatcccaattccaatatataaactaaatcactattatgagagtcacatgaaaaataattgatgatttgaaattatatatgcatatatgtaaattaagggaccttataatggtgctcaaattttgtcaactcataatttgttaacctaataatgagtgcatatgttatgaacatatgagatttaattaattaattaagattacaaaattaaagaggaagtcatatcactcatgtcaaaatattctctctctacctaataattctctttaactttcattattttttatgatatgattaatttgctcaatcttaggcttttcattccttctattttcaaaattaccttcttaatattaggctttttaaatattttacccataacattaacttgccacaattttttttttaaaaaaaaataaaaaaacaatattgttggctttagtgaaagctttgatgaatcaaatcaaatgaaactttaagtacatgcacattatagataagttagtgcatttgtacgggcttccctaagatatgggcaatttctaaatcaaagatttcaagttaaaacaaaaatgcatacaagttagtacttagtgggtggaaaaagaagaagaaaaaagccttaaagattttctcacattttaatgtacaaaaatgtccttttagattgattcccaccaatgcaagcaagatctattatatatacatataccaaaggatatcatttttcttttatctctattatcccttaaaatttaggtacattggaccaccaaatctaactccaaaagcccatttcatccatacaatcttacatactagtgcccttcatacactttatctcaataattattaatatattattatttattatttattgttaaggaaaaacccaaatcacatgcctcgaaattaagtccccttaaactagaaaacaaacacatatattttggaaaatatttgtcaaacaaactatactctaatgattcattgccaccgctcccaatataaatacaccaaccttttaaatatttatttatgtattttaacaaattaaaattaaaataaaactccacctctttagggtgtatattttctttttttaaaaaaatgcttgagagtagtaatgttacttagtattttttttttaaatggtataattaagtattgaattatataatttaatataataatttttagaaaatatcattaaccaatcataaagtatcacttttagacagtgttggatactattggtgcctaagctcgtttttttagaaacactaaaaagtattagtggtgtctaataccctcttatttgttaatattgatattggtataattaagtatcaaattttatataattttatagaatattactattaggtactagtagtgcctagcaccttctcgacatgtcgcgttgtgattggctagcgatactttttaaaagttattatattaaactatatgggatctgatatttagttgaaccaataacgatattgatatatagaagggtgctagatacaactagtgccttttagcatttctcaattatatataatgactttcaaagagtatcactaactaattataaagtgaatataaatacagggacatgattttgtcctgtgattgtacttttacgaaatgtatttcgtgatgtacgacagccgttagatgagggagttatttgatttgagggctgagattgatctagcggtaattagggttaaaaaatggtaacgtaccctgacactcatttaatgtaccctaagacccatttaatataccacagaatacatttcatgaaagtacatcacgagacaaaatcgtgtccctataaatacaataccaatgaacttctttttctttttttttttctcc

SEQ ID NO: 39600 - DNA, 2132 bp, Cannabis sativa
tgattagctctgtccctcagcttgagagtagggattggacgaaggtatgtcaagaccctttgaaagtgatgatggacgtacctgacatcccaagcgatgaagtagctcttggtgtacttcccaattttagacatggccttgtcattagtacctctgagccactgatagccctgctagctaaagtaaaagtacccggacctgccctgcttaggggtggatttcagctcaaaaaagtagctcacctcgtaaggtgaaggcagtggtcagcctaactctgcatacaaaacgaagagggccaaaatgtacttgaagcctttcaaagtgatctgagttggacaaaacttaaagaagttagcgatgtccctaaagtagggatgcaaaggcaagaccgccccttgcccagcatggggaccttaccatgccagcagttgaggtggcaaacggtgtgccaactggaccatgctaggcttattacactagactattcccacgattcccctttccttgatctcattgagctttccagctgacagggtagagggagtagatatacagtgctgctcatctccatactcgagaaaccaaggctcaggagccttattctcaacatggtcaatcccaacctttgacggttgacccatggcatttaaaggtcgtccagcctcatcataagtacccaaggcattaccttggatcacgtcacaagttttatactgcctactagcagtccttggcctggcaacaggttcagcctgcttagcccctaactcatcttcctaaccagccaagagttcctcatcctggccgaccttaggtttctcagcaaaaggttcttcagcctggctgattgtgggttgttgaggctcctcaacaactcgaaccctacttcttgccattaactcgacaatgtgagggtcccctagagatgccttacggcatattttctttctcctagacacggtcgggtacgacttggaatatctagcaatggaaatgacagccttagctacggggaaatctctagccgtatgagttgctcgtccaatggaaaatgtgccaagcacaccctcctggacaacgtaagtccacgacttggggaggaattgtctccacccctggttaagttcccagatgaaccgatcgtaaactcaccgcttatttgctcagaacaatggtggtgttgaatctcaggtttcagagagccactattgacctcaaatcactcaaggaactatccgaaaaaccctcgaaagaagatctagctatctgaattgaacaatagtctttgtagagaagattgaacaagtctttgtcaatccggttttcacctccctagaagagtatcaactgacaaagattaggaaattttagagtttgttatgcaggctccaccccatgtccaacaatttttagtttcttaagcctatcacacaccataatttgggtgtaccaggcatatgtattaggcaataaacccatactttaaagaaactttgcaaatagactgggggcaaattcattctcacgaattttaatgtagtattctccattttatattttaacaattagttcaggaaattaaatcgcgtaatgaatattgaaatctgaccatatatagaatattacgtaattaattttgtctagattcaatgaatataaaatattcatttatgacaaaattaattctttattgtattccataaatagaaatattctaataaaacatacttgacatgctcttcaaaatataaaatggtataaagatgagtgaaatagggtgaaaagtagagagttatggaataaagagtgaagggtgtttcagatgaagagatgtgttttaaaatggtctttcaacaccatatttataggaaaaaataggagattaaattaatcaaaataaaataaataaattgattaatttaattagtgttgggaagagaatggataaatagagtatgtgtaagagtattaaaaaaaatatttgtttgaatggaaaaatagtgaaaagatagggcaaaaataaattaagaatgtttatctgaaatagattaggaagagtaaatggatatttaggtgtaagttgtgggagaaaatattaaaaatttggcattttctaagtgattttcggatga

SEQ ID NO: 39601 - DNA, 3641 bp, Cannabis sativa
ggtaatgtgtttaatatcatatgagtgtggtcccattttttcatactttttaaaatttgttttaatttttttcttgaaataattttttgtacttgctattagtactcttaatgtgcttaatgttatataggtatgatactacataagtagtttgtaatatattttttttttgtctcttgtattattttcatttgtatggatgatttttgtactatttactattatttttggtaaattattcctatttagttagtaattttttataaataatttttgtgctatttactattttttttttttatttatctatcttttatgtttttttttttttaaataaatttattttttgtacttgctattggtactcttaatgtacttaatgctatatcggtgtggtatctaataattagttagtaattttttgtctttcttttttagttttattttttatgaataatcattgtacttttttttttttttggtaaattgtttttgtacaattattactatgtgacaccttaaggtgcttaataccatattgatctgttacccaatacttagttagttgtaatcttaataatttattaaattaaaatttttggaaggtgatattgaaatgcaccaataatagtatcttaccttaatatttttgttattaatgtgtacatatttttagtaaattcgattcgaattttaattttttttacatctgatcttctaatttaattagatatttcatctgtcttcatttaaatacaattgataaaaataaataaaaatataatgaatccattgattttaatgttgggttggatcttagaagtgaaatcaactctaacaaatctgctatagtcttttctgataatgttgggttggatcttagaagtgaaatcaaggggctgatggggtttcgtgatctaaaccgaagtgataaattccttggaaacccgattcttttctctggtagcaaagtaagggactttggcttcattattgacaagatggctcggagaattgaggggtggaagtctaagcttctttctcttgcgggccgaaccactttgatccagtttgtggccttgagcattcctacatataccatgtctaccttcctggtccctaaatctatttgcctttctttggatagattggtgcgacgtttctggtggaaggggtctgatgattcgaatcggttcttggcgttggctaactgggacactatttgtgtcccaaaacggtggggcggtcttaactttaagaagttcgaggaacttaattttgctctagtctctaagcttggttggcaccttgctgccggaactgtctccccgtggtgtcagctgttcaaggataagtattttaggcgttctaattccttctggagtgctcctaagtccaagtcttggtctttcagggctaaaagcattatgtctactagggatttcctccggaatgagacttgctttgtggtggggaatggagcgtctgtggacatttgccactctccctgggtgcccggacacacttgggagagctacttagctgccttcaatccaagagtttgtgaaaaaggtgtcatggctagttccttaatcaatacgggaagtggagattggaaccttttggaccttgagaattggtttatcccaagtatggtgaaggatatccttgctacccctcggcttcagttggagggcattgatgaactcttttggaagtcatccccggatggttccttctcggttaaaaaggcgtacttggcttgcgttcggttccggtgccgtaatgaggagagagtttggagtactctttggaaggtgaatgggcatgagaggttcaagatcttcctttggcggcttgctagggacatcctgccatttggaagtagaattcagcgaatctttggtaatagctctcaatgtgtactttttaatgcgggagaggattctcctcttcaccttttctttcattgtgatatcgctgtccaggtttggcgctcgggcccttggggttttcggtcggattcgatgatgttttctgataatttggatatggtcaagtggctattacaaccatatggcactccccttgttgatagagaccttgctttgttctctaactatgctatttctctatgttttgtgctttggaagactagaaacgcttccttccatgatgggttgagtcccgtggtgaccaaaatccagcaggagattttagcgatggtggcgggttggcctaatgtggactcctctttggtgtctcggcaggtggaagataattccaggttgggagatttctttcgggagctacctcgaagtgatgcctatgtctttgtggatgcggctgtccgtggtgactttgggatagctgctatgattgtttgtgatcatttgggccaggtgattgaggttgccacgaccaagaggagggtgtcttctccgtttgaggctgagcttgcggcggtgcagttaggctgctgcagaattctgcagaacgagtggccgcgagtggttctgctctccgattgcaaggcggcggtgcaaggtctctctgctgggctgtcaccggaatggagagccagggggcttttcgatgctacctgccttctcctcaggcagctactgagccttcaccttcgctggatcccctgaagatggaatactggtgcccacgattttgcagcctgggctgctactgctggctattataggctgttttcttcaagggatgtggcaccctttgttgccactatgaactttggcctttaggccttttctggtttttcaataaagctttcagttatcaaaaaaaaaaaaaaagattttaagagaaattaggtgcctttggcacgttttttaccacctatttctataaagagtggattcgtgacaagtcatttttatcctttttgatttttttttatttattttggtaactaatttatttttactattattgttgtgcggtatattaatatgctcaatagcatactaatgaggtacttaataattggatacttggatagtattttttaaagtgctcaatatcataccgaaccgatatggtagccaataattggttagtattttttttaatgatctttgtaataatgtggtaattaataactggttagcttttattttaaggtgctcaatatatataatacctaataattgggtaattttttttttttatgaatgatctttctactatttttttggtaaataattttttgtactattattgtaatgtgataccttaaattgttcataccacaccgatatagtacccaataatcaattagcagttttccaaatcatttattaattaaaatttgtaggagttgatatttaaatacaccaataacggtatgctacattttgtatttgacaccttaatgtgtcccttaatattttcgttatacatatgtacatatctttattaaattcgattagaattttttttttcaattaaacataactttaagaacatttttaatgggatatgtaaaaattatactatatttgggaaaaaaaaaagagaaattatagtaaatggccccaaatcataggaatatgttagtttatgtcctcttttcaaaaaaatatagcaaatggccctaaatcataagactatgt

SEQ ID NO: 39602 - DNA, 2202 bp, Cannabis sativa
tattaggctcttaagtaaaactaaatgaattataaacattaaatattcatagcttagttacttttacatgtcgacctagacggcaaaatccgagaataaccccacatgtccccttccctccgccaaggtatacaactacaatatataaaaataggcaccagtagtgcttagcatattcttacgtgtcaatattgttattggtgtaatagagtatcgggtcttatataaattagtgtaacagcttttagagagtatcactaactaatcacaaaatgatacgtcatttagttactagatagcactagtaccctataaacatgctttatgaaaaaagagttttgctaaaattttctatatagaagatacaactagtcatagccataaataaaaacaaagctatcgatttaaggcataattttttattaaaaaacaaaagtcatgaacatagtgtcaataatatatatatattcttccattagttcttttgcaatttgattcataatccactcaataaaattatagtcaaaagaaacaagatttacaattgaaagtttgttgaagatgatggatcaagctcctgccttcttcaacatccacactcaattctaacattttttttaacaatgttgtggtaaaatcaaaacaaaaaatgcacataattttaataatttttattttacataaaaaaatatctttaattatattaaagttttcatatattttttttaaatatacatataatataaaaataaattacattttaaatattataacaaaaaattaaaataaaaaattatataaaactttatttaaaaaaatataaaaataaaattaaaataaatattaaaattaacagaaaataatattaaaaaataaaaatatgaaaagtattttttaaaatttattttaaaatcttaaatagatatctttaattttttttttcatttgattttttattaagtaaaacctagtgaccacacaaaacgaagaagaagatgactgaaactcaacttcacctgaaataaatcacattcgtcaaacggtcgacaatagttcttcgaagggtttggcggagcaaagaatcagtgattaggtgcaaacatttggtgcgagtttgtgaaccattaacacatgtgccaaatctttttctacataacaatggcatagattatataaatggtaatattaaaattaatcttaatcttaattaatgataatatactaaataataccattttagtatatactagagtgaattttggttataaatgataatatttaatgaaacattttaatatatattttttatggaagtttttttttctcttgaaagaaaagactttcatttttgaaaaaaataaatatagagaaactacaaagactttttatcatgaatgtaaaatttaaaattaagctccaatatatatattcacttatgtttgtttgtacattaaaactataatttgatttttcttgtataaattatatattgagttgttagtgtaattaatcaaacgtaagtcaactagttataatctctataaatttgtgaatgaaaagatagaaaaagaaaaccaaccaattatgtgatacaaaattatcactaacatttcattaactacgaaattaactcaagtggctataggatcgaaattcaagttgtacaaaatatatacaaggccaaccctaggtataggcaggctaagttcgtgcctagggcccccactttatgggggcacaaaataaaaaataaaaagttttattaggctcttaagtaaaactaaatgaattataaacattaaatatccatagcttagttaattttacatgccgacctagtcggcaaaatacgagaatgaccccacatatccccttccctctgcccatgtatacaactacaatatataaaaatagacaccagtagtacttagcaccttcttacgtgtcaatattgctattggtgtaatagagtatcgggtcttatataatttagtgtaatagcttttagagagtatcgctaactaatcacaaaacgatacgtctaaaagttaatagatagtactagtacccctataggaatgctgtagggaaaaagggttttgctgaaatgttctatatacaagatacaactagccatagccataaataaaaacaaagctatcgatttaaggcttaatttttcattaaaaaacaaaagtcatg

SEQ ID NO: 39603 - DNA, 1935 bp, Cannabis sativa
acaacaagtattgtgactaaaaatatatttagtcataacaaattgtaatttttgtgactaatatttttagtcacggaccttttagtcacaacataagaataataacttataattgttaacaacttttttacttttagtcacaaatttttgatagtgaaataagtaacccctttcttcccattttatcttattaataaaaaaaataataattaattatagtcagatatcacaaaaaagataaataatcacattctatttcttataatgttctactaataataactaaaaaagaaagatatttcacttcaatacattgatttatatctttctaagtaagtatttatgcatgaccaattgtatgttgttgtctcttgagtcattatagaagaaagataaaaacaacgatgatgagctgaaaccctacatgcacaaaaaagtatttaaaaatattctctttatcatcccacaaaacaaaaattaatagttttacaatttttttaattaaaaatgcacataaccattttattattatactcctcattttaattatatattttactaaatcaatagataaagacaaatttaaatatttgattatatgggataaattagtcttatgatagattatgacctatcttttcacattataaattaagatacaaatttaacatccacataatttgttcaacattttatctaaatatttcatattgaaaattttttacttctaacatttttataaatccctcatcaaaaatagataatgttgtgcaatccttcttatatttatcatcctacacacatttttgtgaaaaagaaaacatgcattccaacaactatacaaaacaaaatataaaatttttcataaataacatttaaattatttatttttgctgaagaaaaaaaaatacaaatagtttcttacataaaataaaaattacgtcattaattaattacaaattcagtttattaaatttaaaaaatattattattttcatttatttattataaaaaatacttatagtttctaattctactatttttaatatttgttacaaaatcactgtttttttacatattttaaaataacaaattatgtttctaattttaaaagtgttaatatattacacgttatattatagattatatcattcaattagtaaaaaaaataaataaataaaaaattacaaaaattgggtcgaacccgcgcgaagtaccgctcagttctctagttattaatatataaaagtagtactgtggagacaagtgggggagaatgagacatttttagtagtttggattaagtatataatataatggaataaagtaaaagaattagatgtactaacttcggagtctttccttaattaagtatttaattttaattcaataaactaagaagcaagaatcttccatgcatgttatgctactattatttatttaatatacttatgcaaataatttagtgcttgcaagttgcaacccacttaattgattgagattattttacaaatacacaaaaataatataaaaatacagttttacgaaattttgaatatttttgtgatttttttgattttatttacagaaaatacggattgtttattttgtagtattgttaatttattgttgttaattttttattatctgaatattatttttattgttgttttaatattagttagatgttattttcatattaattttatgtagtttttttgttgtttttgtattgtttctataaaaaaaacagtaaaaatgtaaaaatattcttcaaacgtaaaaatatatttttttttgcaaaaaaaaagtgatatcttatgtaattattcttaaataattaagcttaaaaagtctttgtaaaatctattattttatcctaaagtttttatttatttataatttaaaaatgaactatttaaacacaacaaaaat

SEQ ID NO: 39604 - DNA, 1462 bp, Cannabis sativa
tttctatgggcgcccctttgactgtagttttcctcttggaggtttttcattaaataataaaatagaataaaaggttatagatatacttatttggaactttgtagttcatcaagagtgtgaaaaatactactagctattcataaatttacaaatggacaattttaaagttaaaaaatccattgcttattaatactctctatttagttccatagatgtaaaatttatttatattttttaatttctgcctcactttcaaaggattacattatgattttttgttttagctaaatcagagaatccattatgattttttgaagaaatccttccccatatttttatttacaactaaatctggtaccaagtgaaacttgtcaaaattaaaacagaaaagcccaggccttaaatcttaaatttaaaaccaaaggagaaaaggtattttgttttcagttaattggaagtattgtaacaagtaaatcacacaaaatattttattttttattttttagtgcacatttatagatttaagatttaggtttcattacatattagatttacatgttgaatatggtgttttattagtgttgatttcaaatttcaaataaagagattattggatctcacgaaggtcatgttaattgtctctaaaatcaaaacagatggggagtttttgttattgtcagttttcgtaatgactgtatgatttatgttctagattttgttattagcatgagttgttgtatgtgttcaagtacagatgcgtctacaacattaaggctatttatatttgttaagaatgttttctacttttgtttccttttctaatgttctcttgaactttattttgccagccgagtgcttcttcacaagagacagttctaccactctcacagagttcaggtagttagctacttttaaacttgtttttagaaattcttccttcatcaagctatttcatacttgatattctctttatctactgccattttgattttccattaagatttttacttcgaactttttattgtttgatgtactgggttgcctacatttataaggttttgatgtgcaactgatgtttcagttcacaaattgctattttttgatgtttatagggttttgatgtgcaactaatgtttcagtaagctgcttctagttttcagaattaaaaaagcacttttgggagtgttgggcaaaaaataaagacttttaatttttatgatctttcttgtggagctaaacttctcaaaaaaagactccttgtcattttattttttcttttggtctctcttgctttgtattccagacaaggaagatggctttcaaatcataaatcttggcatacagctttaagtcctagctataaatgtgtgctgtatttgatctgtagattgtaatttgttaattttaatctcaagtaatttattgtttatttgtttgcgtattaagcctatggcattagagc

SEQ ID NO: 39605 - DNA, 1382 bp, Cannabis sativa
tttaacaatgattatttcccttgataataataataatttataaatgaagatattattaatcaacacacggtaatattctaacgtatacaatgactagtctgaaatatatatcacttttgggagctaacataaattttagtttgtaataatatgttttttttttctttttgaagaaacatttcattgcatgaataaactttaattaaaattcatataccctttgaacttcatataccgtgtactagactcttaaactctattacaaatcaaatcactctttatcctctactattattttcttaggcattatatttaacattattaacaatttgttgaaacaaataagcaaacttgccataatttctgagaccaaaaaattgctttttgaagtgacttattcctttagctttactaatctaacacaaaaaaaatcatacaacctatgagaaggagcatgccatcctagccatgcatatatgttttcgttctactaagtttgcactataaacacaataaaaaaaggtgttgcacatactcttctttatcatcacaaagcaaacacatcttattgattaaatcaagacaacaagattctactgcgaagcttctcacgactaacaatcaaagaataaatttatgttttcgcatactcaaccgcgactccacacttcattgcttcaagaaactttatcaggtagagaatagagagtatgataacttccatactatatttacctgttgcaaacgaggtgagaaccatcttgtctttaaaaaaaattcatatgatcacagttacaatcttcttccaataccagttgctatctattggagcaacgtagttgcacgactcatcattatagatagtggatctatttaacccataaattatctttttgtgcacctattgccctaacatattttccctatagctaccacattctaattcaaaatactctaaaaacccaaaccactaaaagatttagaagtataaacttgagtccaagcttgtcgtggtccaacacctgtcgctacacctttccaaagaaaagatctataaattgattctacttcttttagaactttctttggcaaaattaaaatctgaacctgataggagtaaatggcaattaatactgttgcgagtgcttcactttctgatgaattgaaccattttctccacaacactttgacattgcattgtgatgatcttctttaagcgaatttgatacttaaatggcaagttacttctaaaaaatttagaggcatgcatctaccactcgttgcatctcattttctttcatcccacttataataaataacagttttagctttattaagttgcaatttagaagtgtttgaaaaaaaactttatcccttatagc

SEQ ID NO: 39606 - DNA, 1262 bp, Cannabis sativa
attagaatataatttgcttggtcccaaatatattcttggatagaggttctactgtatattgaaacgagaatggttgaaaaatactattgatgtctatactttgtttgatatcatattattattggtataattaagtatctgatcctatataatttaagaaaataacttttaaacaatattactaactaatcatgaagcgccacctataaaatatgctaaatactactagtggcaacaatactcatatttgaaactggtggtgaataataagctcctttattagagtagtgggcatctatatatatctatctttagtcaattattattgttattataaaaataatgaaaaaaaccctaaattattggaagactagagaaagggagccagatcattaataattgtgggttcctcccctatgtactaaaattttgaaaaagatggtggtccttccttgtagaaaccaatttgccatggcattaagttcatttagcatataatttccatgatgtccggcaaagcaataggaaaagtaaattataccatgaagactttaccttagctacatttttatattatcactagacacttttacaatacacttatatataactcacattttaaaacactttatttacactctcactcttttggacacgttttgaaatactattgttggatggacaactagaggacccaaaatccctatttatactactcaaaaaccaactataatattctaaaaaattttaactgtgttactaaaatattcttgaaacttccacaagacttaattattttgaattacttttattataattggcttagcccaaaatgatagatttatctagttaatctctagaaaattctagagagttggtgataatttttcaatactccccctcagcaccaactttgttccttctttgcgtcaagtttaattgttctcttagcttttgaaatcttgtagtattgagccatttagagcatctccaatggagatgcaaataattaatgtaaatataaaatataactcactttgttaaaaatctaatctaatagtgtgttaaattataatgcaaaaatcttacataataaaaagtaattcagatttacatcacaatataacatgatataaaatttgtatcacaataaatgctatgctttagaacactttatttacactctcgctcttttgtacacattttgaaatactattgttggatgtacagctagaggacccaagatccctatttatactact

SEQ ID NO: 39607 - DNA, 2522 bp, Cannabis sativa
cgagagctaaccttgcaagatataaatttgtgaggaggtgcgactaagacaggatttagtcgcatactattcttagcatagtcgagaaaaaaagtagaatagagagaagtcagcactgatcacgcatatatcgattatatgtaataaccaagtacatttctcatgcaactatatatatataaagattaaatcttcatatgcgtcatgtccaaaagacaaatacacaacaactcatcaagaactcataggttcagttgttagatgaatgccaagttatgtgaccaaagtaattgctggcattctacctagaggataaccctgaggttatctatggtccaaagaccttatacacaaataaacatcaaagagcctaggagcttgtatgtttcgaagatgaattatcgatatgcgacttctcaagttgcatatgttaagacaattaattaagaacagtcgaaattactctttcatttattctttaaacattttatttattaattgaatgtaattaatgaaataatggtcatatctgatcggttatgtaatccaaagggatacttactttttatataatggggtcaactaaactgaataagggattgaaaaaatactccttctaaagtagactaagcaaaccaagctctgactgaatcactgtgattcactgtctcatttacatttatagtttttatttgcatactcgtacattatttgttgtgcaaaacagaataatcaatgacttacgatttagtttacagtaccaacaaatacgctacacaatcaagaaataatataccaagagatctcaagaatttaatataatgaattaagcagtaaaatagaaaagaataacaccaagttgagttcggccttgtgtaatgctctacatcttcgttggaacaacagccataacttttattgatatcagtgtttacaaggttacaagaatcattataaacttctcaaagatcacgagaagaggtttatctctccagtttagactctaccttacactatcacaattttcactcaagcaaatttggtctgaaaatctcatcctaggttacaaagatttacaactatttatagatttgcattgttatcaaaaataacccctaaatcatcgtggcacatttataccagcttaaatgatctagctcatcaccagtaacaataatttatgtcatcttaaaatacgtgctttcagtacgagcaatctaggagcattgtaaacacataatccttccagatacgtacatggcttccttcctgaatgaaccttaaagactagcaatagctatccaggagtgtacctttggattcataacaagctaaccaagagagacaacgtatacacggtacaagcttatgaagaagaaccttctagactctacaagacctcatgcacaagaatttctagatccacactaagcttcatgtatctactctctagattcacaacttccactcccagacaacaaattttgcaaccataatcaacaaatctccaccttggtttcaagttaaagtcgcttgataaattaatgtttaaatgttgttgtcccctctgcccctccgggcttagctaactccgatcagctttaggcaatgctcaaacttactacttggcactatcttggttatcatatctgaaggattgtcttcagtcaaaactttggcaatcttcacaacttatttcttcacaacctctcgtatgaaatgaagcttgatatcaatgtgcttagtacattcatggtgcacataattcttggttaattgaattgcactctgattattacaataaacaataataaccttttggttagcttcagctcctctatcaacctagttaaccaaagtgcttccttgatcgcttctgtcaaggccatatattcaatttttgttgtcgatagcaccacaaccttctagatgtccgctttctaattaatagttgttccaaacatagtaaacacatatcacgtcaaagacttctaagtatcaatgcactgctaattagagtccacataaccattaataacattcgagtcttcatttcaattattcatgccaaacaccaatcccttctcagcagttccctttaagtaatgtagaatccattttaaggcttcccaatgctcctttccagggtttcccatgaatctaatcaccgtgcttagtgcatatgctatggtcagccttgtacagaccatgacatcacagagccaactgcactggcttatggaactcttgataaaactaacttcttaatttcatcttctagcatctgagtaacactcagtttgaaatgttgtgcaagcggagtactcacttccttacagttactcattttaaaagtttctagaacctttttgatgtagctcgtctgactcaagtacaatagtctttttcgtctttcccttcttaaatccatgtctaagatcttactagccagacccaaatccttcatttcaaactccatctttagctggagcttcaactgcttgatctcttgtacacttttg

SEQ ID NO: 39608 - DNA, 1629 bp, Cannabis sativa
  modified_base (1558)..(1561): a, c, t, g, unknown or other
aagcttcaaagaagccataaccaccaccaccaccaccaccgacgaccctactacagccaccaccaaacccacacgctggagcattagactccccacccgatggtgatctcaaccctcaagcggcgaactccttttgtcgtcgttagcccggaatcgcaagtcaaagtttgaggttcaaactttgaatgaattttttggccacctctggtatccgtttgacgagtcgttttcatcactagactcagatcgtcaaggagaacaatctacactaagccatttcgcctagcccgctactttttctggtgatgtttttgtagctcagcccatttccaacgactttccagcagtattgtgtatcgtttcgacaaatggttggaatagttgtgatctaattatcgaggttgtcaatttgatatatactgctcctatttttggtgacatttcttatacactacttttattgccaccgatagttaacctgtacaacttaggtgagatttcagaactccaaactttaaatatagtcttgttatatgttgttggactcaattttgaatgtagaatacaatgatgataattatttagctatttgatggtataggagagagtgatatctaagattgaactaaacaattggagcttaggactcgagagcttaagatcctctttttcggacaaagtttaatgacttgggagggtagggactcaagttgattattggaattgattttatatgctttgaatagcattagacatattccaatttttatgatttacaaattgtttgaaaaattaaaaatttattctgcatattttttttttggactttctagggcattgagtgccaaacatatttttgtaaaaatatctatgcaggttataatttttaagtttattcaaaatacatctgttatgctgtcagattttctaaaataaaagagaatatatttttttgttattcttattatttgtctatttttgtatatattgatgagagccatgttgatcatgatttgtgtatattgttgttttacgacctagtctctgtgtcatcataggtagatcaggcgtgcacttacctgtaggtgaaagacctagaatctgtacatgaagtgaatttaatttaagctccgagattatggtggttatcaagtgcgactacccagttttggatgtcatttatttttatgattgttattgagagctaagagtctagtggatagtgtgatatgcatttgacgcttgattttgtaattatttgtggtctctctattttgtttatattttgataatggtgatgagttgttttatttttaaaagttagccatgtaatttttattaaaccaagtgtctattgatattagttgtttttttactgggctttataagctcaccccctattttcttctatttcaggaactaagtttgatgctagtggatgaggatggtattgttgaggaagaaagtcgttattaatttagtcttattctatttatcaaactttccattgaaaactgattttgtattttgttacaaaaattattaattactacgcaannnnacgcaatcaagtagtatactcacgcaagtgaggtcgaaccacaggaaattggattaattactactaaa

SEQ ID NO: 39609 - DNA, 1617 bp, Cannabis sativa
aacaaaaatgtgatacatagtgaaagtctgcaatgatattagttgtaataacattaactagtatggttgcttggatattgagatcataagaactcttttgtaataaccacgaggtctagtcaattttatgtatgaaagtttatttttattaaaaaaaaattgttgtgaaagaaagaaaatcttaattttaaggaatatttttcttgttcttgttctcgtttagagattagagacgacctagggatctctctttaatagttagaagttacgttatttaagtaaatatttaactttaattttaatgataataattatacttaaattatatttctgtaatttttttaagtacttgactttaagtgtcaaattaatatagagatgatagtctccaattggttcatgtcattaatttttaatttttaatttaaaaaattatttatatgtactaataaaaaatgacatgtgaatatatattgatttgacaattaacagtcagataattacgaatgttttaaaaatataatttatgtattattatcgttaaaaattaaattttattataactaaaatttaaacttaaatttttataccacaaattacttttactctttttaacttttttttagcacttgcaaatatcaagttattaaattaaaaacaaggcaactaatttgttattaaattcttcacataattatgcaatttttgtatctaatgctcgtggtcaaagttatatacgtacgtatatgcttatatactaagtagtaagtacaggagaatatatatatttatatataatgcgcggtatatgtggccgacaaatcattaatagctaggagcgtacccgtaccgtacatgatagtattatatagaaattcagcatgttaattattgactatttttgacaattaaacaaaaacatcttcacctaaacgtaagttcgagcgtaaatactttgatgacgaagaaaatcaccgacccatgcatgcatgtaatgtaagtagaattattaatagccattatttggtagtccatattattaattagagttgggtcaagttttagaatactgttttacttattctcatcaagtacatgtatatactatatacttattacggagtcgtatttcttggttgtggaaaatatggtaactgaaatttcctgaccaaaacatacacaatatatatatgttcaaaagaattggtcaaagaggatcgaagcccgagcccgtcaaggatgcataattgcatatacgtaactgagcttctagttacgcgtttgaaatttggcattattcaaagaacctgttactattataacatatatatacccacacaaaaagtggggtatacgtaaaaatattatattatatgatgataaagattattaactaataatatataattaacccccccaaagtaaaagtaatcagaaggttttgaagacggagtcttaattaatttctctttcaagaatttcaaaattcaatttttatgtaatcaaagtctaagtcccccagccttgtccatatcacaatcagtactgtataaacccaaagagcaagaaatttattaataaatgcctcgatctaagatattgcgcctttatatatat

SEQ ID NO: 39610 - DNA, 1089 bp, Cannabis sativa
aaatatgtgtggattgaattgaattacttacatgtcaatcaacatttactctgcacaaatacatctaaatttttcaatctaatttacacaaatgtattatgtagatatttatattttgtaaattatattaaattaaatcatacaaattaaattaaatcgaccgttttatacacacctctaatctatcttgtcgtaacaaagccaatagatatataataatagtatagtatatattgttgtagctgcctaatggggaagattgaatactttttattattacctaccatgcttagctgactacctatctaggttttctaatggataagaaatacaggtcattgaggtcagaaatggtcccatttataaacaatacatatataaatatttttttcaaaaaaaatactacaaacagttcttctggacaaatatataacaattaaaaagtgatgagaatgaaatagatatttttattattattttttctttttgaaaggaatagatattcttattaacatcaaagaaattgatatatattcaccttaatttgaaaagaaaagtctaaataaacgccgccaccacaacaaacatatatatgtttgttcttttttaggttgagatttttcaaagtttttttttttgcctaacgcggtcccatagtgaatgctaacctgataaggttaatttatttaaattaaacacatgtaaataaattattaaatttttttatattgtttattaaattaaaatataacaaatataaattaaattgtatcaataataatattataatttttttttacccaaataacaatgttatttaatgagtgagctcatttgaaaaaactacaattactcctaaaataatattttaactattttagctagaatacaagataaggaatttcttaaaaattgttgtacttgtattattactttaagcatttcactttggattatttaaagtagtagtgaggataagataacaatgaatatgggaagcttcataataattgtgttttggtgtgggagaagaagaatctttataattagtagctactagctagggtacaagtaagaaattacaggacc

SEQ ID NO: 39611 - DNA, 4297 bp, Cannabis sativa
tgcatttgtgaaattaacccaaaagaaagaagtaatttgcgatataaataggtaagtttaatttttgggtacaaataaatatttaagttgaatttttaacgataatatttaagttatatttttagaatttcagtaggaacctgaccgttaagtgttaattattcatgtgtgattttcttattagtatatttaaattaatttttaagtaaaaaataaaaagttaatgtcctggttgaatacagaattgtaatgtgacaatttacttacacttaacagcaaggtgctaataaaaagttctaaaattataacttaagtagtattgcttttaaaaattaaacttgaatgtaatttatttacaactgagaattaaacttaaatatttatgctacaaattaatcatttaaaaatcaaaagtgccatcatttttatttaacgttcatgaaaaatatacataaatgtattctaatttggatgatggagtttcgtaccacaaatttgttgtttatttttttttataacaacaaattagttgtttgttgtttgaatctttccttacatccttttaagctttttcttttttggtaaatatctatttggtactttatattttatcaaaatacaaatttattaccttatatttttaataatgatcacttaataccatttgtttacaaatattataatttgggtaccctctcttcaaatttagtgaacttatatttttagtatgactagatcatctcttattttaatatttctaattttgatcttatagacccatttgcaaccaattacatgttgatcagcagcgagagatacaataattcaagtatggttcttctccaaagcctttatttcagtatccatcgcattgtcccattcaggaattccttgagcttgactgaaaaattctagttcaaaatggcttgatatagctagaatagtagctctgaaggcaggagacaacctgtggtacccaaaaacttgagataaaggatgagcagtaacaaaagaagcctgagaagaaatagcagtgtcattagtggccaaataacaattatattcatttaggtatgagggctttgtcacttgtctccatgatctagtatggggagagacatcatgagactcatgaggagtaaacacatcagaagaactagacatggcaggttcattaagagattgtgaagtacctgcattctaagaattatgggatcttgttgtgtgagaaaaatcaaaacaaaaaaaaaaagattcatgtgtaggaggaagcctagcaaaatgaacaaaaggaaagatatgttcataaaaataaacatctctagaattaaaagtcatgttggtgttcaaatcaagcaatttatatgctttcacgccagcaagatatccgaaaaaaatgtagggaacagacctaggagcaaacttagatatagattggcttaaagttgaagcatatgcaaggcatccaaaagcttttaggtgctcataggctggtggtttagagtaaagaacatcaaatcgtgacttgttctttaggtttggcgtaggtgttctattaataagatatagtctgcagtagtaatacaatctcctcaataaaccagtggaacataggatttaaatagcaaagctctagcaacattaagtaaatgtttgtgttttctctcaataacagagttttgttgaggtctttgaacacacgaatgataatgtataatcccaaggtcagtgaacaattctttgaattgcaattccttcgtattatctgacctaacagctttgatagttttgttgaactggttttgaacaagttttatgaactaaggaatagcaatttgagcatcaaatttttatttaattagattgatctaggtgtacttggaacaatcatcaacaattgttataaagtacttgtatccctcagttgtcatggtgttgtatgctccccaaatgtgaacatggattagatcaaaatagttttcagcaatattttgattagatatgaatggcaattttttttgcttagcataatggcaaatagaacaatgaaatagagaattagaattggcgtgaaacttgaaagctttattcaaaggatgagtctttacagaagaaggatggcctaatctatagtgtcatacagtttcatttgtcactttggaataaaaaaatagaagaaaaaatagaaacaaattgtttattactgatctgattacaattcaggtagtataagttgccaaattttttacccatcccaatcacctctgtcttcaaagtgtcctggatgacacagtttccatgagaaaataagaaagtgtaattagttgtagcagttaaagaattgacaaataacaaattgcacttgaaagagggaacataaaggacactttcaagaacaaggttagggagtcaaagtaattgttccaagacaagatatttcagtgtgcaaaccattaggcaaaagaacagtttttaggttaggagtgtaggtatttttgaacaaagaaatgtcaaggcacacatgatgtatagctcatgtatctatgatccaactgttattatgaacaaaagaattcttaccagaaaaataggaaaccacaggttgttcatcagaagtattgagaggactgttattatttgcctcaatggttttctgagcaagtaatgccatgagtttctggcaatgcacactagacaagctagcaacaagatctctcaattggcatctcctctagtttttcttcatctatccttgaaaagttcacaccagaagactttcctagaggtcccttaacattgcacactaataagtcgtacaattaaatatcagtagctattactatcttttacctacaaataaatataagtaggtaaaatattggtaagtaaaggccagatttcttgtagtaggggatatccattaagcttatgacatctgccaattttgtgtccattcatgcgacaatgagtataattgtactttgattgaaagggttgaacaactccaacaaactgtcaagcattactcgatgatgacttgtccaaatcagatgaattattatatccactagtgaatcctctttgcctctcttcttgaacaatagtagctagcaggccttgttcacacttgggagaggatcatgtattaagatctgagattttgcaaagctgtaagagtcattcaatccaaccaaaaattccagcagtctatcttcttcctaatattcttgaataattttcattgcaccacatgtacaaacaggttatggtctatactctctaatctaatcccatagagccttcaatcaagtgtaataggtcgttacagtgttcgatccttgagtaagactctgcatagtctttttagcctgaaagattcgaggagcattcttctcagtgaattgcgcgtgtaactctatccaaatttcagtagcattccatgatacattatgctatctgcgattttatcagagatagcatgtaaaatccaagaaatgactgtgttgttgcatctacaccagctatcatagtcttcatgatcttcatcgagctaaggaagctttccactaacaaatttgaccttatttcgagcaatcagagcaatcaacattgctcttctccaggtactgtaattctcactgcctttgagaatttttagaacaagaacaacacatgaattattgccataggaaaggaagtacaaattcgagagatcattagcattagatgatcgacaattttcaccaagaacaaagaacatgttcgaatcattagaagtattttcatattcttaatttcctcgaatatgaactcctcctcgagctcgagttccaccacctcgtgccatcaatcaacaaacaaacaaggaagaggagcttatagagtatgctctaataccatattagcttgagagatctgaaacagagtatgagagaaggagagatagagagagaatgagcaaaaaaaaattgtattgaatcaaatcattacagttacaataatgatgattagctacttatagtagctatgattacaaggaaaacaaacacaataactcaatagctaactgtgacaacactaacctcttaacctcctaaatattttaaaatctcattctacatatatgtaataaatatttataaaatgaagtacatttataaataaaaaattaataataaataaacatatacaatatatatagtttaaattaaatgtttaatttactaaaaaaataatatatattaaattttaataaaaataaaatagtgtaaagtctttttttggcaagttagttgac

SEQ ID NO: 39612 - DNA, 1892 bp, Cannabis sativa
aaaaaaaaaaaaaaaacagcccaccactaatcgataaaattgttttcgtattggaaacgtttgccacctgtaagtgagtggttgacagtgtgagaagagaagaggaagaagagagtttagacaagatccaatttatacaacaaaatatcataaaccattaaaccatgtgcaccgacattattccaaaccttcatatctaccatttattattctcctatttccactcttcactcttcaccttcaggtactacttactctccctttctctctcatttttcttttactgatttatcaaatcatcttttccatttgtgtttagcttcaaagatttgtaatttaatgtgttcatatattgattttactttatttaattgtgtttttctttacttttcaatcggttaattcactcacaatttgaatctgggtattactgaaaatttgtcactaggtagagaaaaggcagtacggcaatggcgtattgaagtgggggcgaagaagatcaggctgaggaatcaagttgaagagagagagtcatggaagctaatgccggtttagttgccggatctcatcgtaggaatgagctcgttcggattcgtcacgattccgatagtgggtcgaaacccgtggatgtgagtggtcaaatatgtaagatctgtgggggtgttgttggtctgacagctgatggtgatgtattcgttgcttgcaatgagtgtgcgtacccagtttgccggccttgttatgaatacgaaagaaaagagggagatcagtcttgccctaagtgtaagactaggtatcaaaggcttaaggggagtcctcgtgtcgatggagatgatgatgaggatggagatgatgatctggagaatgagttcaatccatcttcttctagacatgagccgattcgcctcctcaccaatgggcaaccggtatctggtgagattccatttccatgtgctacatctgattataaccaatctgtgagaacgaattcgggtcctttgggtcctaatggggacaagcatcttgatcctcggcttccagttccagtgagaattgtggatccatcaaaagatctgaattcgtatgggttagggaatgttgactggaaagagagggttgaaggttggaagcttaaacaagataagaatatgattcaggtgaccagcagatatgcagatggaaagggagacatggaagggactggttcaaatggagaagagcttcaaatggctgatgatgatgctcgacaaccattgagtcgtgtggtgccaatttcatcatcacatatgactccttatcgtattgtgatcatacttcggcttatcattctgggtttctttttgcaataccgtgcaactcacccagtcaaagatgcatacccaatatggctggtatctgttatctgtgagatttggtttgcgttatcttggcttctggatcaatttccaaaatggtgtccagttaaccgtgagacttatctggacagacttgcattgaggtttgatcgcgaaggtgaaccatcacagttagctccaattgatgtttttgtgagtactgtggatcccctcaaggagcctccacttgttacggcaaacactgttttgtctatacttgctgtggattatcccgtcgacaaagtctcttgttatgtatcagatgatggttcggcgatgttgacgtttgaatccctttctgaaactgctgagtttgctagaaagtgggtgcctttttgcaagaaacataacattgaaccaagggctcctgagttttattttgcccagaagatagactacttgaaggacaaaattcaaccttcttttgtgaaagagcgacgagcaatgaagagggagtacgaagaatataaggtgcgaatcaatgcccttgtagcaaaagca

SEQ ID NO: 39613 - DNA, 1205 bp, Cannabis sativa
ctctctctctctctctctcaggtgacacaacggtcaccaccacaaccacgacaacgaagaccacaacaggcgacccacaacgaccacgaccacgaaccactgacatcaggccaccaccgaaagaacttgaagtcaaactgtcgccaccacccaactcagtaaaaaagtaagttattttttaaataaaagtttagatttttatagatttggatgcgaattcgtgtatattcttcagattagttgaatttttgtagattctaaataatgtgtatttttcagtatgttcttcagtggtgtctgtgtgttttaatagtgttatcgataaattatcgataggttatcgatataatgtcgaccataattgaacatagtttgaacattagaatttaatatttttttactgtatatcgataggttattgacatcttatctttggtttatcgacattttgattaggatatatttgtaagaatttattgggtatatcgatgttttgtcgatgaaatatcaatatgttgtcgatagtatgtctttgtttgagcagaactggtctttttaattttttaaagaatatattgatagtatgtcgataggatatcgatagtttttcggcaatccaagaatatattatggttgtcgatataatgtcgacaaactgtcgacatgtttttgacaccctatgtgcatttattatttgatatactttgtcgatatgttgtcgacaggttatcgatatgttgtcaacaatttgatattattgtattttgttatttttaagtgtgaatatatcgacataatgtcgacaatttctgtgagggcatttgtaatattttttgttatatatattttcaaatggctccacgactcatagttctagcagccgagcattttacttgtcgcgtgacatatagaggtactggtgcttttgcaaaactcaaatctcgatttgaggagtacaatttgaataacacgacgaaagaaagtgattttggaaacttttggaatgtcgtatccctaacattctcctcgatgttatttcacgaagttatgttgcacaagatgaaggttgatgttgaggaagatttgcacatgcatttttacattggtcgaaaggagctcagatttggagtagttgagtttgcattcattataggcctgaacttctccttgggtccaacaaaagaggagaaggctgcgcaggttgc

SEQ ID NO: 39614 - DNA, 1507 bp, Cannabis sativa
aagaaaaagaaataattaataaaaattcatccaagtttcgactccaccaaactctctcattaaatttactttgagaaaaaggaatgaatagtaaccaacaagtcagacgatacaattaaagattgcccttaacaagtaaattaagattgaaattataattgtgtatacaatatttatgcatacattagcaacttttttccttgttcttcacaatgaattaagcacattgttaaggcgcataatcttataaaggcatcttaaaccggcacaaagggcagatattactcttctcaagccaattcaatatgcagtcttcatgataaaaatggaaacaaggtaacctagtagcttcacaccctaagaacatctcttccaaacatatcacacaattattctcccctaactcgtcaattttcaccttctccaaacccgcgcttgaattggaaacttttactcgatcggcttcttcttctccctgttccccttcttccaatcgctcttgtcctacgacaagagcaatgacaagtggaatagtcttgcagcctaggttttctggttgcaaggcaatttcccgagcaatagttgaaatcttttgaatcataagtggctgagcatgaaagggaaccagcatgtgggagagcatgttagaaattgtggaccatgagatactactctctacaaaatggtgtcgttgacttgtgaattgaaagtaccttgaggttgaggaataaatatttggtgtcgtatggtgtgatgtgtggtgctgtacgacatcatcattattattcatatatgttacaaacacatcaatcaaaaactcagggcacatcatctcttgtggtggtgacaaattaccactaatgtcgtttgtagttggtatcaagtcaataatatgatcaggctgccatacctcgcaactgtatggaattacagaacttgacatattttttaacaaagaagagaagttgtgggaaagagaggatcagaattgttagttgagagtgaaatggagaacgatgatttatatatatattgatatttatataataggttgataaaaatcgttgatcctaatggtgctggtattagagaaaaaaaaacattactgattagacttggaataggagttgcttgaattttaagaattagctgagagttgttattgtcatttgtcacgtttggagattatgattttttttcttgttcttagaagtataatacaagtaggcaatatatccgcccttcatgcggttattgttaaatatctttaaggatttattaattttatgttatatttgttgaattattatttataaataaatattgtaaaaatttaaaatatccaaatttagtgagaatagttaaataggtacaaactttttatagtattatgtattataaaaataaaaaggattatttatttaaattaaaatcaatatgaagtgtataagatatttagatatttttagttgatattcttttaaaaaatttaattatatagcgtaat

SEQ ID NO: 39615 - DNA, 1442 bp, Cannabis sativa
caaaaaatcttataatattatagtcttaaaatgatgtctgaatcacctgttaagatttttcaagccctactattcctgacatgtatagtagggctagccattgcccaaaacaacccacaagactacctcaacgctcacaactcagctcgtgctgcggtgggtgtggggcagctgagatgggatgacagggtggcgtcctacgcccagcaatacgcccaacaacgcatgggtgactgcaatttggtgcactctagaggaccttatggcgagaatctggcctggggaagcgcagatctttcaggtgttgatgccgtaaaaatgtgggtcaatgagaatgtcgactataattataactcgaacacctgcgctgctggcaaggtttgcgggcactatactcaagtggtgtggcgtaactcggttcgtatggggtgtgctaaggttcggtgcaacaataataagggtaccttcatcacttgcaactatgatccaccaggcaactatgttggccagcgcccttactaaattaaagactccttgctctttatgatatttatgttattctatagtaataaacagcaggaagaatatctaccatgaatcaagatcccctatctaaatatgtatcccatattattatgtctaaataatataatgatggcacatcatttaatcttgcgcaagtctgttaactgaaaaaaatgatagaactaatctttttaaagaaattattatcatgatataattaaaataactaaaaaaaaatattaatgatatagtacttttcttctttgaataataaggacatagtattaataggaatcattgatgactaaaaaaaagcatatacctataattcttcttgtaataagaaaaaaatggttgtattaataaaaacaaatcaaaattaattataattgacgtgaagaaaaaaaaaaaaacaaattaccagttgtgcacaaatattagaataataaaaaaaaaaattaataacttaaatattcttttgaatctgttacataaaatagaaataatcatttgtaaatatttgatatagtactttctaattttaactattgtttagaatgatgatttaaagttaggatataattttaactatgtcatatagtacctaaaaaaatcatatattcttgttatataacgaggataaaatcaattatataaattaagtaatataatatgtgaagtgttttgtaaaaataatttttatgaaattatttataagtaaaataaatttattataaaaaaattattagaaaaataatcttgtaaggtcacaaaaacgatcatgaagtacattgtgcaacaataaacgattactactcacaaaacgaccataaatttacactgtgcgatcatcatggtctgataaagtaaattaaatgaggttataatttttcaaattttaatctttcacattatta

SEQ ID NO: 39616 - DNA, 4219 bp, Cannabis sativa
actaccaacactattatagtagtggtacggagtgtattggtacaatgtataatgtttaaagggtaggatgcagtgttaccaacactagtacgggatgagtacgtagtgcatgtggtacaacactaagttgtacctgagagtacgagttagccctaccaacactagtatggacgtgtacttaagtgtctgttgtacagaggttatacttctgttaagaatgttcttgaccatttgataagccttgtaaatagttgtatgggcacctaggtacaagtcggtatacattatatgttttatgtttttcttattgagtctgtcgactcaccagtgttgtttgtcatgtgtaggtaaaggaaaggctaaagctaaaaacccttagtcaaaagctcgataatgtttgtacatgtcatgacggtttagcctagaaagttcaatttttgagcattttgagatctattttgtagtcattatgcgacatgtcattaaaatgtagtttgtatatgaatgtgactttcttaagacgggatcctggcttttggataaatatttatatataaactttaaaagttaaaatttaaatttgtcacaatatttgagaaaatcactaaacgcgcctaaatagtagggcgttacaaaagtcctttgcttttacaaattactttttgaacacttcttgcaggtctctccaattgtggattgatctcagagatcaactctccttccagtcttctacagattttgtcagagtcaatgaaaagcaaagacatttttcatcatcactagccttagcaacttgcattatgcagttgtattttgataagtggtccctggggtctgtccttccttcataaaattccatttaaggaattctgaagcactctagtagtggtacgtctatagttctcttcacacatgattctgtatcttcttcttctgaatcagacacagttccattttgtctttaggagatcttctccatgagcttcgttaactctttgactttacattccacgcattgagttttatcatttgaagattctcttccatggactcaatcattgatatgattcctcaattcattcccacgaggtctggcttattctgttctagccttctctttcttttcatttaatcttctttgaagatcatttgtggagagatttccacgtcgttgtctgaaactagatgcaccaatttgacatcattgcttcgactactagaatcattacaatgattcttatcattccaggtagtaggcttcttggctcaggcattagacttatctttctacacaactctgggtctagaattagtctggtcaccctgccctgaagcatggtttcctttctttttctattgaggttgactggaagatttagatttctttattgttcagcctaaggaggcttctttgaggtttcacctacttttcctttccctttatccttatgtggatcataagttctaggatttttagaattatttttttcgatggtgttatcctctggagtcatttgtttggctctatttctagaagttagtgctattaatgcagcctcaattctcgatactttttcaaacaattgcaaagagaattcttcttaccgagataatttacgttcaattatttctaacttcttgaccataataccacaaggtctgactcgtctagattgtccttcttttcagcactaccaccaacaaacatgtcttggggatcatctcaaacatcattgaaactattgtctcctgtttcattgtcttcaaatataggattgtcacaattttggtctttatcatgtttgatccttatggtggcttgtcacctcattcaaatcttttgtatcccttgccttagcattaggatccatacaatgaagaccagatttatttctagtgagtaccatgattactgaatgtaatcatcatatagtatcactacttccttcagctctcaatgaaagcaccaaaatatttaccaagatttttggaaaaccaattataagaaataagaactgaaggaataaataattcaaagagggaacaaaacaacacttagaattttttacgtggttggggcattaaaaagtctagtccacgagtcgatattattatgtattttatctagaaaagcctttgggaatacaatgagtatatgttctctgttttttcctgagcaaatattgcaagagtgctcaacccttaatccaaatggttatgtgagtatatatagagtttacaagaatcatacttagtttccctttccctctaatggggagttttcatgaatcatacacaagttagggctatattcgtgaggcccagcccatgggacgatgagtttgctgactaggcaaattgaccaaggtcaagttgtcattaccatgttctttaattgggggtaattaattgtgaattaattacttaatctttattttaggtagttttccctcttagcttgatatgatcttctagccgagattataggagagttaattccttattctgtgcgatttgataaaaagggaaattgtgctaggcttttaggaatacgttgtttgaccttccggaagcattgtctgagcgagaaaggaagatgccttcctagagggtcttgttgaacttgggctttgcccaagttaccttctttgggccccctggtgggcttggatgctaacctagagtccacgtatcccttgctagaaacacgaaaaataataagagagacataacaatttatagtagttcactccatgtatcacgacagtaatggagctacgtctatttaaagttttatttcttcagagatgttttacaaaaaatggctaagttcggatgctctaatttcaagagagagaaactagagagagatgctctgagcttatgggtacttttgtgaacttaaaaagtgagctagtagagctctccttttatagggaaggacgtcctattaaaataataataaaatattccaaaaaatatggaaaaatacattcaggctatttttgatcgaagatgatgttctaacggtgaaattgactgcggaggtcattcgtcaatttctagagctcgagttacgtctgcacccacttcgggtaagttgtagcttaaatttgtaactctcttgatggtaaaatttggagtcggtaacttcaaaagttcaattggagtatgacacatgacttgataaatcattgaaatagctttgaaatgcaagttgaatcgcatcaatcagataaatattgagtgagttatgatcgttttactaaagattgttttgctcccaccgcccatgttaatatgtgatgtcaacttggacgctgggccaagggaaaatagcgtttgggatgtaatttttgaagcctatgtgatattttgatatcacttagccatgtcaccagttctcagagatgttgttattctgcaaaaataggagactcgaaactacctaatttttgagtaagtcactttgtcggaaaaatgaaaatatgaagttgtaaatttgactcttctaaattcatagatctcagttactatgaaaatctagatgaacggccgagatggaattagaatcggataagtagaacccaacataccaggccatatatcaacctgggtgctctttttaatgcttctgagatgtcattttgatactttcaaggttcttgaaattgaggattaggcctcctaccccattttgaccattttggagagaattcttgaagaataatttgcattttagtgatcaaagattgaatgtcaacctaggctctaagcccaacactaggtcaacttgggcattagggttagttgtgatgcccctggaattactgttttctccccaagtttacttgtatcttcattatttctaataaaggaaaaattctcagaacacctttttggaaactaattggaaacaatccaggttgacaatatgttaatatgggcactaggcctagtgccaagtgttaacctaggcgctaggtccagtttcaagcccttagaaagttgatttgctcggaagaatttttggaaaaattccttggaattggcccagattgacaaaatatcaacctgggcgctgactaagtctcaacctgggcactggtcccttattttggcctccaggttggtccgtttcttcctcaaaagcacttttatctctgtttttgatgaagacaaagaaaattctcgagatgaattttcagtttgatgcttg

SEQ ID NO: 39617 - DNA, 1591 bp, Cannabis sativa
gttttatatagtaaacaactataacataattttggaaaaacatacatgtctaagactaaaataatacttttctttgattaatgctagttagttatgtcaatttttttccaatttgttttgggacattggataatgtcaaaatctatactcaatttggttaaagaaaatgatgaacaaataaataaaaagtaaaagggtttgcattgcaaccaagtttgatgtcaaaattgcacctatgtacatataataataatatgttatattaagaagagaccaatagctatgttgttttgcagttgttaggaggatatatataagatatttatttaagagataggtatggtcaaaggaaattgagaattaatttgacccatttgatttgcacttaattaattaaagtcttaatatgatataatcaatttcatctttattatttgagtactttttacccacctagatagctatggtcaacacacccatatagacccaagtcaaatatatatgcatatttcaacttgggtcatgttatgtgtgtttatgcactatacccatataataccactaataataataatattattattaatctcttaattatatgcacttttcattatctacctcatcaattaatatcttcttaagtgagcttttctagcatggtcttaacaataattttcttctgttatagtaagatttttactgagtttaaaatgcccatgaaatagatatttttcacctaccaagcaaaaaaaaaaaagtgcttaaaatggatgatctttgttgaattaagtgattctccacctaacttattacactcattataggtattttttttcataggagcattgtttttagaatttatattatgcactaataaaattcactagaatcacaagttgactctttacaatggttagtaatattttataaaaattattaatttaaaatatttaggactcaatatcttattatactaataatagtctaacatcttatttcaaaaaaaaaaaaaaaaagagtagtctaacaccttatggtggtgttggatactattattggtgttttttttagtatttctcttaatttttagggacaacaatagtgtacaatactactacaaagttggcatcttgccaatggttataatatttaatattagatatttaattaaatatgtgagactcaatatataatggcactaataatagtatgacacatcgtggtagtgtttatgggtgacaattcgtattgtcgtatcatattcatgttcctattatgcaaatcgacatgtttacttggttaattctaagtttctaactcaatccgtatatatgtaatgtcgagaaatctcaaccccaacccaatcaatatgtcgtgttcgcatgtcgatctatcgtcttcaaatatctacttattttatactacatgttgatcaaaatcacatatttaatttataataatttatttaactaatttgaataatatactaaataaaaatataaattaattaattatataaatattaataaattatcaatacaatgaacaaaattaagtgtaaataaactatctactacaaaaaagggttttg

SEQ ID NO: 39618 - DNA, 3004 bp, Cannabis sativa
caaagtaaaaagactatagagataatttctaaaaaaaaaaaaaaaaagactacacgtgcattactcaattctagttttgctcgaattcgtattttataaaatacaaatttgatatgtatataaaaaataatataaaatttttatttttacattttttataatacacaaaattaaaaaatatttatttaaaaaaactttaaaattaaataatttatttttgttttaaacttttgattcttattctcaaaaataaaaaatatattacaaatttgttttttggaaaataatctcttactattataaaaacaaatacgtacgtaaagttttattataaattatttacactacacaatttatttatttattttgttacgtgagttcatataataatatcaatatgagttgttattgaaagtaatgctatcatatgttataaaaattaacacgtcagtcagtgagtacatcaatttaaaatttgaaagaaaaaaaaaaaattgtttgtgtggaaagggggcttatcaagtttactttgaaaaaaaaaaataaaaataaaaggggcttatcaagtgaccaatgagataagtaagtgagagttttgatagggcgatctgctactctctaacttttggtaatggctatctattagcatccaatatatattttgttttgatatttggcaatattggcatgataaggcctaattggactttcaaattttacatataaggacactttctctccattatggtcttcactatcaggaatataaggacacaaactttttactaatttttttaatattccctaaatgcattatgccattatttaaatcttgctcatattcttatgtaacacttgtgtcacctttagcctttttctattgttattattgtaacgttgggtaaatgttacagttacaccttattttgaataattaaacggtacactatattttaatattcctgaggtccaagttcgaatctgagcgagttatttcactctccttcttctcctatgagtgagttagcactagtaatggcaattgctttaagaataaaaataagagtgatgtttgtttatttttgcaatgataatgaaaataaatggtatataacaaaagaataattagtatttttgctctctgaactttcggtactatttaattttgtcccacttgtaggggtattcacggagtagtttggtctgaattttcataatttttgaaccaaaccagtataacggttttttgaatattacaaaccaaaccagaccaaaaaatttctcaaaccaaaccattaagaacggtttggtttggtttggggataaacttatctttttagtcattatcttctattatctacaaatagactaaattaaaattattaaatctaataaaacctaactcatttttagcctaaataaaccataaaagataaaataacattctacccaatgaaatgactattctacccctccaccaatcacttaggttaaataaagcccaagggtattttggacattttctaactacctcgactaaaccgacttctcaacattataaactaattgggtataattctaatataactcaacttttatcttcgtgacatttctgaccacttgtcgagttttcacgaccgccgaaccctaaaatattttattccaaaaatagtatatacaatacccacataattcgataaaatctccgtaattaataaattacactttattcattcatttaatcacatatttaataaaatatgtccaaattaacataatcataatttttaggatattacacctctgtttagcacatgatttaccattcaggttgaccgacacatttgaatttagaaacaaggtaagattagcgtaaaatatgtatttgatgtgtgtatgtatgtaaattacatgttggtcatgttagttatgcactaccaacactggtacagtagtggtatgcaatgcattagtacagtgtataatgattaagggtatataatagtgttaccaacactagtacagaatgagtatttaatgcatgtggtacaatactcagtgttacccgggagtacggttcaaccctaccaacactagtacgggacgactatttaagtgtatgaggtacagaggtcgtacttctattaagaacattttttgaccatttgataagccttgtaaataggtgtatgggcacctatatacaagtcagtattatagtatatgttctatgcttttcttactgagtttgtcaactcaccattattgtttaccatgtgtaggtaaatgaaaggctaagactgaacaacaatgagtccaaagcttgttgatgattctacatgtcacgatggtaaagagtttggtctcgagatgactttggcttcattttgtagtcaatgtgcgacatgtttgtaaagtttattttgaatgtgaataaaagttttaatagcgggatcccaaattttttgtacaaataatatgtacgtatttataaaagtttaaagttaagccaaaagattaattttatcaaggttttcgagaaaaccctttgattagcaaaggtgtgcactgtaattagaaaattactatagcgtgcctaggtgttagggcgttacaattttggtattagagtcgctaggtttttcatcaaagatagtcaagacatgtacaataattgttggagataagctcaactcacgattcaggaagcctttacttgtttactaagttatgtgattagaaaagcatgataggaagcatgtcagcaacgtgttatttgcttaaatgtgttgcctaaaatccatgtatgcggtatttaaattatatgtgatcgctatctaaccaacctgacttatggtttagaggccaagtcttatagtatggatgcctagcgaaacataaggagtcaaggtaatatggtcgagaccgaaggcagtcggggaggtcaaaatcttccaaatctccatggacgcggtggaggctatggaaggatttaaagtggtgg

SEQ ID NO: 39619 - DNA, 2961 bp, Cannabis sativa
ccattaactgcccacttccctctctccccattatgacttccactgttactccttccacctcaaaaggaacagctcctatgtaccccgaacccccaggcatctgtccctcaatcttccaccatcacaccttgacactcctattgctccttcaaccacaaggaagcggtcctttactcggcatagtggtcaagtgggttcttcggttcgtagcatgctgaaacgggctcgtgcccctcactttgactttgcagttgttccttccatatctgacaatgagaatacggcgggtgttgctcagcaaccccacccaaaaaaatgggtctactcagttggaatgcttgtggattggggagttcccgagcattccataacttctccctcctttgcaagcaacatcaacctcagattttttttttgttatggaaactaagcttgctgctcattctacttttgtgtttagagctaagttgtattttgctaatgttcttgaggttcctagactaggtttagggggaggtctgcttctcttttggaaatatgatgtttatgttaatattttgtcttactcccttcatcatattgcctgtactgttactataaataataatacttttcatttgtcttgctattatggctcgccttatatttctgataaaaatagctcttggactttccttaatcgtcttttttatgttgctcctttggcttcgtggcttattattggtgattttaacgattaccttggttttaatgatcgtaatagtcactgtttgcctccttctcatgccatgcatcattttcagaattttctgtgcaaatactctctttctccccttttcgggtagccgtttcacttgaaaacatggtacatctttagaacgtttggactaggccattgttaatcataagtggaataatcttttccctacggcgtcacttcatcatcttgactttttcggttcgaaccatagggctcttaaaatggtttttgagggcaaccctatgatatttcgacgtgactctacttttcatttcaaaaaccattggtttcttgaatctgatttttctgatcttgttaaacataactggactatggatgctctttcggataaatctgattcccctctccaagattttctctcaaaacagcataattgcattgcttcaatgatttcttggggtagaaataaaaataactttgctcgagaaatcaaacgcatccaatctgatattgagcctcttttggctggcccagttatttcaccctctgaagttcaaaaagctaatgctcttcaatgtactctcgacaatatcttgcttaaggaagaggtttttctggaaacaacgttccagggccaactggctcaaagctggtgataagaataccaaatatttccatagtaaggcctctactagaaagcgcaataatttcattaagtcccttactttagatgataactccagtgtctccagcttaagtggtataactaattcttttgttcagtttcactttgaccttttctcttcgcaaggtacggatcctgatgccattgccattaccctccaagggatttctaaaaggatcactgctactcagcagacttttcttgccacccaatttgactttgcggaggttaaaaaagccctttttcagcttgttggggataaagctcttggcccggatggcttgaaaccctagcttttaccagaaaaattgggacaccgtgggcattgatctctgtcgtgctgccttacatgctcttaataccaacgttgaccttgctcctgtcaacgatatgactttggttatcacccctaaggtcaagaatgcttcccgtatcaaggactatcgacctattagtctttgctctaccttttataaggttgtgtccaaaattatcgctaaccgtctcaaatccatccttcctgatcttatttctcataatcaaggagctttcctcagtgatcgaataatctttgataacatcattattgctaatgaagttattcatgccatcactaattgtaagcatgggaaagttggttgggcggctttaaagcttgatatggaaaaggcttttgacaaagttgaatgggcgcttattcgagacatccttcaccaacttggttttccttcccacttcatttctctcatccttcggtgcatctcttctgtttccttccgtcttcctataaataattgtctttcttctcaaatctttccttcctgtggaattcgacagggtgaccctctctcgccatatctctccctccttgtcgctgaaggcctttttgggattattaattataaatctcggtcgaactctttccatggtatttctatctgtcgctccgcccctcccatctcccatcttctgtttgctgatgactgtttacttttcaccaaagtttctgcctcctcttgttctgaaatcaaagacattttgctcatctatcagaaggctactggtcaatcggtcaatcttcataactcttccattcttttctctcctaattccaactctcttgaccgagatttctttcgtaattccttgaatatggataacaagcctttcattgataagtatcttggagttcctcagtgtttttctagatccaaaaagtcttctttcctttttcttctgcaaaaagcaagctccaaattatcaggatggaaccaaaaccttttctcgagagctgataaggagattcttctcaaatcagttattcaggctatcccttcttacgctatgtcttgttttcggattcctgtctccagttgtaagaatttcagtgggcttatggctaaattctggtggggctctcttggtaacaaacacaagattcactggaaaagcttggacaacttgtacaagtcaaaactttttgggggattgggttttcgtaacatttttcatcacaaccaggccatgttagctaagcaagcttggagaattttca

SEQ ID NO: 39620 - DNA, 1908 bp, Cannabis sativa
  modified_base (1323)..(1323): a, c, t, g, unknown or other
  modified_base (1494)..(1494): a, c, t, g, unknown or other
  modified_base (1736)..(1737): a, c, t, g, unknown or other
tcctagctatagggttccttatggctacgattacttcagtaccctttagctacacttgcaacaccaatggttgtgaatttcttcgaaagtactgctaaagggccaaaaaactatctcaaaaaactcttttgtagtagtgaaaaaattgtttaaataaattaaggcaattaatgtattagttttgaaattttattttccttttaaataataaaaaataaaaataatttaataaattatattttctaaaagtactttcttttttttttttcattaaattaacaaacaaaaaattgtttaaatggttttttagcttttagtgttcttcttagtcgttatgatttttaaaggccatttaggatttttatttctgaattatgatctatgtatattattatgtcttgaacttttcaacccattcaaatggttactgaactattttcagtgttgtaaatttgtcattctgtcaagttttattatacgcgacaagtaaaatgatgacatggttgtttagtcagttgtcacgtcagtatcatgtcaacgtcaggtgtataatcaatttaaaaaaataaattttttaatttagtttacgtaattttcttaatcattacttgaattttagtttaataatatttaaaaatacatattaattttattttcttaatattaaattatacacgtgacgcgcgttgatatgctaattggctaagcaactatgtcattagtatgtttgttgcatgtgacaaaacttaatagaaagatcaatttataatactgtaattcatggactatttgtaacagacttaaaaattcagatccagaataatacatatatatcatagttgaggggaaaaaatagccttttctaatttacatgactacgttcaattttcattcaattatcttataaaattttatcaaatttgtaacagtaggcttccctttttttatttttcaaactggacagatttttttttttccttttgttttactttttatatatactagtaaaataacaaaaaaaaaaaaaaaattatattttacttataaaattaaaacaaaatatatatcaaaaataatatttttattatttatattatatataattatcctgtatattaagttatatatgataaataattatattattataataattaatacaaaaaaaaattaaattattttactaattttctttaattgttgatcaagtttatacttaaattataatatttatgcttgcaaattgtttctattcatcaatataaatataattattaaaataatttgttatttgattattatctaatatataattatttatanagagtgattaaaacaatatattattatatttatataagggattagagtattttaataatttttgttgttaattataatgtttatagataaactataatgtatgcatactgtttcataactatgattatttatatttatttgttgtatgattattagctaatatataattanaaattaaaaatatcactcacaaaatttttaatagttatcaaaataatttaatttatattaaattataaaaaaaattaatggaagaaaaaagataagagttaagtaatttaagatgtaaaagcctaagaactattaatattttttatatagttatagattataaattattcatagagagtaattaaaagaatattttaataatttttattttttaatggtaatatttttatagataaattatnntatatgcatattgtttcatcaacataaatatgattataatttatattaatttattatgtaattattcactaatatataattatttatggtaatgtttataaatataaactataatatatacatagatataaactataatatatacatatacaaatatgattatttatattg

SEQ ID NO: 39621 - DNA, 1265 bp, Cannabis sativa
ctactctccgcataaaggaactattatactcacacattgagtgataatatgtactcgattcaattaataatgtaaaagcaatcttttacaagccaattttattatgttgagttaaacccaataatttttctaacactaatgccatattataccaccaaacattattttaattgtcaccaatatcatatttacctaccctttgaaattaacctctattaatttttcttcattgagtttttcatacacaaatggatccatttggtaatttcaacaaatctgtttcccagaattaaggttctttttcttatttatatatttaattttcttggtgaaatgatgttgttttgtggctgaggagtgagggcccaatggtaatcacagcctttcaacaccgtttaaagaaagagagacgttagaaaataatgcttaggacggcaaaaattaaaaaatatgaatgaatgatgtttattattttggttttggggaaaattaattaaagctccacatggtacaaattgtaatgataatgattttattgacttgatatatatgaaaaacccaacattattatgtatatattgcacatatatatatccatatcgaaacaaacagttatatatggtcccacgtattaattttatatgcttatacttaaggatttattaattaattgtcgtatgatcttagattgtttcattcataaagagagaaatttcaagtgcagttcccactttctcctaaatttcctttgcttgtactgtcatccattagggaagcaatccattaattaatgtatatcaatggttggagtttactattcagttttagagtttcaattcagaaattcttctatatttcgataaattcgagtttcggatgatgtttttacttgcataattttttataaggaaaattgttatgtaaaaattatttatttatttgattttaaataaattagattttgtattttttatttgaattatttttttctaatataaacaacttaaatgtaatttctaacatgatagatatgaaaaaatacgattaatatagtcataaacatctccaagtttgattactataaagttttatttttgataaaaattgagatcatggtaagaccaaacatttctaccgagtttgacctggacccgatcaacccgcctagtccctacttggtcaacttgactgtgggaaaacttgttctctacaggcgggtcaggtctatcccgatcagttttatcgggcgggtttgagtttgtttt

SEQ ID NO: 39622 - DNA, 2122 bp, Cannabis sativa
  modified_base (130)..(150): a, c, t, g, unknown or other
attttaatttttaaaataatatataagattcatgtacttaaccaaacagtgtaatttaattaacaggaatatgattacatattaccctgcataaccatatacggtttacacattttcctataatcatatnnnnnnnnnnnnnnnnnnnnntaatcaaattattttgaacaccttgtaccaaacgcccccttaatgtatcttcaaaaagctcccagtggaggtttactccactgctcctttctatgttcttcaaccgccatttttagtaaaataggcttttctctaatgattatatctaacttggggtgttgtgacctacgaagagggattaaatggttgacatatatggcatcttgccacttttttttgagggtttttgagatttaggtatcttttactcttctcttatttttgctatttaaagatgattgtggtcgaggtcagtgttatacttgtgtgtgctttatttccctaattttttcattttcagaaaaaaggtctaacccaaatcaagaaatgccaaaccttcgtactcttactgaggaagaaaatctcatccatgacttcaatcatatttccattggttctaggtaccaatttgagtctttttaccttgttgttaagattctcacctttaaaactctgagggcaccttggattgagaaagccatgagagagcttaaacccttcgtttccctattaccttctctaagtatcactctaggctgttcctagccacctttggttgtgaaggcgatcgtcgtagggttcttgaagaccaaccttgacacttggtcattatcaggggatctttgctaatcttgagagtttagacacccttacttctgaccaactttgctatgttcccttttaggttcaagtccacaacatcccttttagtaagaaatctccccagttggctcagtatgtagctgatgaagttgggaatctcataaaggtctacaccttttttctgtttgaaagttttggtccttatcttaagatcaaaattttttagacgttaccaagcctctaagaaggggaatgaatatccactttagaaaaatctctaagactaagtagttgtgttttaagtatgaaggtttgtaaaaattttgttacttctctggtagcttggatcagacttacaacaaatgtgttaactatcttgcttgttgtgatgattttgttgctcccccttttattgggttattaggtgttaggttatttttagtattaattttagattaattttagtataattttaatttagttttactcgtgtttggagcaattctacgcttgttattttttatttttgcagatttaaaataaaagaagattagaaaaaatatcagaggaaaaagatgagaaaaaagataaaagatcacataaaaggataagagtgcagatggagcatgccttgcacatgacgaagcctgccttgaagacgtaggaaaaggacacacgggctgcggcctagcaaggagggcaacgcggcttgcccccttccagtagaaaatcctatcttttctcaacgtaggtttggtggcttcttaattcaaagctgaataggattttcagcatgtgcgtttttctatcttttatagtccctcaatggctatatagagtacaaattttggagatcaactataatactggaggcattcttcagacggttttcagcattcttttctactctattttcttctcttttctttagtttacatgcgtgattttacttccatgaacatgattagctaaacacttaattagggtttagatggatattgttgacattgctttatggttttaatatgatttattttccctcagtttctatttattctatttcattcgtacttaaattattttaattgcctgatcaccaattaactgtctatgattttgatgtgagatctgagaagtgggtgtcatttatgctatagtgaaatagaactgaattttgatataggacgagagtacctgtatgacatagatagcttatagggtttttgtgtttaatgcatgttgcatgattaatttatcacgagaatagaaagttttcatgtaattgaagtttatatgtctgagaagactataaattaccttagtaaacatg

SEQ ID NO: 39623 - DNA, 2143 bp, Cannabis sativa
  modified_base (1481)..(1493): a, c, t, g, unknown or other
ctttccaacttgtgaaaacaatttagccttctacaaatttaacttttaccaaatcgtatcctttattggcctggacataattttcttatttctccccacatcattggtatacccaaaatatgtttcaattttatctgtccttctcatttcaagattagccatatacatcaactgaatattcgcaggtatattaggagtgaaaaaaagaatggttttattgaaattgattacctgcctaacacacataaatataagataaaaccattatttaaattttgcgttaaaatgatagactaactatgcaaataataatataattttgcatacctgtcctgataaattccgaataaagggaaaaaattctttgtatagggaccaaagatctctctaatgctcttacaattatcatgctatcatcagtaaaaaagagatgtgtaataggagcaaaattggccacatttaagcctagtatgtctcttcgactctcagcttgtcatagaagtgctaaaagccttctgcagaaatcaaaaacacatatggtggtgaatcaccctttcttaaacctcttgatggagtcacttctctatatttctgaccagtaatttggaatgaataatgaacagaggtgacacatctcattaacttacatacctagggttatttaaaatctaacttaagtagcattctttcaatgaacacccacccaactagattcaggcaaatttcacttatttcatgattatattcaattagttggttaagtatgattataacaaatatgaacaaagaataaggcaacttatggcaggtgatctcattttaattcttctctaaatatacacaatgatatataaatagagatgtgttgatcataattaggttccaaataaaacaaatattttatccatttttgttgaattgactattaacgacgattattttggattggcaatagaatcgaaaacaagagaataagatgacaatcgatcttttaaacgtaaaattgttagtagaattccttaatcttaaattaaaaaaattgggatattttgtagaaaacttttcataaaataattgtaatagaaaagtgtttttttttttttattatttttttatttttgaaacaaaattgtatagaaaagttttatcaatacttttgggcacaacaatatcttttgttttttagaatattttaattatgctctctaaatactttttagctgaaatagagagtaagacttaaaaaatgagttccaaccataaaaaaaatagggctctattataaattatggatagagaattttttttattgtttttgcttatttttttttaatagtatcttaatcaaaaatattattgttttttttttgatcaagaaggaacaatcttcattaatcacaaacaaatacaatccaaacaaaccaaaagccaggtagcaaacctgctttttatataaaaattctctctctctctctctgtcnnnnnnnnnnnnnctctctctctctctctctatgtatctcttctcatgagcttttaggcttctttgtttagctatttgtaatctacaatacactattttcttaatttcatgtgtaacttttgtttctttactcgagtaattgttgaagaggtagttgtttctattgctccaaatgctgtaaatcatgacagccattatcgaaataagaatttgttgtttcttatctctactattctacagcagccactgctgccaacactggaaaccagtcgaccatctcctaattcccagccaaacactcacttgctccaccacctgctgttagtaaaaaaatagatgtgaattgctctcagctgctgcatcacacactgggcagctggtgctgtcaagagtgatctgaaattgcacaatcttgtctcgagttagaagttgagagttgatagcttgccaaaatatgaatacgtgtttctgcatgtttagggagctccaaatacatttgttgaactcaaactgagtttcaggtaagcaactgttatataacagagaagatttaaacctgttcacaccagcccttgccttctcaattgctttttgagtgaacttgtaaagaccgcttagtttaatttggaaattagcagataatcacgtttaattatgaaatta

SEQ ID NO: 39624 - DNA, 1541 bp, Cannabis sativa
atgggtgatagtggatagattcaccaagtcatcacactttttgcctgtgcgggtgacctatactgtggagcagtatgtcaaattgtacattaaggaaatagtaagactccatggtgctccgaagtcaattgttttagacattgatccaaaatttacctccaacttctgggaaagtttacaaaaatccatgggaaccaatttgagattcagtacgactttttaccctcaaacagatggtcagtctgagagaaccattcaaatattggaagacatgttgtgagcatgtgtggttgattttgagggatcttggagaaaattcctacccttgattgaattttcatataataacagctaccagagtaccattaaattgcaccttacgagatgttgtacggtagaaaatatcgatcgcttatccactaggatgaggctagtgagatgtgttatcttggacctaaattggtccaaaataccagtgaagccattgagaagattcgatctagtatgctcacttcaaaaagtagaaagaaaagttacactaatccaaagcggaggaatattgaattttaagtgggagactctatatttctccgagtgtcacctatgaaatgggtgcgtaggtttgtgaagaaagagaagttgagccctagatttatcggtccttttaagatactagagcggataggccaggtggcctatcgattagctttaccacctatgttgttcgggatgcataatgtcttccaaatctctatattgaggaagtacgtgtcagattcaacaaatgttttgagttacgatgatattgagctccatacaatattatcttacgggaaacatcctgtctagatcctagaccgaaaggagaaagtattgcaaaataaaatgatcccactagttaaagtactatggagaaacagtgaagttgaggaagcgacctaggaattagagtcgcagatgcgagagctatatcccgaattattaagtaaatttcgaggacaaaatttctataaggaggggatggttgtaatatcccaataagcccaatgtaaataactaaggtttgtatacattatgggctaatcatgtaataagtgagattatgatcctacgaatttatttcagcataaattttaaatgtgttataagtggataaataagcataatttattaaatacgaagatttatatagcatgtatgaatataatatgagctatttgtgaaataaaaatatttttaggtttggcgactcgatcgggggccaaaaatatcataacaagtttagtcaatggttttaatgggaatattatgataaattgatggtgtaagtattgaggtaattagaaatatttgggatttgacctagtgccctaaaagtagagagttcttagtggttaagaaatgatacgataattattataaattaaatttttattaataatattaatatatattaatattatttaataaaatttatattttttaaaagaaacttatcagtatatatatatattaattttttattttaaaaatagaacagt

SEQ ID NO: 39625 - DNA, 1906 bp, Cannabis sativa
cagggcttattttgtagtcgctagacgacagacttttgtatatgtacagtgaaacttttgtaaatgcttttgtaaacgggatcctggaattatatatgtatgttattttgtgtttttgattaattaagcaaaattttaattaatcacgatttttaataacctcgttgattagcaacgagctgcacagttaagtttaaaatcacgttaacatgatgcctaacatagttagagtgttacaatatatatacgctaaaatctcccagaatatacttctgacttggcaaattagatgagttatagctaaataaagttacatacactaaaaaaataatcaaaacactaaaaaatatcaatgtaacaacaataaaaataaataatttttaatactattttataaataaattattttttaataaatataatatttatatatattagagtaaaattattaatttcataaataaatttataaactaaatatttatatttattaagatataattattcttatataaaagtatactttcttaataagaaacttaaaaatatatataaataataaattaaaactgatttttttttttattttaaaataaagattattcttattattttttataaaatttctataatatatgtttagtgtgtcgttaattaaataattatgttataaatttattaggtataagatttttatcgaaggggcagcttgattagttagcgaaaaatatattattgcatgtgatgctatgacattattactggtaaagccacgttatgttgatttcacactcgttgtttattaccaagacaccattaatccccatgacaagtgtagatccataaagtttgctgttgaatggggcaactctcaccaaaaaaagataacaccataatattttaatatattcatccgtatctcatggtgcattacaatttcatgtttttgaagcccattttttttctaacttggtttgtttatggttcttaatagattttcatgaataggagttttgtgtaattaaaaatttacattcaaaactttatttcctaaaaaaattgttagccaaccctagaggctctatttgttactactggaaaaatttctcctagtttaagtttgtaaaaataatagtgtttgtatagtataactagttattaatagaaattatactttttctcacctttatctctctctcacacccacacccacagagagtttaatattataggactcaaccaatatcttgtgtcctttaaaatttacactattataggagtactcacagagaatttggtatgggttaggttgattaatagattttaaatttttactcaagagaaatcatatcgaaattttcgaattcagatcaaaacaaagaattcaagctaattcatttggactacaaaaagggagtttgaaaagaacaactttcgaacatctttgctttctcgtttgcagtactattacaatcagtcaagccgatccaaaaatacaggtgagattaattaaatatgggaaattacacattagaatatatactgtatctaactgtgtgtattcatattctattataatatttagttgtgatggtcgttgggttagatggaacatgaaatggaaattgaattatttttgttttattgtctgaaaaagttaggaagtccgatgagtgttaattggtttttttttttttcttttttaaaaaaaggatgcgattgtttgaagaatgctattccaaaaaaaattatcataaacacatgggcttgcctactaagtataaatttctaattacaaatattgtatataggtaatcacgatgaattcatgtgttttagttaggcataattataagttagtaatcatgatatgtatgtgttttacttgttgttagattttctttta

SEQ ID NO: 39626 - DNA, 1946 bp, Cannabis sativa
  modified_base (64)..(65): a, c, t, g, unknown or other
  modified_base (1134)..(1135): a, c, t, g, unknown or other
caaaagtaatgaaattgggcttgggcagtacaaaagttgtttttgccgtgtcccagtaaaaatnnaaagttttggtcaaaaagcagtatttttgtaaaattccttatattaattggagtttgattgatgggccgtccatagaacatgtgtcatttctagttagcattcgagataggaatggtactttgtattcacatgttgtacttatattatgtcaaaacttaagtattataagcaaatatcaaattgacatatcaatacaaaaaattgttaacaacattttagtcaaaacataaattttttttgactaaacgtgacttttagccacaataaaaaaaaaatgtgactaaaacatatcatttagacccaagttattattaatttagttttagtcacagcatgtgttatgactaaaaaaaaaaccatcataatcactcttaaagctctattttctccatacaccattttttctcattttttttttaaatcttttagatttctcactattagagataatcaagattggttcattctgttaatggttgctagttaattataagtggttagtcagttagtttagttgtattttttctgttactctctttatgtaactaactgactgtgtgtatacatatatctgcatgcctttcagttacaaggtacagcttcattttctcgattccatcttccattctctctctctctctttcattgtaacatggtatcagatgcttaggcattcatggcgttgaaaggagtagagtccactgcatgaagtgatacaccagaagttccacaagcactccccaacaacaaccttcttcctttgaatcttcgcccggatcgatctaactacacgttctggcaatcactcgttttagttgttgtgcgtgcatacattcttgatggattcatatatactcagcaccaatcctcctccagcttgaattcataccctgcctaacaccaatggcttcgtcttgatcagtttttgatgcatttgatgagggtagatgtgagagtttagactgatggtttttagtgttttcggagaacaatggtcggctaatgatgacgattttgagggttcgatgttgtcttttagcttgtattgaaatatatatatatatatanntatatatttatatatttatagagagagagtactccatttgccccggcctctcaaattaatgcaagagattcattacatacagacacctctaaggttatgagactcatttttttgtcaaatcatgtgcgtggttggttcggcccaaaaattaacacaatacatgtccattgtagttactattataaattaatgtataagcctagctaatttcattacacaatacactcatgcatattaatgagtaaatgaatttataagttgtaatagtctctaacggccattattctttggtttattacacacgatggagacaattactgcagtgctataacaattttttttttttaactttcaagaataaataaatacttattaaaaaaaaaaagaataaataaatacaaaacaattgaataaatttaaaagctgaaaactaaaaaagaataatgatcgaccacagtgggagtcgaacccacgaccttttgatccgaagtcaaacgcgctaatccactgcgctatgcggtcttatggtaatctaacacatttaataacatattctataaacgtttctgtctttcataattatggcactttatttagttatagtaaataaaaaaaaataaaaaaaatcgaagacatttttgtaatttgaaataaagttagacctaaatttgtgcccattaacatttaattaactttatttttgtggtaaaacattaatgaatgagaataatttatatttgttttattaccattatattaatttaagaactaataatttaattaatactatagtgctttttttttttttttt

SEQ ID NO: 39627 - DNA, 2406 bp, Cannabis sativa
agcaccacttcattccatgacaagttgttaattccaaattgctaactctagataacttgcatcggattctatctcacatggacaacaccctttgtcctattgaggaggatgaggaaagccacaatcaccttttctttgagtgtgtttattctaaataggttactaattatattttcacttggattggcaagagctagccaagacattttgttacttggcaaagttgaattgaggggctgaagagaggtcttagttgggagatcattattgctactttggcagtcatgtttatcacattttggacaataggaatacatgttactttaaaatttacatacagtgttactcatccagtcaatgtgttaggtttattttttttttatgtatttttagagtttattttaatgtatttttttttaatattttatggcttcattgtttagatttatacttggtatttgttttagtgtattttttaggagaaatatttggagatgttttcgcttattttggtgttcaagcctttttgagtcaaaaattggtaattataaggaaaaaggaaactccaataatgtttagttggatttcttgttgccaaattggtcaaaatgtgcattttcagctcaaaaattcgtggtctatagtcaagagtcaagagtgtgaactttctaaaaatagagtaaaaaatgaagaaaacgggaaactgcctttgaatgtcgcagctcagcaaggaatgttgcgacattgtctgctcgttggaagaagaaaagaaagaggaaattgagaaactcgtttagaaagccgcgactttctaagcattgccgcaactttggtggtttttgagaaactttatttttttcattatttaaagagggttgatggctagttttgacatcatttgaacttggagaatttggagcataggaggaagactaggagcaaaagatacaattggaggacttcaaacaatgctctatatctttttttatctctatcttttatttttttaattgaatttctattgttttagaatgacttttagtagctaattttcttaaaggattattatgtgaactacttgagtttattttatggattaatgtaattcttcaatttcatcttcttctcttaattcaattctatgcaatctgtgttattttgcaattattgactgaccatctataattgttatcttgaatttgaatcaaacttctgaaaagtgagatttgaatatgctctgattgtatggatgcaaattgattaaggacgaagtctaattatttgtatgattttatgagttgctttgtttaatactttctttgtgattaaacttttttcatagaaactaggtggatgttacgtgtcgagccacgtattgttagttttatttaaagttttagttttttttttaaagattttgctaaataaagtaatatgattatttgaacgatttgttttataaaggtaagtgggtcaatgtatttggtaagtaaacatagatatgtagaaacttgaaaaactccaaagcgtttttagtattggcactttctttccactgatatgctatctttattgcatcttctctcaagtgagattcaattcttgagatgagattcccccaatagctgctcaacaaaaaaagataactcgtcatgacacttttgttttttttttaaatcaacatctctctactcttccaaagtttagaaaaatgcatgtatatgcttagttttatttatataatatagtatttaattttatacatgatgatataaagaagagtggtaagcactctctatttgtgtcaattcatgaaggaaaacatggtcagaactcctttgacttgtggttgaactggatagaaaatttggatgttttctccatgtcaactactgattgaaaaaaaaaaatagaacaaaaaaataaatcataacaacaccacagattacttgcactacatcgtgtatattttaagttatcttttgtcatttatgagatgttttaacttttgagcatttctaatatctaacaatatcaaaaccatatggcacttcactgaagatagtatagctaaaaccataaaaattgtaattaactattataattgcaattaccaaataatgaaacaaattaacaaaaaataaaccagagcaattttcatcctaatgttaatacaatacacacattcacatgatagtctcactaataattgttgaatttcaatagtgacattcatgttgattaacttttcaatttatcttcaactcttaaacaatgactattacaaaaatcatcacaaaataagataaatatttaagtttaccaatgtcttaaaatggaaaataaaattaacaaggttcattgccaagaacaacagttgctgaagagcattaaccctaagctatt

SEQ ID NO: 39628 - DNA, 1870 bp, Cannabis sativa
agctctaccttccagtattttatggttttgtcatttgtcgaaagaagaaacaaagcaccattagctgcctggcaccatctgatcttgttaatcttctcctcaatttccaaactcttgagatagtcaaactgattttgaacaaacaaaaaacaaaggagaaatcatcatacttcatattgtagcgagaaggaaaaatataatctgcaacaaagagttaacagcatattattcaactatagaaaaaaaaaatacctctggttcatgactttgaaactcagttttataacggaactcgggatgtctaccgattgcatactcggtcctctctagatctctccgatccgcagcatgctacataatatagattggtaatggcaatgaatattaaaccattgtaacaaacaaaacacaggagaaactgcaaaacttacatgtaaacaaaaaggtacaaagctaacgaacttacatcccgaacatctgttctttcaaacaaaacaacacggcctccacggtctccagtggccagatggtcaccagttctatcaaattcaatggcagatataatatcaactgcaaataccaaaaaaaaaaaaaaaataagtgagcagacttagaatccacaaaaacataaagcaactgtctttaaactcatctttcgagtaaacctgtacaatttcacctttttctttcaatgccactctagctatgaaacatactacgatgtttgacattatgtacagtgagaatctacatgacatacaggaccaagtaacttcattttgaagggaataaaaacacagtggtgaagtgaactgaaacctagagagataaaacattaactcaaagctagccttgtcagtgcctaaggtagtgttctaatatgtcattacccacttaagttcttcattagtgttccttaaacagtactcaatcccaacccaatatactaacatatatttttactataacattatataaatttatatatatacaacatacatagatatagatatagctatacaggtcagtgtaaagcaactttttcttctgagcaaaccaaatcaacaacacacgaaatcccttttatcaaaattcaattctcatattgatgtatctttttcattctatacatacacaaacttacacaccacgctaagaaaaacaaaagcaaaaaaaaaatcagattggtcagagacaaatgccattaaaccaatgaaacaaatgataatcgaaaacccaatcaccaaatgcctaatttgaatagaaacccaaaaccaaaataaatatatatatcagaatcgaaaaacgaaaagcaaagaaacaaaacaaacaaaattttaccttcctgaacttcttcgccagccgtacgttccccaaacacctgggagaacttccaatcgagtggcgccgatgcagccgaagccgataccccatctccgccgccaccgttcattggcaatttggtaaattaattacacactaaagtaacactttctctccgtacccaattgagaaaatgaaatagagagagaatcaatgcaggaagaatcgatctgaaattgaaattgagatcaccatgaaaatctgaaacaaactctctcaaagattaattcctcgtcaaatcttcattaaccagattaacgcagtgcctttcacttgttcatcgtcatcatcatcagaaattcataatcatcatctcttcaaacaaacaaagctacatactttttggtctcaacgaagaaattctctccactctctctctctcttctctctcttctgatctctctcttttttcgattttgttctctctttctctctctgctttctctctcttctctctattttaccttttgctttttttttttttttt

SEQ ID NO: 39629 - DNA, 2228 bp, Cannabis sativa
  modified_base (967)..(970): a, c, t, g, unknown or other
ttatttattaaattaaaaaatattgatttaaattacattaatagcaatttaacacgtaattgataccttagtatttttctttaaaattagataattgttataaattacatcaatgataaccaatacttttttatatgtcatcctatttagtgtaatttattatgtgactaaattagccctactatttataggggtattcatcaaattgctcaaatcatccgcaaccgtaaaaaaatacggtttaaattttttttgcagtgcggttgtagtttaaatttttcttaaactgtgcggtacgatgcagtttatgattttgcattattaatatgctgttcaaatcgcattgtactgcacattataaaaatactaatttttatatttataaaggttcaatatatgaacatccaacccaaagtccactaattattatattattgaaacttaaaattttcttttatatttattttcaagcattatggtatttctaacaaatgttgctcaagttttgttgtatttgtgatagtttaggtgatagttcaaaccacaaaaatcgtactgcactgcactattctttgtggtgcggtttcagtagtttttttagtttcgtagtacggctgcaatttaaaatattgaaaaaactacatatgcaggttaatttaaaaaaatagtcaagaatcaccacaaacactcccactatttaagtaggcaaatatgtatagatagctacttacaaacattgcaacaacaagatgatagttcgcattcatcatccttaattttaatgttaattagctaggtttacattaattatttttgattcatttccattgttctcaaataattcaagaatatatcttccctccaaaaacactttctcatgcacacccagaattgttgctcttgctatatatttatatatattcccccttccccaaagggccccattcaatctctctctctctctctnnnnctctctctctctctctctcaataacaacaacaataataatatataccatggaatataattaattaaaatattaattatttttaattaattaatgaaaatatataataaaatatcaagttggagagggggcaacttgttgtcaccatcgatcctgtccgtcatctctatatatactcacaacgcaccatcataattttctcacctcatcttatctttcctatgttgttattgttgttgttgtctaacaagtactactactagctacacccaccattaatactactagctagctatactacactctatatatatatatatatatataacccatttgttgttgattgtactaccaaaagctacttctataacacaacaacaaccttttcgccttataaaaaaatattccaaatacccaaaacagcctgctttttggtaattaattaattaattatcatatataattataataaaatgccttcaagatcactcaccgatgcctttaagtcccacccagtccatctccaccacaaacaccttgactttagctcattagatgagttgccggaatcatatgcatggccggaggagcaacccgccggcggtgagcggtggccagaggacatatctgtccctattgttgatttaaatgaccaaaatgcccttaaactcattggacatgcatgcaaaacttggggtgcctttcaagtcacaaaccatggaatcccatcacaacttcttcatgacattgaaaccgccggtcggaaccttttttctcttccggttagccaaaagctcaaggcggctcgctcacctgatggcgtatccggctacggcttggctagaatttcttctttttttccaaagcttatgtggtctgaaggcttcaccatcgttggttcaccccttgaacattttcgccagctttggccccaagattactccaaattctggtacttaattaattaatttgataactaattattaattaaaccccacacacacatttttactatatctcatgcactactacgtcttttttatttttaattttattaaaattttctttctttttttgggtggtgaatgaaagtgcgttttagcaccaaccaatttttttttttttttttaaaaaaataaataaatttaacattatgtatgcattattagtatttagcaaagattacaatgagagctatggacccacatagaagatacggtttgataatgtaaaaaaaaaatgtaaataattttttttttt

SEQ ID NO: 39630 - DNA, 2223 bp, Cannabis sativa
attggctcatttttcttattctaatcggttgtgtttccaacaaagaagatattgcaattaaactgtaggcttttatttcagctaattgctatgattaaaattacacaatttcttcaaatatatatgtactcataaaatatattttataatagataattatttaaaatttaattaaaaaaagaattaaaagtacactacattaaacttttaaaattatttcttcaaattaaagtttctttaaaatttattatgctctacattattattatattatttattgttctaaataatatttattattctattttaggttttaacttttgtggatatttatatacttgaaattaataaaacatattaaaataataaagaaagtgagattttgatagtatattaatttaaaaaaagttaatgtattttaagtaaggtaagagtttgaggtatagaataaagaaagtaaaattttggtgattggttttcaaaagattattctagatcgatacacgtttactatacatagcaatgtgcactaaatattagtcattcatatatttaagtgggatcatatcatttttaattgtgtgattaaaattaattaaatattattgtgtataagaagtagtgtgtgtaatttgagtctaatattcattttgataaatagagtagttagcccaacaaagtctataactaagtcacgaacgttcttgacaaagtaaaactaaccattatacaatatgcactcagtactctaggcatattgacgttggttgcattaattcgtactttctaaaagcctagtatgttgataccctgatattctaatttgatagctactgaaacatgcatgctgaatatgtgatatatgcatctattatactaaaattatctcaattccacaatcaagtgtgctggccaatctgagtggcaactgttgcttgatgattagaggccctaagtcataattacgtaaaattggtaagtaactcactaaatcacttttggatacttaaagtcaaaagtagatttttctctatcgataaatagcgtggcaatactttaaatatcaataaaatgtaaaaaccgaggcacccaaaaaccaccccaactggtagactgaatcccttaacggttcaccatttcttgagattctgcctgaacaaacagttaattgtctctacagaatcagttatctgtttacatgcagaaaatactaaaacctcaattctcacttcgattttaccctaacttaagcataacttccaaaacacctaatagcaacacaataaacataactcaaccagaagttacatcattaagtctctgaagaaaattttgccatagttgagcaagctttgagtttcaaaactctaacttgctcaatcctaactacaaccagccaaacatagctctatggcaatttttaacgcatcagaacgtaccccaaacctagcataagaaatagtcctattatcttgtatcaaaacgcaccccagaccttatcaagatgcttcacaataaactaaaaaaaattcttgatctgatggtagagctaacacaggagctgtgatcaatcattgctttagctcttcaaacttgcttcacaatggtctgttcatataaatcattaattcttattgattaagtctgttaagggcattgaaatcttggaaaccccttctacaaatcggcgatagtacccagctaaacccaaaaaacctctgactttagtaactttcattggccttgaccaatcccttacgaattcaatctttctcggatcaatcatgatcccatctttactaacaatgttccctaggaaggacacttaggatagccaaaattcatacttcttaaatttggcataaagtttatgctctcatagtcattaatgtaaaatcattcgtcgatactgctcatgctgtgcttctaattgagagtacacaaggatatcctcgataaatactataacacatatattgaggaaatccttgaatgccctattcattagatccataaaagttgtgagcattggttagtccaaaagacacaaccaaaaattcataatggtcatacctagtacgaaagatagtctttgggatgtcttcctcttagattctcaactgatgatagcttgctaagatcaatcttagagaagattatctttccctaaagctcatcgaataaatcatcaatcctagatagaggatacttgttcttaattgt

SEQ ID NO: 39631 - DNA, 1718 bp, Cannabis sativa
ttttattttaatattatatgtatatttattataaataatataagagagtagattaattgggaaaagagagaagagattttatatttaaataataatattgcttgataatccacttaattagatcatgttaattcttaatttagttaggggtttaattattataacaataaggagcatattattgctcatccatgtgcatccaatttttgactcataaaaatcaatcataagttcctcagtctcatcttctatcttttccaccagaaccttcctttttaattatccatttatttttatattctctattttgttttttcttcttaaataataataataaaaacaaaaaccaaaccctcttttctctaaatatatttagattataaaaatgtaagagaaagtaagtagtgtgatgttgggttgcatgtgatgagtgaaaaacatttaggtttctcttttgaagaaaacaagattactaggcaattaattaattaagtaattaatttgattaatgatatatatttataggctcttaacaaaatataccaaacttaattaattagtcttggccttttgaccaaatgtctcgttctcacattgtccattcactcccattgttttggtttctgtattaaaccttataataatgtaaattgtgagtaaatgtaacgaatcaattctatactacatgttccaaattcaatatatatgtatattttgccacctacctaaactaaaaggttatgttcataaaagttcggcttaaaaatgcattggttaatttatatctagtctttttgaaagtttgatttgactacattgatcacactaatcactataatataatatagtattaaatgaatagttacataacacgtataatttagaaaaatggtaaaaggtactaatttagtatccttgtaaaaaaaaaaaaaattcttttagtaataacattttaatcgccatagaaaatttttgtaattaaatgtgacttttagtcaaaaaaaaattattcgtgactaaataatatggtatttagatataaattgtcataaatttaattttagtcataacaagtattgtaatcaaaaatacatttagtcacaacaaattataattttagtgactaatagttttagccacgtactttttagttataatataagaataataatttataattagtcacaagtaatgtcttatgtgttaatattgctattagttcaaataaatattgagtcttatataatttaatgtaattacttttagtactaactaatcacaaaataatatgttctataatttaagaacataattaattactaattaatactagctagttagtgagggaatggtcggagatctacaaagcttctgaagcaattttgtaaatgtctcaactagtcctagtacgacataattcaagaagtgacctcaattggaatacaaaaatatttttataatatatatatagtatatagtagtgcacatgcacacgttgatcatagtaaggaaaaatagtagcaggtaggggagtttgattcatccaaagcaagaaaataaatagtgttatataggggtcaaaaacctactactatacaagactttaagactcctagtcccactccagatctaaaggaagcttggtcccctcctcccccggattggattaagctgaattgtgatgttaaggtgggatataatagtatgtgcattgctgt

SEQ ID NO: 39632 - DNA, 2746 bp, Cannabis sativa
ctattttgattagtaatcccgattaggggattagagtttcataagtattttgggtagcgtgcctgattatttagggcgttacaagtttgctctcatacttctaatctacagtgaccaagaggtacacaacatcctgtgagcagaatcccttgagaccaagccaactcaaggtaggatggctgcacacaaggagttaccaggcctgtcaacaaataggtcgaggataaaaattctttccaagagaattactccctgaagaatattccttgacagtaaatcccctgcagcaagcatgttcagaccaagctgagaagctttacaccatttacaagataacagtaaaggtgcaacaagtccggagagtatgacaagaacttgaagtcaaaacttctaccaaaacactaaaatagggacatataggttagtactctcactagccaacttgtcaattaagttcctctaactattcatcgttcgggaacacataaaagcgctactacccatggctttcttagcgtggtctcccactattcttcaacgatggcctctgcttcgttaagccgcgcaggggtagccactatgtgatttcaaaagcaaaaactaagctctaagcttttttacacgttagatcaaccgtgtctaaactaagctctaagcatactatggacaccaccccaaggaagaacccatgcaaagtatgtaaaacttggtgaatatcaagtgaccaagagacttgcctacatggtcgcttgaggggtgcccataccgtacaacgaatcgaactggcacaatgaacttacgtagagaaattttaaggcttaaaataagctactaaacctacttctaagtcgtgtaggcatacttcagcttggcataataaatccacagccttatatgtcaaggccattagaagatagtcaggacgatcatatgttcgtcgtagatggatctaaggctaaataatagtagtgtttgaaaacagaaggcctataggccaaagcaagagcatgaaagccttgaggtcggatatgagatcggttcgcatgcatgaggccaaggtcctgctagaactgcatagccagaaaagaactagacagagctcctgtaagggccacgtaccaggctatggctaaggcagagttccttataagaaccaagccatgttgagtcttaagttgagcattcgactgtaatagactcaccattaagcttcatatagagtttctaatgaaactacgtatgaggctaaggttatatatgcctatagagccaaactcttaccgaagtcacatgaggacagaaaactgtctacccacttggaaccaaggcccatgccagccaaggttctcaagccatgaaagggtcggccagagtcccaagactaagccaaaaactggccaaggtcaccaaatccaggcttaaataggcaagctttatagggtaaatccctaacgatggccaactcccattattaagccttagggccggccatgtctcaagcaagacctcctagcccagacaaggtaagttttgaatcccaatgtgtgtttttctttcaaaactcgaatatgtgccttgtattctttataactcaaagagtcaagaatcataacgaaggctaaaatcgaatcttttctatcaaaaagtcatacattccaaaactatcatgaggatcaatataccaaagagattacaaactaacatgaatcaaaaagtttccaaaagcttaaaaagcttgaaacttgttaatggtaggtacaaagaagaaataccccagaagagaagatgagatgtatatagagagagaagatgaaagatccaaaagcatgccaagttaaaggccaattctttgctagataaggctgctcaacaaagactactacagaaaagatgatggctagaaagtccctatctgaccagacgttcaaacagggacatgggggcaaatgttatcccaaattttttccacctgacgtggcacgcccacgtaagccaatgatagagtacatgtgtagtacagacccaacaatagtagaatagagcctcgatacaagatatagaaaaaacgtcaagcaacaaccaaagggagtgaagtgaggcctcaaggaactgtaccgacatccttggctagccaagaggagcctatacgccggctaggaactgtgcacgagctgtctgaccaagaagtgacttccagacccaaggagcctccgttcgactaagggaacctgacctcttcaagaaaaattttacaaagctatcctcaacttgcaaaaggttggccttctcttggcagtgctatagtgacctgccagatccctgcagtccttgtcctgccaagtcctggcaggaccacgactgaccaagattttcgtggctggaccatggccaactagacttccctgtaggtctatgggcggccaagattgacctatcaggacactatgtgcagcccaaaacgtggaaactaggcatgggctgtgaattgggccctaaaagcctaatagaatggctgaatactatctagattcaagggtactttagtcttatataattatataacaaactatgtaaatatctaggatgtaaagttgtcatatagggtttaagcctcctatataaaggtcttaaccctagcctagaaatctaagtcacttagcctcctaatagctctaagtatgaagccatattctctcctctctctctctctcccttattcacgcccaatagggctctctctctctct

SEQ ID NO: 39633 - DNA, 2053 bp, Cannabis sativa
ttaccctttatgaaaacattttactaatcaatgtagcttttgagtcagatcccatgaaggtacgcagctcatcaaaaggttgttattgccttttaatgatgaaataaatacaacattaaatcagaaatattaaatttcattaagaatttgtatggtaattttgacaaaccataatgcaaaatacatcatgaaattaaattatatacacaccactttttagtaaatttttttttttatcacatatggggtttataaaattgtgcaattcttttttaaacaaaagttactttttgattatagctattaatttatggggtgtgataggaaatgagagttgaatcaatatataacaggaataagtttgacataagtttcttcttcgaaataaaatgaaaacaaaaacttaatggagccttaaaaatattggacaagaacattaaaaaagttgaaaggaaagaatgaccccaaattatagtaatttatgatgagatttaatattggtccacaactttttggtgatagagacatatgattaggagacaaaaagaatgtttcggctgttaatatatatttgtttatatatatacataaatgatatgcatgtaatcaacgacacttatttttttttatgaactcttttctattatatcacttttatttatttataaatacgtgtggttactaattaaaatttatatataatttttttcgatttttttttttcaacatagcgactgctctatctcacctttatgtggttccgctcctgcatataatattgaaaaacgttcttcttttttattttttattttgattatcaaagtagaggatttgaatataaaattttgtctacgtgagcctaagtgtgaaatcattaaactaagactatagctctagtacggtacggtcaatctaatgatattttattttctcatctaattaacttagggcaatggatcagaaaaaccatttcaataaaaataatgtcttttttttcttttcttttttttttcttcataaagtttagttggaccacctgcaattgattcaattttgttttattttcagtaaaagccaaagtctctcatttcaactatatgaagtgactaactttaagatatattatatatacgtctacaaagatattaatatatatatacgtatttatacacatacatttaatgtatcatggtgtttaacatttgtgttgttcgtggggtattatgagccacttcatcgtgttgtgtcatttgtcatgtatatatatatatatacatataagtgagttttgtctttgtctagtctatagggcatatttttaactactgtttctatttattgtcttagtgatcttttgtgtctgaaaagaaaaatttgcagagaaaataattaagatcattataggtgtgggagagatgggaagagcaccatgttgtgagaagttgggtttaaaaaaaggaagatggacagctgaagaagatcaagtgttgaccaactacattcaaactcatggtgaaggctcttggagatctttacccaaaaatgcaggtaccatatatatatatatatatgaatatatactacattttataccaacaaaacatataataaaatctatgaatatttgactatatattattatttaaaaaacagggttgcttaggtgtggaaagagttgtagattgagatggataaactatctgagggctgacttgaaaaggggtaatattacttcagaagaagaggaaaccattgtcaacttacataatgctcttggtaataggtgtgttttttctcttccaattattgcttatatatatatttgaaaatttttaggtaacaacatcacttttacatctattgtacggacatttcttattttcattatattgaaaaaattgtaaactatcaaggtatacattatatttataattggtctgttttttgagattgtttgagtaatttaaagtgccgaaaatatgattcaaatagttagtttcgctgatattttgttttattttatagaggcgcaactaactgttttgaacatgcc

SEQ ID NO: 39634 - DNA, 2341 bp, Cannabis sativa
  modified_base (2275)..(2294): a, c, t, g, unknown or other
aaaataatttccaacactttccccacggactaatggctcttatacacaggtacactagtttggccacttcctgggttggtgactggcctttcaaaccaacttaagtgttcccaatgtgttttgttctaactcacacgattcttgagaaaacttcatgaatgaatcaccgcaggtcaaggacacttaaccatggagttctttcgagatgggatacttaaaaacaatatgcaccttgtaaatataggtagtaccaatcaatccattcaagtcccctaaaactatgtagtcccctacctacatattctcaaaatcatcacatacgaccttcccccagacgatgtgggattgtttagctcccagtcttttccttatagatcacggggctctgactttcatagtttgactcatgccccctttgatctcattttctcccttgttatgaataaatcaacttacataatcgtctccttcagttcacctagaattccaaataatacttataaattgtcccaccttcactaacactcgatcacttctaaacaaaaagattattttctctgtatcaattaaatggatgccacatttagctactcatgtcctatattccacttgggaataccagcaaatttaactcttattgtcatttctctaatcattctaccttgttagatgagctaccactaaatagcatacatccattgtccattcagattttgtttatgtctctaattgaacgtacaatgtttaacatcaatatcaagcaaaatagcaaatataatattgcccataaaattctaatctgagtcggtcgaaggaccgataacctatcccccttaagtcataactgacactttggtacggactataaactcttctcctttaacatcagtctttgttaaacgtaggcaggttcttttcaggatagggtctacgttggcataaattgagtcttttacatcctggacactcaggatagggtcaccatttcttgttctcaccctgaccgttatcctggtcaccatagaaccttttgttatgtcccataattggtggtttatttagttttcacttcctaatctgctcgtaagttagttccatatatttcaccacatctagtggcacaacaagaagtgtcggtggtataagaatagacacaagatgagcctattgttctttcagatcttggatctgttccctttgttgtctaatcgtatcctacatagcagtgattacttgttcccaatgttgaggtagtaaaggattttcttctttactatctatcccgagcccagacagcttgctaatcaaactggttgattgcccttgctgcaaaacttatcacacatttaatccacctcttccaaccatgtagaacacagacagataccaatatcaatatgtgtatacctttcacatattcttcgcataatcatcactatgctatttttcccaacatactttataatagtctaggcaagtaatctaatagcaaataatataaatacttactatatcacaagttgatcttcttcgcaataaatgtacatatttgaccaatcttctggacctttaaaatcatggcttctttaatgctaagttaatgccctatcccatagggacgccacgtgtgtaattttataaactagtttagtattaaaaaagtaattaattattaaaatatgtgataatattaaaaactttactaaaataaaacactaaaaaggacatcgcaacgacaataaaactgtgttacggggattcctgttgtaaaggttttacaaaaaggttagatacgacaataattcaaaatactaaatcaaaagacatggaagatacagaccaaaaataactcctaacaagttgacacacatgccaggaaggtcaatataaacattactggggaagactttcagcttatggttgatcttgcttttctttgcctttacctgcaccaccgagcacccgtcaaagactcaacaagaaaagtaatcaaagataatacgtggaataaccaattattcatctcactattatcaaatgaccaagcaataacataaccagccatatgcatgaaaataaaagcaatcatatattacgttacctaatcaagaaagcccgtatcataatctggcatcatatataatgccacaaaatcaactaatcaggtgagcccgtgccataatctagcaccaatgtatcacatcgtctaactagatgagcctgtgccacaacttggcagtaatatattgttaaattttataccctaaataaaacnnnnnnnnnnnnnnnnnnnnttacttattaataaagatcagaactaacatttaatgttgcatggttc

SEQ ID NO: 39635 - DNA, 2489 bp, Cannabis sativa
  modified_base (2437)..(2446): a, c, t, g, unknown or other
gacccaattgactcccaagggcatcaagtatttgtctgccctgttcgttttctacagcacccagaagtggggtatgccatccccgcacgaggttagctggtttttcaacttgaagtccactcccaagcagggcaggccgggatacttctatttttcccagcaagactttaagtggttgacgggcatcggggacaaggccgtgagaaaaatcaagaattttgacgagtattacatggtggaaggtatgggcaccacctatactcggttccagtagatccctatatattttagtccacccttcacactagctctcagggatagggctcaaagaatcactcagctgccgagtgtttcctggaatatcactttgttgacctcaaaggataaatttgtggagtacgggctcaacccaaaggatttcattccccagcctgtgaagaagaagaagaggaaatccagtgctggtcgggctgagggagcctagtaaagagtatgctcaggagcactttgagcaggatgacaaggttgaggaagagcaggagatccactaagaaggaagaagaagcttccgacccagcacatgcctatcgaacatataattcagatcagggagcctagtaaacctactcggctatccgctcctgtagtaggaaagggaaagccgtcctggaggagtaaggagacttgtgagatgatgatgatccaccaggtcttgcccgggcagatgcttctaccaatgtgcaagatactccatcttgcctttaactttcttgattattatgctttcatatttctcatgcttttccctaaccatgtttgtttcatttcgtgcagacatgtctgaaaaaatgcttgaaactctgaagaagagagtggggggaagctcgggcttatcttctccggccaagaagtccaggggcggcgagacaaccccatctagagagaaagcgccgaccgaagcagttattgatctctccgaggaaccaaccgtcgtggacccttttgccccaaaaatgactaagtccaaagactctcgaggagggagctcggacaggaaagagcagtcgaaaggcggaaaggagcagatcagggcccctgccttacctctgatgctgcgtccagagactaaaagaggcaaagatattctcattcactacatgactcggtcggtccctgaggtgaatgagcaattggccggagctgacaatgacctttctctggagctggtgatgggaggtgtcttgaaggagtttacgagggtaagtctttcctgacagtttcctcttatccttctttacttagctcagattttaaatttatttctctgtgcagaccggtctgaagatggcttatgcttattcctgagctaagtcggctgcctctaagaacgctgccatgtccaacaccatgcggccagaagtggacttggcaaggaaggattcgaatgaagtcagggttcaacttggagtcgaccgaatggaactgggagaagtcaacaagaaaattcttactgccaagaagaaggtggtcgagctgactaaagatctctaggcttctgatcaagtttaagcttccattgcctccttgtccaaagaagtgactagcctccaagaagaaagggaggttcttcgagatgtcttccacaggttggaagtagagaagaagtctaacgaggaggagcttaaagttgaggttgagaagtataagtcagaggccgaggagcagagagcggaggtggtgaggcttggaggaaggcaaatgctatagagacagcgggtctcgaagattttttatgacatctggaagggctaatcctaaggaaaactttgattacttgggcgattccaaagacatgtttctcgagtattgtgcttctcagatggcttacggagaatccaaggcgaccttttatacctccggtctggatgttgacatgtcccctgctcaaaaaactgatcctccaactccaaccggccaagaacacccgtacaaagagcctgggactccagtcatttgaatactccttatgtctatctttttttttaatatctgtctagccgtaagcccttttttaagacaaagtaaccggccaagcggtcttcaaacattgaattttttttccatttttcagacgacgggctgaccgagcagcctttaatctcggttttacatgctttgttatctttaatgaatttcattctgtgtttataatcatcatgcaactgtgtttgttttatttttaccaaaaatactttgtacaggtataggttccccccaagtgactgagcagacttatgactcttggtcacttataattttttgcaagtatgctcttttgtttgttctgggttttgggtttgaccaaaccttttgtacgcatcggatggtaacttaacatcatgctactaaattcgactcaatttgaattttgaaatannnnnnnnnnttcatttattgatcgaaaatgtgtttgttaccgtagtaactta

SEQ ID NO: 39636 - DNA, 2342 bp, Cannabis sativa
tatgtctagttgattcccaaggcatgttttgacccttttgcactaagacagtcccaaaaattgaaacctagttagaaaagtcaacatgggcgcctggtgaaaccctaggtgcccgtgttgacttttgggttgcaagttcgtgtaacttcagctctcaggccttggattaggtttctccacgtcttcatggtatagaatactgaaagatagtgagttggatacaagttgggcgtggggataggatcccctcccagatcaactgctatgacttgggtctactcaactttatgatgtcgtccttcatgtcacatgttaaacattgatgtacacgtcactaggaaaagtttccaggttaacattttcccccaagtcaactttacacatgtgtggctagacaaggttactcgacaaagactactacaaacaagaaaagagctagaaagttcatatccgaccagaagtttgaacaaggacttgggggaaaaatgtaatcccaaactttctccacctgacgtgacatgtccacgtaagtcaagacatagtacattttggaatacagcctcgccagtagcagttcaaagtctccttacaaaggtatggcaatagtatcaagcagcaagcgtaaggagttaagcaagtcgtcaaggagctgtaccaccatatatgaccagccaaggggagtctataggccgaccaagatgagcttgtatggccgaccagggtttgagcacaaactggtcggccaaaagttgactttcagaccaatgaagggttaggtggcatttggttggaggtaatgaaatgaaatagaataggaaagaaacaatttttattctattcctttgtttggttgcatattaaagtattggaatgtcattctaatggaatgagctttccactattttggtggaatgactatttcattttgaaatggaatgaaagaccattccaatgcatgatgagaaaaaatttaataatttttttaaaacattttaaattttattccattccatttctattcctattcccattcttattcttattcttatgtttttattcattccaaccaaacctcaccttaatgttcaaagggttcaatctaatactaacactaaatgtgacattaatactatatttgcgtgggcgtgtgtttttttttttttttttgtactattattctttactggtattctggttagtatttacgaaaacttagtttatagttacataatatctatttcagtatcaattttaatatttcgcatttaattaactaattaatttaaataccaaattttaaacatatctatatttcatgaaggatagacaattgttgcatatcgcaagaataatatattataattacttgagaactaaattaaaatgtattttgacattaattatatatgagatggtaatatttaattattactattgctctattattaatggtagccttcaatcaaattcacccaacttattttttatgttgccccacatacatcatgcaccttgtctttgtctacttgggcttgtatattgtttaaatttcccagccagtccaatcgatcacttgattaattgctcactatatattaagagcattgcgaagtatcattttgcgattggctgcatttaattatatgagactccatacttagttaaactaataatttttcatgtattaattatcattataatttcatatcacagcagtcatttctacttatagtttatattaagaggatatgtattaagactttatgagattatgcaaatgatgataatatctttgtcgatcgatccctgtcactgggacctggcggcatatggctacacaacccagtaaataagttccatcccaatttacagacctttttttttacctgaaaacttattataagtgacttatcaactcagatcttatattcttattacttactctttcatcaagtattagcgttaataaaatcacatacgtacgtatatatgctggatagtgtacagaaagtgaccaatatttgatcaaaatccgtacatttggttagtacaaataaatacagatgaaatatatacaaaagaacttttatgtataatccattaaaatactgagaggctgtgttttcagcttttttatttttcataattgtgtttttaaaagtaaaaacaaaaaacaagttttatcattttaaaaattcaatagtgtttgacttaagtttttaaaattattttagattttgttttactaaaaaaataatattctacaccatactatgacataaacccatccaactccagacccagacccaaacccgaaccccagcccgaacacagacccggac

SEQ ID NO: 39637 - DNA, 1043 bp, Cannabis sativa
caatgggtgctatttatatgaatttatttatcatagttatttttgtaattatttttgatattacgtatagaattgaaaatttcgtaaattcccctaaaattatggtgctggcccaattttcatttgtgtccaaaacacacttctctaagttctcttagcccaatacatcaaaaaatatttattttcaaataaaatttttaatcatttaaatatgtttattcaaattttagtaatgacactccaatttccagcagtattaaaatctaattatacttttagaaaaaaaaaagtaatttttttttcttttttgaaacataaaataaaaataattaagtcttccttgtctcctaaaattatattgattattgcaacaacatagtaattggttcaaaatattaaccgttatattattactttttttttttttataaaaaaatcatgtctttgtttcataaagttgtaatgttttgcagaaaggacgagcacaatagaattttattttataaaaatatgtatttacggctagtttgtaacgtgttataggcataaatttaccctccccgcgagaaagacttgtctatagagaactcgctgtattgaaggtaccttgcaatattatagtactcgcagtaccgaaagaaaggatctcgcaatattaacttaaagagacctcgctatattaaggaaggcacacatcacatatttggtgaactcgcagtatcaataggaaaaggcgcaaatacatagaccaatcaacggaagtcaacagtcaagcattcaaggagcattcattacaaacgttacacatatttataaccgttgtaatcaatttgattaataagcctattattgttattattttgtaacggcctcattatggccattatttgtaactgatgcctactacctataagtaggggcttctccctccattcaaagggtgctgggctgaataaagaaacagagccagagtactcttttcaacagtggattaggcaggccgagcccgaagctcctgctgaaccactatatttttctgtgtc

SEQ ID NO: 39638 - DNA, 1623 bp, Cannabis sativa
aattttttttttttctaatttttaaaataaaaaacacaataatttttttaaaaactttataaatatctaacatctaagtttcaaaaaaaaaattaaaaattaaaaatctatctatctatatatatatacaattaaaaaatatatttatcttttttttttttttttgatttaagcgtttatatctatctatctatatatctatatagctattttatttatcttaacaatggtagtttttttatatggtgattggtgccttgttattttgtatggtaatattgttctgttatgttagtgttcattaattatagtcgttaaaattttattttttggaggtgacaaaaatttaatgagttcgaacaagatctctttttgagtattggagttggagataagttttttttttatcttatctattacattttctttttttcattggtataatatgtttttactagttttttttttccttggttttgtaggtaggttcacatattagtagaaattgaacttatgtagatttagtggttgtactggattagtctcttccattgggctacctattaaatatttgagcaatttgcgccgaaaactttttatgttttaacttttatacacttaaccctcttatctttttttggtggcaaaacccccttatgttttaacttttatacacttaacccccttatcttttttttttttggcaaaacccctttatattttagtttttatacacttaacccccttatctttttttttgtggcaaaacccccttatgtttatttttctttgcaaatttgacacaccagttaaatattacccttatctttttttttttgttgtgacaaaacccccttatgtgtacatgtaacggtaaaatctcgaagtcgatacagtagttatccagttagtatttaacggtaatatctaactaaaactttaaatttgttctctcaaagaaaaaaaaaactttaaatttgcaaagaaaagtaaacttaagagggttttgtcaccaaaaagataaggaggttaagtgtattaaaactaaaatataaggggggtttaccacaaaaaaaaaatataagagggttaagtgtattaaaactaaaacataaggggcttctaccacaaaaaaaaaaaagaaaaaaaaaagataagggggttaagtgtataaagattaaaacataagggggttttgccgcaaattactctaaatattttgactctggttgattatctttgtatactgtgttttctaggagatccctcattctctctttttgttttgaagtatgatctttcctaaattttattgctagtttgctatctaattttcctaagacatctttaatttatgtttattgtacacatgaatcagcagttcgtgcacttgtaaactttttacgacattttatgtcttagaaacttttttatggtatattgagtttgatatatttttgtatcacttatttagaaagctcatattttatatttgggtatgtttttattgtgacattttaattttattccattttaagcaaaatttagcattagtattagggttgagatgcaaaatggtcttaaatttggtaactaagttagtaaatgtccactttttaaaaa

SEQ ID NO: 39639 - DNA, 3474 bp, Cannabis sativa
agtttgataaaaggaagaaaattttgaagagtttgcttagaaaaaccattccaagtttggttgcaggccgaagaaaactttataaaaagggccaaacaaaatgcattcacgcaatacgatatggaggttgccactgcagctccacggtttccccactcaaatttaagaaccaaaatccaacaacaaagaatgtgcagggcagatgaaaatacagagctcaacactatggaataaactatatagtaaatagtgtccgacttcattaaatatctcatgatcctgttgcatagctctcaaaattggaaatgcatttgaccatagaacagatatcaaaacacttgtagccaagtgaataatattgttccgctccaaatagttgcccacataaagtgtccaatgcattggtggatcccactagatcaaataattttcatgtaacttaaatattttaaaataattaatgcacacaaattaagaatgaagttaataatttaatttaccaataagtaataatcagtggctgaagcaaatgtagttgctaatgatgtaccagctaaacccaacttttcatcattgtgcccaatgaacattagtgatatcataagtagagagagagagtacggtgtatacgatatatcgagtttttctttgttcttcgagtggatttcaatttgggtgaaagtggatgtttgagaccacttatgtacgaccaaaggaagtcttttaacgttatataagggtcggaggtcactgtttcgagtttcgaaagtacgacttgaaaccactataagaatctattcttttgtaagcgcattatagttaatgcgtcccagtataattgtcaagatagacgtgaattgaaaattcgactgcaattgtgtgtgaaagtgacattaattttgtaggcacttgaagtgtgcttgtaaaactcaaagtatttttccagacatgttgaaggcgtctgcaatagaaataatacagagaagtttgtcaaatctccatggcacaaaataactctaacattgtagttgtcgctgttgtcgttgcgtctccaccgccgtcgtcactgcttcttcaccgtcattgttgctgcatccaattatcctctagtacaaccttttcttctccgtcgccatcgttgtttactcctaatttgttgatcaaaatctttttatttgttgattgtcattaaattttggattggagcttctagaaaggtttataattcaatccttatcttatctgagtttattttcagtatttgaacattcgattttttcattttgtagagaatattacacttcctgatcataagatttttacttgagagaatttggagaaaatggcttacgaatttatcagaaatgcatgaacctagtattgatacttcataagctcagctacgagatctttcaactttggagagcaagtttctcttcggctacgatggtcagaagctatggattatgttggaggtataagaaaatgttgtgcttttatgtttatgtggttaattttcaggtgagttatctatgtttcaagattttcttttgctgtggatcctaaagctcacaagatcaatttttttggtaagctttccaatgtcttaatttcactttcacaagcctaaagcttgagctttattccaatttatgtataaatttcttgcctgaatgattgaaccaactcagtgattggtccaacaacctcttcccatataagtgtcaatgtagagtaaataatagtaattttctttcataaaagtgtcaatatagagtcaattaaacatttttattatatatgtatttcagtttaattttgaaattcgtttggtactaatggataatttatgttaatcttcactagtgtactttgtgatattgtttaggagaagagacaaagttatgaattagtattgaagcttgaacaaaataaagatacatattaagaaatgtatttgacagaggatatgtatggatgaagaagagaaagataaagatagtaacttttggatatatattcagtttttattggtttcgggattattgatgtttaaaggctttaatttatgaaattattaatggttgaaatttgttgtcaatggtactttgtttgctgttacccaagcttggtctgatggagcttctcctcctaatccaactttcatttcttttggtgagccatcttccatggaaacttgctttcctcagctcttttgttaatctcttttctattttattattctcttctacttgtattgtaggtgtgggatcacaaaggtggttgtttctaattctattacattaatttatcttcctttgctcacttcaattcaataatataatgttttttaatcaaaatacaaagacattacttttctattgtacatgtttttataaagtttttacttttcacaatgtggtactattgcagtaagttaacaacacaaaactaaaatagcttgtactgtttagtgttagtgttggtcaaatttgatttttctatgtttcaatgatattttgcccacttaccataattattattgagaagatgataattttatttttatactttgcagacttggtgagcaaattttgactctgagacatattaaagaattggggttgaaagatatattcgagaaatcaaggcaatattttagaaatagaagtgaaatatcatatgtttagtgatacccatttcttataatgttcatgtattttttcttttgttgaattaatgttcataatttttttcttctaattaatgttgatatataatatttatgtatggattgatgttcagatcaatatttataaaattacatgagttttatactaattgattttaatatcttaaattataaatataataaaaaaaattattaatttaatattttgaaattgctgcaaaaataataatttagtaaaaattaatattgtgcctattttgcaggcgcgtgtagtgtgtcagcaaaaaagttgtaatgtttgcagggacacaatatgcatctgcgaaagtattaaacttttctgtacgcttttggcttaatgcgcctaaactattttttccagtcgcagaattcaaggcgcttgaggacttgcgactgaaaaaattttacaggcgtattcgttgatttatgcaggcgcaaaagtgcgcctctaaaaatattatttcttgtagtgagcctacacaaattcgaacgtgtttaagcttgttcttgagtcaatggagattagatatgagtttatgggaccctaagggttgttttttgacgtaagaaaatgagctttaacgtccaaacgaaaaactaagattttgactccattaaagacggtacaccgccaatgaaggagaccactttgatcgatctgccaacttgggcctcttttctttggttgatcttgatcattttgaggtcctgagcactgtggagagcttccccaatcaaaaagacgcgtcaagagcaatcgg

SEQ ID NO: 39640 - DNA, 5299 bp, Cannabis sativa
  modified_base (1131)..(1131): a, c, t, g, unknown or other
aataataataataatatgtaattaaattaacgaagaaataaaatgctcactagaattctcattttctttctcttaaaatgacatttggcaattttttttgacatagtgattagaaccacctatgaatttacaatgcagatatccacaaaccgtgcagaaaactcctcaaactaggataactcatcgtctaaccgaagggcatacttgtcaaaccatgaaactgctaaaataagcgagcaacatgaaacaaactgcccccggaaatttagacaataaagctataacgtcctcaaacatcacaccaaaatagctagagcttcaacttgtaacatatcaaactgctctaccaaatatctacaaaataaaagaaaaagaaaagtgaattacccctaatgatgatattaaaaactaataaaaaaatcttaacagtaaaaagatgacaactctcaaataaattatatttaacaacttatcagcaaaatctctgtaatagtaggccctccacaaaatcgacctacaaaagaacaataaattataaaactctattactacacaatttaataaaaatatgtaatgtgaataaagattgtaaactcaattcatataataatattaagacttgaaacactaatctgtcaaatttaaaaagtcgtttgcggaagccatgaataccaaatatgaaacatttctcttaccattgatcatactacaaatctatcctaaacaattagggataagccataaagatagcacaaaagccatagaagacatccaaaccataacaagaaaatggtgcaaaaacaaatgctaataaagtactaataaaagtataaaaataaaataaatatttaaagtaaatataaataatctcaaaaatttaaattgtataaacaatactaaaaatttctaattataactatcatttaaaactttaatttgatttgtaataataactttaatttgatttaccataaaattttaaagttgatacaatagagagaaacctggtataaaaataattttaaaaataaacaacaataaagaaaggtaaataatatttaaaataattaagaagtaaataataaaaaccgtttttgtaaaataactaaaattaaaaaattaacatatatngttatataattaccatttaaaatttttttgaaaagtcaaattaataaacacaaaaccccaaaaagagataaatacaattataaaattaaaggacatactaaaattaaggaaattaaagtaataaatcttttattataaatgccaaactaaaataaaggaaatcaaaataaaattgtaataattaatagatacaaaatatacgccaaaaacctcaatttattgtgccaccaccattagcctcggattgatgctccacaccgccttcgtctcctctgtcatttgctttattgattgtctttgatgaattcaaacttttggctaacaaaaggtggtattcttattgtcagtgataagttgagaatagaaaaagcaaaagaaactaattcatatgttaacgataataaacaatcacttatattagaattttgataaataacactcattagattcaaataaacaataacaacaataataataagcatataaaatctatatttaatatatatatacacagaaaaagaatcagagaaactttaagagagttattgtcgctaaacatatctgtgtgataggtggtagacttatcggaattgaccttgtggtcatgcgaatgacaatggacaaatgtaccatggcgtcttcggaaacccaactagaaggactcttgacaaattttgggtgcgggtacgacggcgttttcgggtcctgtgactccatgttaatattatcttttggcaatttaaatgtattacaaaaatatacatttggcagtctgcatgtaattacaaactaaaatttggcattcggagccagagctaaattttaggggggccaaaaatatatttatacatactggtatatctaatttaatatgagtacttaattaaaaaaaaacatgctggctagtattatttgatttaaaaatgatacctagctattgggtaagtattttaatactgttttttaataagaaaaaatgatttttattaacttttaattttcataaaaaaaaaaagagaaatattaaaaatcactataagtgcctaacatctttcttgatgtctattggtgtaattaagtatcgagtctcttattacttaaaaaaaataacttttagggaatatcgctaaccaatcgtgtggcatcacttataaaaggtgttggtcatcactagtgtccaatagtaatgccttaaaaataataataataatgtggattgttttttaagaaaaaaatattaagaggtatcttaaggtgccaaacactacaagacgttgcatgatgctattgatgcattttaatattgagtcttataaattttaatttaataaatgatgggaaactgacaactaattatatgacactacaatagtatggtgttaggttctttaaaataccaaataacaataactaattttatatttttttatatatattattacataaaaattttttatatatatataattagctgataataaatgaaaatcaatcaatcacttcaaaaaaaaaaaaaaaaactcacttttatttatttttttttaaaaagatactatttacttttactatatattatataatatatagcctatagatatactattaaacaatatttcaaatttctttgaaaacactttacattcattatgatagttaattaagagtggacacgtagtataacattttatagaaataaaactacatagtaaaattaatgagaacacgatgtattttgggctgggggccaaggccaccttagactatcacttacctctgcccctagcaacatgcatgtacttatagcatattcaaatgataaatagtatgttttattttcttaaaaaaatacatatacatataattactattttttaatccaaacttttcatttgcttagaaaaaaaaaaagaactccacatttctagtaaacagagttttatctaagctgcttcaagatgacaatgcaaattaaagtctttactaattcattgaaattattccatttaccacacaacaaaaaaaaaagtactattatacaaaaaaaaaaaaaaaatctctctcaatattgttcattttcctttttcttattaattattctgtgtggagttttccttcattagtagtgtatagaacacctttacgatatggttcatactctagctaataacttcacaagtaaattttacacctacatttattttgcatgcaatttttttccatctcataatagctttaagaattgattactccaaagtaattggacaaccaaagtaattgtagttgaaaaattactctccacgccgcgccaatccaaaaattctgtcaaatatcagaatttgcttttaattgatccataggtaaaaataattaatatatttttattttagttaatgcctattaatatttattgacctatattatatatataattttgatagagaaaccatatggaaacaactatttatcaagctgatattcaagccttgcatagacattgcacatgacaaaagcatatgcaatttctaatgctaatgttaaagattgcaaactggactacaaaagaaatagagatctccaatgggttataactggaaaaactaaaattaaagaactccaagaaaattatgatgatcagttgatgtctacttacaactttgtgcctctctcagtaatatacaacaatatattgatcttccatctgaagaaattagtaagtttccacattatatatagctccctttttttttttttataatattacatacacttttattaattataatttttgttcttcttagatttgatggctgctgtcatagacattcatcctaaacgttaaatacacaatcatcatggagagctacaatccaaaaatttgttcttgtggataatgagtaaattatttcaaatttttttattatataatattaatatattactttattaaattttattatttacttggtaggtttaacatagctacacttacaatgtagaataattttgttgacaacgaatgtgctgcaatctcaaacatcattcataaaaaatctattatggtcgaaacacgactcaaagtggtttactacgatggtaatcaaacaattattatttttttaaaaaaaaaaaaattcaaatcaagatattctaaaacaaacttaatcttttaggcatgtcaatatccataaaaaattcaagctactttttaattgagcctcagttggaaatcactagaaatctttgtgcctggtaattaagatacaaatctatcatatgctttcctaacagccctgcatactcaaacatgcttttatataatcactattatcttactaatgtatgtttttttacgtttcaaaaaaataggataaatcgaaacacctgcaccctcaatgagaggatcactcaaaaagcatatcttcttccaggaacaaatctttcacctccttcttctgataaaaattactgatataagcaagatacatgacatgttaaacatagtaaactctttttaacttctccttttttattatttttattttgttctattattattttctcaatgagataacattacaatgcaatcttctatttcaacaaacaagtttctgggtcaaagtaattgctaaagtctcaaattatgcccaaccatttttgtatatggcatgtcccctttgtaacaaaattactagatccgaatatggagaaacttttgattgtatatattacaaaaataatgaacccaaagcagttcctaggtaattaaatgacttactcattttcttaagtttcttttcttattaaattatatttttactaacacttatgtcttgcagatgcagaatagatgttgaacttactgattcatcatcctggcttacaacaactatatttggggaaattgcagaaacattgttctcatgtaatgctacaacactgatgaataccaaaattaaggtttacccactcaatttacaaatatcttttcaattatgacaaaataatctgcttagttttttaaacattctcttactaataaattgaattgttattttataggcaagtcacatcatcccttaaaaactttcttaactccatgacaacaaagaaataagggcttttttaataaatgtacaacaaaaataatataattacaaaaaatgtgcaa

SEQ ID NO: 39641 - DNA, 1250 bp, Cannabis sativa
tgttattgatggaagtccatggactttcaacaaatgtccactggtttttcacagattgaaaaaaggtgaggatccgaaaagtgtgttattgaataaaatcgatttctgggtccaaattcatgatctgaaatccggatttatgcttgaaaaaatggttcgaagagctggtgattatgtgggtagttttgttaaatccgatcccaagaatttcaatggtctttggcgtgattacttgcgtgttagatcgacaattgatattactaaaccgttgaagaggagaatgaaattgtgtaaagaaaatggtgagtggatttgggcgaattttcaatatgaacaccttcccacattttgttttgtgtgtggaataataggacattctgaaagattttgtccaaggagatttgaccagccgttggaacaaatggtaaagccttatgggattgggatgaaagctcaattgaagaagaagaactacttgattggtgctcaatggcttagaacgggcagggaggaggacggtggccttgatggtggtggtggcggttcaaaaaattctgttgatggtggtggagttatggtgaatcctaaaattatggatattgataggagtgattctagaggatatcataatcccataatatcaggaagtaataaaggagttgatgggagagagaaaggtgtagtgattacccaagatagtgggaggagacaaattagtgtagctgtaggtgatgaggaggcatttaatgaggaagattctctcttgatctatgacagtaagaggaggcgtatgggggctgagatagttgtgcatgaggtggatgagtatgggccaaacgtgggctctattatagaggagggtgctgttccaaaaaacgttttaaaggtgggccttggttctcaggcccaccagtcatcatgagcattttggcttggaattgccatgggcttgggaacctatgggctcaacaattcattaaggatcttgtgatccaaaagaaacccaatttcttatttctgtgtgaaactttggccagaaaagaagtagttgagaaggtccgggttatgcttgggttcgaaggggctctttcagtggatgttcaaggaaagagtggaggggtggctttgctatggagagttgaagatgaagtcaaggtgctggaatatgggcgaacgtttattgatgtggtggtttgtggtcatgaacaaggtgaatggcgtttgaaggggttgtatggagaaccaaatag

SEQ ID NO: 39642 - DNA, 1309 bp, Cannabis sativa
  modified_base (1260)..(1268): a, c, t, g, unknown or other
aactcaccacagataaatctcgaatgccagtagatcagagcttgtttggctcactatcactaagctcctgaagctcatcatacattgaaggaaaggctctctctaagtgcctatgagctgcttccatggctctctaccctgcggctaagcctactccctaaccgggctttgaggcacccctgcccgaaggccgttccctcctagctgaaggatcatcaatcgtggaatgcctagctggtgcagcccttggaggaggaagaggaagagatgatctagtagcatctctaccatgggtggtctgagccaacttggcctcggatgacctaaaggctcatcaaaaggtccactaacatgacctctctacttggaagacatatctgaaaaagaaaaaagcaaagtcagaatgtaagtcacaaatattcaatgcaagacaagaatataaaagatggtgcaattaactattaaataccatcatcctcagaagaggaatcacctcaatccttagcaactgttttgccctagcctctagatgtggataaggggcgagtgggtcccatagagctctggccttcaggccttatccgaagagaagcatcaccaattgagcccttacaagccaagcactggtggagggccctctcactcctctccagattctaagctatttgagatagaggtacataatcatttaagtaagggacttgtccatcactaggaaaaactccctctgcagctggggctcaatccacaccaactgatgggccctgggctcccacaactctagaagaaggagggtacaagcaatacttctaaatgttggtgacactggccaatctaattatgtttctcttctccataggaagagacaggatgtgattcgccctatccctcatctataatgtagggatagagtgcttgtaaaattgtaatatcccaatagtgttatcccattttttgcaatatgacgtggcaacacacactggtcacacatgtctgctattctctgcatttggctggagagatactccgaacagacctcagccatgcatatgcacagacaaagtctgcctgaccgagcaaggaaagggcagatgatccgaacaacaaatgaagttatttctccgagtagtatatcaagactaagctacttcagttttgatatcgtgacgctcacacacacaagcaatccctacaatcatgggatcatataaaagggattgttgggttttatgccctaaataaacatgactatgtgaatannnnnnnnntagatttatcagaacactaggttttactgatatgacaatct

SEQ ID NO: 39643 - DNA, 1362 bp, Cannabis sativa
ttttttttctcacacacacctctcacacaaaacacatatttataaagttacaaaacttgggcatcaagacaacttggagactaagacattccaaagcttccgtaagaagatttttcaaaacttgacaaccaagactttccttatcccataattaataattaccaaaaaaaacaaattgtaactttataaatataaataaataaagaaataatttgagtcaaactccaacaactcatacataaaataatctaattttatttaatatgatttttgattagatattattgaatgactattactttattaactaacttaacattaaattttaaatgttaaggacttaaaatttcaaagaagaaataaataatattactattcaaatactgtcttatctatattctccaaactcatcttagcaaaatagaaatatgtgaagaacaattaaattaccaatttgatgatgaaattgaaaccatcccacgtatataaatttaaataaatatcattaattttttttttattgatataattttgaattttttaacatacataactcattgtttgcagaaagcatactattagattgaagctaaaaacatattaaaaaatctcaccaaacaactttattatatgtcatgtgattcatgtaataagagaattgtaatttacaacgacaatgaagaaactgattgttagaattaaaattacagaataagatgtctccctacaccacagtaatctcattacatttaaattgacatttgaacttgattgacattcacaccaacactaatgtattatgtataaattattagtgcaatgacatatgtacaactcgaggatggtctcagaatactagatcctatgatgttcaaatatgttgtggaaaatatattgtaatgtactattaggttcaattaaagtcgtattcagataaggtatattttcacatttaaatatatatttatatgtataatattttcatagttagaagcataacgaatcttatcttaataatagtaaaagtaatattaaaaattaattttgtagaaacattgcttgtttctctaaaaaactatagagaaattatcagccaaaagagaatccagttgtatccagatctaaaaggaacgatgagtcataagtacaatcaattcaccattcaaactactgagtcgatggaagattaggataaagttctactatgctttgttttatttttcatagggtattctatattaagattttttttaagagtaacttgcggcataaatacataaatttaactcctagttacaaataaatacctaagtttgatttttggcggtaataatatctaaggtaatttgcggcataacctcc

SEQ ID NO: 39644 - DNA, 1770 bp, Cannabis sativa
gccaagggtgcagtggaatttcttcacgagccccaagggactccaagtgttggtcggaccaccacccttcctacttttggttatggtagggatggtggtgattccaatgttgatcaaaagaggaagactttcccgatgttaggtggctcgagtcaaagtaaaaggttttgtgggaaccaaggcagggttggtcaccaaccctattcctatcttgagtgtccacgttgtaagaagtatcatcctggggaatgtaactgaaagacatggttttagtgtggcttatcgagatgttgcagtcagttcttctgtggcaacatgttagcttctggtccacaactcctattatagtgtattatttgactctagggctacatattcatatgtggcgttgagagtaattaataagttgggtaggccctgtgattttatcgagatagggtttggaaccttattacctagcagataattggttatcttaaaaaggtgggttaggtctatactaattagaattgagaatagggagtcaagtgttgatttagtggaattggaattaattgcgtttgaaaatatactttgaatggacttcctgtccaagtatttagccaacattgattgcaaacagaagatggtcacttttcaactagagggtaaggaaccatttgtttatattgggtccattcaaggttctcggactccgatcatttcaattttaatggctaaagatttactgaacagtggatgtgtagaatctttagcgattgtgattgagtccagtagacctgaaacatttgggtctgagaatgttagagttgtaagagaatttctggatgtatttcccaaggagttactgggatcaccagcacgtcaggagatagatttcatcattgacgtggaacctgaagcaaagcctatttcaaaagcatcttatcagatggccctaacagcatgcaaggagctaaaaatacaacttcaggggatgctagatctagggtttacccgaaccagtgtgtcgccctggggtgctctgattttgtttgtaaaaaagaaggatggatcccttcggatgtgtaatgattactgagagttgaataagctgacaatcaagaaaaagtattaactacctaaaattgatgacttgttcgatctagttcagggtaagactattttctccaagattgacttacgcttgggttatcatcaattgagaattcgggaggaagacattctgaagacgacattttggaccaggtatggtcactatgagttcttggtgatgtcattcggattgacaaatgctccaacaacctttatagatcttatgaacgtggtgttcaaggatttcctggataactatgttatagtttttatcgatgatatccttgtatacttttgaacaatagcaaagcatgaacaacacctttaaatggttttacaacaactcaaagatcataagttgtatgcaaaattcaaaaagtgcgagttttagttattacaagtgtccttcctagggcatattttcggaaaggacagaattattgttgatctaaggaaattgaattagttaagaattggccaaggccaaggacagttactgaggtttgaagttttctcgaattggcagggtattatcaacgttttgtggaaggatcttctatgccactgacaaaattgactaagaagaaccaacaatttgtatggtccaataagtgtgaaacaagcttccaagagttgaaacaacggttgatcacgacaccagtgttagctttgcca

SEQ ID NO: 39645 - DNA, 3680 bp, Cannabis sativa
tcactccacagatttggaagaaaataactgacaaacgcatcacaagggtttggttcaaaaatatgatggtccatttgagattgtccaaaaggtgggggcagtagcatacaagctgaagctacatgagcgcttcaagctacacccaacttttcatgtcagtttcttgaagaaatttcatgaggacaaagttgaaggaaggcagcaggtggtgcgagctccgcctactgtgaggaaacaatttgagaagaagttgacaaagattctcgaccatcgtacttttggggcaagcaaaaagaacctgagaaccgagtacttggttcaatgggagggtgaagatgtagctgatgctacatgggaaaaagttgtgactttgtggcaatttgaggacaaggtgaacagctatatcagaagtgtatcgacgaggacgtcgatttcttctagtgggggtaatttgtgagacccccacttaggttcgctcggcaaaccttgatatcactcgtggttagcttgtgggatagcagcatacgagtgaagtgcacctactagggggcagtatgcagcagtatcattagcatgcagcaacattgggagatgttggctagacttgtatacgtgatggttctaagatttacgtgaaattgcatgggaatgcatgcaagcagtttctcagacgacgtgcatgaagatgacacatatgaatgacggttatcgggagttatcaatgtctatccaagggaatgcacgtgagctaaagacatttgttggtgaacatatgcactgattcaggttgaaggcttaaatggctgacacgcaggtgtgttggttatttgtacatgtcatgctgatgtgtaaaatgttggtgagaccagcatggcctatgcggttggggatgtcaaccgcaacttaatgttgggttataaaataggctaagagcgcttgagtcatcaaagtatgatgtccagcatttgaacattgtattccttgatattgtgttaataataaggttgggaaaagggttctcgtatgttgtgtgtgttcttatgctttatgtgcatttacttgataacaagagagagtgttgttaagttacgatgggcaaactaaaccgtgagtgtgtgtgaatacaaaagggtgttggattggctgactagattggggagaatctaggccatcgcagggaaatttctgagtgagactgcgatggcatggattctccccaatctagtcagccaatccaacacccgtttgtatgcacacacactcatagtttagtttgcccatcgtcactcaacaacacactctctctctctcgttatcaagtaaatgcacataaagcataataacacacacagcatacaagaaccctttcccaaccttgttattaaaggaatacaatgttcaaacgctggacatcacactctgatgactcaagcactcttagcctaatttataatccaacattaggttgcggttgacatccccaaccgcctaggccatgctggtctcaccaacattttacacatcaacatcgcatgtagaaataaccaacacacccgtgtgtcagccattcaagcctgaatcaatgcatctattcaccaacagatgtcttcagcccacgtgcatgcccttggataagcattgataactaccggtaaccgtcattcacatgtgttatcttcatgcacatcgtttgagaaaccgcttgcatgcattcccatgcaatatcacgtaaatcttagaaccatcatgtagacaagtctagccaacatcccccaatgttgctgcatgctaatgatactgttgcgtactgcccccaggtgcacttcactcgtatattgctatcccacaagctacccacaagtgacattgagatccgctgagcgaaccgaagtaagggtctcacaaaccacccctaccagaagaaatcaacgtcctcgtcgatacacttctaatatagttgttcaccttgtccgtaaactaccacaaagtcacagctttttcccatgtagcatcagctacatcttcaccctcccattgaaccaagtactcaattctctggttctttttgcatgccccaaaagtacgatggtcgagaaactttgtcaacctcttctcaaactatttcctcacaataggcgaagctcgcaccacctgtttccttccttcagctttgtcctcatgaaacttcttcaagaaactgacatgaaaagtcgggtgtagcttgaagcgctcctgtagcttcagtttgtatgctactgcccccaccttctggacaatctcaaatggaccatcatatttttgaaccaaaccctcgtgatagcgtttgtcagttattttcttccaaatctgtggagtgagtttcagcaacacttgatctccgacaaaaaactctaagtctctctgatgcttgtctgcatacttcttcatcctccttgaagcttttttcagaatgtccctagccagttcaaacaattcggttctatccctcgcaaactggtatgctgctaggaaaacaccttgagacttctgtttagccacttcatatggtgtcagcggctgcctccccaagacaatctctgctggacgcgttcctattgtagaggattgttgaatgctgtagcaaaattgtgccacatccagcaactcaaccgagttcctctgacttgctgtcacataatgtcgtaactactcttctagtaactgattcatcctttctgtctgaccattagtttgggaatggtttgctattgagaacttcaagtctgaacccaacatgttgaacaacgtcgtacaaaatcttcccgtaaatttggaatcttgataacttaggatgtcttcaggtagcccaaattacttcaccacattcttcataatgagttatgttgccacattcgttggacaagcatggagtgtaggaaggactatgccttacttgaagaatcgatccactaccaccaggatggaccgaaacccttttacttttggaaatcccactatgaagtccatgcttattgactaccatggcttctctgggattggcaggggttgtagtaatcctgcttcttgccttctttctgtcttgtcttgttggcacacaagacatgtcttcacgtatacctctttgttctgctccatttttggccaaaaataagacttcgacatcacagccaacatcctagccacacccgagtgaccaacccactgagtatcgtgggtttctttaagcaattcctttattaaaccaccactatttggtacaaataatctaccacacttggcatagaaaagatcatcctcttcccactactgcattggttcaccatttcttgcttcctctaaaagctttttgtattcgggatcgagcagtgactgctccctcacccggtcaatgaaagttgtactcacctgagacaacgcacaaacaaaagcatgtacttcttttgtgcttagtgcatcaacaacttgattttgcttacccgttctatgcacccacacaaaatcaaactctaccaaatactcttaccaatgagcttgctttggggttaacttctactgagatttaaagtaagtgttggcccacattgtccgtcaccaccgtaaaatttgtccccaaaagataattgtctccacacatccaaacaatgcactaccgcagccatctccttctcgtgggcagaata

SEQ ID NO: 39646 - DNA, 1990 bp, Cannabis sativa
  modified_base (1435)..(1435): a, c, t, g, unknown or other
aaggataaggtgtgcaagggaaaagcgtacaaccacgcctcctgaagactctaaaagtgagaaggtacgagtagcgatgacaatggacctatgaagttgaggactagaccaagggtatgctacaatcatcctctagcaacttgtaatcagggaccacatgcctataactgaggatcacctccctgtaattggggaccaccctcctacaacctataaccaataccacatgcctataactagggatcacctatgtgggactggggaccaccctcttacaacatataaatggggaccacatgcctataactacggattacatgcctgcagttggggaccaccctcctccaaccagggaccacatgacaccagacaagggtatgaggtgcaaggtcacctcctgcacttacagtatgcagcgtgaaagtgatgatttttccccttaggaccactttctaccttagaccattagagcctataaatacccctatctcagatgtgagagggggttggaaaatcatttttgtaacttgaccttgagagcaatagaaagtttatcattttctcttcattttgagatagcaatttgaattcatatttcatctttcttttcgacttagatttgagcttgaagcgtagcttgatttcctagccaataagttagttgacgagttctcaccatcaacaattgccaccgttaaaactctaaggcgaaaccttattcttcttcttccttccacctctctctttctctatgatgtttcactactgcacaaccactacttcaggttcattgggccacttctagtcacccacgatccaaattgaccaaaaatctggattccctgggtcctaaaaccctaaaatcgaccccttttctctgtccatgatctctctcactttgtatctcaactctgccctattgagtcccctctgatcatcgatgacccaagccagtcccacctcgagcctcgtcatgccccaaaactccaagacccgtggttctcgggggtcattgttgttttgccaacgtgaagagcttgtcatagcggaggctcttggattcgatccagccaacttcgggcctctttaggccaagtgagttgttattttgtgtttcccttctctacaacattcagatcccgtgtttctttccctatacaaaatcattaaccaggaacaaccaccccggacaatgatgttttggtggagctctcggccagccatggtcggtggtgtttgaggtcttattttgagcttggtgttggatagtggtggttttgacggtggcagtggtgagtggtgggtggtgagtaatgggcatgctggttcgtggatggtggtgagagaaatcagaagagagagaaatagatgagttaaggaagaagaaagaataaaggaaaaaatgttattttttaatttatttttattttttttntttttaaaatttttaaatattttattttattttttaagggaaaattgcaccaaaagaccctattattccaattttttcccacatgacgcgacatgtccacatagctaagattgatgccacatagagtacaacttattagcaagaaggccaagtcaccgtgcacaacgtaccccttgacgaggagtccaaaatattcaagtgggataaagggacagcaaactggccaactaagagggtctggcttgacaacccctggccggctctattgccagcataggccagcgagcctctagtaaagagaaggctgaccagcctctcctctggcagacactttttatgcctttgcagctttaagcttgaacaacacttccagttacgaagtgggcttcaacaacacacaaaaataggagattaaattcaattatttaccaaatcttggggactaattaacatgttattcacttattattttaatgtgtaacaaataggtgatatatcctcattttaagggatatcaacttaccatctcttgtaagctctcctatataaagagta

SEQ ID NO: 39647 - DNA, 4172 bp, Cannabis sativa
  modified_base (46)..(48): a, c, t, g, unknown or other
aattcatattaggatgttaattaaacatacttggtagtaaatctannncctagtaaaatatttccaacacaaagcttgtgtttcggttgaagatgtgcgatttgtgttaggtttgttggcggctgttggtcctggggaggcgaaaaagaaagccacggaaaaacctacactcaatccgtcctcctctcgacgtgagattgtgatcgaaaaagctccagctctgcaaccggttaaccgagttggtcgcgcccgattctctagacgatcaaaaatgactactccaggaccccgtactttgtcaggaaagggtatgcaggtcatttggcttcccaaaaagcttgttcgcacgcctgagacccacctttcctcttctggtattgttgcagaaggaggtgttactagcaatgagaaagggaagacaagggttccctattttaacttgaaccgttatttggaggggaccccacgtgctcgaaatgaaattttgaaacttgatacctgtagtaagttggttttcaatagtggagtgaagtttagtgggcccacggctgattttaatgagatggtggctgggctttttaatttgggccgacctatttattactctttggttgaatatgggcctaatgcccaggtggaggaaaaaagagccttagaaaaatttttccaagcccaagaattttttccacaagagctaaaaaaaatttggtaacttgaagccttcggagattaatgagtttggtggtgatattggggttcaaaaaacttctgaaaccaatgctagaacgacgccgctgaaaaaaagaaagattgatgaagttgactgctctttgaatgctcgaccctctaaagtccactgtcaacacccgggagttgtccgcgaatttccttgggactttgttgaaccgaaccaaaactttgtgattgatgatgtcagtttttgtatctcatctcactttgctacccctgtggaggaggatgtcacacctcctccacaggcaccatgagaggagtagcttggaactgtagagggttgggacagacctctatagttcgcgagttgaagtccctagttcggaagtgctctcctgatttcacttttttgaccgaactaaagattgatgctactccactggtacgtattctaaataaccttcacttttattttcatttttctgtgcctgctattggttgtgcttggggtatcattttagcttggaacgttggctttgattttgaatgtatcaattactcccaaaaccaaatctctggattagtttactcagatcccattactcacccctggctacttacttgtgtttatggcccgccgtattttcatgctaagaagaaattctggagtgagataatgaaaattggggatagatttggtggcccgtggttaatcattggggataccaattttgtgcttagtgaacttgatagggagggctccaaagggagggatgccttcatcccattcatcttatccctagtgaattctcatggtctcataaatctcccgattcaaggagataagttgacttgggacaaccataggtcgggaagtaatcatgttaagtcggctttggatagaggcattgtcaataaggaatggctgttgctttttccgaaagcggttcttcgctctttccacacaagtaactctgaccatagaccgctttgcttatattttggtggtcttgaatcttatttcaaaaaaagctttaggtttgaagagggatggacccgagataacagaagcagactggtagtatctcatgcatgggactcggtggcgttcccttcggctccggctagacttttcaaaaagttaggggctactcgggttgccctcatcaaatggaataaacttcaatatggtaaggttgactccactattaaagagctcgagactaaacttgataggttgcaaagccttccaacgggtaccagagagtggaaccttgagaaagctacaagggatgcacttaatagggcagtaaaaaatgaagatcttctattggaagcaaagatcccgtattgattggcttaaagatggtgacaaatgctcaaaatttttcttcctcttggccactattaagggaagacgtaatgctattgaaagaatcctagataaacatggcatgtgggttcattcaagggatctgatcggaaaagaatttcttgagttctttagtgggatcttctgtaagaaccgacatggaccggtccctaattgtgattatttaatccctgaccagatttccactgaggagcaagaacaacttaccagaatcccagacagtgatgaaattagaaataccctatttagtttgggaagcaacaaggctccaggtcctgatgggatgtccgcaatttttttcaaacactattggcagatagtgggggaggacttttgtgtagcaattatggatttctttgtttcgggcctgatgcacaagggagtaaatgcgaccaatttaatttttaaaaccttaaattcgaaacctgacgaggacccatcatttcagacccatctcgctctgcaatgtgtcttataaagtcatctctaagattatagcgaatagaattaaaccgctcctccctagcattatttgtccctcccaagcaaattttgtgcctggaagggatattcaaaataacaatgtgattgtgcaggaaatcatccatacttttaatcgaaaaaaggaaaacaggggttatttgccatcaaaattgatctcacaaaggcctatgatatgcttagttggcaatttgttgattaggtcatgaggggtttcagggtccctgatactttctgtaagtgggtttaccagtgcatctcaacaacgaccctaaatgtttgtttgaatggtgggaacgtgggccatatttatccctcctgtggcattcgctaaggtgaccccttttccccctacctgttcatttgggctgctgaaattctttcaagacttgtccaagatgctttgaagaagaaaaatattaaggggatcaatctaagctaggggggcaaccctctcccacatcttttttgcagacgaccttattctggttggaagggcaactgtgggggaagctagaggtatgtgggattgcctagagaaattctgtgactgattggggcaacgggtcaataagctcaaaacttctatttttttcagcaagaatacacctgagaacttgaaattggaaatcaaaacttccctaggcattggtggtctagtgggtgcccccaaatatcttgggcttccaccgttccattctaaaaataaggatgcgaattctcacttcattttggataacctaacgtccaaacttcaggagtggaaggcaagagcactatttaaggctggtagggccaccctgatcaaatatgttggcctggctatgccatgcaatctaccaagctttctaaccacttgtgctcgaaaattgatggcctggtccgtgacttctggtggggtttcaaaaaaggtaatcatggaattcactagaaggcttgggacaaaatttgcctgcctaaatctcagggaggtctgggttttaggaaaacaaaagagatgaaccaggcctttttggctaaatggggctggaaaatccttacaggttatcaatctttatgttgtacaattcttgaagccaagtatcttagaggccaaaatatcctcaagtgcagagctaaagtttctgattcttagttttggaaaagtttggtgaaagaaactgagatccttaggagtggggcctgtaaagtggttactgatggtaaagatacgaggatctgggaggacccttggatcatgtatggtcaagggttctacccaactacgactagtaaccaatcacagaattttactatggtgtccgaacttctgacggaaactggtgattgggacatgattaaactgaacgacctctttaatcaagaaactgttaccgccattttgaaagggggccaacccttgggccaggggagtgatcactgggtgtggaccaaagaaggaagtagtcaatttaccagtaaatcgacatacttaattccagcaatgaaacgagccccacactatgatgtggctccttctctttggaacaaaatatggaacaacaaaattctagagcgccacaaagttatgtggtggagtgtcctt

SEQ ID NO: 39648 - DNA, 2270 bp, Cannabis sativa
gagacatatctcattagtcaaactgtaaactaacggaaaaatggactgctacaatactaaagtttcccatagttaatggtcctgtaacaattcattattttccttcgagaattttcttggtcagaaagataattgttttatccctcaaaatttattttgtgcatatatagtcaacatgccttattaggtaatgtaactgttataagcataaataccatttaaatttttagaaaatttggaatagtatatataattttcatgtgtagtcatgaattaaacgttgttttctaagaatcatatgtcatatcaacgaagaatctgtgacaaagtgactgaaatatcatgtttagtaaatatacttttaccatcctcaatagcttcatgaagaaattatgttttcaattgttccttttttttttatatatgaaaataaataatccttgtcaatactttttccacccaaataatatagtcacaccaaggtgtgtattttaaataatttatattttaaagctggaatttaattgtttataattttagatatctttatatacaatattaaatgagtgttttgttttttttgcttccggtttttattcttttggatgaaagatatgtataattactaataaagatgttgggatacgattttgtgtcctgatgttatttttgtggtacactagatgagtcacagggtatattagatgactgtcagagtatgttactatttttcaaccctaattatccctaaattaatctcagtcttcagataaaataactttcttatctaacggctaccatacatcacggaatacattctatgaaagtacaatcacgggacaaaatcatgtccctaaaaatattatggaaattatgtgttgtccataaatatataagtactgcaaattataaaaatcctttttctttattttttttttattttttttattttgcctattataaaggtcactttgatacatttgaagtcactgtcatatcaaattattattaaatttgttgttttagtcaaaacccactttgccaatgaatagtctagttatttagacatgaacttcatccaattaattcttatcataaaaaaaaaaaaattatgccgtcgaaagtgatgaatttttttttcttattggattgcttttaccctcttaatcttttcttttaatttgtatttaaatcatcattttaatttagtaagaaacaattttgaaaatttttgaggttaaaaaaaataacaaatcattcttttcaattttttttttttttttgatactgtggtaagagattacacctataaatagtcaaactttcatttcttcacatttttcacataaccttttttttatcattgtacattattatgttttttttaataaaaatgtatcgaatgtaaatttctaaaaaaattaatataactgactacatataaattaactaataatgcaaagaactttgtacattaaattttcggctagcatgtacacattcttttgattctattattaattttatgcaagaaaaattagatcctttcatgtataaatgcatgttaattttgttttaattttcggaagagaagtatatatatccatctaataaattcatttgcatatgttttgtctatatctattatttatactacatgtgtgatgccagcgtctcattttaatatcaccaacataaacttttctcctttcgttaaatcccctaccaaattagaagattagtataccttataagcgacttaattgaattttacaatgggaaacataaatccaacaactgatctatctctacaagttggaaatttatcatctttgttgttattttttattttctagttccccaagtgatgaataaagaatatcaaatattactgcaaacaagctgtcagattttggggtatttttttttttttttatataaatgtatatacataatttcgggtgacttatgaagaataaatgtacatgttatgatatggcagccaaagcactaaacgatgcacgattagaagcaagcattaaattgtatggagagaaaactatgaagaataaatggccaagcccttacgcagtggcttgtggtgtgttgcttatgctgtcgtttctcaagtacgtgtatcgtccacttgaatggttagctctcggggctgtcgccattggaattctccctatttgtctcaaagctgttatttccattcggaatcttaggctcgatatcaatattcttgctattcttgcaggtatctatac

SEQ ID NO: 39649 - DNA, 5042 bp, Cannabis sativa
aaaaaaaaaaaaaaacttttggatatcccagccgccattatctatcagaagctcagccaccttatccattcaacaaatggaggaaccattagcatgaaggctgaaacctttcttatgagctatccaagggtcctcccagaccttagtatctttgccattcacaaccaccttgcacgctcctttttttaaaatagggatggcactgacacaacttttccaaaacgaagaatcagaatctttggaagtataattgagaaagcgctttcctttaaggtatttagcttccaagattttgcaacaaagggattgactgccagacaggaggttccatccccatttggccaagaacgcttggttaatttctttagttttcctgaaacccaaaccagttagagacttagggaggcaaagcttgtcccaagctttaagatggagaccatggttacccgtttccgacccccactagaagtccctaaccagcccatcaatttgagcaacaagacggttcgaagaaagaagcttagtgttgttgttgtttgcatagcatactacataggcaacaacaaagcccacagagtttataagggtcgcaggacttgctttggtcagagtcttagctttccagccctgaagtttagatgtgaggttatccaagataaagttgaaatctgcatccttttgcctagatctaaaaagaggtagccccagatattttatgttaccttccggagagctcaaacccagagcctccttaatacttcttttgatcccattagaggtatttttgctaaataatatagaggttttgatcttgttgacttgctgacctgacccagcgcagaatctctcaaggcaatgtgagtaacctttggcttcctccatgtttgctcttcccagcaatattaaatcatctgcaaagaagatatgagagataatggggccccctctactgagcttaatgcccttatagagccattatcttgggcatcaatcaaaagtttggacaaaatttccgctgcgcaaataaaaaggtaaggagataaagggtcgccctggcgcaggccacaacagggtataattctaccaaactgccctccattaatgcaaatgttgagtgaggtggtagtgatacactaggagatccaacctctaaattttttgtggcgctccaaaactagcaagcacttagtcaataaaattcaaactcaacttgtcgtacgcgttcataaggtcaatttttatggcaaaaaaaccttcttttcctcttttcctgttgaaagagtggataatttcttggataatcacattattgtcttgagtgttccttcctgagacaaaagccgcttgggtaggacaaattagggaaggaagcaggggcttgattctattggcaatgattttagagatgaccttatacataacgttacagagggagataggcctgtaatggttggttcttttcggattctgcaccttgggaataagcacaatattcgtagcattgacacccttatgcattcttctcgtctgaaaaaaattagacactgcatcgcaaacgtccctacccacagatccccagtagtgcttgatgaaaagaacaaacattccaagccttattgttactcatggcaaacagagtactacgaatttcatcgtgagaaggcctcttaaccagttcagcttagtcaacgatagagatcctatcttgaatcagatggctaccattgaagtcattaccaacgttagtacccgagaaaattcccttgaatatgtcaataaattcgttatcgattagatcccgtctagaaatccaaatatcatctttattcaagatactttcaatagcattctgtctccctttgatagctggggaaaggaagaaaaacttcaagcatttatctccttccttaagccaagaaaccctggccctctgtttctagtataactcctttcggttccaagcctcattgagagaccgacgaatagcacattcagtgtcccaaactctcaatcccgccaggagtcgctggatgcaatcaagcttcctttacaaatccttaattaaactatcaaatttaccaaattgagttctgttccaatgaaaaagagcaacccgagtagcccccattttttggaaaaccctggtgggggcccaagagtgaataaccgtcttctaggcataatcaacaactaacttgcttctttcatacctagtcaaaccttcttcaaacttaaagcttcttttaaatttatcttcacggccaccagagaggaggcaaagacgtctatggtcagagttgcaagtctgagaggagcacagggcagcattcgggaaagcctaagccacgcctcgttgactaaacctttgttaagcgcagatttaacatgtttcgacccagaccggtgattatcccatgtgagcttataaccatacataggcatgttgataagccccctagaattcacaaaattagagataaatgggatgaaacggtccctgcccttagatcccactctttctgaatcacttagcacaaaatttgtatcacccaagataagccacggcccaccaaacctgtcccctatattcatgaacttctccctgaaagccttctcagcattagaatagcgtggaccatacacacatgacaataaccaagggtgtgtgagggaatccgagtaaacaagacccgaaatatggtttttggaacaagcaacacattgaaagacaaattcgatcttccaagccagaataattccccctgcattcccaacaaccgacacatggacatcaaagtaaaagtgcagggaattaagagtacgtaccaaagaagtagcattaactttgagctcggtcatgaaaataaagtctggggagcgcgaccgaatcaggaacttcaactcgcgaactgtagaggtatgccctaaccctctatagttccaagcaaggcctctcatgtctcctgtggaggagatatgacattctcgtccacatgggtatgagagtgagccgacctaagagagcagaggcaccaaacaaaaagctgcttacgaaaggacgttccaataaattatttcttcctttggaactcccttcaggcagctcatccgatcggtagatagagatcgatttatcatttgatgattcttccatcgcgaccttagttgcatgcccttggctagtaggctccaaaggaacatcccaaaccaccccaaggtgtagccgaagaaatttatgaggtctagagcaaacagaggaagagccatcgaataaccttcttttcttgaaggaagtagttctagcgttaattgtagaagtcagcatggcctcaaagtcagctccgaaattgcgaatcttataattgtccaagctcccaaattgtttaagctcttgcaataaagtatcttgggcttgaaaaaaattagataaagcatattcattatcatgctgaaagttgatctcttgtccactaaatgagctactccatgatttaattgtcaccacttcgacatttatcaaaaggtatatgagtccagaaattatagttaatggtaattgggtaaataaagatttgaaaatttaattaaagttaataaattataataattagtagcgttataataaataaaaatgtaatatttattatgagccaaattcgacacaatactatatcttgtgtttaatttagtataacttttaacatgtgttaaagtatactattcgagtaataatttttattaatgtgctaaaatataattctatcctatttttttgtagtactctattaaaaatgctctaagaaagcacattgataatatttactataatttgaattgttttcaaatatatatatatatgttgtatatcttattttctagagttatagattatatataaattttcttttattattttataagatttaaataatataaatttaatagctttgtattatcacaggagaaatatatatatatttatatatatatgtttatataatatatatattataaaattatattgttaaaaaatttactaaaagataatgataaaaaaaggaagctctttaatttatgtcctctggtcttctttttatgtaagcaaatcatatttgaaaaaggtataattctcttgccattaaataaaaagatttaatagtaattaataatcaaaaaaaaaaaaatcaatgacatttttgtcatttactttaagaaagctcaaaaacagtattctctcatgttatatagttatagactatccaaataataatgggtaaacctaaaccataaaaaagtttttagtagctaagtggatcaaactaataccacaacatcatataatgtatatttttaaaggctgccggaaatagtaaataaactgacttatatttgtgtcaaatttgaagatccatggtggtgcgtttgacaagaaaatatgaagcgaaaataaacagcttgaaacatatagtagttggagtgttgtgattgtttttttttttttttaatgttataatcacaagtagtgttatgtcgatcgattagtacaattagtactcattttctacataaagcattggttaggtgttttgtcttttgactcatcatttgccaatggggccttgaggatctacattttagcagaaaatatttataatgggttaattcaatttatcaattataggatcattattggtttaacgcatcgtaaaggcattgggacgcttaatggaagggtactccacttaatgtcatcttaacaattgacttttttttctttctttcctttcttttcttttcacacgttcacacacacacataactactaatgattggtgagatataaatattttagggttggtttggtacacgtaatattacttaatacactattatgtttaatattgtcttgtactcactacaaaaatttttgtttttagtcacaacataatttgtggctaaagtaaaatagttgtgactaattacaaatcatcattcctatgttgtgactaaaaagtctatggctaaagatattagttacaaaa

SEQ ID NO: 39650 - DNA, 1482 bp, Cannabis sativa
aaaaaaagctacaaataattagtgttttcaaccataattacaataaaacatgataaaagagaataatgatagtcttagatggtgcaacatgatttaaaaagtacctcatgttaaaaaaagaaaagaagaagaagaagaagcatgatatgataatatcttgctaattggattggaatgagccttgtgtggagtttgcattgaaattaaagtagtctaattcataatgagttggattgtataaatcatttgtggataataacacccttgacctttgtgttggtggaccttctcatacacgtatgcttattataatctgtatctttacaaatttgtttgaatctgcccatcgtttgaaacatgtgcttttgccctttttgaatttattggtatacccatttcttttgttctcaccctaattagatcttctataatattagggcttttatgatgtgttgttattttcgtagttaatgcttggtcgtcaccttaattgtcgttgtatttatttttaaatatacttgttaacttagtaatttcactcttcgccatttcaaaagtactgatttcgcgtgataaatagtagttcattaaatttgaatatgaagtgaatgcgacatacttattacaaagttattaatacgctatataaaatttctcaaattataaatgtaccataataaaataggcgaagagagcttttgtacaccatgataaatttatttagttagcaaacaaatcatgaacaactaaatgatacctactagataaaatataatagtatgacagtaaagaaaaatgccataattatctcaagcaaatatgaaaaattaacataataaaattaaattaaattattactaaatatgaattttcaccttgacttttgcttgagctttgattttttcttgaaattttgaaggattttaagtttggaagaagtcttcacgccctttgggcaacgagctaatataattgattttggaatagttcatatgtcaagagttttcagctcacaccatttatacttatatagaattcttccatctcaaacaacaaacatgagcaattaaagttgtttccatcttttgtgtgttggacttagactatattgaaattctatgaaagagtaaatggtgtgtgtaatgtggtcctccttattaaaaatagaatacaaatgctttttctcaatttgagcaagcaacttatagtagatatcttgtaaaaatttcaacaacctatttgtgatatggtaacaaatgtttggtggtaaactgtggagaagtgttgtcttttgaagtcattttcaacttcattatggtggagtgtgttgatggcaaggtcaatctgggacacaaagtctctcagtgagtaattatacacttaaaatctcttcagttatgtattcattcctcacacctttgtgtggttgtcatgcctgcaaagaatgcccctcttaatcaagtctctacccattgatcatgt

SEQ ID NO: 39651 - DNA, 1404 bp, Cannabis sativa
aattaagtaataacaactttaataaagtctctaaataaacatgtatccacttacctaattaacaaaaaaaaagcattttactaatagttaattagtttacatatacaaacaccctttaatagagtactaattttataaagttatttatatacttttgtaaaaaaaatacactaaaataataattttgttttttttttcacaaaatattatagtttatttacatataatgtgaatgactgaaaggacacatccaatgtcatgcatgtatatgtatatatagcataatgtcaatcagtgtatatgttttcactaattcccatttgaaaccattcagttgaagtcattgacaacgactttttaattggtggtaattaaatgccaacttgaaaagttgaaaatgacaagaaaattaatttgatcggttctcaaaaacatattaattaaaacaactgtgatgttttcttcattgtatttgtttaaattatgagattaataatctcttgaataaatatttactcagcagactattaataatataaggtacgtaggagtattactagtaattaatgttaattagggatatgatgtgacaaaagtagcttatcgttatactgatcatgtacttctgtactataccactaaacataacgatcatatatatttgaagattcattaactggctaatagtatggaccgatgatcaataaatgcaatatatatagatttgtcctatatatattctttatcaacatataaaattttacctaatttaatatttctaataatatactttcatttatcaacgtataaaattttacttgtgttttgaaacatataaaattttactttattataatactatatgtgcgccttagtatacataactataatattatgactgataattagataagaggactatctaaagataatccattgttaattacaatgaatatatatataaatatgtatatgtagtacacaaggagatataaagactaataaacaattacgtacataagtagatttcaatatcagaagcataatctcttgctcagggtttgcgtatatatatattttatataaatatatataacttgactatatattgtaccccggccgcttaggtaataaaaagaaaaactaaccatactccttcccttgcaactataaatatattatatagttaattaagataatgataatataatttattataggtaattaagatcagtagtagcccaatcgaagctccaagtccaagttgttgttgctgcctatttttattggtggctgatgatgatcaccaagaacaccaatctccaagtccagtctcacagtactactactactagtactattagcagtggtctccacctgcacctgctgctgcttcttcaaatt

SEQ ID NO: 39652 - DNA, 3786 bp, Cannabis sativa
ttttcccatctcaaaagcacatctccacaatgcttaattttttcaataataccattcgaatcacccaagttccagcagctctcaactatttcgaaaaataatggctcttttagccatgagttttcaaaccgaaagaattgattaaccgtaaccaattgaagcggagtatgatcagaagtagaaacttctaaattataaagcttggctaaaggaaagaagtctaaccaagattggttcaccaatgctcgatcaattcgaacctctacccaatccgtcgtgcctcgactacgctcccaagtataaggatagccatacaagtcaagatcatgtaatccacattcagccaaagtatcattaaagccatcaactaaccatctcggatagggattaccacctttcttatcttcttgtgaagtaacattattgaggtcaccaatgatgcaccacgacaaacttgacttgcacttcagctcctgaattaaatcccaagttctcttccgtaagtttctattcggctcaccataaaggtctgtcaaacgccaatgcccttggtcacttccacaaatcactacatcaatataagacaccccatactccaacactttaacatcctcttcaaccttccatagaaaagccaccccctactcgttccctgagcatcaatcgcaagagcaccatcgaacccgattgccacatgcagtcgttcaatagcctcctttctagctaaagtttcacacaaaaataagtaactggacttcttttggaccacaaggtcctttaagaatttttgagcccatgggctcccaagcccatggcaattccaggatataatgctcataatgatgggtgggcctgagaaccaaggcccacctatgactcgttttttgacccaacattaccatcaacaccagtatccaacttagacagtttcacatccccaccattaattacttcatccctcccgtacgcctccttttgctatctaaaactataagcaaatcctcctcattaatgtattcttcatcatgtgctatgatttggctattaccacccccatcagcctgtcgactaccccctcttccttccataattaactctttcttatttttttcctacaattcttggatcatgatcaacaccatggtcaacacaatcaatatccataattttaggcgtaacagtagctccacctccggcaccagacgatcgaaccactccaccaccagcgacggctcctccatcttcattccttgtctgaagccattgggcaccaagtaagtaatttttcttcttcatctgagcgcgcattccaaccccatatggcttagccaattgttctacaggttgatcaaaacgtcttggacaaaatctttccgaatgtctgattattccacacacaaagcaaaaggttggaagatgttcatatttaaaatttgcccaaatccaatctccattttccttgcaaagtttcatcctatgcttcagcggcttctcaatatcgatcgtagtgcgaacacataggtatctcgccaaatgccattaaaattcttagggttagatttcacaaatttaccaataaaatccccagcacttcgcaccacacgctccaacatgaacccagttttcagatcatgaatctgaacccaaaaatcaagtttatgtagcggaacaaccttcgggtctttccccttcttcattcggtgaaagacaagaggccacttattgaatgtccatggactcccatctataacggcttggacatccaattcgtggtaaaactggaatagatatttattggtatccaattctttgataaacacaccctttctcggctgccataacaaggccatcaaatgcctcattgcatcaaaatccaaagccctacccgtaagaaactttcccaccaaacaccacctatcatcaaataacgtttctttatcctcataatcccctccaatcagaattcccccttcctcatcctccaaacttatctgagcatattgctcattcaaatcaaacgtagagtgactactcaaagccatagaaaaaacacaagacacaaatcaatctagaaacttgagaaaaacatacaccaacatgtcaaaagacgtacaagacctactttataatttatttagtaattaagaaatttctttttttttttcaatataaatatattttaaaacattggcacataaagttcaaaaaaaaaaattgtgttgtagtgactcataaaaaatatgatagactgaagactcataacaaaatttttcttggcaacttatatattgatcttgcattatgcataaattttattactcttctatagttgtatagatcaaattgttacaattttaactcgctagtttattatatgctatgataaatactacctcaagatttgtcctaattaattttttataaagggaacatttttttttgagataaaatggtgacattttattaccaaattgcatcaaccattacaatattcaaaagatccactggagcattacttgtggtgaatatacgaactgaatgaaaacaagagctacgagccatataatgtccagccttgttagcagaacagttaacaaattgaatctgaacagattttaaagaatcaagcaactccttacacttcaaattctaaatcaccactccaaagggagaacgcaaaagaacccaacaagctatgtgagattggataatttagtccacacccatgtttggtgcatttttcaaactttatgacattggacaaagttttctcatactctaatttagtctcttttgtttaggactattttaacccaacaagaacatgggttaaaatagtccaaaatggacttttgtttttgtttttttttaatttttttaatttctttaacttagtttaagaaaattaatatgtatatgtattacatttttgattaaaacattaaaataattgtcttaattttaaaatttattgggataccttttatttttttataatataaatttcaaattttagaaatagatattatatatgtcataatttaatagttgttttttattgtaaaatattatttaattttgtagaattattagtttttattgaaaattatttagtttatttattttaaaatatctagttttattaaacattttgacattattttcttattttttttaaaaaaaaaatctaaaacacattatacttcattactatcttttttataatgtacatgtttatatattttataaaattttaatatgacttattttatttacgaatataaatgaattattacattatctaaattaataaaaaaatataattatattagaaaaattatttatatgagatttagttcttcattattccaaaagtactaaaataagattaatttaatccaatcttatacaatcctaattaatagtccaatcgagtctcacaaactaaacgagtggttctcaaaaaataaagtaaaaataaataactgtcataaaataactatcaaggagctgaaaaaaaaacataagagttgcatactcatacaactattttaggaggtatgtaataatgtaacaaaaatctccccatgtacacccattttaaaatgtttaaaattcaaatcaagttactaattaattatatatttaaacgtcattgaccaaatataattatgttagctctatttaatatgtaacttcaaacaagaatgctaagtttgaacctccttatatacattaggataatgctaacgtattgaaaatgattttatatagaatcattttttt

SEQ ID NO: 39653 - DNA, 1508 bp, Cannabis sativa
ggcggggcggccggggtggcggaggagagagttgtggtgggggatcaacctggacgtgtgttctcatgtaactattgtcaaaggaaattctacagctcacaagctttaggaggtcaccaaaatgctcacaagagagaaagaactcttgccaaaaaatcaggacaacaacaaagggtatttcttggaaataataataataataataacaattattattattacaatgatcatcatcatcatcatcatcataatcaacatcctttcttcaatcgtatgtcatctatggcttcatctattcctcttaataataataataataataataataatggattatacatgatgagtaacagatctcttgggattcaggctcattcaatgattcacaagcccaatagtactagtaatggtatgcaatcgtattatgggcattttggtcatttcgatcaccatcaccaaccagcaacaactacaaatggattgtcatccaagggtagtgccggtagatttgatcatcatcatcatcatcagagactacttatgaataataatggatcaagatatactcttcaagatcatcatcatcatcagaataatactaataatgaggagattaaaaagcttgatttgtctctcaaactttaattataattatatgtatgtatcaattactagtagtggtatatacagtctatacaaattaaattgttattattccttcatctttgattaggctataattaattatttcccagtatagtcttgttaagactcttcaattaatttgtttttttttcttctaattttttgttaaattctgattttttttttctcccctcttctctgcaataatattgattaatgagatttatgtatattagacaaattaacttgtataagtgatcttctttttcttcatcatcatcacctcaattttgtaagtttactatatagtttggtttagaaaattatagatataatatttcattattaattaaacaattgagattttcttaataataatcaaattaaactttatctttcatgttaatgaaaatgtgactttcatattcataacagtttagtatttgaaccattatgattaatcgaagtactctctttaattaagttgaggaaataatagtattcaaccaattaatcaaattattttccctattatcattagttttggaagtgaaaaagaggaaacaattaagcaaattttaataattcaatatgtcaactttaaaatcatagaaactactttcggtcactcctctaaataattttttaatgttaataattcataatgttaatgccctcttaaatacattatgtttatgattgtataaatatatatatatatatatattattagaatccattggatgctgagtaagcacctcatcattgtataaaatttagtcatataattaaccccaaagatacaacgaaagatttttatgttcattttttcacatttctgataaggacttgtagtacttgtc

SEQ ID NO: 39654 - DNA, 1913 bp, Cannabis sativa
tgtaggagtgtggtttatgcattgtcatttggagcgtcatttgacttggggaatggacacagttttcatagtgaagaatggcaaatacaaacaagctcagttgctccctcctccaccagacatgcctccatgctaattaataatcttaattaattatatatctctatgtgtgatcacatctctctctctctctctacctaataatatatatttatagctagagagatcaagagatcgttatttaattgcttaatttgtacttggattcatgatcatgtcccaaataagttatatatatataacttaaataatattgtctacgtacgtgtttgattgtttgattattatatatatattcatttcaaatatatagttaattattttatataagggatattaaaaattctcaacatatatatactccatagctagctagacataacacacatttaaaaattaattggatatatgcatgcatgtgtaatatacaacattactttttaaattattattttcataatttacgaatatggtatggaaactttatatatacaataaatatatatacatgatttattcagaacttgataaaagtgactaattaatgatagtgattctatatatatttatccttttcccttttcttacttcatagcttctttaattatatataaattattttttaattcgtaaatatatatttttatcgtactttgtagtgtacgtacgctctgctcgagtttttcacacataaatttattatatatatgtatttgaaaaactcatgagaatcactacacattaatgttttgtaatatctataatggtgagacttaaatcttttatatacatgccaactatatcttattccattgccatcttacaagttttttagaatatatataattgtacataattcatcgacaatatccctcgtaccaaactctccctctaaactaatctacttcaattaaaaaagtagttgatgttgaggttatccctaaaaaacagttcttagctttcaccgttcggaaaaaaagaggtctcaaaatacaaaaaaaggcacagatagattaaacaaacaaaatttatagaaagctcccggtcaccaaacacaagacccatctaaactaagcgctctcttgtaagagaatgggtaatagtattcttaaaccctactacaatgagacaataagatatactacgaaaagatttccaaaacatcaaaaattaatatcattaagcataataccaaactcattataacgaatatttttaacactgacagtaagaactatatgaaaaaaatcggagaaaacagtaacattcctgaaacctaaccgaaggcaaaaagataggccatgaaacatggtcattgcctccgctacatgaagcttgaaggtaccaatagcatacgttctggccaaaccgataggatatatttataataatacattgaattattttatatgatggtgtatgttggtagttgtgtaagatttttcataaattttcatataatttagaataatttacaatatcttcaaaataagttatttttcgtattttcaacatatagatagattaaaatcaatttttttaatatataatattgtacgttatagttatttaaaatctctcacaaattcttaaaaaagttcaaataatttaccgtatcaaaaaacacaaaataaattattaaaatctatatatatatttatattttaataaatcatagaattttattaatgtaatcaactaaaataatagcctgcaatacaatcgggacatctctgccgttagagacacaaccaggttagaattaaaaaaatgagtcaaataatcaactgcttaatttccagatcgtttgactaaaaaaattagatgaaaaaaattgcagcatcacaattaac

SEQ ID NO: 39655 - DNA, 3700 bp, Cannabis sativa
  modified_base (2907)..(2910): a, c, t, g, unknown or other
tgagcagtagaagatgcatgacagacataatctgttagatgttttggtttgaccaaggctctaccagttcgtgtgagtagtggtgctttcgtgatggtaggttgttggttagatatctaagcaataggtaagttaccaggaggcacttttgctagtgtggatgctactgatgtgggaagcaaaccaggtgatgttggcttggtgtgttggccatctggtgcaacaggtggtgatcctagcttgttggtggggaaactaggtgttatatttaggatgtccacagacttgtgggtagttttttttgttgcacagttttgacatgcaataggaagaacaatgtcaagaagtagcttattgatctctgatggagatgttgtggagagcaaggggaagattgtttcatacaaaacaacatcccttgaaatgtatatttgtttgttttcaatgtcaagaagtatgtaggctttcatgccttaaggatagtcaatgaagacagaggctctacttcttgggtgaattagtgccttttggaggtaagggtggagccataagctaggcacccaaaacttcttaaatgggcacaattgagcgttgtaccatgcaaaatctagtatgaagtcatgcctttgaacagtttaaaaggtgttctattcaataggtatgtagctgtttggactaggtagggccaacaaaacagtggtaaattgtattggaatcccagagcacgagctacatttagtatgtgttgatgtttcctttcaacaactgaattttgttgtggtctttccacacaagagtggtaattgacgatgcctttagaggcaaaaaaagattgtaaattcaattctttttgcattatctgatatgattgctttaatggatgttgagaattgggtacaaatcatattaaagaatgcatgaattatggcatggacatctgatttgttcttgagcatgtaaagccaagtaaatctagacttgtcatctactattgtgaggaagtatttgtaaccttccacacttgttatataaaaaggaccccaaatgtccatgtgaaccaaatcaaacacattcttggaaaaattatgattggaaacaaagggcaaacgtttttgtttagccaaataacagatgtgacaatgcttattagaatcattgtgtggaatattgttctctttattgaagaaatttcagatatacatggaggggtggccaaggcgattgtgccattggtttacattgttattattgaaagaaaaaaaggatgtagtagcaactacagtagggagattgtcttgatgaagcaagtacaatttgccatattttttagctgttccaatcaccacattcagagtaggatcctgaataacagaagaattataatgaaataagatggaattagatgtgttatgcatatattcagatatagaaaaaatgtttaccctaaaacttggtatatataatacattgtggagagtaatgtgggggattgatgttgatagttccaatgtttcgaactgatgttttttgtccatttggtaaaatgacatgtttaggaaattgaacattagtaaaagaggaaaaacatgctatgttagagcacatgtggtgtgtagctccactatctataatctaagctgtggaattagaaaaaattattttacctgcaagattagatgcaacagggggcataacagcaggttcaacatggttattatggctgagttgctgagtgagaagagagattaggtgctgacattgtgtagaaagatcaacattcacaaaaattccgtcggtgtcagatttggggttgctggtggaagcaagattggctttagctttgcccttgtcttgtttcttcttgtccccataaccaggggaaaaccatgtctaaaataacatttgtcaaccaagtggcctggtttgccacagttggaataagaaggtcgaggtttcttggctcttggagggttggtagaacttgaagcagcagccagaggaggtgcatcaacagagccaagggatttttggcgttcttcttgaattatcataccaaacacacgggatagattagaaattggttcattgagtagaatttgagctcgaaccgaagcaaaagattatttaaaccagtcaagaattgaagcacttaattctggttgtaataatctaagaacattttcattgcaccataagtacaagtagttattggttgaaattccttcaactcgtcccatatggacttcatttttgtaaaatatgaagaaacagagtgatcaccctgttgccttcattgaaatgcttagcaagatcattccacattttagtggccaaatcgaagtacattatgctttgtgcaatctcagatgaaacagaattaactaaccaagacatgaccatgttattgcatcttacccaagaattgagataaggattaccaggctttggacgagggagagatccattgataaatgcaatcttgttcttggaagttaaggccatagtgatgcctcattaatatggtttataattggtgccattgaggacagtagacacgagcacaagcccagggtgatcaccggtactgaggaagaatggactggagtggtcatttgtaacgaatcgagaattaagtgcaggaattgtgttgtcatcagcaatggtggattggtcctggggatatggatctgtattctgagattgaggccgaagttggggattgcgaggaggaacagttgaggaatttagaacaaggacagaggaggatcggaattgacctctgttgtgtggttgtcgatcgttgatggaggagcaccatcttgggaacgatttgaaggtcttgccatgaaagttgtgggcaagatttattttgataccataacagaaatgagagagagagagagagannnngagagagagagagagaatgaaaaacattgtaaaagctcttgttattactcagctgattattacagtgagagaactgagtttatatagctacttggttcatcgagaaaggttggttggaaataaccaactgtaaaagaaaagttctaactaacaaaacagtcttaactaactttaccaaagtgaaatctaagagttatagaatatgctacacttacttttagtacaagtggaagattattagaatttataccataaaaataaaaataaaaataagtaaagtaattataattaataaatagataatatattagagaatatataaaatacaattataagataaatgatacattaattataatagtataattgttaaatatatgaaatttctttattcatatggagaaggtataatattgtaaggatgtacaggttaattaagattatacgatatgaataaaacaagtcggtggtgtattaaagtattagaaatctttaatatggcactactaagtatggtttgctatacacaataatttaagtgtgtgtgattttgattcagatcacatatgtaaatagacatgtagtaaaagtgttgtatataattcgattatgtatgactaggctgatatgcaataaatacctttcattaacgtgtcttttaccatgaaagagttattgatatcataatgatgatcattagtgaatcagcttgaatcctgagtatacataaactcttatttgtgttcattgagttctttgattcacgtgttaaattttctcaaagaagatg

SEQ ID NO: 39656 - DNA, 2271 bp, Cannabis sativa
ttataaactcaaaactttgggtacttataccactatttacccttattgttattataaaatggcgaaaaactcttttttttctcattcttattcataatatacaatcccaaataaaaaaactaatgtatatattaaggttaaaaaataactaaatatttcggtataatattatatataccatttgaaaaactataaattcataatatatatacacaatatgcaggtttgtatgcttcaaaaaataaataaataaataaataatgctagcttgtaaatattgcgcaacttaaatttagttaattcattattttattataattggtaatatgatatattgaaaattagctaaataacaaatttgtaattgcatttcgaattattacacaatttttcctaaatcggtgttctcttcggccgatgaactcaaattcgagtgaagtgagctattggagatgcaattcgacagagttttgactggactagtgtggccaaatctgtgttttgtttgaatgtcgaagtcttctatttaaaggaagggattgtcgcacaatcttcattcgtttctcagattggtccatatcgctttgttctcttattttctcgtgcgctttctcttctgctttgcttatcgagtttcattctccaagttgttctgaatttagcttctactctaacttctgcttttctcttctttataactgaaacagcgtgtttctattttccttccatataactttatcaattttcatgcttttattatagtaaaattatttttataccctcaaattatttttatcgatccaacatacatatatcttcaaaaatttatttaagatatatcttcaaaatatgatagtttcttttatatttaacttgaaggaagcgttgagctgggttaaaagataacagtactgaacatcgtacatgtacaggtggagactgattaccttattgtggttcaagcaatagagagagtcctattaaaatatcagtcttgatatgttactaagttttggattaccgcagactatgggttacactacactcgatctctatttgttctagagagatacagtaagttggatatctgacatccaagactcaaaagctactagtggatacgtgttcactttaggtggtacgactgttttatggaaatcctctcgaaactgtaatcactagatctacaataaaatttgagtttgttgctctagatagatgtagtgaagagagagtggttacgtagatccctaaaggagattctagattggcttaaacatgtgcatgaaatatgtatatattgagaaaattaagctacaattggcaaagcacaaaatttattacataacagtaagtcaggacatatacgtgacgacacaagactgttagacaattgatctcaactggagttatcttaattgactatgcatgaagtaaaaagataccattacagatccgctaaccaaactgttaaacagagatcaagttgaaaagatgtttgaagaatgagacttaagtccaaaaagaattaaggccgatatgatggaaaattcaagcaagatgactggagatcccaagatctaggttcaatgggacaacctaattataaagaccttgtgtgattactgtgggggatcatccatacccattctaattataaatagtgattctcgtggtggaaaaaggttaagcattaagcttttaagactcttatgtatcagaagtccgagcgaagtaaaataggattactaattaattaagagatcacctatgtgagagagaagtgggaccgctttgaaggagaattgtgggggctcaattctctaaaacctcttgctaaaccaggcagatgttcatgaccaaaatgaacataaccatgagaactgaaacactactacaaaaatgggttttcccgaagtttataaacagtcgtttaaagtattctcgtcggtttctataactgtcgcctatacgaccgtcgtaaaatgggcagaataagcgacggttcaaaaccgtcactaatatgggtttcctaacggtttaaaaccattaatggcagaaaaatctgtaatttccctcatttttttcctgcatcagttttatttacctaaattaaaataaaacaactaattaattttgttacaacaacaactaactttaaaataaattaattttatacaataataaaataaaaaagtatataaataaatgtatttataccgagctcggagagagtagaaggagagtgacaggaggaggggtgggtggaga

SEQ ID NO: 39657 - DNA, 1739 bp, Cannabis sativa
atatttatggtaaactcaactgatagatatatatatataaattatatatatatagaatagaaaggcctatacaaaggcttcacaatccaactttgtagctgtttcaatctcatcagattagcttagttcttttctgctcactaaaattcatagcagtattcaaaagcttctccattgctataacagaagagcccttaaacccattctcatctctcacaccattcctaatcatttccctaacttcactaattttccttctaatttctcctcctttctcactctctatattcataaccaaatcaatcttctcaaccatttctttatgtccaacacaggagctctttcctctcccaatttcaacacaaacacccaatttctcttccaaaagtttagcattataaaactgatctgcagacaaaggccaaccaattataggcacaccataactaagtgattccaacactgaattccaaccacaatggctgagaaaaccacacacagcttcatgacccaagatggtcacttgaggagcccattgatgcacaactaaccctcttttcgactccctcattcgctcctcgaacccctttggcagccactcttcagctctgaattcgccgtttatgtcaaacccgatcggcggcctaacaacccagatgaagcttttgccactggcttccaatgccatggctaattccatcatttgagatgttgatatattgttcattgacccaaatgacacataaagaaccgatctttttggttttgagtccagccattgtgtgcatatttcgtctgtgattccagctcttgcttttccggaccttgttgccggagaaaagagaggcccaatagaaaaaatcacatcttcaccaattattcgccggaaatatgctaatccattactctgttcgatctgctcaactgtgtcgaaaagaaaagcatcagctttcgtccataactgaagcagctttcgtaacacaatagaaaacttctcagacccatcagccacacgtaagaattccgacatctgagttaggtagattttcccagcttcgggaaaatccggcaaacagatttcgtcggtaaaggaagctcctttactcagtcgatgaggaagattcatccacagagagtaaaagcaagcgaacccaaaccccccaccaatgcaaaaaaaggcattgaaaattccaaactcggtagcaacctctttagtccatccgaaaaacatgtcggagattatcaagaacggttttttactgttatccgggtgagaacagaggtcggagatgagttttccgaactggggtttgagtgaaagtgaagcttcgaagaaatttgggaggagattgtaaggaagagagtcggtgttctccacgccggaaggaagatcagattcataaccctcgccgggaaaagttattccgacgagttgaattaaggaatttggtggcagagagagtttgaggtgtggaagattgagttgggtagtgactaaagtaactgtaaagtagttatttctggtttgggagagtttatgagctaaggctagaaaaggattgaagtgtccttgtgccatgaatgggaagaggactatgtttctgttgttttctgtatcagtctcagacatcattgttgctagtaattttgatattgaaagtgttttgtttaaagagtgagagaagaaaactgtgaataagctctttgttttgactaattagagttaggtttatacataa

SEQ ID NO: 39658 - DNA, 2277 bp, Cannabis sativa
cgtatcacacattgattacaaaaaagaagctcatgttgtcccgagaccaaacactcaaggtctaaccatctcaatattttcaaagactcgcaagctccggactcactactgcttagcctttgccttttccttacctacacatacaaatatatttgtgaatcaacagactcagtaagaaaagcataaaatatatatacacattagtgacttgtatctaggcacccatacacattactgacttgtatctaggcaccagcactataatcgtgatgtggacccgacatgatagttttaccgctatgataacatcaatctatacccaaaaatatcattaaccataatatcactcttaaccagtactatactcgtactgccgaccaaatactatagtttgtactgttatgacaacatcaactaatactttatggaattaaatatcagtcaaaactagcactatactcgcattgctgattcgacactatagtttaccccactatgataccaattcatacattctatccactaccagcactatagtcgcgatgcagatccagtactatagtttgcgcttctatgatactaattcgtctattctaacaatataaatatgtatatcacatgtacacacatacatatatatatattttatattgttcttacctcatttttaaatttaagtgcatgcgctagtcaacctgaatagaaattttgctcattgaacggaggccctatgtcacattacgtaaaatgggtaaacaatttgctaaaaccttctcagggacttaaactcaaaattagaaattttcttatcgataaatagcgtagaattactctaaatatcgatgaaaaaaaaaaaaacaagacttcaaaaagactgcttgaaaaatggcaggtcgtttctgtaaaaatggcaaactatttttttaggtcactgctagtaaaaagggtagaccacttagactgtttctaaacagtccatcgttttccgctgcagaaacacaccaactctcatttctacttcaaatcaactccaaactttccacaaccttcgagaacacctaattaaggcccaacaaacctatcccaagcagtagtaatatatataacaaaaagttatgaaaatcacaactcaaacttgctcaacaccacaatcagccatcaaattaacctcaaacaagctttaagcaactttattttatctcaaaaataacccaaaataaacctaggttcggaaaaaaccttttcttaaaatttacatgttcaaaccaataaaaagctaccaaaaattcaaagggaagagttctagggctttacttttgatttgtaccaccacctttcctagatttcttgctaagaatcatagaaaatcaatgacaaaattctggtctcctttggttttctcaggagttgaactcaacgtgagagagatcagagggataaacttagctttatctctaattttctaacttaatgaacaattgatataattatttttgtattcctttttcttaaaatcagcttgattattctactaaaactacaaaaaacaaaatttacctcttaagaaaaatggccaattcgccccttgtttcgcacttaagtaatcttaaggcctagggataaaatagtttattaccataatctcgtctaatcttgatatttctaatattcaatatacttaccccactaattgaaaggttctaaaccttacttatatgattcaattggccaaaccgtcacatttctattgttgccgaaaaaaaatcataaacatattaaattgcacatatattatatataacacacttaaagtttaataaaattttcgaaattgaaaaattacaatcctaatgtctatttcttgaaaatagaacccatgcatttaataaataataacatttaatcatataataaaatcaattaatgctaattgtcttactaattcctattctaagtatacaatcattacaatatatatttgtgcatgaaagtaaatattactgaaggctttgacgattatttattgttggaacatatattactaggaacttatttactagcaggtaatttcaataattaaccttattatcaatttacttaaaatatatttttttaaaacgaaaaaaataacataaagttagaattttcttataatgggaacgcaacgggattactccttctgttcaacactagtttttgaattctttttgtggcaaggtgttataaagtgttaaagatttattttatttcttagtcttctaaagtgatttacaagtt

SEQ ID NO: 39659 - DNA, 911 bp, Cannabis sativa
tataaccatacaaccattaacatttaataataaacggtgcataccacttttcttacctgtatatcctaatgagtgtgctaaccgatccgagcagaatataatttggcgtataatagtccaaaagttaactatccaagtaaaatgattcttttatagccttagtgtagctttcatcaaaacctcagtagcccttactcttagtcataattcccagtttatattcaaaacatgctataattattaaaacccgtagatataccctctaatatatatatatattcctaagcttgctttgaagggttaagcttttaatacatgaaaagagagaaaagaataaagtggcagagatagagaggagcacgcccaaatgtagtgtgagatatcctttatataagttttctatgaagcttataaacttaagcttgaactagattaatcaccaaaatggcatgcttagtggcttctagttctacgtgtcaaagtcttaagtgatgaatgacttaagttttaagtttacaccatgtaaataaaataataaaataaggagaaagataatattaactttgactagccaaaacttgttgagtaaggtggccattcgtgtcattcaaagaaatggtgctagaattatctattaagcttagtcactttgttagtgtggttagtcaccacaaatagcttagtcatcacttatgtttcttatctaataagttatcaataataatatagatgggtaaatatcaaactatacccaataaataattcgtttaatcttaaaatttctagacattacaaagaaaatatttggtactttaagaatacccactaataccaccaaaatattgctggccaatccatcgaattcctactattgttgatctaaaaacatattttattccacatatagcata

SEQ ID NO: 39660 - DNA, 4324 bp, Cannabis sativa
ttttaattttatattttattaataaataaatgaataatattaaaatttaatacatcaaacaacttaattattaaaaaaatatttctttttttatttttatatttagacattataagattaaataaaaataaacttattttaataaaactaatttaataattttataaaataatttgtaaataaattgaaaagtatcttaaatatcatatgagttacattaaaaaaaaaagtaacctcaaggtatcttaaacaataaaataacataatatagtctaaaaatataaaaaaagaaacaaaaaagtttcttttaatattagtcgtccttttttggagataaaaaaatatatatttctcacatattaaaatagttattttattatttatatatgtgtaaaattctgaaataaattttttaatagaaaagtaaccaattgttattttatttacatcaaaagcaactaaatagttgcttttttcaaaactcccaaaaagtgaatttctggaaatgagatttctcccgttttttccattttcggtaattattttgtatttcggtatgtatgctgatgtggcacaatggtacttgtacaaataattttcctaaaggtatttttataaataaaatcaattttaggtataatattgaaaaaaccaaaaatatatatatatatacatatatagaattcacccatgcataaatataattagatttattaatatattgattctcattataaatcaatcttaattttttttaaacatataatttttaaacattaaatgtgaaattaaataatgtaaatatagatgattaaagaatataactcgtgatattaaagatgaaagaaattatttaaataagcaaaaaaaacatttatagagaattaatacaaaaaataaatacttaaataaaaatacatgtttgatcgtctaacttaatagtaagtgttatccgtgccttcggattaatgacatgtactttcaatgcccaaaagaagccaagacgtgcccaatcctgagcccaatcaagttaatgaatcaactacgacgaaatcagactatggttcctgatccagatgcaagcccaacgtacaagcatgataaagttggaccactttggtccaaaaaaggctgttctacctagaagatgaatggtctatcaggacgtatccagaaccctcatggggtaatccagaaagagcgaatgaagaggcacccggaaagcatcctatgtacatccctttgacacatgatcccacctaattagggactttgtcctctacatcagacctagagagtgcacacaccacccaaaagaaaccatattttagggaaatttacacaaattacctaaaatcatacttttttttttttttttttttacatttttatggtttttttatagactattatttttttagaagtaattgcagcaaaactctcaaaactcgtattgtgttagcagttagccatttctatccaaatttctctattaaattccatgttagactatctacgtgtacactcttgtacacgtgttaaatttacattggtacacgcaaggtggctacccaagttaaacaatgacgaaagggatagtgaaccatgggatcgagaagcctattccaaggaaaactcagagttgaagactattagtcgagaggaggtccagaagccactagattggagtcaaacatctctaaactccatggattctagcgaatgttaacacccgattccaatgatcttcaagcctggtccattgaggggttgtattctcctagacctcctgagtttaactgtaccattcactgtccaaaacgatgttagaatctcgccaaaaaaataaattgaaggttttaggggccgcaactttaactaaattgttctccttgttggcgactcgagtcaggctgacttgcacgggtggatgtttcagagggtggtcgttctcttcgtgcaatgcgtgtctctagctgataatgggaagatcgacgtcgattctggagcataaaccacacgatagtgaaagggcaagaggagagagaaggttagggtatgaataattttgggggttaataataatttattagtttatgtttaataattatttatttatgttattgaaataagtatattagataggtcaatgtaaatctgacatgtgtataagagtgcacatgtgtatagtccaacatgacatttaatagataaatttggatgaaaatggctaactactaacacaacacgagtttgagttttgggggtttgccaccaaaatttggatttttaagatttattgttatcgaagtagaagtattgggagttatgccaataaatttaactttcaatcacaaccgaattttgtgggaacatattgtagctacagaacggtgcgaatctagccttgatcaaggaatgattctcactttgattttctttgagaagtttcccaatcttggttgattgtgatctatctagagagatactcagtggtcaaaaaaattacaaaagaaattaaatacttttggtaacaaaataaagtctaagcaaatatagaaataaataatttatttttgcttaaacttactattaggattgttaatccttctactcatagctgaaacaccaaagagacaacaatggagaaacagagaaagaagaaggagaaagagtaaagagaaagaagatctaaaagactagaaagaaagagagagaaaacaattgcattgattattattgttcaagtgttcagagtacaaaagaggatcacatttttatacaatagaacagagagagatgaaaggaagtaagcgagagtaaccaactaataaccttccaacaatcctgtaactaccaataacgacttttaactaacgctgaacagtgagtccctaatacttccctgcaaactcacaattggtagggcttgcaattgtgagtttggtacaaaatttggaaagctatggttggaaatagacttggtaaggccatctacaagttggtctgtagcagggacgtgcttaacttgagcttgtttgcggaggaatttttcacgaacaaagtaaagattaagttcaatatgtttggtgtgcgcatgtagaaccagattggcagcaagcagcacagtgctaaggttgtcagttgtcacaccaaacaattggaggctttgattgaggtatctgaagctcagtaaagagtgaatgcaaccaagcaagttcagatacagtattagctaagctttgatattcggcttctatacttgattgacttatagtttgttgcttttttacactgccaagtgattaaatttccacctagaaaaatggaaaaactagaagttgagcgccagtcatcaagatcggaggcccaatcaacgtcacaaaacgcaacaagatcagttgaggaggacttgtgtatgtgtaagccatagtctattgttccactgagataacgaaggattcatttgactgcttaccagtgcggttgtaatggggttttcatgaactgacaaactttattaacactgaatgcaagctttggtcgagtgattaacagatatcacagggcacccataatcgacctatacagttggggttgtcaaacggttcatggccatgaacagaaagctttaaaccactcaccatgggggttggaagtggtttggcatcctccatttgggatttgatgagaagatctctaatgtacttggattgtgacaaatgcagcccttgtggagtggtttgaacttcaatgccgagaaaatagcttaagtccccaagatccttgagagaaattgagaattcaatgagttgacaatactggcaatgaggttagagtcacttccagtgatgataatgtcgtctacatatactaatatgagagtagtagatgtagatgtgtggagaatgaataaagatctgtccgatttagatgaggagaatccaagggcaagaagactagtgtgcaacttgtcaaaccaagcccgaggggcttgtgtaaggccatataaggctttgtgtagtttgcacaccaaatgaggggtagaggtaagaacaaacctaggggtggttgcatatacacttcctcatgcaaatcaccgttgagaaacgcattgttaacatctagttgttttatatcccagtccctgagatgacaactctaatagtaatcgatttgactactggactaaaagtttcagttaagtcgaaaccgagttgttgatggaaccccttagcaacaagccgagctttaaacttggaggtacttccatcaggattctccttcttcctataaacccatttacaaccaattgccttttttc

SEQ ID NO: 39661 - DNA, 1217 bp, Cannabis sativa
tgtggtttactatgcttttacacataggcctatatatgcagtgtaatacagtgtaatttgaagaagaaagccgaaagataatagtgtaattttttgctattttttattgaacaccatatatatatatatgctgcaccacattgtaccaaaaaatgtggtatggtgtgtgagcagtttaaacctatcaccaagagaaaataaaaggaatatttaaacacagcatcttatacttgtaatttattcaaaatgaaggattatattggtccttctttgatgttaagattggtcatgtatctttttcctttatccataatatatgttattttagaaaagattatattttgaaggaagtcaccaccgacttctagaaacttttagaaattaaggttactagatttatctagtttttgggccaaacccattttgatataattgctagaattttctagctaattaccgatcatgagcactataaatagacttttggtctcttgaatgtgtgtgtacaagtgaaaaagtccaaatgagatccaatattagtgagtgtctgtagtctaagtaaaataaaagaataagtaattgtgtgtattgtagtcaagttttagtataattatttttgtaataataaaagtagttacgtttttttatgtgttgtagtgttcaataagtggttttagagtcaggtcgggtcagtttatatcaagagtcatttgatgagtttttaagagtggtcgtgtgtagtttagtactacagagcttgttgttgaaatcaagctttcttggtaaaattagaattttaactaagacatcatgggtgatcttcaagtgtttggtagaattaaaaaaacttaacaaccaaaattacaacacgtgatcgatgcacatggaggcatatctccaaggccaaaacttgtgagagattgttagcggcaatgaattcacacaaccggaggatgcatccactttaaagaaatggaagattaaagcggacgaaaccatgtttgcaattcaaaccacagttgaagatgaaatgtttgagcacaataggttgatgaagacaccgaaggaagcgtgggatactttcgcatcactattcaccaagaagaatgatacgagattacagcttctggagaacgaacttctctcaatcaggcagggagacatgacgatcaaccaatactttaccaaggtaaaatctctttgtcgcaaaatctctg

SEQ ID NO: 39662 - DNA, 2066 bp, Cannabis sativa
attgaatagtcacccatatataaatatatataataagtgtacatttttatattttatttttttaaaactctttctctctcttacaaaaacttaagagcatttctcctattttttttttttaatcttttacatgactaataaaagtagtatattcctttttttttttaaaaaaaaagtagtatattctttttcaaaaaaaaaaaagtagtatattcttttggatgtttttatagttcatatattcagagttaatttatgaatggtttgcatattttatcaagattgatgtcttgttatttttctgttgatttataattgtctttttgtaattttatatagttattttttatgttattatttaggtgttgtatagttattattctgttgtttctacattttttcgtacagttgttaattaatttatgtgcatattttatcgtgtatatattaactaactcgaaaatgtaaagagaaaaaaaaagttgaaagaataaagttataaaaacaaatttcatgaaaaaagacaatgtaatagtacaaaaagatatgttaagttgttctagggttttttttttaaattatttttgagttatttttttttttacgaaaacacagtatttttataattttaaaattttaaacatagtatttttgtaaaattagtacgataaaaatataaaaaactctttatcacaatatttttgtaagttgttctttactttctatatactttttctctatttcaaacacatgagatcattgatttatctatttatttatttggtagtaattttttttttcaacttttgaaaacaatatatttaaatttttttgactacacgtctagaaacgctagtgtgatcacatagtgggaaagaaggcttagtagtaatcattttcattaccataaatatataagttgcacgtctccgtgtattaggtttaaaagtaataaaaaaagtaataaactaaaaacaatttgaaattattctataataaggtcgttccaatttaaaacctagctcactccaaacctaaatctaacttttcttttcaataacttttaccacttttcacttttttttttttctttttttctaaaaatataatagtcaaaatagacttttgatcttcaaggaacttaataaaatcttattttctttctttgataaatgtgcttttatgtaaccactccattgtttggtatattatagagaaatgctaaagggcactagtggtgcttagtactttcctatgtgttaatatcgttattgattcagctaagtatctggtcccatataatttaatacaatagcttttatggagtatagctagccaatcataacgcgacatgtcgagaaggagctaggcaccactggtacctaatagcaatgctcgtatattatatgataatgatcatacatatatatatatatatataaataggaatagtctacaatgtggcacactctctttccacaccgaagcgagaaaatacaaactaatgatatcacacgccacgtctgcagaaaataccaaattaaattggacttccaaccaccagatcgatatttctaaattataaattatttattttaaaaacaagtgcaaattaaaatttttacttcaatatgtcagttgggtcagaatatgtcagatgagtctaattattaaataacatcatgcggtctttccaccctctttgtccatcttcttcactttccaccctctttttcatcgactcttctttacttttcttctgtccttctattccctctttcccatagtctcttctttattgatttcacacgtaatattttcttttttgatcattgatattgcctgctattgatcagagttttagtttaaatctaaaactataaaataaaaatttgattattttttaaattatctagcctcactgatttggtataaatgcctgaatttttatgaatattgaataaaatgaaaatctaattgtcttttaaattttttcttcaagttcatatattcaattcaaaattactttttatttttaattatgacagtaggacttgtgggttggg

SEQ ID NO: 39663 - DNA, 3414 bp, Cannabis sativa
taggcactataggaccgagagtgtaaccactactcacgatattatattgcacagttgaaaggcatccataaatgagtcgaatccatttttcagtaaaacccattcggccaagcattgcacataagaaatgccaatccaccctatcatatgctttgctcaaatcaagcttcaaggccatgtaaccatctttaccactttgctttctcttaagataatgcaggatctcaaaggacaccataatattatccgtaatcaagcagtccggaatgaacgcactttgattaacagagataatttcagccattaaacctttcatcgtattagcaagtaccttagttattactttggcgatgacattacacaaagaaataggtctcaactcactcatttggtccgggttctttttcttgggaatcagaacaatgttagtgttttgcataccctcaggcatcatctccgaatgaaaaaactcttttactgaacgaatcacatcatctcccacaatacaccagtacttttgaaagaactttgggttcataccatccggtccaggacacttatcaggatgcatttggaacaccccaactttaacctcttcatcctcaattggccgagtaagcattctgttatgctcatctgtaactacaggcactacacaatcagtaacctccccccaattaccttgttcagcttggaaaatatctttgaaataatcaaccattatctcacccaaaccattattccaatctcgaagaaaacccgaactatctcttaatcttacaatctgattattacgcttacgagagttagctttcgaatgaaaaaacttactgttttgatcaccttcttttaaccacaactgctttgacctttgacgccaaaaaatttctctctggtttagcacatcaaacagccgcctcttggcttcataaaattgttgttttccctcaacatctcgtcattttttcagcagctttaaagcatggttacattgctttattctcccaccaaagttaccagttatacctttaccccattcttgaaggacctgaccacaatgattgattttttgagcaatagaaaccccacccattgaacaccagctatcatggataatcttctcacaatcctggtgtgaagtccaacaattttcaaacttaaaagttcgaacaggagcagcagctacatggtagttagaatctaaaagtagttgacaatgatctgagggagaaacttctaaattaaaaagctttgcagaaggaaaaaaagataaccaaccattattcgccattgctctatcaagccgagcttcaatccaattcggtgtatccctacttttctcccatgtaaatagacgtcctaacatatccaaatcgcatagcccacactgttgaacaacttcttaaaaaccttcaatcaaccatgtcggataaggattaccaccacgcttctcacattgatgaagcacatgattgaaatcccccatgatacaccacggagccactgatcgtgcaaaacgagtcctgagcagaacccaagtttgtcttcgttggctacggttaggctccccataaatcccagtaaaacgaaatggtcgatgcccttccaccgttatcatattgtcaatgtaatttttcaaaaaaaagtctatagccacctcatcttggttcctccaaagtaaagcaataccaccactatgtccatggcttcaattgcaaaagagccctcaaaattcaactgcctacataaagaatccatctttttttgttactcaaagtttcacataagaaaatattactggtcctatttcgagcaatcagctcttttaggaactgaacattccgtgttggcccaagcccacagcagttccaactcaatattttcatatttgtgggcgagccccatttccaaggcccgccaaacttaagttttttggaattccactaactccctggcccatctccacgtgccccctgatcccttcttcacccactttcctttttttactgtcattaacagtcaagctatcagattgatcactaataacttctttcccatgactcttgctctggagactatccccatttatcataggattgattgacaccccattaacaacctgaaattctctaatctccattgaatatgttgtttgattgcccaaatcattccccacattagtagcagaaatgtcaactccattaaaagtttccatattcggattcaaatgatcctcctgtcctgaattgttaccgccggccaccacaggtggtgtccatcctcgtgtgcgcaaccatcgagcaccaatgtttttatgactacgaagtggttgagctttcataaactcaccatacggtttgaccacttgatgatgaggctgatgaaaaagcttgctacaaaatttttctgtatgtccaatcactccacaaatgaagcagaatgtgggcgccctttcgtacttaaacgtaacccagaaccaaactccatcaaatcttgtaacttttaatcttcttctcagcggtttccttatgtcgagagtgattctcatcctaagataatccctcaaaactccaataaaattcttaggatcacattcaacgaacttgcctatttattgccaactccacgaactgttgattccgtcatacacccgggttgaacatcatggatttgaacccaaatatcaagagtattcaactccaatgccttaggatcccctccaactagtaacctttcaatgattaattgcatccgatcataagtccttggactcccctcaatgactcttttgatgtccacttcatggtaaaattgaaagagaaatctgttggtatcaagttccttaacgaacattcccattcctggctgccaaagggacgctggtatattctgcattttatcaaaatcgatgattcgattagataaaaaccttccaactaagcaccacctatcatctataccttcactgcctccttccccattcacggcaaaggcttctaactcttcctctttaatctgaaaatcaaaaacatctcctactgcctcccccatatttccactgctagatgccatgacgctcaaaagaaaaaactgatccgaaacaaacttaagaaaatcaaaaactcataacactcaaaccatgtcaatagacaggactccaaatcggtgagattttattttagtttgagaataaaagaataaaaatcctcaaaaggtgaggctaatttctatctccttagaacttttgtatatcttttcaagagtgcttcaaaattttcacccctcactacgtgtatttagattctctttagagactcgttttgtaagtttatacccttataatttttttaaaatcaaagaaacatgcacttttgcatttttcaaaatttgttaaatattaaaaattaaaaaaaa

SEQ ID NO: 39664 - DNA, 1290 bp, Cannabis sativa
  modified_base (867)..(868): a, c, t, g, unknown or other
ctgcttgcctttggcagcagtagaagctttggctgctgaagatgcacgaggaggtgctggagcagattttgttaaaggtggcatggcttcaagttcagtttcctcactctaagaggagatccaaagtcttttggaatctcttttttagaatggatagactcagatttggtctcagaatcattagagggcacctccattggttcttcttcttgagaacttgaagaaaccgatcggggattcatctttagcttctgggaaggaggaatgggtctgtcatggcttcgtttagtgcaaagttccttctcgagtgaagcttgttgggcaagagtgcgagaggaagggcatgttggagttgaggcggcaacgcccttacttgatgcagtaggacgaggtggagaccccttcgacaaagaagacgatgaagtgcaaaatttgtggggacgcacagatttcctagcaacttgcttgggaattcatttcaacttggacttcacaggctgagatttatgctgaggaagcgatgaatttcctggctttgatgcagttgcagcaacaggcagtaaaattggagcagcaggagaatcattcgagggggcttgttcgcattccaccatcttgcttggatgtcctaggttcttagtcttcgtcatgaatttttgaaagtaagaaggaaaagcaaagaaacaagaacacaaagaaataggaatcgggtaggtggtgagaataaatgacaagtgaaaataagtttaaataaacatgggagagtggagaaaaaaaggaaaccgatttcaaaatttgagtaaccactagcccacgaacaccaaagaaaactgcccccactctttttccaaaattatttttttaaannaaataaaagaaaactagaataaccaagatactttccaaaaatagccaatttatgaaaatcctttaatatcaaagacaaaatacaatgaatatgatatcaaacttgaaaaggaaacatatcaaaataaatcaattaagaataaatgttgaaacttaccaaacaaagcacaaaattttcttagcccacaagccaagtaactaatgccccctctcttttatttatttatttattacttttatttttgaaaactcaaaattaatacaaaataaaatatgcacaataaatataaggtattctaaagcaagcaactaatcaaaattcatcataaataacatatatacatgttatgctttcaaaagagattaactaatcagtatctcatgaacaaaccatacctagtagatgttgaggaaaaagatatg

SEQ ID NO: 39665 - DNA, 4725 bp, Cannabis sativa
  modified_base (4205)..(4217): a, c, t, g, unknown or other
tcatctattttttacagttaattgtcaatatagactgcttacgtgtacacttttatacatgtgtcaaatttatattggtacaccgaatattattattttaagagtatataaattatttcaaaatttataatatttttgttttttttaatattttatttttatttttataattttattcaattttaaaatgaattttgcaaataaattttaaataataatattaggtgtaccaatataaacatgtcatgtgtacaagagtgtacatataaacaacctatagtgacagttaaacgaatgacaccttaaatttgctactagtttagtagtttagagtgttttaccgccaaaatttgaacttggagggttaaatgtaagtgaaacaatagttgagaatgttttgcggcaaaaaaaaactctaaaaaaataattaaagaaaatatataaatgtaaaaatttccttgtgaaaagtataaagtaaaatttagaaaaaaattagtatttagtgtaaatttctcattatttttttttttgaaatttgtgtataaatctattgtattatttataataaaaacttgatatttttttgtgaatattttacatttgggtttgttgtttattttggtttgatttttgttcaagtttttttttggtgtcgtttggatgtgaaaaataaattgtggtgctagtagtgggtggtggtgaatgaagaataataaaatctagaagaaaaaaaaatcacaaaaagtagaaacagaagaagaacaacaataaactataaagtgtaataaaagaaaaaaaatatttatttttgagtgtatgagtatttttttttaatttaaaaatatttttaaaataaatatattacatggagcaatgtaagtgtgccatgtctatataagtgtacacataagcattctaacagtcaagttattttgtgagagatgcgtcttctactattctctctcttggcgtctttcttttcttttcttgttttttatcttctgttattgctttggttgacctttgcttttaccttgctcattctatcccttgtctctgtgcctccttcgtgttgacctttgtttgcttgtcttcccgtgtgtccctgttttaggttgtctgtggggttgtgttccctttgtggggcctttgtgtctctgtgttgtgattgtgtttctttatttcaggggttggtaggtggttgtgtggtccctgtgtgagtgcgtttatttggtctgtgtttgtatttatgactatgggtgaggttgttggctcggttgatggtaagaagggtaggtgcctctctttaaatgaggtatccatttctctagccccttgtgtggtgactactaaaatcctctcaaaggtgtgcctttttggcaaaattgtttcgtccagaaactttactccaaaagatgtggagcaaacttgctccaacctgtggaaaactcggattagagtggagccaacagataatgctttggctggacaaaacactttgcgatttttcttcgagtctagagtggttagtaaaagggtcctagaccatggcccgtggtgtatcaatggagatatgctggtactcctctcgtggtcttctggtttcggggcctaggaattatctttcacctcgatctagttttgggtccaaatacatttcctgcctaatgattactactcgaaggtgaatgctaatgtgttgggggctttggcgggtactgttgtgaacattgaacttgatgaattgaagtcggtcacttggaagaagtggattcgggttcaagtggatgtggatgttaataggcccctctgcagcggttgttttttcaaggtcactaatggcaaaaacaaatggatccaatatgaaaagctgggaaccttttgctacttgtgtggaatgttgggtcatcaaagacgagattgtagcctttcttctccggtcacggtgctcaacgaccagggaattctgttcccgttattcggaccctggctcaatctctcttcgaaatatgctagctgcttctctggaaggagtggtttctcggccgttgtggctggtgaaatcgagaaaggtgaagggcacggggatgctttgggtgggtggcgagatggttctggtaggagaaaagcccccatccccggtgtcgaagttaagagatacagtggcgtctgctggtggggccccgtcaactcggttggaagcatcaagatctatgtgtggccgagcttcgaggggacggggaggcgcccaggtacgatcggcgtggagaccaaaggctggagatgcgacaaaggagattgtttcttctttgggtgagccttctttttcaccttttctaaacattggaaagaagcttggccattttccattttcagaggaaaatttgaatcgggggaataatacctctatttgtatgggtcctggggtgaggtgtagtcaaaatcaggtcaaccctttgaataatgatttaattaaagagatttaactattataaatagaagccttgagaaatcaaagaatccttttttacactgctaattttgaattcagtagagagaaaaagaaactctatttttctctctattattcttgctcatgtgttgagaactcaacaagaacaaggttataaactttatcctaatagcccgcactatttcttgcgtgtggtggatcgatttggaagatactggtgtgagtccaaattgcatattcctcatcaactggattaagggatacaacatacgaaaagtttcgagaataccctgataggcttcaagaggtatactctaaacttactgtttttattattttgatttaatgtacacacatatggagatcttgaggggctatggtacgatgataatcagattatacgaaactcttccgatgcgtacttaatttagtaccataaaatcaacaatatggccctcttcttcgacggccgaaagcattggatgactttagaagcaaacttagatcgttggttgttaagcatatttgactcgagtcttgaattgattccccatgatgaattgaagatatacatggaagcataggaaaagttgttcccaacattgttgatccaatttggcctattcaaaaatcataaaatgatcgtcatgccttagttaacagcatcagagagtcaggttagatatttcacctcaaaagtcatcgaccacaatatgatacgacagacaaaatcaaggtaacttaattacaagtgattttttttattgagtaacttgatttaatttttaatattttatttaactattttttattgtcacatatagcagtgattgcgagatgtatacaatagagaacatcgagcatagcatgctataacttctgtttgataacgtacacaataacaatatgaagcaatttagagagtgattgtgtgtagatttattctaccaaaacttagcatgaacttctttttttaatatagatatgtatttattgggataataatgaaatttgatttttttattggtttagttatgttcttagcaatttatcctgattaattttttttaagaagtatcagacaaaaaatacaaccaaaagaataaattatttaaaagtttttactaacctgatattggaccgatgcatggaccaataaggtccaatggtgaattatagatccttgctttttaattttttccaaaagggtcgatactagtctgatgtatggaccgatagggtctgattgtcatatacatcggaccctattagtctatgcatcggtccaatattgggctagtgaaaactgacctgatgcttggtctgatgcatgcctgatgcttttattaattttcatcataaccctaccaggcatctgaccagcattgaatttacatcggactaacatcgggccaaccatttttttacaggaaaaaaaagttgaaaatatttttgtttttcgatgaaaacctactcgtgccacaaatattaatgttcaacgaagtccaacaagagttcaacaagaatacacaacattacaatacataacaatacgattagtaaaattcaacagtcatttttaacctttgtaggtgcaagactttctattttccctttgccaccacacttgctacaagtttgtttcatcacaatccttcaccattataagtattttggattgacttaattcttccaaccttttgcttattgggtcgccctactggttgcttcnnnnnnnnnnnnntaattgtcatgttctttatgtcattaggcaatttctatttatcctcgtcacaaactgacataattgtgcattcatatgtgctcctctaatattctattgtgtaatatggcaagcatagtgcgtacatgctaacacttcgttgttgagctgcaacacatgcatgaggataaggaaacttcatgatttagaacaagttgtaagtgcaagtccactacggcaccactctcaactaatcctccatggtggacattcaacgtgtaaggtccacatgtgtcaatgtttaaatatcgagatttctcaaactacaacgccaagtcctcttccatttttggtgctatggtcttcgtccacttgttcgtgtagcaaactacttttggactttgaaccttaggaattttacaaaagcaatgatcggaaagcctcttgcgtccttaattatgttgttgaaactttcaacctagttactcgtcattacattataacatacccctagaaagtatgaccaaac

SEQ ID NO: 39666 - DNA, 1401 bp, Cannabis sativa
tataaaataaaaattattaaaaattaaagtatatttataaatttttgaagtgaaaaaaaaaaacaaaaaatataataataactattacatattaaaggtgactagtgactagtgatataatttcaatcgaattatcactactatattatatacttggtcttataaaattacttttaataaaaatcaaataaaagaatacacgactttgaaaatattgcaattgattaagtagtgacattaatatattccgtgtcatgaaagtctttttatgttgctttgaaaacgacgtatatatttttctgtattttatatgtcgtttttattaaatattaaaaaattgatcccttcattcaaaaaaaaaaaataaaaaaaaattgatcccttctctagttgctagttgttgttttcttcactattccattgacaaattaatattccagctttaattaattaatcttcaatgttttgatcattgatttggaatttatatagttgaatcgatcttatatagagattggattataacatatataagtgaccaattaatctaattaattgatgagattcaacttttttttataattatcctctctcctcctccgttaattctgtctggtgctaagcattctttcacaagatagaatgttcagtttggcaactctgttaggaagatgctgaaacgtgccagagctgcctcggaggatgaagatgttgctgtggttccttcacttgaaacctctgatgatcaggcgggtgttgcttcgcaaccccgcccagaaaaatgagtcttttgagctggaatgctcgtggtttggggagttcccgagcattccgtaacctctcccttttggttaaacaacatcaacctcaacttctttttgtaatggaaaccaagctcagggctggttctatagatcggttcaagactcaactttcttttgattttggttttgaagttcctaagaggggtctaggtgggggcctttttcttttttggaatgatgttgttaatcttaatattttatcctactcttgtagtcatatagactgttttgtacaaatgactgataatattaattttcatctttcttgttattatggttccccttatagttctggtaaattagaatgttatactttgctcaaccgtttatatgatgttgctccaacttctccttggctaatcataggtgattttaatgattatcttgctctaattgataagtctaccagtactatgcctccttccaatgccatgattcacttccagacttttatcactaagtattctctcactcctatgcctttcaaaggaaaccggttcacctttaagcatggtaaaactctcgaaagacttgattgggttgtggttaatacgaactggtttgacctttttcccaa

SEQ ID NO: 39667 - DNA, 2105 bp, Cannabis sativa
ttctaagaaatatttcttacagcagagaaataggcttcaggataagattgattagctaaaaaggaacagcaacaactgaaatagccaacttgcattataaatgacggtgacaagaaattggttttccaacaaaaacttagtagatgctaaattccattaagattttttggatgatattgctttacgtaaactaaatagaaattctgacatgacatacctgtctagctaatttttctatttccaagttcaaccctcaaagtagttaagaagcatgtctgactcacaaacttcaaagtctaattgctataatcaacccaattattaatcaaatgtctcatatctaacttaaagttcaatagtccgtgaaaccatgctaatcatgttaagagaaattcagcccaagaaagagaaatataacgttgtgctattcaattactcacatttccgacaaaaacagatcgtgaatctacttcttccttgtttgcttgagaagcagctgcactagcaggatctgtaaaagttacatttaataaggaaagcaatacatgaattgaaacaacaaaataatgcaggttacttctttcttcctattataacacatcttccttggaaaacattcaagcaggcactaaatatttcgtcttaagattacgcacttactctcaaggaaaagtaatcattttgccccctcttttttgtaaaacaattactaaagcctagtacaccaaaaatatgttccttcccgttctaagcaaaccagcagacaaaattaaagaaaactaaacccattgtcagaaaggtcatccaatcaaagtaacagaaactcgaaaatctaaatttagtgttaacactaccattaggtcgaacttaaggttaataatttcatagaaaaaaattagtaaataaataattaggaggaaccttgaacagcacccatttccttctcgaccttggcctgcatttcgcgaagagcggcagcctcctcctccatctctttcaaccgcttcttcatctcgtccaattcctacaaagccaagaacatcataagcattatgtcaactgagggtttcgataaatttagcagaagaagcgattgaaggcctagggttttgggcttcatggatgaatgttggtacagaaaacaataggaagaaaataagagagaaaccttgacagcgtcgtcatcggcaacggacatatcgacgtcggcatggtgagagtcgacgtcaccttccaattcgccctcgtcagggatttctccaccatacacctcatgctcctcttcctccatttctctctcactgctacgcacccaccgtctaatgaatttccgcactataaagctacatacactatatataaaagaaattttgacataaattaccacaattcttcttaaaaaaaaaaaaaaattataaaaatgcatagatttttatttttgctatttaattttttttatttacaatataaattttagtaaattattaattgggctaagatctaaaataatactaaatttaaaagctaaagtagtaaatattttttaaaaaaaaaatcaagaaaataactaaataataaattaactaataaaaatacatttactacatattattatttttaaaaaatataataattaaattaagtaatataatttttttagtattacatattattatattttaataaaaataaaaaatatatatgtatttgatcattacatatatacaacaatatttaatatatcatattactaaaaattaatatacgtaataataaaattatacattacaaaaaaattataacaatactaacttaatactcaaaaatatatatatcatactaatgaaattatatatatatcactattaaaatatatacatataaataatttaatagaaactaaatatattcataaataaataatatactataaacaacaaaaatcatatatcatacaacaaaatatttatacgtacgataaaaaataaaaaaaaataataaaatattattgaaaagaattatatatacttgttgaccgaagttttcggcaaccaataaaatattataagtttaaagagctataagaaaattagagaaggattttt

SEQ ID NO: 39668 - DNA, 2967 bp, Cannabis sativa
cgacaaaaattaaaagtaattaaagtaattaattatagtaaataataaatttaattttatctaagcaatcaatttgaaatgattttagaaaatttaaataaactaacaaagaagacaaatagcaaaattaagttgagaataattaaatcaaaattattgtctagatttcgattttactctaatgtaactataattttaatcattaatgtgcctagtttattctaatatatttaaaaacctaactttattatatctttatgctctagtgtcgcataaagaatgtataactaaataatagtctatatctttatatcactattaaaccataattcgttaagtctctccctagaaataattctaaaaattaaatctcttgatttcataatgtataattatttcaattacctaagcgaatgcttatctttcgatctcacaccactaaagttgatctacctgatgtctaattgttcaaaaattcccttgagtaataaatttcacaatctaaatatacccctatttatagtcacataaagcaaaaccatatataaatcatactcgacaacaattaaacaaggtaaaattatattggactaaactaaactttacatcaaatcataaaatcaaagtcataattataaatccatgtaaaccctaataactaagaaaattagccacacatagtgtggtttatcatctcaaaatattatttataatctaaataataactaagaaataaagaagaaagaagaagaacatatgaaaactctggaatgcaggttcagattacttgtttgagctctcaatattatatttcttctctaaaaatgtgtttctctatcgttgtatatcattctggtcatttttaggatgttttataggtcaaaaatcgactcctagttgaattaggttctaaaacatgtttaaaatattcatttgtacgatgggttgccacattaaaggcgatgggtcgccactttatgaatatttgactactttcgaccttgctctgtaaaacatgcatagtttttgcgtccaaactccaaatgagatgatttaacatgttttggaaagttgggaataaactctatcatgttggtttttataagctcttcaagaaaatgatgggaacatggtcaaaaattagtttaacgagtttgagccatgtgtaatactctacatctcagtcggaacaacagtagtcatatctttactgatattagtatttacaaggttttaaaaatctttacaaactctcaagattacaagaaaatgttttcttctctagtttaaactctctctctcaaccttacattatcacgattttcactcaagcaataatagtctaattctacctctgattacaaagattgatagttatttatagatttgtattgttgcctaaaatagttatgagaacatcgtggcacatttacaccgccttaaatatttcaactcaatactagcaccaataaatcacgccagctttgataacacgcttttagtacaaacaatctgaaagttttgatacagacaagctatctgaatacgtacaagcgctccttcccagatgaacaaccaagacttacagtaagttatccggaagtgcatctccaaactaatgacaagctatttggagaggcagtaagcttatttggaaacaccttttggattctacatagtctttcgcacaagactttctaaattcacaccaagcttcccgtatctacactccgaattcacagtttttcttccgaatgacaaaatttgtaaccataatcaacaacacatactgagtaccaaacaaatcctaaaatgtaaatttaatggtttatcttcttatttgattttatcatgattttgttttgtagcttttattttattttatttaaataaaatatcatataatatttaacattatgtcaatttagatacaatatcaatttaataattacatatttagtgcaaccttttttaattataaaagatttatagcgaggcttaattattagtaatttgtgaaaatctaatatcatatattagatgcatgaattattttactcatcaattaattttgagataaaactttatacaacttaagttgcttaaactacatcctagttaattactctagtttacacttccaaagagccataagaaaatataaggatcaatagtaaataaacccatacatagtgtaacttttacttaaaaaaaaatcttgatacattgggaaaaaaaaaaagtttatcacatcaaagtttgtttttaacattatatgattaacttcaatctataaccaaaatgtagttggcattggcaaggatttcttagtatagttagtttactatataatactcaataattcaacatagttctttttttttttttttttgaaataaacgttaagatatattgcaaaaagaaccaaaaggggaggcctcaggcctctacaagcatgttcttttaggaatcttatcaaagttacaagcagtacaagttttagccaaactagaacaatgaaaaataaagttcttgattgtttacatagttcaaacatagttcatagtaatatctacatcatactagaactagttcgtttaaaaaaagaaagtagattagagcattattattattaataatatttttgctgaaaaaatagactatagctatattattaattctaaaaatgctaagaaatccaagcagacacagcataaaggggtcggtcatgccaacacaacacaaaactagctttgttattcacaactttgtaaccctccgactccgagccacataccttgaccattttgttagcatcctccacaggatcaaaccacattcgacttggcctgaacccggctccacctaacctaaccacccatttctcatatctctcgtgcctctctaccctatccaaaccctcacacgccacaatgttctcaatctctcttccaaacatttcctcta

SEQ ID NO: 39669 - DNA, 1757 bp, Cannabis sativa
  modified_base (1601)..(1603): a, c, t, g, unknown or other
ataaaatattgttttcgattatttttattttaaactgattcatttctctcattaattattctgattccaattacagtttagtaaacgcaccatcaaaatatcaaactcttctaagtaattacatgttcatgcacgaacaagtgtacaaccagtgacagatctagaattcaaagtgaggggggccgtattttttaatgggattagaacccttgtcctcgaacctatatgctaagtagtttaaccattacaccaaagttaatattatacttataaatattattttttattacaaatacatgttgtaactaattaaattacatatatatttttttcccaattttttttcaggaaaatgacttccgccttggttatatgtgggtccacccccatgtgttcaacaattatgaaacttttattaatcataatcacaaaacagtacaaggagttttctcaattttatttatttttattgagtattgttggacacacacataacattgtatgttaactaataatgttagtataattgtgtagaaaataattatacatctgtaaattaaaaatttgtaatttaagttattattgccataaacattactatagtgtttaacaatactatgatccatgagatgatgtttttactagtagttagtaattttatataatagttatttgataaaaatttataagaattaatattgaattaaactaataacataataacaagatgttatttctttttttttattactacatattttgctcctttaaatagaatggttaatttggacaagttttgaaaggacactccttaaaacaggtaatgtcttcttctttcgattggacatattcgtaggtggataatggatttggtatctcgaccatacgtggggcccagaatagcattcaaatttaattgagcttcaatttctatgggtccacctgttaatgaacgcgcggcgcacacgttatcaattttgaattggatttgaatatcgtacatatacgctgattgccacgtgtcaaatggtggcacgagcaacatcattcacagtgctaacatgagccttggacgtaccccgcaattagataaacaatattaattagcatttaaattaacgtttattggggttgaactaatctagagcctaccttaattaataatactaaaagaattgagtagcaaaaagttcatcgaaactcatgaattactcatctattaaatattaataattcagacattagtcggtgaaaaaagaagataattagattatttaattttacctatgaaaggtacaaactatattcccctatgtatactgtttgagaagaaagaaagtacaagattggacgatctttcagattttctttattaagcattgcttaagatactttatgatatttaataagggtgttcattaaaacgttcaaactgtctgcaccacactgcactgcaaaaaatatgcggtttgaaattttttgcggtgtggtcgcggtttgaatttttcttaaattgcgcggtgcggtttgcagttttgaattgttaatatgcagttcaaactgcaccgcaccgcatattataaaaatacaaatttttatannnatttaggtccaatatgtgaagacccaacccaaacccactaattattttattgttgaaacttgaaacttttttttcatatttattttcaaatcttatggtatttttgacaagtgttgcttaagttttacttcatttgtgatagtttaattattta

SEQ ID NO: 39670 - DNA, 1627 bp, Cannabis sativa
atcttatagtatttattttatatgttacaaaaaacacaaaagaaaaacggaagaaatgcattttttgtttattattatattttgattcatgtcaaggctgttgaaaaaattaaagagttgaatttgttgtggtcgtgtgtggacctcttgcagacatggtagtgtcgccaatttggtaatgagttaccattgttttgttctatatcttcagaatacatcttactgtatgtctgagattagattgttttaccgttaggttatcatatgggcttctttactcgactgaaatttcttataagatttgtaatgaaatgtttttcttggctccaccattttaacaaattagtgagatgttattttccttccataattataataataaataaataaaaatatggaagcgaatcagaagaaagatagagacggtccatttgcaaatgcatctaaaaagtgagtgaagtggtgtgtcttgtccccctactaattgatcctcatgtagaataatagaaagggaattgcatataattgtgtctagtttattactaacgtctttgcccctcctctcaaatttttcttatccatcatcaaatttaggaaaggtgggaatattggtggataaactaatggcacatacctcttcaactaagcaggcccccacatgcaccaaaacctcttaaaagaaccccctgcatctatgatctgttccactctagtagcttggaccctagacatgaataacaatgaaaactacacgatttccagaatattttgccccataattaaaccactaccaacaacatctattaatactacaacgaaaaagatctctaggggcaacaattaattatcgttgcaaatagtaaggttattagcggcgtaattgcccctaataatcattgtagatgttggtatctaattttaaactattagagataagggtattttctatggtattaagattgaatctaatgttagagattttattacaatggaatcaatacattaatttacaactctattataatataatacaagaaccaacaaagagattaaataaatattacaacaacttacactatatatgtatttatatatatgaaaggtagaatagatgaataaattacataatattatataagatatatatattatgaagaagaaaaagaagatccgtcactgacaaccttatgtgtagaatagtggggataaccatgacatgaacaaggcattacatttttgtccaaaaacttatttctcttatctctaagcactgagggaactctctaagaaatagtattgggattatcagaccttagggttttcgagcaatgtgctttttgatagaaaacttggtccatttcaatcgagcaccaaagacctccttttataatgtctaagtgatcacacatagaattcaaacacactacccctaatttctatgataaaaattagtatttatatgatttgtaacaactatatttcacaactttgaatgatatcatcaaatgtatgttacatcttttttattacattaaaatatgatcaaccaaaagaagttacaaaagcaattaaacttgtaactcctctccatgttacaaagtgtaggttgttgggaatattttaccag

SEQ ID NO: 39671 - DNA, 1715 bp, Cannabis sativa
  modified_base (1415)..(1415): a, c, t, g, unknown or other
cagaagaagtacttagagaaagtattaggaaaattcaagatggacaaagccaaagtagttaccacccattagctgctcatttcaaattgtctcaaactcagtgtctaaaaatggagaaagaaagaatagcaatggatgagtagcaaatgatcgatttggattttcagaattatcatcttagtttgaagtgctttgagtctgtgttgctcttcctttcgccatagccagaagaataggaagaacacagaaaaacgaagaagaataagaagagaaagagagaaaaaagtgtttcattgattagagaatcatagtgttacaatgagcttatttatagtttgatataatataatataatatatataaatgtatacaatacatcaattgcaacgtgaaaaccacaagattgttcgttctattatggtttaaaagatacaacaactacatatacaaccaacttcctcaaccttatttctatagtcacttttgttgtttctgtcatcataaggtacaatataatatatattatatatatttgcatgtaattaattaagaaattatagatttgtgttaattaatgttgattaaaaatgtgtttgttgtaagaatggagagacttagattgggaagcaaagaagggaaagtaaagacaataggggctttattgtgtgtgagtggagctctactcactgccctttacaaaggaaatgaattttttatatctaatcatcattcagatcatcatagtcccatcatcatcacacctcatcatcattggacacgtggcacaatcatgttgcttgccagcacccttgcttattcatcatggttcatagtccaagtactaaattctcattcccctattcttagaattttcatttttctaatttttattttcacgggtttaaggtacaagcctctaaatatatctatctataaatatatatatatatattttaattttttagaaaaatttaagaaaaagttaaaaaaaaaatagtattacctaactgattaccctcttataacaaatgattatctctactttttaatttccatatttttcatataaaaatgactatttttttcctttttaaaaatgccacatttttatggagtttgtataaaaacccatataatttgtgatttgttcttagagtgatttagaccgggcctaggccttgtttcgaaattcgtctcaacacaccctcattgaaaagaccttattttaaattccgccctaactcatgccccatcctaaaaggaaaatttacatgttatgctaacttttgttattttttttacaaaaatactagcagatgatttttttttttctttttcagtatatttttttataagttttatgctacagtatactgtgttaagtttttactggtgttctactggtgttttttagntgttctactgttgttttgaattattctgctttgtgttttacttgagttttataaaaactatacagtatttttgaaaaaaaaattcgtgtgacagtatttttataaaagttaacccaaattctaatattttggtaagtttccccctcaaaaacatgcttaaaaatacattatttcaaatttatttatatttcggtccctcaaatgcttgagacattgtttttaccaattactcctaattttgtttgttatattttggatttgcaggtaaaattacaaaaacaattaccatttgtatacttg

SEQ ID NO: 39672 - DNA, 2392 bp, Cannabis sativa
agtcaaagtttataattttactgctattattttacaaaaatactatatttttataaaacaaccggaaaataattaaaaacaacagtagaacaactaaaaaataacgttttacaaacattttactgccattatacgatatatttttttaaaaaaattggcctcacaataaaaataattgttacttaaaataactgaattgccattttggtgccacgtaaagagtagtgtaaagacacgtacgcgcgatgtgtaggaaatggaatgtgatagaactatagctagaaacatcttgaaacgccaagaagttcccccacgcactcatctccattctgcaaaccgtagtatatatacacgtctcttcccatcctcattcatctactcatattatcatcactaaacaccatactcagaagtcagaaaatacaatcataacccttgacacatcttggtgtctgtttccgaattccaatcaaatcgaaaaccttgatacaatggctctcagtctcttcggtggccgaagaagcaacgtttatgatcccttctcgctcgacatttgggaccctttggagggcttccctttcaatacctctgttgccggtattccttcctctgcccgggaaactgccgccattgccaacacccgaattgactggcgggagacccctgaagctcatgtgtttaaggccgaccttcccgggataaagaaggaagaggtgaaggttgaggtggaagatggaagagtgctccatataagtggcgaaaggaatctagagaaagaggagaaaaatgacacgtggcaccgggtcgagaggagcagtggcaagttcttgaggaggttcaggttgcctgagaatgccatggtggaccaggtcaaagctagcatggagaatggggttctgactgtggttgtgcccaaagaagaggagaagcagaagacagaggccaagaccattgagatttctggctagtttttctttgggactcttgtctttttgttctctcagtcgtctttgtagtgtgaaagtactagtatatggctttgtgtttattttgtgtggttttttgtctgcgtatatattgtaatatgtaatatgtagtatgtagatataacatgtaaaaatcaggagagaacttggactggtcttggaattcggtggtttgtatgcatacatataatattatatagactttcctttcttatattgttgattgtcagggattcataaattgaaccaatatgcagtaaagatactaataatattgctaacactttttcaagatattcaaaatatttgtgtcaagatggaacacaagctaacatagatgtgattttatcgagaatgtctagcaatcaaataccaatattagagctgaggaaaacgcaagcattctttccagtgtcttagacaagatggtaaccgtgcagatatattgactgaaatgggtggaatttgtttaagccaatattttgatatcattgttctactaggctaatggttactcctttaacagtcgcctcaaactgatctccctcggaagaatggtcaattgctagctaaaactgagaacctatctagtaactaacaaatgatttgtaaagaattacaatttccttgtaagcaaccgtgtactgatgaagtggaaatttgctttgaagctccttcctaggtgtgtttcacttttgtcacaattttttaaatgggcaagtgaattcaagagaacagttgtttgagccaatattttgttcatcagccacaatattggctaaaaagcacgatattggatgatgacgaggagaattgttgggtaataatttaccgttttcaggctttcaatcaacactatccatatagttaaccaagtcgggtcaagacattaaccaagataaatataaatggagtacgtgtcttaactcatttttagcttgaaacaaaatttctccaaacatgaacgggctttccatagaggtagcattaatttcttttgtctccttagacaatgattgagaatgagaagggtaatgtgcctttgatgtgctagcttcttttggtgttctacctcgagcaaatagacattagactctttccttcttgagctctttttctaattgcagctcaaagtctggagttcaaggaccctagccaagagagataacatttgatctctaccataatttaatggctattttgacttcatcaaaggccatctgtaatgacagtcaaaataacgacttagactttctttatcaaccttgtttgcaatgtaagccagctccgtaatagtttcattgaacctctcactattattatgtaaagaatgtgaagagtccattctaaaaactatcttttgcaaaaaagattaattttaccgaagatagaaggaaatatatata

SEQ ID NO: 39673 - DNA, 1435 bp, Cannabis sativa
  modified_base (1329)..(1331): a, c, t, g, unknown or other
  modified_base (1388)..(1401): a, c, t, g, unknown or other
aataaagaactaaactctaaataaaattaatatttacgtgcctcggcacgtaacttttaactagtatatttttatacaccaaaaattgaaaaatatatagtgaaataataatttttttaacaacaatttgttatatgggcacaagtattcggccagagtctcgattaaagatgattaagtttgtgtctaaggcacactcaattagttctatatatacatagttttataatatgacattgtatttaagtaacttaaggtaactctaaaatcgaatttattaacgcgctaaacacatacattattattagcttttaaaaatattcatcatcaaaatttgttattaaatatataccacaattcatttggtaattgttatataactaattattcttatttataattaatctaaattattgttttttataacaaaaatataagttattctatgtagggtgtagttttaattagtgttgtactagttatgaaagtgatggaaaatatataattgatattttagtactttacaaagagttagctaacgcagaacacctagaccatgtttataccatacacgtggacatgaacttttagaacagtgacactataattaatttaaatattaaattttccttttagtattttatataattataattttgttatataatattatacatttatatttatttaaaatatcttataaattattaaaaaatttaaaataatttaccatattgaaaataaaattaaaatcgtttacttatgtaaaaattatttaagttttttaaaattttactaaatgtcgtaatatcttagacaatcaccaatgaaagatttaatatatttgtgttaaatttaacaaaaataattttatgttatttttgactcactatttataattatactctaatatacaacatgtttaataaaaaatataaaatttagtaaatatcacaagatataaaaaaaagtagtatttattgtacatgtggactaaatttaacacatattatttaacacaagatataatatgtgtcaaatttagcatattttttagaacattattaaaatagtaatttttctaaagtattttaaaatacagcaatatactatttttttaacactttattataaataatctaaaataactataatatacattattatatataaaaaaaatataattataattattcagatatcaaaaatacgaaaaaaaatgcattattcatacattatctttaaacagtatttttaaagaatgagaattactccatatactattttctaaaacttttttttttttaaaatttacggtttgggtttctnnngtggttgcagcgctagttgcattaaaaatttctgtacaattttctgttacaatttannnnnnnnnnnnnnttgcaataggagtttttatgtagaattccgtaaa

SEQ ID NO: 39674 - DNA, 1078 bp, Cannabis sativa
aaattactcacttaccacagcagttcgacacctttcaccgaaatttgggtcgagaaagtaagagactcgatcaccctccatgcccacaatgcgcttggtcattatttttccagggttttctggcgagcggaccaatactaaatcgccgcgacccagcttcccaagccgatgggacacgtgttcagtgattaccacgtcgccggttacattcaaggtagggagcatactaggtccgtgcacctgcaaataccaaataaaaaccggcctttcttatataatgatctccggaaaaaggaagaagaaaaacatgactaagccgagacaattggggaaagattgagaacggacgaggttgcaggagcagagataggtgttggttatgtggaggagggagcagaactttgctacaattaaacctcgatccattgcctcctttgctaagctccgccattgtcccataagaagctcactgctcacgcggccttggagtcctggtgaagaagaagaagaaagaccaaccaaaaggactagaaaggaccaaggcaagttttgatgggcttgctcatggatcatgggccaacccattgaaaattcggaaaatatactagtatgaggtaaaaattcgaatattaccacattactttttgtattgatttttaactacgctgcagatttaaaaattggtccggttttgattgaaaaacaaaaaaaccttttgctgaaaataagcttctatccaaaaaagaattgtgttactgtttttattcttgttatgagtaataatatgtacacacataatttactttacacacaaacataacacacacccatgtgacaagttactcttgataagtgaaatccatcttaaataagaatgatcggttaaagttacttaccagataaatgtgaattaagtttatattttaattatgtgtgtataactcattacccttaatattatttcattatcaaagcaagggtcattggtgtacactacacaattgttttcctcactatgattaatgcatccaatgcaggagaaaaatgggaagatataacaagttaatggaatgataaa

SEQ ID NO: 39675 - DNA, 1756 bp, Cannabis sativa
ccctgtgaccctgtaaagggaaaggtacctaagactgatacttaagggggaaaacaggactatacttcgaaactagatgttatgaaatttgaagagtaaggactaaagagccacttcacactcgaaagtacttctaagatgacagaggtgatttatgttggtacttcgctcacggcccaaatgctcagcagtacaagtatttccctcgattgcatggggaagaattgaacctaagcaaccaattcaactatctttgcacttgtgatcctactgaagactacttcaaaggaaatagttacaataatgatctagatgactgatcccgcaacacatcgtcccaagacgattcgatatttgtgcttgaaaagtctcagatgtttccttcacaaccccattgtcaggagacaacatccagaccaaagtaggcaggtgcctttgatcgactctgaagatgaaaagacatgcgtgacaccctaactagaaaatggttagtgtggaagcatgagcttctagaggtgaccctgattgggcaatagaagttccgactaggacacaaaccatcgcccatagtgtgaatatgatagagtttgcaaatctagcagcattggtaaaaggaatcacgaccccaaaatttcaaatttttgaactggataaagagcgacgctcaccgctctaagaccgaatcaaagctctgccaatccctccaaagttcaagaacccttcctgacatcaatacaccgggaaagaagacttattgtcccacattcattactttgaagtgcacaccaatttgtaaggagtaagggactgatgataattcgtacagaaggacatggtatttaaagatggaattattacatcaaaaatataaattgacattttatttacaaaaatacctctataaggtgtggacaacatttatacattttatgtgattttaattaccaaaataccttttacactatcacttacaaaattagacaataattatatagtggttgctatgtggttgcgcggtggttgcatcagacgatgattgtagggtggttgttgggtggttggctgaaggttgcatcagatgaaggtttcaatcagacgaaggttgttgggtgtttggccgaaggttgcattagacaaaggtttcaatcaaacaaaataactgttagaaaaatgtttatgcaactgttatgaaacatttgaatctccctaaggagctggagattcttgcatccgatttcccccatgcaatggttccacttggttattagccattatctgctccgctggtgcagataaaaaatgattggcatatgaggtaaaggtgctgcaggagacctttgttgctttaacctctgaatttcctcatcatgttgttgaatcatagcttccatctctacgaacctttactccaaatctaatggagcttgtggtggataatcaacactcccgccagaagccctccaagggctttcacctcaattacggggacaacttggattccattctctccaaccattaccagccctgaccatattgtcctgactctccatattgcactaggtgtccattctataggatacacctgtcgattcataagtcggcctagtcaggcaacggtccaagctgtaactttactatagatttaaggcaattcatttacaataaataattataatctattatgcttcctaacatgcttttctaatcacataaattactaaacaagtaaagacttactgaatcgtgagtcgagctt

SEQ ID NO: 39676 - DNA, 1107 bp, Cannabis sativa
atataaatttctgaatagtaatatcataaaattactacaataataaatttttatcaaaactttaatattgtaaactactaaacttatcatttcttttataagtacagttaggaaatacataactacaaaaatacttgattgttgcaaaaatgttacaatattaacatgctaatttgtaactaatagacgcattatctgtaacaaagatttatggaattaatttgtgaacttacctaacatttttgtatctaaagtttatataaatactatattaatgagttaaacaagtagctagatcacattgaaagtgtacaagagataacaaggtttttcatcttctccgtctacaacatctaacgtcaaagagtattgctatactactagtagtgtccatcattgtttataggtgacgtttcatgattggttagcgatattttctaaaaattattttattttacgtaagttatatgagactcgatatttaattacactcagtataacattaatgaaagtgctacacacgagtggtactttttttagcaattcttaacgtcaaatggtgcacaacaactatggtagcgatggaagaagaagaagaaaaagtggttggcagtggaaggaagcaagcctgactcttgatcttgaggatatgcaaaagatcatatttattttataaaaatttacatataaaatgttttttaatgggttttcataaataagtatattaaaccggcatgttttggacatagccctttttttgtttaaaaaataaaggattgaaatatccctttttttctttttttttttttttttggaaacattgaaatagccctattgatacgtgttagtttcactttttatagcaacaacatgcattttgacaccttaaattatctaaaatttcaagtaaatctacgtgacatctctcctataattaaaatgtcatgaaagttttttcttttacttcgaaaattatcatgcaaacatatatatgttagactctctatctaagaatactatagacagctatgttgtagtgtatatccaacaaaaatgaccaaaaactgcagttaacacaagattatgatcaagtgattataaaagaaa

SEQ ID NO: 39677 - DNA, 1924 bp, Cannabis sativa
tagggcacaaaagccaacatgttccaccagcaccgggcacaaaaacagaaaacgagaaattcacgtaaatagcataattaatacatactgaacttaaataaatctccacaatatatgaattataaataatagcttaatctcataattaaaccctaattatttaataattcatcgtattaaagtaaggcagtcattacaattattcgcccattaaaagaagttcatccccaaaatctaacttgaataactctggatattgagtccgcatgtcagactctaattcccaagtggcctcttccactttactgtttctccagagtactttaaccaacggtatggttttgtttcgaagtactttgttctttttatccaagatttgcactagctgctcatcatatgacaagtccagttgtaactccaatgcctcataactcaggatatgcattggatcagatatatacttcctcaacattgagacatgaaatacattgtgcaaagctaacaatgttgggggtaaggctaaccggtatgctacttgtccaatcctttcgagttttcgaaaggtcctataaacctaggacttaatttgcccttcttcccaaagcacctgattcccttcattggtgatacacgcaggaaaacatgatctcctggctgaaatgtaatgtctcgacatttggaatccgcataacttttctgcctgctctgtgaagcaagcatccgagctttaatcttgtctattgcttcatttgtcttctggactaactcagggcccaaatatttttgttctcccgttttgtcccaatgaattggagagcgacattttctgccttagagtagctcataaggagccattcctatggaactttgataactattattataggagaattcaatcagaggcaaatacttactcaatgaacctccaaagtccatgatacaagctcgtaacaaatccttaagtatctgaatagtacgttcagactgcccgactgtttgaggatgaaaggtcctgctaaacttcaaattagtacccatggccttctgtaaactcatccagaacttcgatgtgaacttaggattcctgtctgaaataatagacttcgggactccatgattgcgaacaatttcttttatgtgcaaatcaacatactgatccactgtatatgttacttttacaggtaagaaatgtactgactttgtaaagcgatctacaatgacccaaactgagtcgtacatccctgtggttctgggcaaaccgaccataaaatccattgcaatgtctttccacttccattttggaagtgataacggttgaagtaatccagccagtcattgacgttctgtcttgatttgttgacaggttaagcatttagacacataatccaccacatctcttttcattctgtaccaccagaaatagggctttaaatcttgatacatcttggtggtacccggatgcaatgagtaaggggtagtgtgtgcctcatccagtatttccttcttaagttcaacattgcttggtacgcatacacgagtcttaaataacaacattccattactcaaagttaagaagtccttagctttgcctgctaagacatcttctcgagccttaaccagttcagagtcttctagttgtgctattttgatcctttccaacaagtctgactgaagtgtcaggttatgcaattctccaattacaaattcaatatttgccttagacatatttgaggccaactgaggagaaatcattactgcactgaaagtttggtcaggccctttccgactcaaggcatccgctacaacatttgcctttccaaggtgatacaaaatttcatagtcatagtctttaactaactccaaccaccgcctttgcctcatatttagatctttttgagtaaataagtacttgagacttttgtgg

SEQ ID NO: 39678 - DNA, 2306 bp, Cannabis sativa
aaaaaaattctaattagccttttagtttttgtattctgcaagcttataataatgaagaaaggaaacttctttagcttggattgatttcctatttcttaaaatggatcaagattggccttttcatctcttgaattcgttgttaaaggtcagtaatgatcaatttccaaaatcaatgtggaaaatcaaaaaaaaaaaaagaaacctaacttgcaaggtcgcggcttggtaagcaaggttgtggtcttgcccttgttcgctagaaaaaaaggaaactggaaacaaagaatcaacgaagaaataaattttgggaaattacttataaggtcgcggccttgatgtttttttgggcaactcgaattttcactataaaaggggaatgatagcaagcttttgacactcgaacgttgagaagaattctaagtgtggaaaaagagcaagacataaggcactagtggaggactccaagagtatattctatcacttcaactctatcttttatatctttagtaaatttcttctctttcaaattatcttgtagtagctaatttttttttaaagattattatgtgaaccacttgagattattttataaattaatgtgattgtttaatttctttttcttctctttattcagaatcataccatttgttataattgtacaaatattgactgaccactcttaattgttatttattaatttaaatcaaaattctaaaaaaaaatctataaatgctataattgttagaaatataaatcaatttaggacaagagtatctaaattatttgtataatttttactggttgttatgcttaattaattaaacttaccctaagaatatagaaagactttatataaattgtgtttataaaaatcttaactaaattataagtttcttaactcaacttatcaattgaataagaagaagaattgaataattttatgaagtaaaataaaaaataattgagaatcataataatctttatttttatcattgttattttaaaaaattttaattattgtttattttatttactttatttaacaactattatttatcaaatagaacaaaaaaattaattaattagtaattaataattaatcatcgaaggaacaatactttatttatcaatattacttttttcgtttccctatatttatgtatcaaattttaccgaaacgaaaaattccatacataaattttcaagcaaggaaatagtttctcattgaaaggttatactaatatgtcaacttaaatcccaaaaattgacatattaaatccaaattaagatatacttttttcatagtgctatcaagaactatacaagacaagaataggaacgaaatgaggataaatttacctttgacgtctcgaaagtagagttgttttggtaatctccacaatacaatagcattacatttctatacaagtacaccagacaatgtgcagagggaaagtcgtttaacttacatcaacgtatctctaactttcaaggtctttggcttcacaaaattaggattttcaataattccttgaaaacctttatctttctgctttcattattaaacaacagggcatatatcccattattagttccgtgcataaaacagtaaaaaaagtattgaaatagctctctacaaggacaatgagccatattaacctcattgtctccatctgattcttctccaaactcctctccgtattcttctgcagactcttgttctcttcctcgtactgaacttcatactaataacatcaaacagaataacttgctgaagacatagagattaatcaaaatacgcttcacggaattaaggttaactacaacatatatagacgtgtatatgtaaatctatatttgcattaatgttacaagagagagtaaaaacctttttaaacgtgcgaggtagaagttccaccaactgcaattatatatgataaacaaatggctatagcaaatgaaccaaattccgttattgatgttttaaaatcaatccagaaaagaagttaaagtacatagcattctgaagtctgacagtaaaatccgaattttgatatgtactaaattgtaactcccaaattaaatcgtgtagcttgaactttcatccacatcacttccattggtaaaattgaacgtaagtccttaaatccagtaatctttaatactcgagataatttttaacggccgaccaaattcttaattaacctataaaaaaaataggataatatgtacaaattagtgattaaacacatatctcccaaaacacttcccataacacaagaatactaaaacttcatccactaagt

SEQ ID NO: 39679 - DNA, 3936 bp, Cannabis sativa
catactcagctataaagaaatatagaatgccgggcaacaaagtgcgcaacacgattcgcaaaatgcttaacaaaaaataccgaaacatttaacaaatttttaagaatgttcttacaatcttccaccaccaaaccaaatgttgaagcaaagatttctacactctgaatagctttaacacagaccagactgtctatctcaagaatagcctgtctgtaagtgtgatttttaagccaacttaaagcctccctaatgcccatgatttctgccaatcaggagagactttgccatgtttgaacccagcaaaagcagcaaccacatttccattcgtgtttctaactacacacccggagccatgtttgaagagaggatcgaaaatggctgcatcaatgttgagcttgatacctaaagtcagcttaacccactacttcgaaccatctccttctttgagtggagacatcaagggaccctttccttgagctttcaaccattgatcaagactcgaattggcaaaaacaaccacatctctcacacttcgaactcgctgcttccatagaagatcatttcttgctgaccaaatggcccaacacaacattaccactctgcccatagactcaccatctactagccttgaagtatcgttcagccacgacagaagagaagaaacatctcttcctgcagcagccagaccagcatactcccaacatgacaaagaaaatggcatgacaacagaatatgccattccatctcagcaaacacaccacacataagacaagcattatcaaccaagacctttttgatgcacaaatttcctttagtttcaagacagttagaggccgccctccaaacaaggtctttggctttaggaggcactttgagagaccacaaattcttccaaaacacattgatttctgagttgtctgaggaatgcttctaatcttgaagcaatttatacgcactttggaccgagtaaaaaccatttttctcagcaacccaatacaaggaatcgtttccaccagagggatttataggtatgccaagaatgattgcagcatcttcgtgtgagaaaagatctctcacaatatcaacatcccaactacggttgttgacttgaaagaggctgctgacagtgaagttttcaaggccatgaacagcaggaacaggtgtaggtcgattaataactggtagccatggatctgaagttatttgaacagtcgtactcaatccaattattttcctcaaatccaatttgacagtatcctttgcagcaaaaatactactccaaataaagctcgggttcgacccaagttcagcggagagataatcaccttgcgagtaatatctaactttaaaaactttactaaccatggaatcaagcctaaacaaaagcctccatccttgtttaccaagcatagctagattaaagtccctaaaactacgaaataccatgccaccgtcaaatttgtgctttgtcattctatctgaattcatccaaatagtaccactcccattaccattggaattgttcaatttctaccaaaagcttgccatcattcgctcaatttctttacatgttccaatcataaaaaggaagacattcatagtgattttttaccttaatagccctaaaattgaaattatttagctcatgataccaattattgaaattaatacacaatgagaatttaacaataatcaatacaattaatactcataaatatacaagatcaatcatttaatcttagacattgacataagaataaacatacttccaattttaaatttgttctaaaatgatcatgttgattgaacttcatttatctacacaataaagaaaaataaaaattcatgcggttttatgaacaatactctatttcactctctatctttattcacacacatctcatatacacccttagtaaccaataaggacatgacccttttataaggattaatgggcctattgagcctatagcccaaataatgagaatttattatcttggcccaatagaattaccaaagatgttttagagcatgtccatgtaagaattcatgggattttatgaacaacactataattcactctctatctttattcacacacatctcatacacacccttagtaaactataagggcatgacccttttataaggattaatgggcctattgggcctatagccctaatagagagaatttattgtcttggcccaatagaatgaccaaagacgttttagagcgtgtccatgagtcctgagtgtattagtacgttatgtccatcttattatggtcctatggtaataccatacattatcgattatataattatcattatattttaatactgacacaaagtaagcaacatttaattatattagtccacataaattattctcatttgaatcctaatttatatttattgacaattcaaaaacttaaattaaaaaaatagaaaccaatcaaataatggagcaaaacatttaaaaaaaaaacataatagatctttcatgttatacctacacataaatatataaatatacattctatataaaatgtaattatgtaacaaaatttttagtttaacgatatttttttattttttatgttaactttaacaaaatatactattatttaacaaaatattctttattgattttataacattatttttttgataaatcaatgagtcgtattgcacaaaacaagctttttacaatctatacgcacccatgaaaagggccgaagtctatgtacacaattgtatcaatctagagtcaatatatgtgttatgatttacaaagcaataaacgaagctctatcattattcttgacgtttttaggcatcaccctatcaatctgaacctttatgttccattttgtttcttcaacaatacgagtcgggttaactctagctttttgccaaacaacttcattttgggctctccaaatgttatacaccagccctacaacagcagccgagaggactcccttcttaaactttgacaatttggacttcccaatccacttgagaagctgttgtaggctattggtttgggcatgccaattcacccattcttcaggtcctgtaaacatttctcagcaacagtgcactcaaaaaataagtgctggcaggtctctagttgcagctcacataagcagcaggtctcttgaacatgtatgccaaatcgcatcagtctatcttgtgtcttcaacctatttagcattgccaaccaagctatgacactatgttttggagtgttaagccttgaccaagcttcttttctccaaaccagccgagttattggtggggaaaacagtttgtatccagctgcaacactatatttctgctgctaaaaagcatcaaagtctaccagttctcggatttgatctttcaaggaaaccatcttcttccaataccaactggaatgtatggaaggagagtagttctcccatgtctgattcttaatatagacactatggacccatttgagccataagctctcttgtttatttgaaatagcccatatgtacttacttattgcagccttgttccatgcttccaagttcctgatccctagacctccacctgccttaggttgacaaatgtaattccaagcaacagaccctgcaccttggaatatagcttgacctttccaaagaaaggctctacagatggcttcgatagatctcaataccttctttggaagaatcattatttgactccagtaagcttgtatagcaatgagaacagagttgattagagtgtctcccagcaaaagagagattcctggagctccaacttctaattctagcagtcattctctcagctaatatatcacattctttccctgaaatctttttcccacagattggtatgcccagataagtgaatggcatttcttgtctgatgaaacctgaaatgtgcataatgtgattgactt

SEQ ID NO: 39680 - DNA, 1744 bp, Cannabis sativa
gtaaaataatttccaacacaaacaacgaagaggagtatgaggcactcctagtaggacttcggttagcactagcaatcaaaattgagtgacttgagatttacaatgatttgaagctagttgttaatcaaattctcggcgaataccaaccccaggatcatagatgataacatacttgagcaaggctaaagatctaatagctcaacttaaacactactccatccaacaagtgccacttgaacagaatgcgaacgcagattccctagctaaactagctagtgcaacaaatactgatactctaactgtagttcccgttgaatacctcaccaaatgaagcatcaatgaagacttatagcctatcgttatgatcgacaacagtccatcatggatgatcccaattgcagaatacttagaataaggtattctcccaatagaccagaatacagctaagaaactgatgagaaaagcagcacgcttcatcatcatggatagagtaatgtacaaaagaggctactcaatgccacttctaaggtttgtcatgaaagaaggagccaagctcgtcatggtcaaagtacatgagggtttttgtggcaattatgctaggggcaaagcctctcaaagaaggaaatggtatttttggctaacaatgattgaaaactcaatggactatgttagaaagtgtgacaagtgctagagttctcaaaaatacctagagttaccccaaacaaactcaaaagatgcaaactccctattcattcgctgtttggggaatcgatctcagtttactacataagggaaaaggtggagtttcatatgcagtagtggtggtagattacttcaccaaatatgctgaagcagatcccttagccactatcacatcaaataaagttcttaatttcatgatcaagaatatcatttgtcgcttcagaatcccacaaaagatagtgttagaaaatggaatgcagtttgacaacgatctctttactaacttttgtggcaaacaccaaatcattaatagatttacggtggtcgcttacccacaagtaaatggacaagtggaagtggttaaccaaacatttacggatacattaaagaaactcctggagcaagccaaagggaactagcctaaagaaaaacctgaagtgttatggtcttgccgcactacggataaaatagcaacaggccacactcctttcgctctaacctatgggtacgaagccatgatacgcgtagagctcacacccccataacattaaagagtaacatatgactaacataccaatcaccagctgctcgctgagtctttagatggaattgaagaaataagagaaaggtctgagattagaaaggcggcgtatcaccaaaaagttgcaagacactacaactccaaggtgacatgatcaaatttaagcctggagacatggtgttacgaagagtattcctaaacacaaaagatgcagtagtaggagtactcagacattcttgggaaggaccatacatcttcactgaagcactagaaccctaaacataaaagttggtacgctatgcttacaacttgattccagtgcctgtactaagggactagaacggggcgcatctgcgatgatacaaataataaaataattgtcttcaaaacagctcgcgtcacagtgagattcacttaattatgtgcaagtgaattgatcgcctcttaaactgacaagatgtgacaaagtcatctttaggttaggaggtccatcactaaggt

SEQ ID NO: 39681 - DNA, 1590 bp, Cannabis sativa
aacttggactcttaaatggaaagcttgagacaaagcctttttttatcacccaatgcataaaagcctgaaactcatcaatctttgttttaccaacggcctaattctgttctacaaagggaatagagactcggtaaggtgtatattggaggctttaactcattttagcagttgttcgtgcctcaaggctaataataaaaaatccaacatctattttgctggtatgactaatggtacaattcttaatattcagtaagaagtttcttttaaggcgggttcttttccaaagaataatctaggagtcctccttagaccaaccaagtggaagcaagaggattgtgatattatcttaaagaaactgaagttgaagttgcatacttgggaaagtcattacttgtcttttgcaggtagagctctacccattaacacagtcttacttggaattagatgttattggatgagcatgtttcaattagatgtcatagcaaatttcatatggcttcttggagccttgtttgtaagccgagaaagctaggtggcttgggattttgagaggtcctaaatggaacaaggcatctttagcttagtatttttagctcagtaagatatgcatataacaaattatatatcatcgacttgtgtttaggcacccatacacctatctacaagactaaccaaatgattaagaacattcttaacagctggtgctattgaccatgatatcacccactaccatcactatgatcatactatagaccgggactatgttcgtattgctatgatagcatcaatagcccctgaaagtacaattggccatgatattactcttaaccaatacgttacatgtattgccgaactgacacaggttatgccactatgatagccccaattaatactttttggggtgaatatcactcttaaccagtacggtgcatgtactgccgaaccgacacaatggttgtgccgctatgatattacccaaaacatatacattcataaatacagcatgcatatataatatgttctatgctaatcttacctcatttctaagttcaggtgtgtcagtcaacctgagtggaacatcaactcgacgaattacaaggccctatatcataatattcataatattgatgagagacacgctaaaatactttttggggacttaaaaatcaaaattagaaatttccctatcgatgggtaacatggcaatatcttaaatatcacaaaaataggaaaaattagggttcacaaaaccgccccaactgaaagactggttcggtggagtttcctgggtactaactaaaattccagttcggtcctcctaaactggtcgactagttcagtgcaagaaccaccaaaaatactctcaacacttcaatttaaccccaaactttccaataaccttcagaacacttgtatataccataataaactcaaaacaagtaataaacctcaataattaacacagaaacccaaatcaccattaaagagcaaagtttgagttcttaaactcaaaccttgctcaaacaccaccaaactcagcaaactttacataattcaacttagattacctcaaattaacttcagaacaca

SEQ ID NO: 39682 - DNA, 1569 bp, Cannabis sativa
  modified_base (1439)..(1444): a, c, t, g, unknown or other
agtttatttgtgtatggaatgaccataatgcccttgaatgcctaaatgagtgttatgttgccctaggagaatttttgtaatttttgcgtaatgggattactttcaacaaatgcattttgagccaaattagaattatttttctgattttactccaccaactgacccatctctctctctccttaaactcatcttcccaagtttgattttgttgtgaaatatattggattcaagcttgatatttgaggatctttgagcttggctttggattgaatttgaggtagtttttgccgccttaatcttaattgttattactgaaattaaagatgagtgttgtgatgtttaagctttagatgttctttgaatgcatgtatattgatattggtttagtcttgatatctcatgcttgattgagttagaaattgttgtaggatgcttgtgttgtattcttgataagattttagggactttattgtgtttttatttgattgtgcaattgggaattttggtgaaatattaagttcttaaagttgggttcttgatgaatcttgctttagttgaagcttttgttttatgttgttaatctgatattttggggattttatagttggcttttatgcatgagatcggtattttaactccctgtgttgataggttaagtgttggtgcatggttttaaattttgattaaggtttgggttgatttggttgtgttttggggatgaaattcgaagctgaaactgttttttttttgggtttggaacccaatggtcgcggctcggctgtgtgatgtggcctaggagttgaacccaagtgtcgcggccccatgtggggagtgccgcggcctgcccttcgtttctgggcagattcgaacgcgttattcgaatcctcataactttgcgattcagactccgttttgggagttatatatattgttggaaagcttgttcggagctctatgagaatatttatattttgaatgacaagtatatatattttataaatgtggaattagggattaaccctacatgtgtaaatcccaaaatttgtgactaggattaatggcacttggtcaggagcacctggggatatggaatctccacatttgcgggacatcaagtaagacagtagttgcacgtagagttatgcgcggtggcacttatattgaaatgttatatgtgagtaattaaaaatcaggattagggttattaccctaacataagtagtttaacgatctagggttattaccctagggatatatgatgtgtaaatgccatgccatgttaacaatatgagtatattgagattgagggttatgcgttcaaggcataaatgggttggactcggtaaccagaatcgagatgaactgttctaaggccttattatatataaacgtgtgagcgtaacacgtaggtctatgtcacatagacataaataggcatnnnnnngtaacatgcaggtctgtgtcatacaagcaaatgagaatggcattaatgtttatatgggtatgataattatgtgtatcaatattttaaactgtctggctgggcttggctcacgggtgctctactgt

SEQ ID NO: 39683 - DNA, 1475 bp, Cannabis sativa
taattaattgtatttttcaacttaccccataatctactctactaattgtgaactgggcctcattattacatattttgacataagagagaactatatatattatatatactaaattaagcatgagactatgagagtgcatgtgtgcaggcacacctaaatgattcttcaataatcagatacataactagctatcttcaaaaaacatataatggggaatttgagtttctatattcattcatgtgacattttatatcaaaatcatcacataatatatcattattttaaaaacatgctattgagtttatattctccaaaattatccttctcacaagtcacaactcacctgttctctttattttctttcttttgtctcttctctctccctctcatctccatccccatagataaataaacaccacaaaatgtatcaaaagatttaccatcactcaccattctcattgtttttctaaagtagctttcatctttctctctccctccatttttcttctcaatctttttttgacatcttcattgatgttatacaaaaatgaccacaaaaaagattttgttgatttaaaactttaactcatgtcaaatatcaattaaatcgctaatatatatgcattgaacttatatgtatataagccactaaggctagcttagtggtaagagaatgatgagaaaaagaaagaggtcataggtttcaacctagaatttttaagctattaattgattgtaaaaatactattatgctacactaaaaaaaagaacttatatgcatatgattttttagttattttttggtattttttgcgatttctttatatttgaaatgctaaaatttatattttgatagaatttgatgggaactcgatacctaattaaagtattaaaaattaagattcagattttcttttgatattaaaattgataaaaataaaatatattaaaaactaaaagaaaaacctaaaagtagagatcatgcactaaaagcatagaaatactataagcaatacaataaaaattagagattacaaactataattccaacaaaaaaaaccaaaatgtcataaaaaaaaaagaataaaaattgaatgcagagaaacgatctaacagtacaaaagaacaatcctatcataaaaaatatagagctctacctctctctaatctttgagatggaaaagtgaattacgtggaatcctcttaatggactagtgaggatcaacttcaatactgaaacaaattcccaaaagatttttgaaactcaaaagatgtcacatttcatagcctccgatcgagaatgtgtttctttcatttactgtatttcgatttggggtcacttctttctacactttcttcattgggtttgttgggaattatttgtgcaccaggaacatattgaacaaaagcatattgtccagagggaggggagccgagagccaaagggagcctaagctccgaaatgagagagacaa

SEQ ID NO: 39684 - DNA, 2000 bp, Cannabis sativa
aacacaccaagggagcgatgaacaaccttttaaattttgaaggagtgcctaagaatcacttcttttatttcggttaggttctccataaaaatcagtgaggcgccaagttggagaagtaaaagatatggagatttgcaaatcaatatgattatcagagtaaccccacaaaaagccatcatctttatttttccaaagcaaagcaataccacccgaagccccaatagcatcaaccacaaagacaccttcaaaattcaaagactgggccaggcctaccacttttgatttatgacactttgtttcacacaaaaagataaattcgggtctcttttaaaatacagtttcttttaggaattgaatagtccgttggttcccaagtccccggcaatttcaactcaacacattcataatacttggcggacttggaaaccagcacccgcctctatcaagttttttgatacttcgttttgggctgcaacatcattatcttctgaattagagatgtccatgtttttaacaccttgactatgattacttatcccatggcccaactccaaaacttgtgtgtcattacgcccaacttctttttctatgcccattcttcttcttttattatcaataaaagtcagcccagaattcaaatcaatttcggttggcgccattatcacatgctcattaaccttccccaaagttagggatttctccatattgatttgtgcaccattaacattgtcaactgtcctcataactggttctccatttgtatctcgtgaatcaaggtgcagtaatggagatccctgattgttagcaatcatcctctgttgactccccgtgactggtgggaccagattactccagcgaccgccattggaactacttgcttctaggcaatcgtccattctgttcttgaccgccaaacccgattttaaccaccgtgaaccatccacgtaattccttcttcttggggcagctttcaaatcaagactatattcatgaacaatttgctcttttgggacatcaaagagcttttcgcaaaacctctcggaatgttcaagaactccacaaataaagcataaggttggcaaatcctcatatttaaacattacttggcatgtcggaccgcctcgtatttcaagtttcttcttcttttttagcggcatgtccactctaatcttcacccaaatatgtaataatctcgctaaacgcttgaaaaattgtttgggtttgacttgacaaaagatccgatgtaattccccaccccttgaatcacgctttccaacatgaaaccaactgtcatattgtgtaattgcacccataaatccaatttcaatagtggtatattcctgggattctctccatgcttaactcgttcaaatatcagtggtgccggatcaaacgtccaaggactcccctttataactttctatatcaacttcatgataaaattggaataggaagagatttggatcaagttctttcacatacaaacccctccctagctgccaaaagtgtagcgattttattttgcatagcctgaaaatcaatggctcaattggtcaaaaaaacgtcctaccagcaaccacatatcatcgattttgctaaaccatcagcccctacctcaaaaataagaccctcttcatcatcatcgtaaatcgaaaacaacgcatattattcttccattctgaacagaaatgaagacacacaacaaggcaaaactatccaacaaacacagacttatcaaaacctccttaaacaacacaaacaaaactcacatccgctgcaaaattagctaaccatgtcacaagacaagactccaaaataactctatctacatctgaccctaataatgttatatatatgaagaaagcccaaaaaataaaatacatttaggcctcgtttggtacgtcgtataagggtcgtattgtattaaataataaataatactatgtttggataaagcaatatattgtattaattactacggccaaaatttttaatacaat

SEQ ID NO: 39685 - DNA, 1123 bp, Cannabis sativa
accttggccatagccacggcaactacaacaacaacacaacacaaactcattcttagttgtcaaaatcccaataaacaacactaagaaagaaagaaagaaagccccttcatataaagtgcaagaagaacattagagtaagttattacaatccataatgagagtttcctactgatgtgtataattatacttccaacatgcttgataatgcatacaagagtataaatgaaagtggagaaccatgaataaaaaataaaaagaaaaaacagaagagagaaactgtaaattgagatgagcttacaggataagctttcagcatcatcatcaacttctgcactaggagcctttttgtcagttcttctaaataccactttcccatatctatcaaacaatttatcaaacatttcatctgtatcttcacttgcattctgcaaaagaaaaattcaaactttcaaagattggaaaaaccacaatagtagaaactaaaggcccaaaaccccattaacaattgagttagagttagctaaaaaagctactctctttagttctttttgcaataacccataaaaaaagtgtctttttttttttttttttgaaaaatgaaagagagtacctgaataaagctatcttcagaatctttcccagtagccgaaatcgaagtagaaaatctggtggaattaaaaatcaaattgttgggttgccaaaagtaattgcaaagagagaaacgggaagtagaagaaagtttgttgtgagtgtgagtaagcttcggttcaacgaaacccacttgccagaattctccgttcagtcggcttccagcgccggtgccgacgagagagaaggttagtgacactgccattgttggtgtgtgtctacggcagaggacaagagtttggatatttttattttaagattagagaagagaagagaagattcaaaaccaggatagagagtctatcgaaaaaccaggcataatgggcctagatattgggccttgggccttgagtctaagtacaaaaattattggagattatttcggaaatataaaaaaaaaaattacaaaaatagttgaatgaaatttaaatatttttttttacggtttttgattatttatatattatttgtatga

SEQ ID NO: 39686 - DNA, 1929 bp, Cannabis sativa
tatcaaatgagcatcaaaactagttcaaaaacactccaaaaacaaaaccaaaatctcaccaaactcttagcaattactgtaacaaaaagttagccttcacacctaaagcttttccaataaagaaaagaaccaaaccttacgttagcttccacttcaaggttaccttacaactatttgctactaaaggtttaaagagctagttttgagcagaagaagtcaaagaaaatgatgtggcgatggtggtgtttcttgcgagagagagaaggagaagaggagagggttttgacttctttgttttatgtttcaatatatatatatatatataccttaagtttttttaaaaataagataagaagaaaaaaaagaaaataaataacaataatataattaatttaattaagaaaatgattatttttttattattttttagccattaagaaatctctaactttagaacatttggtcaaccccgagtacctcgaaatatttcggtaattctaaaactaacttgtctcaataatcctattaaaatttataactaaactcgtttgtaacatttttagccttcgatcaggtctccaagattgctaaacctaaaaatatttttattccataaataactcacattatatccatatattctaaataaatctccgtaattaataaattacacttatttatctacttatagaaaaattttgtaattcacgctgagttaaattagtaagatcataatcctacttattactatttgattaactcatatccatataataaattctaattattcataattattaagtttccgagatattacattggagtctggacattaacaaccttgcaagctggtttagaccagttttaagtaatgatctccacaagatctcactctttcttagtgatttgaaagatgttatgatttggaaaagctctgccaatggggtattttctgttaaagatgcatataaaacgctctctaaatgtagaattggtgagatcaatgcgatttttaaacaactttggaggactcctctccttgagcatattaaacattttctacaacatttagggaaagatatcctccattgtggtaagaggcttaatgtgatctttaacactgagtcacaatgtgtgctctgtaaggatggggaagactctctggatcatctcttctttcaatgtcctttggctagctagagtttgttggtttagtagcttgtggggtattcatagtgacctcatgtccttttcgtcttcgatagacattgtaaattggatcttgaatccttatgggagtagtttcccctctaaattttgatggaaacccgtttacttttttggctgcttaattccctttgctatgcactttggaatgcctgtaataaagccttccatgacggggtactagagactcaggttttttttgagccatttgattagtaggtgtgtgcaggagtgccaagagttggtgtgttcctctcatgttcagcctcctatttgccttcctgatcctgatgtggatgttctgttgggagaagaatctctttatggacacaactgttcgtgggagggtggccttccttggagttcttgtcttggattatcaaggcaattttgttgaagcctttatcattaaggttcaggtggagtctccccttatggctgaaacgttagccttgtgccagctggtttcaagatgcatccaatgtggctagaaggatgcttgtatcttctctgattgcagagtggctgtgaatgcgattcaaaccttgcagatctcttgttggaaacttacttcatgttttctacatttatttgacttggttaagagttggtgtgtttctgtaattttatgtagatcccttgccgttcgaatcatgctgcgcatggtattgtttgttggactgtgtcctaggattgttgttg

SEQ ID NO: 39687 - DNA, 2156 bp, Cannabis sativa
ggtttgaatttatggtaaacttttcttggtttttgtcagcttgttaattctaatgaaaaagatatatatatatatatatatatatatatatttagggacacgatttttctgttaatgtacttttacgaaatgtattttgtgatatacgacagctgttagatggggtagttatttaatctgagagttagagttgatctagaggtaattaaggttaaaaaatagtaacgtactctggaacacattattacgtacctatcgtacaacgaaatacattccgtgttttgcatttttgagtacaaaattgattgcctatatatttatatatattttttttggttggatttgaagatttctatttagtttaatagaagcttaataattgtgtactaaattgtgtctcttaaaattttatttatattaaatgtcttttaataaaattgaacagaattaaacaaaaatctttaaatttaacactttaaatagtttgaagggaatttatattagcatgaaaaattagacaagtatgatatgctccatattaaattgtttgagaaaagtcctaatttacctataaattaccattaataatttaatactttttaaaaatattaatataatatacattttgtttctttggtaagaataatttaatatttattgcagatatatcaaatcataattaaatgagctatgagaagttggtatttatctttaaattacttttaattttttatataatttttataataataaaaataataaaaatcatgtaaacaaatcaaaacataacacatgttcaaatatgtacgtataggtctaccactttggtatttaattttggatgtttaacataatagtatagacaataatagaatgtgaatttagagagttttactatcaaaaaatcgattcgtatggttaaatgtcacaaaatgtatatcttaagtagttttatcgtaaatatttcttaattgtattaagataaatagtgacataagtactcaaagtcttaagtttgtaagtagcataaacccaatgttaagttttagcggcataagtacccaatatttataaaactgtaatttttttttctaatttcttcagtacagattctgttttgaattttttaaaagaacacttgaaaataacagatactacatgtttcatgtttctgtttagatccaatgatctagaatctggccttatttgtatatacgaaattagaaaaaaaatacattttaaaaatattggtattatgctgctaaaaataaatattaaatttatatcactcataaatttaaaactttgaatatttatgccgttattttgtgattgtattattaggtaagtaataaaggttggttctttaaaaaaaaataatcctaattgaactttagtggtggaggagtggagattttgcttaaatttttctgtcatatataacaatgaataaccaatggatgtttgtgttgtgttgggtaaattctttttgtttattatatataaagccaacaatgattgacatatgtgtacacaattccaaacaattaagcaaagccaaaatagtccaaatatggactatgttcattcatcattactttctatactccttcaataatcacaattatgactttttcaacaccccccatttcctataatttcccatatatattacacaataaagattatatatatttatagatatagatatatcaaacataacaatcaaagttattggaacatcaaaaaatctttagtcctcaaaaacaccaccttggtaagtcactgtcttatatgttcagattttgttgcttataagttatacttacttacatatattaatatatataaatacatatgtatagatgcagaccattgagggagaaaaatgggtggaaatggaaaaacagaacaggagcaatcactattgcatgacaccttatcttcatcagatgattccacccaccttaaaagaacaggtattaatattgctattatcatcatcatcatcttcttgttctttatacagttcttgttctgcaaatattttagaaggaaaggtgtttgataatatatttgtagatgttggtatttggtctgaaagaagagggttttgtggttgtgaatgtgatgatgagtagggacgacatggactg

SEQ ID NO: 39688 - DNA, 1821 bp, Cannabis sativa
cgtgccaagcacaaacagaagagggagcattggatctccttgtggaaaaccacttttagctttgaaaaatccgcggagagagccattaaggaggatggagaaagtaggagaactgatacaaattgtcatcaaacggttaaaagccaggaagcctaaggaagctaacatctcttcaataaaatctcattcaactgtatcataaactttccttaagtccatcttaataatacaccctaatttcgcattcttccttccatagagtcgaataaaatcctctcaaattataatgttatgagctttgaaatgctcatgaaacaaagcctctttggttccacaacaatagaacgctacccgctacataagattttcgttgccactttgtatgtaacattataacaaggaataagcgtataatcaatcacatttaacatgcttttcaccctgggtacactactacaaaatgcacttttggtgtcaattttaaattgacttttatatctatagagcccattctgtgacacgtatttatacctgaaacccacccagttagaaacccaaaaaacttgaaaaaaaggggcttcaattttagtagatcgggttcgagtgtaacccagttctgtaccaagtcgggttcacatttaataattttaaaaacccacccaaaactcaggtagcgtttttttttttttaattttttatgtatatattatatatgtccttttttttttaaattgagaatttgtgagtttgttaaattgtaatgtgttagtttatgtaatatgtatatataataataatatattgtacaattgtaatttttgttaaaaaaagtttttttttaaaaaaaagaaaaaagaaaaaaaagcctagcctaactcaaaacccgacccaacccacctgaacacgtccgaaccgaaaccccacccatgcggacctgaaacccaaaaaaggagtctccatatgggtagatttggtcccaagattccaaaactcgaacccaaaaacctgaaacctgttaaaacccacatgatgtgcacccttaaccagctattgcatagaatttgataatagaaatagaatcatgttaaaccataatcaatagatgcaattgaaatcgagagccctaacttttaatcatcgttaattttcttattaatttacttgcttcttattttcattgtttttattgttttcaagttttaattttctcttaaattttatatagccaaatggaagtaaaaacttaattttaaagtacttaactacaactattgtaggataaacctcactctttgtgagtctattacttatttacaatacgtatacttgcgtgttgaaactaccacaacaaaatttttgcattgttgctggagatgtgaggaatagaaaacatgggccgcagcataggaagtgcatgttgtggcccgtgtcggtttccttcattttttttttctgcgataatgtccagatgctccagatcacttttctccaccaccgccatggtatccataccaaccaccaccaccaccaccatactgatgtggtgctcaggtaagttcctttttctttctctttaatgtcacattggggacaatgtttcaactaagtttggggagtgaagttaaattttatttttcaatctttcgtttttaattttatttttgtttttagcttttaattttttgttgtttctttcattgttttgagtcaatttgtttaatgtgagtcaatttgaaagtaggttaattgcatggtttgaaaatttcatttatttttttcgaaaaattcgtgtgctttgtgatataacactcttgactaatt

SEQ ID NO: 39689 - DNA, 3574 bp, Cannabis sativa
  modified_base (3537)..(3546): a, c, t, g, unknown or other
aaatataattgaaatgtgcataaaaaatattaaataaagtatagctttttcgacagattgcaattaacatattatgtaatataattaattaattgaaaaatgattaccgatattatatactattattattcgcgtttttgtaaagtatgacatgtcacatttaacaagaaaaatcagtgtaatctttcctttatcaaagtcttttgatactactctgtcaccgaaaagcttcttggaactgtgaactatcctgaatggaaggcacacaaaagcctactcatatctgccttaacttttcagaggcaaaaggcggaatacttctcctagactcgaaagggcataacagggaagcttgcttagatgatatctagataggcattcgaaaggtctgaagaggatattgaccatcgttaagtatcacggacgtcaaccttttatgcacgccaggtgaccaaagtgacagtacttatactttttctgataaatatcagatcttgtctcctacattcgagcattacagtgcgcgtaccaccaccacttttttgccaggcggatgttacagacttcctctcgtaaaggagcaagcattgagcaacagatgtcctctaattttaaaggttgaatctttgcataccctatgtccctatggttcaaaatggtccccattatctagctgctacatgcacgggcataatgtttctcacgggattattcaaatagctctaatgttgtatgtaacttaccccaatagtagaatttgagcaaaaatcttaggcgggtcatgggcctctccattccagccacatagcttataaacaccccttgattctcatacaaagggggcatcacaatttacgtagctaaaattttatcaagattactctaggtcttcttcttgttcaagagaaacttaggataaagagatagggtttcctgcttaaatattgtaaacacattaaacctgccctaagagggtaatagactgactcgtggactaagatttactaatacctaaaccatgtaaaaaaatttcatctcatcaattctgcaatatactatttttttagttcttaaatatttaatgttcaaaaatctcggtaaatattttggtgctttcattaagagctgaggaaagaaataaaccattgggactgtcatggtgttcacatgagagatggttccgaagaagacttttgaaggtggcgaggacagcattggagggaagtaaaccccctcttgctagagcacgaccagccgagggatgcaaggggcagggatacatccaacatgaacgaccaaggggatgatccttcggtggaatgcgtccgaggaaacactagggaaatcttagtgacgctggaacctcttctccacctcaggacaagggaaggaaaaagtatacagccctatgaagacacatactcctcaacctcttcagaaaaacacgaattaggccagcatgccttctcaggcgtagaaggaagccaatgcctccaagtttgaatgtccttcatccccaaaagtccatgtagcatcgaaagggacccgtgcaaaagtaccaacgcccaatagaagggaaaaccgccctagtgttttagtaaactagaacagtgggacaaggggacggtgccttgatgatagttggtccacgggggatctcaaaaggcctttagattacaagtaccaaaaagaaaaaagtgagaaggtgaggccacgtggtaatgacctcaggaatcacttgaactagtgatgcaaagagattagaggaatagatagctgtactgacaaagttagtcaggaagcaaagtggtgccctcactagtttttaggatgagcactcaaagccctgtgtatgaaggatcgatgaagctccacgtctagagaacttcaaaataccccagatcgagctttatgatgggcgcactaatcctaaaactcattttgcccagtacaaccagattatgtaggtggcaagagttaatgaggacaacaagtgtttattcttcccctgaccctaaccaaatatgttgaggactagtggaagagattggctccctgatcaatcttctcctagaaggaactatagtcttgcttctagaaatagtttattgctgccagcgattatgacttgcaaatgggctccatcaccagcatcaagcaacaagcgagagaaagcctgaacagttgcatttagtgaatgatggatgcaacaactaaaactaaagtatccaatgacatgaaattggtggccctataatttggacatgccgatggttctctcctatggggagaaatttagaggagaagagccgaaatactttcagaatttatggctaaggcacaaggctttattagtttggaatatgattatcagtaagcttttcatgtccctctagcactggctccagttgtttccactcccaaatttacccctttagttcttgttcttagaacttgatacaccccgacagtttatagatcgtcaacaaccgtacaagcacccacacagacctatttctctaggtatagagtggcacatactggatgtcgtatcgttcccgggtagtcaaaagcagaagttctagaccagaacgtgagtaaatcctagaacaagaggggaggaaagggtctgagacagagtgagaattccgaaaaagccaggaaagattatgaaccaaaatataccatgcactccaatctggtagacactcgagaatatgtatataaagcaaccagtaacatagtctattatagaaagcccccacggacacctcaagggggtaatttcaagagagattagattaagaggtattattatcatagagaagtgggtcagtcctgttggggattattttaccacgatctagatttatgaacatgtatcttgtttaacatcctaaatataaattctctaaaacaataaaattaaacacatataaaattaagaatccttacattgattgtagaggaataatatgtctccttccacttagatttttaacccttgttcctatctgtcgcagagtattatcaagatttgagcctgattctccttcaagtggtatattcttcacagtcttacacactatgattgaatactttacttgctataggtgggaatgtactctttcactataaggccggaaaatatgaagaagaagagagggagattcgaattcaatagaaggaggttctcaagcttctagttgtctgacaaagaatgaaaactaggtaaacttaagttagatgagaatgagaaccatcctatttcttttataggatttcgtttagggttagatttaaattatatagaattaaaaaaaaaaaagataaaaattggctaaaattctcttaagtggccggccatacaatgtgggccccactatttagatttttgctattttatttaacaatttatcttttctttcattaatgccatattttccaatttcaatcatttaaatttgaaagctatttattaaataatcaaaattaattatcaaataaaatttctatttaatttatttattaattagnnnnnnnnnngtctcttaattaacaaataaattctaaa

SEQ ID NO: 39690 - DNA, 3326 bp, Cannabis sativa
tcttaaacaactataaggtacacgactataaaaataaaaaaaatttaaattaaaaaattcttatagatactgaaacaattaaggattgcatcagtacacccattttaacgtactagcattacattttttctagtaccaactattcaaagataaaactcatacattaaatttataatttaggaaattactaataattacctgaccgtagttcaaaacgccagcagcagggctaatctggatatttgcatagggattaagttgtccatgttcaaaatcatggtctttacaacacttcataacgtacatgtaatcagttggaattgcaccaaatccaattttatcccattccacgtcagcatattcatccacatcaccccctacatttctgctctcccatttattacgtcaccaaatttaatatataataataattatatcaattttacagcttaattacaagataataatcattacccacaccccaattctaccattattaattattcatgatttttttttctggaaaaaaaataatgaaatctggtaatataattaatcttacccatatgtttgttgaggcaaagatgcagctcgagatgcaaatccaaatcgtcccaacttcatgtcaaaaaattaaaaaaataaatatgaattgtttgatttttaatcaatttttgaaaaaatggaaatttgaagaagaagaagagaaatatataaaccttaaaatttgatgatgaaagagtatggcttcttctgagaaattgaatcatcatattactaaacatctttaattgtgttatatatgtatgaatataaagaaaggaagaaaattgtgaatggagattatagtattggaaatctgggatatataatatggagaagaattaattaattgatgaagtacgtgagagttttttcttcttgatttttatttaatttttatagagatcgacaaagagagtagctagagtgagaatggccaacctcaaaaggtgaggattacaactcatacaagtaaatggatgagaataagctatttgtgtggaaaaacaaaaataaaataaattattaattaaataaaattctaaagaactttaaatgatattgattgattccgacccaatcgtgaatgttcaaatatatataaattagatcactacttatttttttattattataaattattattattattattatatgttatatatatataggtatagtacactctaattatagacatgcatgtaatggtggcaatgaatcagaaatatgaataaggataagatctaatctactgcaatactgcatgggggaatcatataatatgaatatatatattattaggtgttttgtatttaaaaattaaaaaatatgaaaattttgctcttgcattaattatagatgttttgtatatgagagtatatggataaggactaattattgtcacttttataaaatgatacacaaaacacagcatgatattaatatttattctagatataaaatgtaattgtttaacttttaataaaataacttaagaatataaaaatattctgttaatagtattagtaaagtcaattttataaatatatattaatattaatattatttatttaaattaatttaaatatgtataatattatttttctttagattaattcaacttataccaattttaaattaatttaaatatatataattaatatattatttgtaatattattattttttttattgttatttttaatattggaagtatgttcaattttaatatttttaaattttatatttatttttctcaatttttttgaacattaaatattaggggtgctcatggattggtttgatccagattttcataatttttgaagcaaaccagtataacagtgttttgaatattggaaaccaaaccagaccaataaatttctcaaaccaaacccttaagaacggtttaatttggttcaaaaccacggtttaagcaaaatttataattattcatattttttaagtaattgtattatttttactaaatttttaattttatttttcaaaatatatatttaacatgataagtaatatatgtataacatataaataacaatataaaaatattctcaaaagtcaaacataatataaaaatcctacaaaacttgacacaaaaaaaattaaattatacatatacatatatatataaatcaattatttattataaacggtctggtccggtttaataattgttaactatttattacgaaccgcaactgaaccattacgccgtaaacggtccgaattgaccaaaccaccaaaaacggtttccccgattacggtctacagtggttcagattgtcacagtccgaatttaaactgaggttttctgattgatatgaataaccctatcaaatattttagataaatttaaatatatataaatattaatattatttattttaggttaattgaacctatatcagttttagattaatttaaatatatataaatagtaatatattatttataacattattatttttttattgtgatttttaatattgaagtatgttcaattttaatatttttaaactttatatttactttccttaaatttttaaaaatttaaatattatttcttaaaaaaaataaaaaaattaataagtagtttcctttaatttataaaattttaaaaatacacataataaaaataaaaactataaatataattaagtatatgtgccatgcatgtaacaataacctagtatataaataaactaggttgatgttacgtacaatgcacgtataattagttttttttaataagtttaattaagtgatgttaaatgcaatacatgcatgttcaattttttcattaggtaagatatttttatttttaaatttttgaaataggatttgagattttgatctttaaattttttttagttattgcggttacattagtgtgctcattagatgtgattatatatatacgtattttatatatgtaaaataaaaaattatataaatttcattattataagtattttatattaatttttctctatatataagaattatattagaaaatattttgacgaaatatattatgtccaaacatatatattttaaaaaataataatagtaatagatacaatattcttaatttgtagttaagagggtgtacggttataataaaatgtacaaattattagaagtatgtatatatatagcattagttatttttaaaacaaaatgttatcgtaaaattaaagtttaaatctattctatataaagtgtgcctatataactaaaattcttggtttatgagaaat

SEQ ID NO: 39691 - DNA, 1941 bp, Cannabis sativa
  modified_base (1082)..(1082): a, c, t, g, unknown or other
atgaatgttgattacaattaatggtaataaataaaaaatttggacatccacataattaataatatttataacatatatatatagttcaaatttacgagtgctgcatagtaattaatcaaatagagctagtcaatatatatatatataggaatacattaaataatattattgcacacaatgtacgtatagtgaaatataattgagcctctaatataataaattcctatattaaaattcatgaaatctataataataataataattatatatagtttggattaatagaaatgtttggtggatgatcaaattgaatctagtgaacaattgacgctacatacgtacataagagaatataatccctcaagccaacctaccacatcttgtaacataaatatatatatattaaaatcaataaatgtgtgtatacatataatcggatgaatatgacgtatatattataaattatgcaaaatatatatgatattaattattacataagtacgtgcaatatagtatatatatatgtgggcggcgttcgttcgagagtatacatacaattatacactatataacatataatatatatatatatatataaatgtacaagtataataagttggtatatataacataataataatccaatattggtttgatacgataacacattggagtatattgcatgcatgtgatgtgagcctttataagataaatatatgtatatcaactgtacatatatatatatcaattaaggcgggttaggctcaaaaatttaaaaaaaaaaaaaaaaaatatctattttataattacaaatattattttaataattttcaaaaataccgcacatattttaaaatgatccaataattttattgctagctaataagatccaattaacctcatcttagagccgactatatatatatgcatattacacacaactctagctatatataggcttgtaaaacttgaattgaaacataaaagaaactttacattacgtaataaataactagctaattgacacttgtgcgttctgacatatatatatgtttaattattaatatataaatatatatatntatatatatatatatattaaagctgggccatgaagaatgggggtgagttttgctatagctaatttactaattagtagataggggccacatgcactctcctctagcacatgcatggctcaaattggtcacattattaactttttattatgctacctatccaatccaatacatatataataatatatatatatatatataatgtcaaccctatagtattctactcgatcatgacgatatatcattttgatggacttgcaccatcctatgtgcacaataattatcaaatttgaacaaacataattatctatattcatttatatatataagttaattaagatttttgtttacgaattttaatgtcttctaaactaattttaagactgttaaaaattatttttaaacgattaaaagacctatgtctaattttaattaaaaaaaaaatttaacataaataaaagttcaaaatcataaattagtacatatcaaagttcgagaaatatgcatgatttgataatatcaaaatttgaagaacatgatttagtacatataaataataatcgattttattagtaaaattaaataaaattgaacaaaaattcttaaattttaaatttttaataatagctaaaaaaaattaatgagtataatttaatacatgaataaaattttttgtacataatatattgatgatcatatatgcatttcaattctctgagtggatctatataattattgcaatatacacaatattttggatgaataatatgaaagaattaatatacaatcaaagagatcagtatagctagtaataattaataagttatatattgttttaaatttgtagtacttatatatatat

SEQ ID NO: 39692 - DNA, 1200 bp, Cannabis sativa
attgcctttctcatatggtaagaattgacagtcaattttatatatatattattatatattcaaataaatcattttaaaataataaaataattaaagaggaaagtagagaatactaatgaaaataatatattaattatctattctctataagtttcaattcaacccttacttttctacaaaatgaactgttaataactttgtatcttttgtagcttactgaaatctccttctcctatactttgaatcaccatatgttccaatccataattaattattaatgtctacgtttcacctactatatatatatatatatgtcctgtttatataaatatatgttttagtattattattatcattacttttttgtacagtgcaatagggtatttaggttttcgtataacaaattaattaatggctcgatttatcagaaatatatatatacataaaatatggtaattataagacctagctggtacatatatgtgcattataaattaatattcaaaattacataatgcaccatataaatctcatctatgtataaataatactaaaaaggaaaaaccaacaaaaaaataatgtaatcactggtcaatatatttgaaaaaattatagtggaaaattggtatgatttaagaaaacacagcaaggtataagaatttttgtaaggacagtcacacacagatgctgttatataatatatggactcgatcatcagatctgaatagttgtggaatgttcttaaatatttaatattttaattttgttaaggatctcttcatttttttttttttttggatgatttaaaaagatatatggatggatcatcatctcatgatctctttttatattattattggtaaaaaggtcaaattggaattgattatataagcttttgaattcggtggccaaactaattgggctgcttttgtaccatatttttctcatctctcttatctttttctttataatttattggtactctgatataccatccaatattccaacctcatcagtcatgactacttcaatagttttcatattctagctactaaatatatatatatatatatattctttgcatgtcttatttgtttcgccagtactagacaaaatatataattgtcctccaaaatatatagtcaaacttgtaattatatatataacaccaggccaataataatgaattaaacgtactat

SEQ ID NO: 39693 - DNA, 1683 bp, Cannabis sativa
  modified_base (38)..(38): a, c, t, g, unknown or other
atcccacttattacctgattaactcataatataaatanaaaccctaattatttaccattagacttattgggatatcacactagtgcctcgacttccgtccacttggtaaaataatctactgcaaccacatcatattgcactcttcccttcccttttagtaactgaccaattaagtctatctcccatattgcaaaaggccatgaactttgcatctgtgttatttccttgggggcaacccttggtatttttgcagacttctagcatttgtcacacctttggatgtatgccatggagtcctcgatcatggatggccaaagaaacgttgtcgtagtatccttttggaaagactttgccctggcatgattttcgcaaaacctttgatggacttcatctaacaatctttaggcttgggcttggtgtacgcaccttaagaagggcattaagaacccctacgacacatgacaccatcaatgattaagtatcaggctaattttcttctcacttttattgcctcgtttctattggaatataggctaccatgttctcagtacgcgacgatgggggtcattcatgatgggttcatgtcaagtagaaggacattttctttcacgttgatgctgggatcaggtaagtactctatgggtacaaggttggccttgtctaccttggtactgcttactagtctggcgaaagcatcagtggtagcatcttccctcggtatttgttggatggaatacccttctaactgagcaagtatgtcttgtattttgttgaggtaagccataatcttttcctcgctttccatatagtcacctagaacgtggttcaccattagttgggagtcattgaagatgtctaagtatccagctttgacttcccttgatatttcaaactagcaatcaatgcatcatactcagctttgttgcttgaggcagggaacccaaagcggatggcagcatggattttattgctcttcgagagtgattaaggtgatactggcccctgataattgatcagtagaagagccattaataagtagcttccaagcttctctttgatgatcctgctctttctcttgcttcttctctgagtgtaatatctcgaaaatttaattattaataattaagacatattttataaaatgtggattgataaaggtttaattggtatatttatgatcttactaaatttaatttttgagggaattagggaattttactataaataaataagtgtaatttgttaattacggagattttattagaatatgtgagaaatatacattatatttataaaataaaatattttaggtctgacaaccacagagacctaattggtggccaaaaatatcacaacgatattagtgtgtggtattggtggttttgataagttttgttttaaagttggaattttgcggatttgtttctgtgtgattaagtatgaattgaaatatgttcctagggcagaattagagttgttttgagggttccaagcttttagtgtagctggttatatgggggagcaagcttgagttcttggaactcaaagcttagtttttaatggtaagttttgaattgtgttttggttttaggttatgttagttgggttgtgttatattgatggtatggagttaccctgtgaagtttgagaccatttgattaggtttggaggggtgtggtgttg

SEQ ID NO: 39694 - DNA, 2066 bp, Cannabis sativa
tttcctctgtttgtgttctttgcttttgcctacacatgtatatatgtttttttttttgtattactttttctgtattggagaattgacaatttcagcattcattttttcggtaagttttattaattattcttatgcatgcacctcatgcttatgggatctattgttgtgtttcttgaagatttacttatcattatcttgctattttatacttattattttcattgggatcaatttcaaactaaattaactccacttacatttgaagatttacttatcttaatcttgctattttatacttattattttcattgggatcaatttcaaactaaattaactccacttacatttcctttgtgtttttttggttagaaactttatcaatgaaggggctgacactaaattgcatggaccgtaaatctgaagcatatgagcttgttcggcaaggattaaaggtgagagtgttgtcttaaaattttaatgttaattttgtctcaaagtcagtaggtcttatgttctctaacgcttttttgtctctttgcagaatgatctgaaaagtcatgtatgctggcatgtttatggtcttctttatcggtccgatagagaatacagggaggcaatcaaatgctacagaaatgcactgaggatagatccagacaatattgaaattttgcgggacctgtcactgttacaggtatgcttttgatgttaattttcttcttttagagacttatgctctgttggtaacttgaagaaaatattgaaatcgagcacttttgttttctgtttcaaagttaattggaatacatgactcttgttaaatattcctgctaacatcatgcttatttattacatcagttatgcgatcgtttttacaacaaacattttgttgcttagttccttgatttgatataggtaatgatggctctttatattttgtgttacaggcgcagatgcgagatttggcaggttttgttcagacaagacaacaactcttgtctctaaaatcaaatcatcgtatgaattggattggttttgctgttgctcatcatttaaattcaaagtatgaatttaatcttaattattaatattttatctttgtagtactggccatcatttacagtggcaaacttaaattatttttcttgttggtcccacttaccattgttatcctactatataattgaagtttctagaaacacaaccaagaagtttctaaacttatgttctctcatccataatccaaatagaattgttctttatacacaactggaaatttgtagaatgcatttctggttatagattatagatctattgacttcatatgttcaaactgtgcttttgacattggtcattctgctgttgagttttgctgatgcctatcatggttcatgtagctgttcttagtaaaaaattacacctgtgaatcatgttctaaggttcttgtcagaaagtcggttacataaagtaatgcaagctgaacttttaaaaaaatctagatctaaaatggaacttaaattcattctgtgctttaagaaatttttcctctcttttgtttatgtttttaagtattatgtatgtatacaatcaatactattatttttttttcttctctatgaggcatacacaaatatgtaaggataagcatctttactttttttggtgaattaattcttcttggttgtgcttttgggttgttaagtttgactaagttttggtctactaaacttttttgttttcgtgttagtgctttaaaagcagttgaaattcttgaagcatatgaagggacactagaagatgactttcctcctgaaaatgaacgttgtgagcatggggagatgcttttatacaaggtattctaagtggtagcttccttgtattatgttatatgttagtgtagatcttatgggtgattagtttgtctattgtgctggtgttgctgttactatctatttatgtctcaggttttccctacttatctctcttcttttttcaaggttctcttgattttgtaaatgtatgcacagctcttacgttatctgactttttttaaaaagctgcttctgtat

SEQ ID NO: 39695 - DNA, 1878 bp, Cannabis sativa
agctccttaaggaattgaaaagtccgttggttcccaagcccccgacaattccaactcaagacattcataatgcttggcgggtctggaaactagaacccgtcccaaacaagttttttgggctatccccaccttgaccgcccatagccacatcagcatcactcttttgattattaccattatgttgtttttgtaaattgtctaaactaggttcatctaatttattaaggtccgacccaatagcgacataattatccagcccatccaaagtccttcttcttttagtatccaataccaataaagaatcaatcccactattctctccaatcaaatccttctccacgtaagcctttgactttccatttgacacttccccaatcccatccgaattcattgtctccatctccattaacggctcattattacgtgtcggtactaatcttcctaaatcagtggagatatgatgcatctgcacattgacaccattgattgcaccattcaatgttgcctgagtattggccggagttccaggatcaggttgtttcataaccgcccctgatcttagccattgtgctcccatggtgtgctgtcgtcgtcttggggctgccttcaaggacaggtcttattccttgactatcaaatctggtggcgtatcaaagagcttcttacagaaacgttcagagtggccaagaacaccacaaatgaagcagaaggtagggaggccctcatacttaaaaaccagagaacaagattgaccactcttcttttcaagtttcatttttttctttaggggtttatcaatattcatcttcacccgaaccctcaaaaaatccctccaaacaccaacaaaattattgggatccgatttaacaaaagtacccacatgatttgccacatttctaactgtagactccgtcatgaaacccgactccaaattatgtagctgaaccaagaaattgagtctattcagcggaaccaaccgtgggttctctcctcgtttcagtcgttcaaaaattaacggagcgtgatcaaatgtccacgagctgccatctataaccctttcaatgtcaatctcatggtaaaattgaaataagaaatggttgggattcaattccttcacatacatgccttgtcccggttgccatagagatgcaattttatgttgcattgcctgaaaatcgacattccgtttgcgtaagaaatcgcccaacaagacaccatctatcatctatttgcgacaaatcgccttcatcatcatcaagcagtagcatgtcttcatcctcattaccacccctatcattcacatacctatccaccatctccatatctgaagaactccccgctgccatcggaaaaacgccagaaaaaccacactaaggatacaacacccaacaacaatcagacacaaactatgacgaaaccaaactcggactgccaaacaatctcaaaccatgtcaatagacaagacagatatcactcaaaaacaaaaattaattggcagcccgtgctcgctttatgatctcagatatccctgagaacacgttgttggctggtctcagatttcaacaaaaaattttaattaagaatgtttgagttataatttctctaaatctaaaaaatagagacttccttattaattttgacaaaagtggtaccctaaaatttacttgtactgttgtacatgtattatcaacacataatctaattaatatcaacaacaattaaatatatataaataaagaaagaaaaatagaaagcaatactaaatcacaaatcatatttttttttgaaggaaaatggtaaactttattagaatgaactttcaaccattacaatagataaaagatcaccaggagcattactctcactgaaaaatacgat

SEQ ID NO: 39696 - DNA, 2576 bp, Cannabis sativa
ttttatcttttcaaattatgcatgaaaatagtatttttgtaaaataaggcaaaatatcggggcgttacacctaagtatcagggcggtacaattttggtatcagaactgccaggtttgtctaccaaagatcgccaagacatgtacaatcatcatcacagaaaagtttggctcacggttcagtaagtctttacttgtttagtattgtatgtgattaataatgcatgttaggaagcatagtagcatataattacttattttaatgcgttgcacaaaattaggtacgcaacaaaaaaaaattatctaattaacattgtaccatagtctcaactcaaggatctcaagatgtatatacattaaatataaaatattaattgtatgaaagaaaaaaaaatacctcttgatggctatcatgctatcctcaaaacttctcgtaagttagatccaataaatctcacactgtagtcttccaaatggatccaccaaacaagaagtagtgtgagctactaggataaattgtatatgatgttcttgtataaatctcaacacatgatcaagaacaatttcttatgtgatagagagaaaaagattttctattaaaaaccctttttaggctttgaaaaaagctacgtaaaaattttattctaaaacttatgtttagagcttatgttatacggtatatttaaataaactcaataaatattttatttaattaatcacttaaattcaaatctatttattaaattatattcaattattttaataaataatataaccgaattcagttatagatatttacatctaataaccgattgaggaaatctcttaataaattgagagaatatctcaactacattataaattcgaatatttataaattgaattaattaattaaccaaaaaaagataaagccaataatgatacctcacactatatggtgcaaatatactatctagacacaatgcatgtggtgcctcctatgtcttgtttaagacaaggaatgagcctttagtcttgacaaccctttttctcaacaacttttgtctttttcctatttaattaatttttaaaaaaataaataattactatttttttcaattaaaaataggtttttttgaacttccatatattacatttatcctaccccttgacagtttatttaaggtggcgatctacctataattctaagctccaataatgtagatttatttattgaatttcatcaattaagtaatattgtttattaatttcatgattactctactaaaaatatagaattgaactcttagtaaatatagaattatatttataaagttttactgtagtatctattgatataatcaattctagtgattaacccttcttgtgtgagtttgtaaagagttttgatcaaatttattgttttatccttatagttacttctttatcctttagtactgttaattcactagtgaaagtataatttagatccaatgtaaatttatgcaaaacttttcaattctaggattaatacttaaagggaaccaacattcgatccgctaggaatgtcaggattctataattgtagatcatgttcctagttattcacattattagatccccaaaatagaagttgtaagaatcatctactctaagaaatgttaatgagtgaatcaaagaacctaataacataaataggaatttatgattactcaagatttaggtcgatctactattaatcatcactatgatatgaattaagtctttataattaatgataagtttgataaagataaatttattcatatcgatccttgtcatttataatctctattacatacaacacctttacttagatgtcatgttacatcagtaatccgaatcgagattacttgcaccaaataatgggcatcagtgaactgtactagtaaccattgattaaagcttcctaacctttaatatgtttttgactgttttattcatggctaagtgatcttaattcttcgtacaactacaagccacaacctcatgtatgaataaggacttttctgatatttatatattatttaatattaaatattaataatttaacattcatgcatatataaaaatatacaactcttattaacaatcagaaatttctttacaggttttttaaggcataaaccctaacaatctttcacttgccctaaaagcaaattgagcatgtccctaaatcccatattagttatatgacccatgaaagattatgttggtagcatctttgtgaatggatttgtcaagttatcttttgatgcaatcttcaagaccatcacatcacctctctctactatattcctttgtagatggtacttcctctcaatatgcttgcctctctcatggcttcttgattccttggagttggccaccgctccattattgtcacagtagatatcactagtggtgtttttttctacttttagaactacttccagatcagtgtataatttcttcaaccaaactgatttcttagctactttgcaagctgttgtcgagtgaatttcgcaacaccaaattatatttttttttgttaatacgaaagagaattttatgggtaatga

SEQ ID NO: 39697 - DNA, 1738 bp, Cannabis sativa
tataaactagctagtcttttggaaaatgacttgtatttatggctggggcttgaattgaatgacatgcagactaaatgtacaaaatgaaagtaaaaaaaatagtgataatgaagcacttttatttttctaagcttcactcaatttgtgctagttgtaataatgaaacaatagagagagatatactatatatatatataatgatgatatcagagtgaagtgataatccatgcatatttatatatatataaatgtaactgtaatgattttgctttcttggaattttatttatagagatagattttgttgctagctgctgatgatttcattagtggggtaaaaagtttttactgaatcccccaatgaccaatgacccaatgaccattcaaacatacagtcttcatatcagtagtacttgtgcattttctattggtagtacggatgaccgaattgagaagatatattcccatatgtcaaatggtaattaaattttattcctaaaatctcttcttttcttatggtgatcatttaggagaacattgttaatttgttataggtgttcctaaaagcatcttcagtcaaccaactatactcactaaacacattcataagttaaaatagataggaaacctctttaaatatagggagcttcctatttttttgttaaattttttaaataatattttaatcaaaagtactattacatttttattattttataaaattaatttatatttaacaaattcaaattataaactattataaaataatcaaatactaactatagaagagaacatgcttagagcaacaacaataaatagctctttattttaaccttttagctttaaaaaaatagagagtgccattagaaatgctctaaggtgtctaccaccactatgagatgacgtcttacaaatgactaacaattctctgtaatctttattaaaataaaataagtggagtttgatattttggataattttttgaaaaaaatattcgttttcgttaaactagatcgctaatcgctcaaaaggatagcataaaatttagaaaggacatcccccttcttaaacatacaaccaacataatatcgagattgtctcacaagaaaatgtgcagctcgattagcatgccgtttaataaaacataaagtaatattatttaaaaatcgcaataaacttttacaatcttcaaccactaaactaaaagcaaaaagtattttaaaataactatgaataccttgaatagtaacaagattgtctgattaaatctccattctagaataattttgaaatttcaaccaactaagaatctccttaatccctattgcttcttccaaagaaggagacgccaccccttgcgtacaagaagcattagttgctaacaatttccctttgaattctgaatcacaaaagcggcaccaaacgacctatcttcctcaaaaataattgaatctacatcatcataattgtattcgtcataggtttagtctagctctctgcccccatcacatgctagtaatgggttaagtgaaggtatattcccaacatcttgagcaccattaatcaagaattaacaaagaaaatgataatacctcacaaatagacctctccaacttggaactcaatgaaaaattggacaagttcaacttctctccattccttaacatcaccatcttcaacctcaacaacaacaaactcgttgcctcgataccaataaccattggtaatctcaccaagct

SEQ ID NO: 39698 - DNA, 1455 bp, Cannabis sativa
  modified_base (1399)..(1407): a, c, t, g, unknown or other
agatcctggtaaaataaaatccaacaggaactagatctgctctgagtgtctagtgagttacttgcaacttagcaaaagttagcacagtaagaaaatttctttcaaacgataaggaaaatgatggctcgcctccggtctaaactcattgacctagacaaagactttgaacaagatgtcttgaaaggatccatcaatggagaaaacaaagcaaaccccgccaacgttggaacctcaactcttacgtaagataagggaaaggcaaaggtgggcaagccttagactaaaaccacctcgttttctcttcagactaatgtgaacacaaccaaccagcccttacggacgcataaagaaaccaatgcctccaggcttggacacccttttgctccagaaggcaaggttgcgccacacaaaaggcctaatatgaaagtaccaaagcctaaggaaaggaaaaaaccaccctatctgaagatagttggtcactggtagacctttagaggagtctcgatgtcaaatatgagaggccaaaggagaaaaggaaaaaccccaggagaatgacttgaggaaccatttaaatgataaggtttgcggatgcgaccttctggacagtgacaccaaaagattggaacaaaaaattgctgctcttaccaagttggtcaagaagaagagtagtgccctcttggattggaaagatgaagatctagagtcatgtgtcagacggatcatagaagccccactacccgacaacttcaaaatgcctcagatagagttgtatgatggctagacagagcccaggatgcatctattcaaatacaactggatgatgcaagtggcaagagtaagtgacgatgccaaatgcctttgtttttcactaacactaaccatgtccatggaagaaaagtggaagagatttcccccatatcagttcatggatggaaggagttgcaatcagccttccaaaaatagtttatagctgtcagagactctgatatggaggttggatctctgacgaccctcaaacaacaacctggtgaaatcctgaagaacttcatctagtggatgatggaagtagtttcaaagacaaagttcagtgacaatatgaaactggtagcttccgagtctggattaatagtaggttccttcttgtggagtgaaattcaaaaaaaaaaaaagagttgagacgttgtcctagttcttgtccaaagctcaaggaactaataactaggaagacacttataaacaagcttttggaatccctctgacacctactccaccagtagtaacgccaagttttaccctgccagttctagctccagtagtcacacttctaggaacttaatatactctgattgtctacaaactcgctgcttctgggcaagcacttgttgggttttatgccctnnnnnnnnntccatttcaatgtaatccattttgatcaatatcaataaagaaacagaa

SEQ ID NO: 39699 - DNA, 2911 bp, Cannabis sativa
ctaaatccggaaaacaagaaaacaaatttaaaaacgcataatagtgttaaaagtgtttttaaattctgaaaaggaaaaaaaagaagagaaaacaaaaacgaggaaaacattttgttttgatataaaaacaacaacatcgtcaaaaaaccaaaaagaaaaaaaaaaaaaaaagcagaagaaaacagaacagaggggaaaaagaaattgaagaaaaatctccctccaaaccaaatgtctccaaaaaccccttctctctctcagcctcaggcatgtcaattcctttacagcttttctgtttttgtttttatttatattgaggactatagatacgtatatacatatgcaaatttaaggggccggattgaatttgttttttatatttttttatgtatatatttcgtttttaatactgataagtaaaataatggcatttgaaaatcagtcgttgaagaagaagaagtttacaggggtttttggagatgtttatgggacgatgatgcttcttcccaaggaggtggagcttgagaataagcctaccccatctttcgactttcgtttaccggtccctgacttcagccgcgccttcaaagtgagttcctttttctttctttaatgatttttgtttgttttcattggtttttctctttgattctctagaaaaaacattgaggcattttggaggtttggtttttctctttgattctctgtttgtttaatgagaaagtggtgaaaaaagagagaaaatcaaatatgatgaatgttaagtatcaatcactactaggggagagactcactgttgttgtgcctcttgattcttaaaaagagttatagataatcataactgttgtgggaattgctttccacaacattgatctttattatagcctcttttcaattttctattacaagtgatatgacatattcaggtgctcttctctctctctcttgttttttttgttggttggatattatacaattttcatactacatttttacttgagacacttaattaaacctgaaataatatgccctatcataatgttgatcttaggctgtaaaattaaatggtaagaccctatcatcattgtttcaaaaggaaatcttaaataaagatagatttggcaattacttaaatctgattcaatcagttttcatacagcttgctatggatattgaagagtactaataaattatgcactgttttgctcagtttagcacattatatgttttctttttcctgtttaccatgacttgggtgcattatgtatctgagtattatgtaacccaaagaagcagaatgctctaagatattagataccttttgttggtggtgctctaatattcgctttgacttcgtgcaggatgttatgaaaacaagggaagctgctgagttcctcagtggggctttagcaggagctatgactaaagctgttcttgcacctctagagaccatcaggtttacttgtctttacttgtttttttgattcttttcattcccctacatctcaatgaattattgcttttgacgagctgtgcttaacattaatttacaatggcggagtattttgtttacttgtgttgagtttcgggtgcactcaactgctgaagctcatcgctggttctcaggatctaaagtaatttcttgattgtgaatttggtagaattttaaaagaggttgacaccatgtttgctgataaacctcctatttagtttgtttatcagagaaagaaaggccataaaggccaagtataagttagtattgaagagttttatttcttttgtattagttgtgttaattgtttttagagagttgctgtattttcagtgggtattagaattcaactaggctgctgatgtggcaagttctatactctataagtagagtaagggaacttggcagtagcctgtaggtatgtttggagagaatagaattgggagaaaccagccctcttgaaaggttagaataggagcaaaggcttcttgaagagcttgattttataatcctcaaagattcaataaaagttttcttgtgggatttcattgttcttgtgcgtttctactgttagactctttgtaatcaaaaaaaagtctatcatttgcatctgattcagaaaggaataatcaaggctcatttttgggttcttttctttgtcagtttgtgtttctagtgatgaaatattcttaaaattattatgtgctttttactttatatttggatagttgtgcggtttctagttagatcagtgggactagtgcactgagtcacaaagttgaaacttctagacgaatctaggaagttaaggagcccactgaaggattctttctctttcttgaagttttgaattatgaaaccctgtagtctatgcaactttatacatttagtcatgtatatttcctgatttacatgtgcagaaccagaatggttgttggtgtaggatccaaaaatatcagtggtagtttccttgaggtcattgaggcacagggctggacaggactttgggctgggaatgcaatcaatatgctccgtataatccctacacaggcaattgagcttggaacatttgagtgtgtgaaacgaacaatgacatcagctcaagagaagtggaagcggaatgatgggccaaaagtgcaatttggtcctgttagttttaacttgtcgctctcttggatttctcctgttgctgtggctggtgctgctgctggatttgttagtacactcgcatgccaccccctcgaagttttgaaggtaggatacgagaattaatataataactctttaccatttttctttctcatggatgccaatagtgtttgttcttcttccagtcttggttataatctgtctgctttcactttataccatgttttataatggtgtagtgtagaagtatctagtttctctatttttctt

SEQ ID NO: 39700 - DNA, 2485 bp, Cannabis sativa
aataaaatatcaatttatattttctatgtaataattctattttttttttcataaaggctgaaataaataaaaataaataaataaagtatgaataatttaatgtaaaaaaaatttcattgtaaaaaacacaaataccattttagactttatgttttccaaaatagtaaaaataggatactgagcttaatttttaacaattttattttttaatataattaactttaagacaatttataatacgaacatatacagaaaatataacaaattttgtcataacatctctagatcggattattataaagttttattttgacaaaaaattaattcaatatcctatttgtacaattttggaaaatacaaggtccattttgtcatttaacaaaacatatgttccaattaataacttttgtaaaacacagaatatataataatatttacccaaaataaatatagtattctgtataaaaatttcataaaaaaagagtaattcataatatttaagtttaactcccggttgaaataaatacctaagtttaatttttagcggtaataatacttgttatatttctgaaactctgtaggtactcgttaaatattaagtcattatccacatgttattttttttattgatatacttaaactaatttttgtaaaaaaaaaataataataacttagatcaatcagtaatcatcacgtgccaatttacttaacacttaacatctacgtacttaccgaatttacaaaattatatgtattataaccgctaaaaattaaatttagtatttatttataactgaaagttaaacttaaatatttatgctaaaaattactcaaaaaaaaaaaaaattcttttgctcgttaatatctggttccccgtgtagaaaagaaaataaacctacacttgattataatatctagatatctgttatgcattaatatatttctagaagccagaaaaaaaagtatgatactgacttttaaatatactatcctcctcaacaagccaatgttaatttctcaacaagcgacagcatggagcattggttttcctgtacaatataaatgacaataatgaacaatattcaatgtttagttgaggtagacgtattccttacaaaataagctatctatattcattattttagcttatcccattcccagtccttttatttgttcttttttccttcacaataattaccatcttttttttttttttttaagaataattagcaactttaaatatacaactgaactgaaactaatgaaaaatattcaaatgagattgaccataacatatattaattgtgttattaattaaacatatctttggtgcgtgacaatataagaaaataccaacatttaacatatgcagtaataacaaaacaatatgttcgtgtagttggacctttaaagtttaagactatgtttggttgaaggaaagaaaatttggatagagaaagatttgaaaaagaatagaaattttgaatagataaaaacataagaataattaaacatttcgcccttaaatttcgatactacttgattctacatcctaaaatataaggcttgttaaaaattctgcctcaacttttacatttacagattcttaatcctattaggttatgtcatacttttctgtttaaatgctaacatgtctttataaattagtaactaaatttgcatcctaaactttaaaaactatcatatggcacctcttcaaaataaaaattagaaagattcaacattttttttagtaaatcttaaaaaaataatttaaatcttgaaaaaaaaaaatcattttgaatgattaaaaaaattaaaattaattaagtgatttaataaattaattattttttattaaaaaaatctatttagatataaaaagtatataaaaaattcaaattttaaattaacaagaataagtttgagtttggttttttctcaaaaaatttaaatttgtttaagtaaatataatatttttaatttaaaatctagtttttttaaaaaaaatataattttatatttttattgaatttttaaatgttttttaattttataagatatgaatctgtaaatataaatacaaaattaattttcttttttacaaaatcttaatttgtttaaactatttattggatttttaataatttagtttattttttaaaatatgtgcttataaataaaattaagtttgaaaatattttttttagaataatttagctttcttaagtaaatttaatatttttttttattaatttattcttttatcaggttttttaataatttttaaagaattaataaaaaagattatattttttaaagttaattttttaataaaaatggacaaattttgtattggtcaaaatttaaaggataaaaatattaatttttaacggtaaaaattacgtatattttaaggaaaattttataaaatcatatattttattaaaaattaatatatatatatataaggacataattttgt

SEQ ID NO: 39701 - DNA, 2900 bp, Cannabis sativa
  modified_base (446)..(460): a, c, t, g, unknown or other
tggggcccatctcatggcggaccactataggtattattttgctattattttatcattttttattccataataggatggtctcataatccaactaatgactcataacttagttttcaacttgttagacaactagagagttcttgagactttttcttcttcttctttcttctaatttcaaaatctcatagtgttatttaccaaatttttgagccattagtgagtgagtgcatgtccacccataataagtctagtactcaatcatagtgtgtaggactgtgaataatccaaacacctgaaggagaatcaggctcaatcttgataatactctgagtgggaggagtcattatattacgttgtaatcaatgtaaggttacttaaactttatatgtgttgaaattccattattttagaaatttacattgaggatgttaataaacatacttgtnnnnnnnnnnnnnnnctggtaaaatatattccaacacgtatggcttaggaaagctaaaagggtttatcacttcatcattttctcttcagagaatgttcttgctcctttgttgagacaaaaataagaacatcatattttctatatactatcgtcccacactgatccttgtgtgttgtggttgatctcaagatcaatgtgtgagtttcattactgttcttcgatacaacatacgaaaagaattaaggataccctgataggcatcaagaagtcaatattctatttcatctttttttgtttttttgatttaatatagatacacatggagatcttagggtatggtacgatgataatcctcgtaaaatgcttctattgcacacctgatttagtatcacaaaaccaacaataatataggcctcggtcttatgaatcgacaataatacaatatttgattgttaaaacagttgcctaaaccactttttttagtattgctcgagagttttcaaaacatgagtagaggttttatagccaacgacacaagtgagaatttcttcagtcatcgatgaaagaagccatgaatatatagagaagttgatcttgaatctcccactgagtgaattgaggattgacaagactagattcttgatcacgattggtgagaaaggtgaaggattttgagatgaaatgaagtagttgatggcctttgatattgcatagagaatctgaggtcgccaaagaagaaattgtcagtatcaagcttaattgaaagcttgtgagagaaaattattagactgaacgacctagtagtagtagtatgagaggttgatggagtagtagaagtggaatcagacattgtcagagaagattagattagtacatcctaatttgtgcacccttaattactagatgaacatggacattaagattttgaatttaatttaatttagtttttttaaagattgattttgcatttaattattttatatgtattatatatgatattatattggacttctaacatcttcccactaagtattaggtgaaccatttctcaagtgttcataagtttatgtttagattttctagcataaagggatcatgttatgttgaatttggggtgtatatgtataagctatacgtgggtaatattatttgaatatagtgattaaacagtggagtgttttcaagcccaaattagttctatccactatgcaaatggaatgtagttgaggatcaagattctcttattactcaaggaagagacaagctattataatagaaaaaggctcgtgaagagaattattggtcaaaaggtatcctaataagcaacttaaaagagttgttatatatagataaaataattattaatgtatatttgggtcggtagaaagctaaaatagaactagctagtaacgtagccaccaaaacgcgcaaatttattaattttattttcatacctcaagtactacaaatttcaatgattttcattttatataagagcattattattagataataatattgtctaataatatcacttaaagttggtattttgtattgttcactaatattttttaaaaattattatattaaattaatacttaattataccaatagtaatatgataacttgaaaggtgttagattttagaataaggtgaatgaaattctatcttaaaattaatcgacaatgagaagagtagcgcattcatcttatatattctattatctttcgacatattagtaatgtaagactctctaacatccccttcaagatagtatctattttatgtgctcactatcttgaacaactcgatcataagcagttctttttggttcactatccctgattacaagtggctcttttactctactttttgaatcggtatttatgaaattttggtaactctttttttttttttttttggctcactattcccgaattacaagtgtctttttttttaggtcattttattttttgtttatttttgctctaaaccatgttagattttgagataaggtgaatgtagttctatctcaaaactaattggcaataggaggagtagcttattcaacttacatatattatattatctttctacacattagcaatgtaggactctttaacagaaagtactatgcactattggtgtcttttagcatttaaagggaagagcattgatgttggacactgccatgcgattgattaatgatattctttaaaagttattacattaaaaattatatgagattcttcaataatactaataacaatataatatctaaaaaaatattacatattatttgtaccttttagcatttttcttttgataattattacagaatatcactaattaaacagactacactgtgggcgtttggtacgaggtgttcaaaataatttgattataaggaatattatgaaggagaatacgattatagggaaatgtgtaaactgt

SEQ ID NO: 39702 - DNA, 3723 bp, Cannabis sativa
  modified_base (3687)..(3690): a, c, t, g, unknown or other
ctgcagtaaaactcaataaatataattctataatcactaagagttcaattctatatttataatggaataatcatggaattaataatcaggattatttggttaatgagactcaataaataatctagtttattggagcttagaattataggttcatgtccccgaatcactaccttaaaatactatcaagggtagggataaagagttgtataatgttgttcagaaaaatctattttgaattaacaaaatagtaattatttattttggtaataaataaataatttttttcaaattaatttaatagaaaaaagacaaaaattgttaatacaaaatttattatgacaatcattgttaagacaaaagttgtcaagataaaagacatcatacttgtcttaattaacaaggtaggcgtctaccctttagtatctttatctttttgggttaattaattaatttaattaatttaattagatacatatttgaatttaaaaagtggttaaaatatttaagttggttaagatattccctcaaagttagttgagagattccctcatctgaaatatcagtaaccaaattttgttataaatatttatttaaataattaaatatgattttattaacggaaaattaactactataaatagaagcttgatttgataaatcagaagaagcttttacattgcaattttcaaaattcagaggaaaaaagtaaacttatttttctctctcaaatagttcttgctcataacaaattttatagtttatcttaatagccgacactattccttgtgtatggtggatcgatttgaaagactacggtatgagtttctaatttatctaaaaggatttaacttacgagaagttttgagaataccctggtagtcattaagaggtatatattcctttcatgtaatttatattttgatttaatgtttatacatctggagatctattgagaatatggtacaatgataattagatatacaaattttccattacgtacctgatttagtaccataaaaccaacagcctcagccccaaacaccaaacacggacccagacccaagactcgaaccctggactcaaaccttggacccaaaactgaaaatggtctgggtccgggtctggcgtctgcattggttttgggtccgggttcggtgtttggggctggggtttaggtctgactgcgggtctggggttcgggttcaagtttggggtctaggtcccaattccggtctgggtatgggtttgggtccaagtccgagtccagaccgtagttagggttgggtcgtgtttattgtaaataatttattttacacaacatattagtacaagtcagtatcaaacatagtattgtattaaataatactaatataatacaattcaatccaacagaataatatacaatacaatacaatacatcacggtgtaccaaacgaacccttatttatttttcataataataataaagtaggctgaactgtaaatttacaggatgatgaatactgaaggaaataaaagtacacttggttttggcaaaatatttataattgtttttggaataaataaactctaaagaatattgcctattggctatttggttactttagcaactatggagaagaaagcgatagattctagctaattatttctgaactcactaaatgacatgtcatgttctcatgtctcattggttaacacactttagaacaacattctttgacaggagatttgagttctatacgagcctttgctctactataatatttatggtggatcaatttggtgattaataggttaacatggtcaggtatattaatctggtgattaataggggtgccttttgaagcttataaataagggcctctcttcttcattctattcatatataatttacagctcaagagcggtttttctttggtgtatcaggtctcggttgtgagaagagttcagtgagtcctcagtccctgatagcacttataaaatcattttctccgtgtagtgaagatctacattaattcagtttccgtggacttggttttgtgtcttcattttatttttccttattctacttatattcttcatatttttgattgcttcttattcttgtttatgaaggaggtgattcccaacatatctttggacgattcattttatatcagttgttgcacactttttttggaggtagaatgctttgtaataggacctttacaagttcggaatgtaatgatactacaataattctatatttcaataatttctttttacagataatccaaaaatgtactttaaactttgctttgaactctaagactacgaccttgtgctgcaactaccaagtaatttggcaactataacatctcttctaaacagttcttcttttcatgttttacaaagtataaaaacaaaaaacaactctgtagtctgtactgaaaaatgttgagtaaaagacatcacataaatcatttttttcatttttataaagataaaaatcttgacttactttggtgggtttggtgagcatgaatcagtctgaagggaagaaggaaaaggctcagaaagagtttcacaagaagggctatcatccttccttcgttttcggtccaaggaagcgggtttcataggtgccccaaccatattaacattgcctgtcaacatggtcacaatgtgtgacatgggaggtctatgttctggatcaggctggagacataagaaagctacatttattgcttgcaaaacatccttctctaaaaatccatcttctctcattcttggatctacaagttcaagcactttcgatgtctcatacagcctccatgcctggttttgaaacaatcagcatgagaaattgaatgatgcaatatgaaataataagttcgcaagtagtaagatgcctacatattcagggaggtattgcattacagatggcaaattctgatcagtgtttttcctgcagctgataatttcaagcacaagaactccaaaactatagatatctgccttctcagacaactctcctctaatagcatattcaggagctgaataacccctgaacaaaataacaaaagaattcagtttgtcacctgaaaatcaataataaacctgtacaaaaaaaagcaataaaaaacacaaatgaaaacttgcagctttttgtccttattttacagtttttattaaaaaaccataatttataacactatcggtttaatcaacctttataacttttaatgtatttatcaattaagaattcacctgttagtgataatgacaaagactacataggaaccgtttggcataatttttagaaaaactaaaagttaccttttaaaaaaattatgataaaaaagtttttgataaacaattaaaaagcttcaagaatttatagaaaaaatacaactaaaaactaaaattacaactcaactttaaaaaaaaaaaaaaattattttaattaaaagactataattataaaagtatatttatttatttaatattacaaaacatataaatatttaacataaataatatataactctcttttttatatattttattttaaaaaatattttatatttttatttttcatattattaataaatcaaatcaacctagaatttcttatatacttaagtttttaatattttttttacaaatcataaaaatataatttaaaaatactataaattatttttnnnnaatgcatataaatttatattttaaaaaaaataa

SEQ ID NO: 39703 - DNA, 2121 bp, Cannabis sativa
  modified_base (2078)..(2096): a, c, t, g, unknown or other
aacttaatctaaaattaatactaaaaataacctaacaatttttctaattcaattaggcctctttcactaatatggcctaatctcaaataccacattctagtttggtcaccacctttgtcatccaagcagcatttgctgttcctatcactgccttgctattaagagcatagaaaccatttctgatatcacctttcatcactatcagtgagtctttagtcactctaagagactcctcaatcttaatggaacatccatttgtagctaattaaccaatagacaactggtttctcttaagttctggaacatatttgacattctaaatagttcttttaatgccatcatgcatgacaaacaacacaaatctaattcccttaatctgacatgctttgttgtttcctaaaagaatatttcctatgtccttgaattcacataatagattcttgtgaggtgtcatataaaatgagcatccaaattctagcatccactcttcaccaaactccttgctggacacaactaacacatctacaaattcatatccatcttatgcaacatttgattcacctctttctctacttttgcttctggtattcttcactttcagagctctacattcatcttgaaaatgtccttccttcttgcagtagtaatagaactttccactcttaaacttggattttgtcttggtctggctatcacttctatgtttgttcttgaattctctcttgtcaatctttcctcgactatttacagaccatcactattagattctcctttatcctctgaattcttttgatttttttttaattgagtgtagctttgatctctgacatggttaatgtgtctttccaatacaggatcatatctacaaagtgctcataggttttgaatagacaacttagcaagattatgacccgatcttcttcttctatcttgacacctatgttattcaagttcagaataattctgttaaattcatccacgtaacttctgaattttcaagtaaatcttattagccaaggatttctttaagtaaatggaggcaagtttaatccacgatcctaaagcagttgcttcatttgagagttctctcaaaacttcatccctaagactcaaaagggtggcactataagccttcgattcagtatctctcttaatcttttcatctttaatttctgcaagttgagtaaggtcgattacttcagatatacatcaatgctttcattttgactttccataaactaaagtcatttatccatgtgaacttatctacttcgaaccttgctaatgacattttaaatttgagttctttgaatcttgaaacagttcttgaatgttaagattcttcttcaccaagctttaataccatttgtggtgaatctcgattcacctcgtctaagaacacacaataaagaacatcaaacaattaccagaattgaaaatgtaatctaaaactagcaatggacgataaagcaatcacatgaactaagtctgaaacttaaatggcaagaatgctaaaaatttaatgaacaccttttttaatgaggttcgaacaccaagccaatgagacttgtgcctacatgtttgggaaacaacagcttatgaatctttattgatgaatcaaaaatggtgattacaaattgatcactcaagaattagagagctccaattacaaaggagatttgctcctaaactctctcactcaatctaattgcaccctctctctcacaaatctgtcctgttagttgttgttaaaacaaggacttaatcaattgtatatttagagctagaattgacataaatcccctaaccaactaacttaactaactctaaaaaaaaaaagtttgagggtaccacatggtacattataatttatgctataaatattacaatatattatactcataataatatatatataatattataatttaaaacttaaatatcatattatttaataaataatatagcacatattttactttatttagcagcttttcaatacttatttagatgaaaaaaattatattcaattaaggctaattaggattttttccctctgaactttaacatgtaccaannnnnnnnnnnnnnnnnnntaaggtcgttaaaaatgccccctga

SEQ ID NO: 39704 - DNA, 1822 bp, Cannabis sativa
gtccttaaatctaataatctcaactattgaggggagatttttaacgaccttaaatgttcaagagatatgatttggtacatgtctaagttcggggccaaaatccatattagccattttggtaagcacacaacacaatccttaattttgtgtattcttttatgactaaatcctctgttttattaaagtatcactaattaatgttttgacaggttgaactattctatttcttgggctcctttttgttgtcacatacgttagattcacacaagtgttgccttgcctctaatttgaatacttcaacaaccccatgcagaagattgtaaaggtgggtatcagctccaaaagttgataagagattagtttaatttcaaatggttataatagtttcttcaccaatgtcaatgaaaatttatatgaatctagttactaagtcactcatagctataccaatacgagttcatgcatgaagattctcaatccagagtagaagaacctttgtaaaatttctgttgtcttgctactgaggaacaatgggaaaggagaatgtgtcttgctacgacggaggaaatgatgggcaaattgattttttgtgttagcacattttgaatgtttcaatttggcactcttttgttcctgcagagtacagtacagacctacactaaccatatataaagtatatacgggaattttatagttacacactacaggtagaagtttttcatttttgtttttggtaagtcaaacaaattataattgcttatgtatctataccaatttaaaaaaaaaaaaatcaaatagagtaaatatgagtcgggttttttaacacggcacgagcgcgactcaatacaaaaaaatatatggttagacacgacacaaaaaaaaaatatggaaatagacacaatataacacgaaagatatgatcttaggcacgacatatcacgatagcttgaatgtacgacacgtaagcacaaatagattatctcaaaagcacaatacgttaaaatgtttaataatttgataataataacaatgataaataattatttatcaattaaaatgatagtaatatttaaattataataattataattattttttatttgattgtgtgtaaatattattgaaaaaaaatataaaaataactaaaattataaagtacacattttaatatttaactcattaattgtaataaaaatacaaaaatataaagcacgaatttgagcacgtataaaaaaataagttggtctattttagaaaaatggatcgacttgaataaagcactacacaaatctaagaacgatacgatacgaaattactaaacttgcgggccatgttggacctaccttataaaattgttgtacgatataagttatattttttttatagcacgacatgatatggtacatatttttttatagtacgacataacacgatttatatttttttatgacctgaaataatacgatctatatttaaaaagtattaaaatataaatcgagctagtataatacacacgtatttacaattttacatttgggtagatgacaaataaatttaggtagatattgtttcatattgtattaaactcttaattatttttgtctatatgtttttttttaaataaaataaaataataagttgcacatttattaaatgtagttgactattcaaacttaggggtattactataggattgctttggctctatttgtatttgcatttaagggagttttcttcatagttatttaggattatattatatttttagaaatttttaaataatttatgttattgaaaataaaattttaatattttgttactt

SEQ ID NO: 39705 - DNA, 6086 bp, Cannabis sativa
  modified_base (537)..(542): a, c, t, g, unknown or other
agatctccgagaattggtgaccaactttaccataacatataaatggactaagttgtgtcaaaatatcacttaggtatcttaaagtacatctcttggaagtttttacagttacgcaacgtctaagttgacgtcatatgtcaacccgggtgctgggatggcaacctaggcgctggatgtcagcctgggcattgggtcatgaacttcctttagtaaaatagccataacttaaacttgccttttgaagattatttaatgctctatcaattcatgtctcacactccagatgtaattttaaagctatcgttgtcaaatttcatccccaagagagttacaaaaataagatctgggttactcgcagtaggacccaccaggctccaaaaaatggccatcaccaccaagagctaattttcactcttagatcatcatcaatggttaacagaatcttatttgaattttcccccatttttatggtcctccttcacctataaaaggagagttcccttagctcatttttcacattcaaaaaactacccacannnnnngagcttctctctctagattttctatctctatttggagctttagacacttattctattgctataattactatctcgtgagaaataaaaactcgaagaagatgtagccccattactatcacgatatagggggtgagctactataaatttattgtatctctcttaattacttaactacttttttcattctcattaatctagctagcagctatggcttaaaagtctagtctaaatttatgagtcaccaaaacgattaaccagttctctagaaatggttaaccactttccgaagcaattcccagaaaataatttaccgttttggaaatccagtttaccgattttagcaattttaagaaccttaatttttgtattttctcgatatttatggtattcccatgctatctatcgatagtgaaacttctagttttaagtttaggtacccgagaaggttttagcaagttgtttacccatttatgtgattgtgacatagggcctccattcagcgcatgacttttcattcaggtcgaccagcacacttgaatttggaaacgagataagattggtataaaacatgtatatttatatgtgtatgtatgtaaatttcatgctgtgttaagcgatttagatagtacgaacactagtacgttaacggtacggagtatatttgtacagtatatgatgttcaaagggtatgatcaagtgttaatatcactagtacgggatgagtacgtagtgcatatgtgtggaacaacacttagtggtactgggggggtacggttcagccctactaacattaatatgagatgagtacttaatgtatgggatacaaagtttgcactttcgttaagaacgttcttgatcatctgttaggcttggtaaataggtgcatgagcgcctaaatacaagtcggtaatatgttataggtttttcttactaagtctgtcgactcacaaatattgtctgtatgtgtatgtaaatgaaaggctaaggctgagcaccattgagtctagagcttggggatgattgtatatattaggataattggacgtggatagttcagtctcaagacgacttgggcctacagtttgtagtcacagtgcgacatgtctataagtgtattttgaatatgaatgtaaattttaaagatgggatctcgaatttttgtatcgatatatataagtaatttaaagttttaacttgttataattttcgaaaaaacctttgattagcaaaggactgcacaataaatagtagatcactatagtgtgcctaagcattagtatgttacaatttttgtatcagagctgtcaggttgtttaccgatgatcatcaagatatgtacaatcatcgtcagacgcaagcttgactcatagttcggtaagccttttttgtttagtaatttagttgattagaaaagcatgatagagagcatgttagtaatattttaattatttaaatgtgttgcctagacttcatgtatgtagtatttggattatatgtgatcgttgtcttacctacatgacttatgggctcacatgctaagtcctataatatggacacctaatgaaacacaaggagtcaaggtaatatggttgagaccgaaggcagtgagggaggtcaaaatcctccaaatcccaatgggaggattgggagaaaaagtttgcagtaatgcaagcccgaattaaccaacaagaggaagagttccaaaggctaatatagtaggatccgcgtgatatgccccctcatcaagtactaactgctttggttccaatgagtccagcagaacaacctgttgttggcaactgtatggagcctttgtatgaaagatttcgcaaatgtgtctctagcctttttgggaggtcctgatattatgaaggcggaacaacgactatcagtaatcgaaagaatcctaaactttatgggtgttaccgggaatgaccgagtgacctgtaccatgtttcagttccaagagaatgcccttgtgttgtgggaaatggtgtccttcactcgggatgtcactacaataacttgggaagagtttcaagatctatttaatgccatatactacattgaggcagttcttagtgccaaaagaagagagttcaccgacttattttagggtgaaaacatgaatatacaacaaagttcggttgactatcaaagttagctttgggtatagtgcctacagattttagtaagaagagaaaatacttggcgggtttgaatgccaagattagacatgatctggatattaaaataaatgatacaacaacttatattaagatggttgataaggctcttcaagccaagggtgtagtgtaatttctgcaactgcctcgatggattctaagtattggtgggaccaccacccttcctacttctggttatggtagctagagatgatggtgattccaatattaattagaagaggaagaccttcctaatattagctggcttgggtcggagtaagaggttctgtgggaatcaaggtagaggcagatgtcaggcttattcctatgttgagtgtccccgttgtaagaagcatcatccaagggaaaagcctgttgtctagagacaaattttttccctaactttacataatttttgtaccaatctattttgagtaaaaatctaattttttacaggtaataatttcatattttcgaagtccacattaatttttcataatttttcatgtcagaataaacaccttaaaattttcttaaaaaaatgtttgtttgccaagattctgaaaaaaagttttaagcatgcaatttgttaaaactatatcttgctcattttaacacattttaaagtaattccaaagctaaaaaatacactaatcaaacccaaataaaatatcacgcaagctaaaatcaaaacacaaaatatcaggtggctttgatccattggatgtcaagcctcaaaactgtgatcaaacaaaatattctcatttgatagaaacttttgatttctaccaaacaaaactcagacaacccctagcatatcatctaacatcatggatcgataaataacaacctaaaataataaatcaaacactcaaaccctctcttaagacaaagccactaacaacaaagcaagactctgtgaaaaaagagaaatttacctttggaagattagggtttcacgtacgtctttgatgcagcttccaatgatccttctctctcccaagcatgacactttctaagaaccacatcacaagcttcgattacaaagatatatatatatatatttatatatacagagagacaaatttaaggcttcaaccctaagaggaagaagaagatagcaagagaatcacactacacaatactcaccctacttatccttttgatgtgcttagcaggaaaaatcacatgggaacctctaatgaagttttcctttagatgaatgatggtgagccatggatgaaaaataaaaataaatggtgataatgagagctagagctaaaataataagaagagggtagaagatcgagtagaatttactcttggttcttttttgatcaaacatgcatgatggagcttcaatagtttcattgaagagagaaaggagagcctctctctctagattttattttctgaatattgaaattaaaataagagtgaagagagagagagggagagggagagagggagagagattttgtggcttaaggtatgagagagaaaagtgaataatgtagggaatatgacaacatagcctataactaggtgtaggtttagtgtgtatgaagagaagccatgcatggctcttatttttcacattttttttttgaattttgccaatgtttttttctgctctctaaggccagtccaatatagggttttcaaggctggaaattttgcaatttaatcaacaaaatattgcttaaatactccttgaagcaatataccttacatttctctccaaaaactatattataaaatcataaaaaaaatcaatgtgtaacacttaaataaattttacattcagaatataacatcaacaaatatataaataaatatttattttagcctaataattattcaacacaaaaggttcacacgcgagtacctattttactaaaattccctctttaagtgttctcacacttggaattttacaagttaaattacactagccaaatagaataccctaagcccaatattagttgccataacctataaaagtatgaaccttgcaatttttaatattttacctcgttgtgttataggtctgtaaattttgcataatttctaaaaacgacaagagtaacaccaattccatttttcattgttaatttcacataaattatctatcttgacctaaatgtcgcagaaatcataatttggatacccataaaaaaaaattattacacatataagttttttttgtccatcgtttgtattacctttttcaattttttgattgagctgtctcggggaccatagacctattaagcttcaataaattaaaactaaataattgaaatttttattgatactagttagtttactaattctgatattcttccactatgaattcagaattgaactctttatgttatagatgtacttttactgaaatcttttcttaatttttccattgatataattatcttacaatagttcagctctccaataaattggttcataaattaaaatggaagaattactattttacccttctaatttacttcttattccttaagtaacattaattcactagtgaataataaacctataatatgattatagatttgagcttaacataattcagtaccagaattaacccttaagggaatcaatacacaatgtcacaatccgttaaaaaagactgaattctttttcgttaattcatgttccctactgtccatgtaattaaatttcaaaaacaaaagtcactagactaattctatggagagaccttaacaaatgaattaaaaaattcaatcaatatgaacatgatttcataaaacactcaggattgaggttgatctataaacgatcatctgttatgatattaatactagtctttgctattaaatgacttttatacaaagataattattcatatcaggccatgtcttatataatcatattatataaaatttcattaccaagatgtcttaccacatcaataatctgaatctagattatttgtaccaacaggtactcaggaaaccgcactataataaccccaatttaaaatttaaaatattaattagttcttgactattttattcattcatgtgatttaaattctcttgcactaatacaagatcacattcttaataatgaatatagaattttttaatatttatataaacgattcaacaaaaaatttaacaattcaaatataataataataaaccattatatttattattcaagttaaaaatattaaattcttttacatgcttttagggcacactcctaacagtaactagttactctttttttaaaatagaattgaatgtatttttggaatgttggaatcctttctaacagctcaaaattcctccaaattacccaattagtatca

SEQ ID NO: 39706 - DNA, 3815 bp, Cannabis sativa
  modified_base (2928)..(2931): a, c, t, g, unknown or other
taactaagcgggctttacattgctagagactcaggcaaagctagagaaaagtatgcaagagccttaaatatgaataaattgatgcagttatggcagaaaagaatgaaagcctaaataaccatgtgttggacaaccagtcaaaacttttaatgaactagactctggccacattatttatccacactatgatcctttggtcatttaagtgcaaattgaaaataaaatggtggctcaaaaaatggttgataatggagcttcctcaaatagtttttttaaaacaacatatgaaaatatggggcttcaacttaaggatttggttccttgcactcagctagactacgaattctctagccaaagtgtaccaccacttgaacaaatctacttaccactctcagtaggacaagcttcgacgagcaaaacagtaatgacacaattcttagtgatcaacgttctttaagctttcaatgtcatgttatgctgaccagccttatatcacttaagatccatcacatcagtctttcacttgtgcattaaatttccaacacagagtggagtgggctgtctgatgggaaatcaaagagctgcaccaaaatactacaatcttaccctatctaaggcaaaaaaggaggatacctctggccaaagttcagagaagggaaaaagcatcgcccaataagaatttgtccaaggcagggatgaagatatggatccctgacttggggaaacaaacagaaatgttgggccagtagaagaactagaagaagtatagatttatcccaccatcctgaccaagaaactcaagacgtgcaagggtttgttacttggaataaaattagctttaataaaatttctaagataaaatctcaacatttttgcctggtggcatgaggacatagtcgggattgatccagctatcatgtctcatgcccacaacattgatccaaacttttgtcccatctaacacaaaaggggattgatggacaaagaacgagcacaagcactaaaaaaagaggaagaaaggctccgcataaataagttcattattgaagctttctatccatcctaggtggctaataacgtactattaccctagccaaacattaaatggcgagtgtgtatcgacttcaccaaactcaataaggtgtgtctaaaagactattttccacttctaagaatcgatcagctcatggatgcaatagtggagcatgaaatcctaagtttgatggacaccaattaagggtataattagataagaattcatctacctaaccaagagcacactagtttttgaatagacattggtctatactgctacaaagtcatgtcgtttggtctcaagaatgctggagctacctgcaaaggttacttaatacgatgttcaaagactagatcagacacaatatggaagtatatgtggatgacatgctcgtcaaatccagtaaggttggagggcacgtagaggatttggacgaatgcgtcaaaatccttaaaaaatacaccatgaaactcaatccctaaaagtgttccttcggggttagctcgggtaagtttcattgatttatatttaatgctcgaggaatagaagctattccagagaaggttgaagccctcttggatatgaagtcgccaacaaaggtgaaggaagtgcaatagtcggatagccgcactcagtagattcttttaaagtcaacagacaagtgtgttcctttcttcaacatcctttgaggtaataagaagtttaaatggacgaagatttggtggctctttccaccgctgcatcttacaaggcatctgcataaattcctgatactgttgaagcctcatcatcaaagaaatccaagcctcaatctctggtgtttgcttcagatgatcttcctgcagaagctcctactccaaccgcttcaacatatatctctgcggaactctctggtgttcgagcttcccttgatgccttgactgatcgtgtaatgactcttgagggactctaacgttcaattctaaatgctattaaagccttgtctaaggccccataagtttagtttttcttgtccttttattttttgtctccattcttaagaacattgatactttctttagtcttaggtttggcatgtttgtttcttttttgcttttggtactctggctactttaaaaggcacaaagggggagactagactcaaaaacctatttattttgttatatgtaactccagaccttcttattttgagggggagttgagttttagtttctttctcatgtgtgttttaagttatgcatgcttggaaggggagttcttctctttacttatttctaacatgtgtgttgcaggcttttgttttatttttatctatcaaattgccaaagggggagagattgtaaaatcttttattggaatatttgagaaaatagacaaaaataatacttgtggtattttcaaaattgtgtctaattgtttattcattaaattcgaaaatatagtttcctttttttgtgtgaaaagcctttttgacttattgtgaataaatatgagtgttccttatatagaatatatgatttcatcctttactttttaaggaaattcttattcatattttatttcttttgttctgatttcttgaccaagaaaccgtgtacatctgtggatattaatgttatgaaagttgccctatttgtttatggaaactttgctgaaaaactgtccaggttcactgtatctgtttgaacagattgactgtctgtttaaatagatttttactttccttttcgggaagatttttatttattgacctaatggcttcttggtttcttgaccacgacctagagggtttctaaattacttttcaaagttagagagtgttttctttgttgtgtgaagaacttgagtccaacaagttcttaatatattattattgtgttactctatattgnnnnttgttgaaattgtgcaggttgaacactttggatattgttaatcaagcttcgggagaagtcttgttcatgagtcaccttttgggaggaaaaatgcatgtgagtcactattcgggaggaagatttcaagttagtcactcttcgggaggaagagtgtaagttagtcactcttcgggaggaaaattgcaagtgagtcactcctcaagaggaagactgcaagttagacactctttgggaggaagatttcaagtgagacactcttcgggatgaagtgtgcaagtgctacggattgaagggagctcaaggtctcgacactttagaaattcgattagaagaatagattacaacaatcgcgacaaattcaaagaaagagtctttatttgtataagtcaatttggttttgtaaacacttgagattcattaataaatttcattctatgggcgtggcctcatggactaggagcgattcaaaagagttgttgataccacgtataaaatgttgtgtgtcattttaattttcttcattttactttgcagtatatttctattttttagattctatgtctaatagaatagagataagttctgttcaaacaattttactacagttccgcattattaaattgtttgataatttcacttggtaattattaaaaatggaatttcaagataaatagaatacacaatggaactgtttagaacgagtagacaatgagtctacagctctttgatccacatactcgtgagtatgagcttgcaactcattgatccacatactcatgagtatgagctttctgctcaaaaatcttgcccttcaagtctcgaagagttggatttttggtgacaatggtgttgctccaattcagaatccttggaatcgaagatga

SEQ ID NO: 39707 - DNA, 2102 bp, Cannabis sativa
attccccacaaatgttaattaatcgatggccaagtcttcttaaaaaattgcctttaatgtaataagtgacaccaatgggattcacaaggatcatgtctctgacaaatggcaatgtatgtataaaaaagcaaacgaaaacatatattaaccaaaacaaaaaggaaaagatatatgaacagatgaaaagatccttataattacaaacatttatatataaaataaaataaatatgtgagtgagtgagtgagtgagatctagagagagaaaagagtcacatgactttgtttggtttgagatgcttccctttccttttctcctaaatctgttaagaagcatgcaaaataactggtcccccttttgtaataactacttgcattttcctatctctttttcttttgggttcatattattcaacctctctttctctctccttcatcatgttcatgtgtatattattattattattattatatatttcatgaatgtgaatatatatgatgtgtgagagagagagagtaatactaaaggagataaaaggtgtaggtgactttttaaaacaggtatatatcactaccatgtctgcatggtgttggcgtgggcatgatatgtattcaatattgtcttatttactttgattttgggtttggaccactgccatctgtttctttccaaaaactttatttttaaaaaaatatatattttatttttgagtcctctcaataataacataatcaccattcaccaataaaaaaaaaaaagcttgaatacccgagagttagagacattcttctcttacctcctcctcctctatttatatccctctccttatccccttcttcttcaccttaacaaaaatctcatcatatctcctttacataaaccctagactaccttctctctctctatatatatacataaataatcgtgttgtagtgagtccaggcgatgcttatcgtgcaccagcagcagttgaagctgccagcatgatctaaacttccctgtgctcgaggaaagatcggatcatgtggtagcttcacctgttgatgggtcacgtttcaattccagaagaccctttatataataatatttactaattgttttttcttaattaactcttcttcattgggtttttcttgggtagtacccttgagaaattttagattgatctctctgttactatatatactataatataatatcatttttgggtatcaattttccttacgtactcaatttgttttttctcttaatttgattcgtttggtagcactatgtgtggtaaattctactttccttttatataaatgtgagtttttctaataattattaatcatttcaattagaataagtagaaaaaatgatgattaattttgctattccaatgagaacctggagaattggaccatcattggttttgctttttgttttttttttttaagtgtatatgataattattatattaacatatcctatttataatcatctctgtaaattattattaataactttatttttaggcgtggagtggaatcattgtggggaatcttattaacagcggttagatatgagtgttagggttttgagtgacagaatttctcctgttgaaacatggttggtgcttttcagatctcatcttatccctaatgtatcattaaactttaccttattattagtttaccaaataacatatttatttattcatttaattttagctgtgtgtgcatcatatatatatatttatatagatgacataaatatattattttatgtattggttttgttaaagaaacaattatatataatcgtaaaagaatatgtaactggtaaaaagggagaaaagtaaaaggaaaagcacttcaatcttttatggcctgcaaatttattatacgtatacaatggcctgcaaacaattgttattataatatgaatataggaacggcaagaataaaaataggaatagaatgaaattaaatttaataaatatattacaattgttattacaattgttcaatctacaccagaactggcagaggctgtaggaattagggaggctttaagctggattaaagacagcggaatgcagcaagtggtgctcgagacgg

SEQ ID NO: 39708 - DNA, 1180 bp, Cannabis sativa
atctagatccttgtaaaatatatccaacactccattgttgaatggcttgaaaagcttgagagtgaatagagtgattgattttgggtgtgaagatgagactagaatgggattttgatgagaaattgggatgaaatgagaaatttgaaatttttggtgaagaaaaggtgtagggtcggctgagagagtttagaagagtgattgaaggattagaatagggtttaggtgtgaaatggggctttttaaaggcaatttagggtttcagcccgatccctggtcgtgaccacataatggcttagttgcaacgatggatcaatgcgcgatttcaaggctctctgtaagacccatagccgcgaccatggtcgcgaccatgaaaaagggtcgctaccatgaatcaatctggtcgcgactactgacggtcttaattttatgggctttctgtaaatcccatagtcgcgaccatgaaaaagggtcgcgaccatggaacatggtggttgcgaccactgagtgatggctcgaaatttatttatttatttttctttttccacttttcacgcttagcacggtttaacataaaacaaacgtctaaaagtttacaaaacattaaaatgctaaaaataaataaacaaaagtctaaaaaaaaacatcaaagtaactaaatcacttgggttgcctcccaagagcgctgtctttatcgtcatatagctagacgctgagttgcttttcaaagaggcgccaatatgatggcagacttgccttggtctatttgacctcccaagtagagctttaatccctctccattaactttaaaagtttctggactcttgcctttcagttccaccgctccatatgggaataccttaactactttaaacggtcccgaccatcttgacttcaatttgccaggaaaaagtttcaaccttgagtaaaaaagtaagacctactgctcgggttgaaattccttcctaaccacatttctatcatgccatttctttgtcctttccttgtatatctttgcattctcatgcgcttcgtttctgaattcttccagctcatctaattgtaacagtctcttctctcctgtagcttctaaatccatgttcaggatcttcattgcccaataggccttatgctccaactccaccggcagatgacaggtttttccatacaccaacctatacgg

SEQ ID NO: 39709 - DNA, 1585 bp, Cannabis sativa
tataattttaaaaggtaaatatttttttttgggcccctgggataggtgggccctaggcacaggcctagcccgcctatgcccagggcaaggcctgattatgggtcgtaaaattacacaatcttgaaattacagctaataaagaaattagagagttgtttgcattgaagtacatagttaccaatattccaaatagaacaggttctcttcaacgcgttgataactgtctcagaatcactatctatcaacacaaaagaatgcttccagtagaccgctaattaattccatagccaacaaacatgttgcgacttctccaataagcaggttagagaagttgagcatgctggtagctacccacaaaactgactccttttggtgcctagcaagagccaccacacacattgaatcacaaccaattctaacgtcatagttgatttttatccagaccaaacaagagactcaaccgtcaccggtgtagaaaaaaaggcaagaaccataatctatgtaacacatacaaatagagtcaatgcaatgcttaatgttacaaaaagaattattatgaacatttctgttgcgggtttgtgtccaccactatcgaagcatacaagaacaagtctttgacaaccactcctctagactccatactccataagaatttatcacaaccccacacacgggcctccgagtccataacaggcatcacaccccaggggaagacttccacatgtgaaaagtaaagttacgatagaggaaaagatgctccattgtttcctctccctccccataaataggacacgaaacatcctcaacctgtattcgtctagcaataatggactaggtaggcaaggcattggagaggatactccaccacaggactttgtgacgctccaaaattttataattccatagttcattctatagaacatgagtaatattgcaagtaggagcacgattcaaggcttgcaccagattagacggacttagtagataattgactatttgattctttggtccatatccacttttctctatcttggccagagagtttgccacctttgataatactattagtcatcttaggccaaaaaggtaatgaagtttggccacattctaatttctattatctgaacgtaaattcattactttttccaaacccttaggtcgaacgtttacaaggtgaggatattatggtcatgtaaaattcacgaatcttctcaaatattagtatctttccatcctaaacaagtttacaagcctctttcaaaagaatttccttagtcttcataatattcttccattacctaagagttatgacactaaatattttttcaattattattgaaatgtctatatatatataatcaggatttaatctcaagaccccacatacgcaccactttaccatctatattcacatgagctaacctcaattcaactggttatgacactagagcatttgtatattctaattcatcttcttgcttaattaaagtaataagatattaatgtgacttcgattgaggctgaagagttggctgctttctggtttgcttaagggatgagcccaattaaagaaggggccaatgga

SEQ ID NO: 39710 - DNA, 1666 bp, Cannabis sativa
  modified_base (791)..(798): a, c, t, g, unknown or other
cgacggtaaataattacttaatttttttagcaacagtcccccaaaacaagagtttttaggaccgtcgcgaattctcacttttgtagtagtgcgctctaatcactacaaaaattaattgaccatcataattaatttaaatttaaaatatgaattatgcttatcaaacaatatcggatttaagactaatttaacaaaataattataataggaaaaagacaatattggtttctctccttccgcgatgaagaagaagagattaccacatggaagtctacaaatcaaattcgagtagaggagcttccttcaaaccaaattcaagatgatggaattgcgattactgatcgtcgattacagatgtgatctagcacgaagaatgatttgattaaggagatgattgtaatgagggaactgctcgagcatcctctcagctctatgctcatggatttgatccagagcacttttatgaatgaagaggaatcacaatattgctcaggagaaatggacaaagttcagagaaacattaggttagtgctgctactaaattgcattatattgaaccttttgtgaaagaggtatttacaccaagagtagccctgatgatgtggcatcaatatttgacgcatggcaagaaagatgacatctcggagttgagtagtcctgagtcatagcaggtcaacttgggaggggtccctagccctgcgcccaggttgacttcacaggaactccgggatggaagttcggaattcaataacttgaatctaacttactatctttcagtattttgtaccatnnnnnnnnggagcaacctaatccaagccccaggagttgaaattacacgaacacacaactcagaagccaacctgggcatctagggtttcacccgacgcccaggttgacatttgggctttagtttctgcgaccgtcttagtgaaaaaaggtcaaaacatgcattgggacataaactagacatcccacggacatgcttaatgcatcagaatcagagcaagtttatttttgacaactcggggcctcgagcacccagctctcaggttaacaatcagtcaatctcgacacattccaagtatcaaatcgatgatctaactttttttatcttctttgtcttcataaaaaatggggatataggtcctttcgtagaagaaagaacattttttgggtgtcgacaacagggcccagcgcccaggttgacacctggggctgaccctgcgcccaggttaaaattttgtcaacctggcaattttaattagagtttttcaagaatactcatgagcatcatcttcaattttagaaaatattgagattcaactatttctgaggactaaataaaacttttgaagggccaaaagggggaccaagcgccgaggttgacacctggggctaggtccagtgcccaggttgacatattgtcaacttgggctagtttcgatcaagtttaccaaaaagtgtttcgggtattttttctgtcattagaaacaacaaagatttaagtaaacttggggagaaaattataattccgagaccttggaaacagggcccagcacccaggttgacctagtgttgggctcagcgcccaggttgacaatcaacctcggacgcaggctgttgggattttatgccctaaaagaatccattacaatccaatctgatt

SEQ ID NO: 39711 - DNA, 1705 bp, Cannabis sativa
  modified_base (83)..(89): a, c, t, g, unknown or other
gtatttttgtaaatatttgtatgtggactgtataaatgtttaatgggccggcccatagtatttttgtaattttttttcctttnnnnnnnttttctgtttttttccctatttaaaatgtctttttcctttattttttttttatttttgtaacacataataattaattaaatatatttttagtataaaataatttattatagttgtttaattcaaagaactattttttttttataaatttttttttttcttaaacattgagttgtactaattttaaattttaactgtaattttcttataaattatttataattattttttaattagttactaaacatcttttaatcataaccaaactttgaagtctctaaccaaagtaattaaaactttaaaatttgttttcaaatttgtccacaaattttgctacaacataaatttgaagattctgttaagatgttaaaataaaacaaaaccaataatcggacaataatttgagagcttagttgaacataataaaataaaacaaaaccaatcacatcccacaaatgataaaatattataaagattccaccttctggcgtggcatctgacgtggctccatcatgttccgtttgagtgggtcccatttcctacacagaatgacgtaagaccacctcaaaattctcaccagccaacccaacacaataataataatacccattttcccagctatagagaaaaaagaaagacttgctactattactactcactaatccactttcttcttcttcttcattttcaactcatggctttagcaaacaccgccttcatcgccccctccttctccgccctccgccgatcccgaatcgcccactccgacattcctcctctctacctcaccgctcattccgacctcctcactcactccgaaatcctcccctcatactcccgaattcggtaatccaatctctcccttctccgatttctttttctcttttctgtttgggttcttagaaacgttggaaagaagaaagagagatatgcttttattttttttaaatgagaaccaacctcctggtagtgaaacccagtattgtgtttgtattttctttgatcgtgtttttaaacttccagtttgatctggttaaggtttatattgcttgaaatggctccatatttctgtactgcaggagtgtcgttgtccatgccactcccaatggtccgaatgctgttggttcaacctttttggttagtagatttgatctacctcatggttgtcgttggttgtattgtcttaaaacttttctctcattttttttttggttaaaattaggtggctataagttttgatttaataattgtcatgttctatgtttcttatgactcaattagtttagtttttggatgttattactgtttttaacacccttctaaatgttcttagttagtgtcaaaaggaattatgctgtgaaagtaaatttatacttttacctatattttgcaatttggcatataatttttcaagctgggttgcttgttttctcgttcttacaagctcaataagcactatagaccttttcatactaaactgttggcgctcattcataattattacagctatatgtagttattgaagtgtaaatcaagtacacattttaatgctttgatactgaaaaaaagtgtgcttttgcgtctttcgtgtttcacctgtgtttagattttcatcaga

SEQ ID NO: 39712 - DNA, 1945 bp, Cannabis sativa
tcatttgcattaataaggtgtaccgttcaattctttcgggtaactccaagtcttgttcggaaatcgtcctccataagcggaaggccatcgcgcaacttgatctttggctcccaaccaagtaactccttggcttttgtgatgtctggcttcctctggcgagggtcatctggtgtgttttcaactgatatgatctccacatctgggttgataagctgaaagtaacaaaatcgcaatagctttagctttccaaatatatgtagtatgtttcctactgttttgaggtcttatgcaaatgaggttcggaattaagatgactgacctccttaacggtctctgcaagctcaagcatagtaaactcacctacaaaatcaaaatatcagtagtgaaaacacaacaaacaaagcctattcgaattatgttgtcaaagatctttccgggaaacctggatttccaatgttaatgggcccagtgttgtctccctccataagtctaataaggccatcaaccttcaacacaaacaaaagaaaggaataaatacaaaatataagtaaacagaaatcacagcaatgaaagattttgttattgttcacaatttaaacaaaggatagacaaataaagcttgcataccatgtctgacacataacagaaactacgtgtctgtgttccaggtgcttgaacagttaatggctcaccactatataattgaaaaatatattagacaaattggatgtgcccaataaataactatctgagagagcagacagtagagatatatgtgaaacattggttaagaactaatgaaacgtaccgaactgcttgtgcaatgaaattactaacaacacgaccatcatcaatattcatacgaggtccataggtgttaaaaatcctagcaatccttatctctgtcaagagcatcattattcagtcaaaatagagcccaacaaactaatttaatcacattatagccaacacaaaaaaagcaaaaagatgtcagggatggaatcaagggaatttcttaccaatcccatgctgtctgtgatagtcgtacatcaaagtctcagcaactcgctttccctcatcataacaactcctaactcctgtaatgcataagtgcaagcacataaataaatggtgacacatttgggtcttataaaataactttttgccttgaaataacattcatattaccagttgtaaatcaaataaatcagatgtagagtgagtacataccaattgggttgacattgccccagtaagtttcatcctgaggatgcataagaggatctccgtacacttcagaagttgatgtaagcaaaatcctgtttagcattgtcatttcattagtagaacaatacatataatatgaccaactcaaataaaaacggagaatagatcccaacctggcaccaacacgcttggcaagtcccaacatattcaatgtaccgatcacatttgtctttatagtctgccaaagaagatatgttagttagatcagcactcagaaccatcaaaactgaccatggaagtcaatgcttttaagagaaggatcattagataaagagagaagacaatggcatggatgtcagttagagccagttctgcaagacatgaaaagaaaagaccaagaactaaagaactctgggagacagacgcatctctcctgttctgaaatagaattgaaatacagaaatgtgccacctttacagggttgtatttgtagaagatgggggaagcagggcaagcaagatggtatatttgatcaacctcaaccagcaatgtctctgtcacatctgcacagggaaaaggaaaacaatttaaacaagtcaacgacaagagtacatggtctcactgagtaaaaaaatggttttacaagatcactgcaataatatagctagataacattattacacgaagtggggtgagaaattcacaatgaaaaaattag

SEQ ID NO: 39713 - DNA, 1857 bp, Cannabis sativa
gtatttatgccgcaatttatcctagattttttttgtaaatattataattaaatggctttactgttaaaaaaattataatagagacttaaatataaaaataaaattattaatattatttactaaaaagggtatcattaaatattcaaattaaaaattaattatttttaaaaaatagttagttattgttaatttaattctaaaaaaggaatttttatatgttgttaacatgctattacatgtcaataaaaatgtaagattacaataaaaatgtaaccattaagtagtcacctaaatatatagatataaattgagaattactaaaagataccactggtacctcggtgtcatactactattggtgtaattaagtatcaggtctcatatggcttaagaaaataactttcaagaaatattgctaattggggtgggtgtcctgacacaggtcgttccacttccgggtattgtgttttccatggagataatttggtcggtcttccaaacggcagtatactctctcctgcagcagtgcagaggcagaatacaggggtgtggctaatgttatttttgattcttggatcagattcttgcttctcgagttgcattgtccaattcaaaaggctactctagtttactgtgacaatgtaagtgcaaatacttatctgacaatcctgttcaacatcaacacactaaacacattgatatggatattcacttccttcatgagaaagtggctcatggcgaagtccgtgtgtttcatgtaccgttcctttaccaaattgctgatatttttacaaaaggtcttccgcgcgttctatttaatgattcagggacagtctaagcatacgagaacctcccgcttcgactgaagaggtgtgttagaagatatttaatatatattctcttatttctgtatatatttttatttgaattaatcaatatttgttacttatatttagtaattagttagctaatttatagcataatattatgcttgtatattgtataaatgactctgattgataatgagaaaggcacgaaatcaatttctttcactaatagtagaatgccacctgagcaccactattataatcgcaatgatcaaataaaatacaataaaaatctgtcatcattattataattgcaagcaaaatatatgtatatatttatatagcatatatattttcaaaaataattcttatagtacgcgttttgttaatgtgggaaaatttccatttccaacttatcagggtagtgttttttcttttgaaagattagcatgaaaattcaattaatagtaacaaacttgagaagagtatgcatgaaaaacatgattagtgttgaaagttaataatttgaacacaaattaaagaaataggtgtattaatattcgttgacaaagccgtttcgattgagtgggagacatagacagcccattctgcatatactcctttttcaacaagtcaaaaagcaatttgagagcacaaaacagattcacatgacttctattctatatatatagtcaaactctgcagtctagctcttataattattataataattaattcaataacggattttcaaaaagaacatttatgcaaatgtttactgaaacttcacagggttgtactctagggtaatatagtgttcaaaggtacaacttgataaagagtggaatggctacgttcttatatataactcaatatttatacatatttttgtgatatatgtggaataatattatctaatattctcttcaagatagaagatagggactaagtatttgataggtgtgaattgaaaacctattagagatatcactctgatattatatttagattcataggtttgcatctcaaa

SEQ ID NO: 39714 - DNA, 1659 bp, Cannabis sativa
gttaaaccaagaattaccgttagataggcacttttaatatataaagatatataatatatctttcccaaagtatggggttgtctgatttcgtagcttaaaaattattttcagtatttaaaaataaaaaacaaaaatttataagaatatttggctaaattttttaaaaatgagttttaaaaaattagaaaacatgaaacatcaatagggacccgtacttggactccctcggctcggatctcaactcgaactttagcccggacctagacctggaactcagactcagactcgaccccaggaccctggaccatgaccgaacccaaactccggacccatacagtccctgagacccgaacctggacccagaaggacctcgggacccagccctgaccctggacctcgaacccgagttcggggtctgagtctgggccggggtccaggatacgagttcaggttcaggttcggggtccaggtctctagtgtgaggcctggctctaggtccgagtccgagtccgaagtccgtaacaaggtgggatgggttcatgtcgtggtatagtattattaaaatttttttattcttaaaaaagtctaaaaatagtttaaaaaaactaagccaaacaccattaaatttttaacatgacaaaaaattatattcttttctcacttttgaaaacacaatttttaaaattgaaaactaataatatagcaaaaaaaaaacctctaagaagacaataggtttttttttcgagaatcttgagatagagtgtaaaagagagatgaagaccagagatttcaaaataataacagaaaggataggagaaaagccaatataatcctaagcacgttttggggattggacaatcaaggcctcttttctttttaattactgtgttttaatatataattaaatatatactaggaaagcacaactaccaaaaccagagagaccaatgggaattgctttggttcttctgatctgagatggttatattaatatggcatctctttctacaaatacaaatgcaattttgaatttaaaacaatccattattacacaaaaaaaaaagtagaaaaaattatctatattgagaggaatctgaactaagactccaatagagaagggatttgttagaaaaaattaaccttctggcattgttttctgttgagaattatgggattccatctcaaaatcaattgacaatgagtggagtagcccatggctcacttctctactatttattccatgtgggacaatgtccacaatatcccccctcaagatggtggtatctgtataggtgcgaatcggatataatcacttgcccgcaagggatataactctgataccatgttgagaatcatggggtttcatctgaaacccaattgacaatgagtggagtagcccatgctcttatatatgactcacttctctaccatttatttcatgtggaacaatgtccacaatactttcttatgtagaaggcttacaatagaattatttcatgggtaaatggcggcaaaactcctaatactttcgttttggtttcattaaaccctcaaaacccaaatttctacgagtaaacccccaaaaccagaaaactgttagcaatttaacacttccgtccaaatttagctgttaaatgccaggttggattgtccacgtgg

SEQ ID NO: 39715 - DNA, 1354 bp, Cannabis sativa
  modified_base (1268)..(1275): a, c, t, g, unknown or other
tattattttgtctatgtaacattttagtatggattagcagtctaacatatagtatcgtagcagaaagtaatgttatagtaattaatatattagttaataagaaatgtcctagaaaatatttagtattgctctggctgatcagtcgtatagaaaattaagagaacctatctgtgaatttcaaactctctccttttttgtgtgctgaataagttatggtttaggaaatgtgagtatattcgatgttgatataagtgtatcattgattattgacagcatggaaaggatcctggaacggtatgaaagatattcatatgcagaaaggcagcttatgtcaaatgatcctgaacaaactgtaagcaaccattctctcaacaaactaaactttgcttcctcaatttgtttccatctgtctattagtaacattatgtaggagtatataaatatatatacacaacaatgaatcaaatttgtctctatgtgcctaaatttattgattagggctagagaaatatactagttaatacttacaacatatatatgaaatcgtttagggaagctggactctggaacatgcaaagctcaaggctaggatggaagtcttgcaaagaaaccagaagtaaaatatataagaatcaatcactgttctcatattatatatatatatatttatatatatgtgtgtgttcatgtatgtgtgccaaataatgtatcatctttgttgtatgatcgttttcaggcatttcatgggagaagaactagactccctaagtatgaaggagcttcagaatctggaacaacaacttgattctgcactcaaacacgtaaggtcgagaaaggtaataatgaactcctaactaaatattaatacttgattaaagcattcattgctttcttggtatgaactgatctttccttggttttcagaaccaactcatgtatgaatctatttcagacctccaaaaaaaggtaatctccgatataatatttagtttttggccgctaaatcttttcaattatcgtttcacttgtacttaattctccaagttcaaatgatggctgtaaaaccttccaaactaataaactattagcaaatttaatgtgctatctggttaattgctaccataaactgcttatgcatacactcttgtatgtgatacaattatattgatatacttaatattatcatttcaaaatttattttaaaaattaaataaatcataaaaataaaaaatattataaattttaaaatattttttttataatttttnnnnnnnnatattaggtgtactaatataaatgtgttacgtctataaaagtgtaatcataaaccgtctatgtttgcagttaactataa

SEQ ID NO: 39716 - DNA, 2483 bp, Cannabis sativa
agaaaaaatggtggcttttttgttctgtctccgatgaaggttcggctatctttggtggtgatgttggttttggatccgcaagctatgaagtacttttctggtcgtttgtagtttgattctgataatgaaaggatttgtagtgatgaaagattgaggtaaaggctgacgaggaagaaaatcagggagcttgagtttaacatttttcgggaacttttttccgagaaaggaaaggaaagttccaagcttgagtttttaaaattttcccgggaaagaaagtttgcagtttttttccgggaaaggaagaaatggaagaaagacgtgggaaaataaggttatcatagacatgcaaagggaaaaaaaaaaggagtaatttaccaaaataaccttcttttgagatgagataagatttaaagtttttcttttttgaaatttaaaggttaatactttataataattgacaagcaatattattacacacactactttttgaattaaataatatttattattgacttgacttcatttaaaataattgaaatatcaacaaataaataaagtaaaaaatgtttttagtgtttacttttaatgttgggagcatttatatgtattcttattgatagtatataatgtagttatttataaattttcataattgctataaaattttagataatttatgattatgaaaatagatcttaaaataactcgatcgtttttatgtatacaacataagcttcaaaattattagctgttttcagatttttgtcacatagattattgattataatttttttttatgatgataagcaatatagtttttataaaattttaataaatttttgaataatttattatgtcaaaaatataaaataatttgttcttaaatttgttttgtgtgtacgtgaaaaaaattattttaaaatttatttttagcattataaattagtaattttaaaaaaattagtaaaaattttaaattactacaatatacactattatataaaaattagagacactcttcttactagtgaggacaaaaaaaaaaatagctcgaagcacccctaacataacatatttgttattaacatagagaaaaattacattacaagattttttatctgaattaattttcattatcaaaaccatttatttataaaaggttaaattttcaattcaaagtattattattcatgaccaattaattttaagaagaatcacttacaatttaccacataattccacccttcacccaaacaaaaaagtaggctaacaaaagatactctaccaatcaaaacacggtcgttttctttcttttatttacaagtgtatgattgattgctttttttccctcgtctttttggatttctacaacatacaaagtcattaactttactttactcagtgagtcactgaagataaaaagaaaaagcaatcaactttctttcccggaaaatgttaagctctaaccaccaagttttcccggaaaaaagctgcaaactttctttcccgggaaaattttgaatctccagcttggtcacttctcctcttcctccatatatttttcttgacaatttcttttacttcccttttcccggaaaaaaaagctaccaactttctttcccggaaaatgctaagctcctccagctctgttttcttccaactctgtcttcttctcttcctccatttttcttcactgcaaatcttttcattatcagaatccgattacactccaccagacaagtacttcatcgcttgtggttccaaaaccaacatcaccacaaaagatagccgaaccttcatcggagacagaacaaaaaagccaccattttttctctcaacaggacaaagcaaacccattattaacactgatgaaacctcaaacgacatgtcgtttctctataaaacggcaagagttttcaaaaccccatcgtcgtatgagctcgaagttgacaagaaaggtacttacatggtacgccttcatttctactcatttccctctgaattcaatctctcccaagcagttttcgatgttgtggcatctgggtattctttattatccaatttcagtgtaagaaaaagtagtaatcgaccaattgaagagtttattcttccagttaaaaaggaaagattcaaactttactttcacccattaaagaactcacctttagcttttgtaaacgccatagaagtctttcttgtccctgaagaagatcttctcccaaactctgctcaactaatcacttcagatggtgaaaggggtaatcaaagtaatttggtttctttggtgtaccgtacaatccatagaatcaatgttgggggtgacaatatcacatcagagagtgatttgctatggaggacatggttagaagatgatggttttctcataaacccaaaagctacaaagaagagtgagtattatgatggtaaagtcaactttttgagtggagggtcaactaagtatagtgcaccagaatatgtttaca

SEQ ID NO: 39717 - DNA, 1268 bp, Cannabis sativa
tgttgaacaaacattgatggcctttaatagtatataatttatttatgtattttcagcttatgtgtgtggagaagtagaaggagttatagaagagagagcctttgaaattggaggaacactaaagaaaagtaggtcatccaataataataataataataataataaacttgattttgaattggaaaaacaacttgtccaacaaaaattgtatcaacttcaacaacaacaagcttcacaacaaacaattactaccacaatgaaggaatttggcattcaaaggtaattaattattaaaatatatatgcataaatttcttctattaattaattaattaattattatcttaataatataattaataaaatatatttattaatcattattatatttctagggcaaagctatttggatggccaaatacatatgtgtttactaaagcaatgggagaaatgtgcttagagcaatccaaattagatgatctctccatcattattatacgcccaactatgattacaagcacttataaagaaccattttctggctggattgaaggtttgaggtaatatatttatatatatatatatgagtaatttacaccttaaatatttaagtttatctttcggttacatataaataattaaatttaattttttatagtataaatactttagttatatatttgaaacttttgtaggtacatagtcgtaaaatatcaattattcaagtgttatttttttattggtatatttaaataattttttcactgtcatatgactatttacttgacatttaatggacaggtacacataatgaagttttagaaatgtaacttaggtattattaccataaaaattaaacttaaatatttatctaccattaggagttaaactataagttatatattatgtattgttgttctgatgatactgatgatgttccaccctggaggaagtacgtgtaacattatcaatattgtaatgttattcttaaatatagtttcacgaacattttgaaacctatatgaactatatatgtctaatacatatttgttttattgataatggcatatatattttcagaactgttgatagcgtaattattggttatgccaaaggaaaagttacatgcttcttaggaaatcccaagttgatacttgatttggtaagtgcaattaatttgagcaacttattatgttcttaaattaagactttggattataaacatgaaataagtaataaagcatgatcattaattgcctattaagttaa

SEQ ID NO: 39718 - DNA, 2641 bp, Cannabis sativa
tatattattattatctattccggttagttaacttcttagtttctaagttataatttcatttttaatttatataatgttgttaatcaaaatacatttatattattttattttctagttatataatgttattgatcaagatacatgtacctaattttttattttatatttttatagcaactttgagttatattaaattttatttgagtttaaaaattgattacttgtttaattaaatatataaaaaaaaattaaagtattacttttggttgagacagaaatatttatgattgaaaaatatatgcttctcacatattaaaataatcacttcgatgtgtaaattacaattgtacaattcttaatactaaatatttaccggttaagtaaaaaatatttcattaaagaataaagataaatataagtaatttttaatattaaaaatatattatatcagtagaaaaaggaaaaaaaaaaaaggaagatacttcatgcctattgttttttttaagaggttttaactcttcttaattaatgaactacaacaaaaaattcctgcatataaaaactcgagaattgggtgaaagaattagtatataggtggaccaaataaatttacaaactctcggtaatgaaacaattatggttatatctgtaataaatttcaaatctctgtttagagaggtaattttctcatataacttggactaaaatggtcataacgtggagcaaaattttggtgttggtgtcggacgggtttgggcttgggcttgggcttaattagcagttccaataagcccaccatccatttccaaccaagtttccctttcacttattgttgttgagcttcctacatatatatgacaaagcattttgattgacttaagaattttattatagcgaatctcatatcaattcaattaataaataggatatttaagtacctgtcgttaatgtttgtattgggtttgtgccaaaattagaatttgaaccaataagtttggaaagctcactagcactaacaatttctcctatgcttgtcccatttgccactgttatggaataaatagaatttttatcgactaattattagtactaattataattatatcaatgttatttacaaatatataatagctagagcagtagagctagaattataatgtctaacctgactttgttgttgtttgttttataccaaaagtattctgacaattcttacaacgacatctttcagtgcaaccatttttcatcttgtatatatatgtatataaaaaaaagacaaataaacaatattcaattagtaattatggtttatgataatataattaataaatagaaattacatttactcaccttaagacaagaacatttttgtgttatgcagtttgattttatgcatttgcatccaataattttacgatccttcattatctacacatatatatatatataaagtaaatggtgaaattagtaataaggaaataacttagatttattatgtaataattaataattaatatataccttcgagaaccaaatgcgcgtggatttagatctttcattctctgtctttccttctctactattttttcatttttagatgtatttatacaataatcgcatacacaagaacctccgcagtagttttcgaaagaaaaacagttacaattactagaaaaaaaaaaaaacaaagtatacattaattatatataaattatatgtatacaatttatacaaatatatattattgaaattcaaaaattaaatatatatatatactaattaatattattattaattattattatgatcacttaccgagtcaagcaattcctctttttacaggcacaaccaccacttttaaccttattcattttcctagatacacaaaaataatatttataatatgttataaaaatatatgtatatatatataatatttggacactttttaataaatatactaattaatacatgtaatatatattatatggttacgtgccttttttcggctagtggttctttttcatcatgctcattattaatctccaattttagtaaggaattagtgttggtaattggcatggagctgccaatttacacagaattaattagaataaaatcaaatataaataaatattaacattaaccattaaatgaataatataaatataattataattttaactaatatatatagatataaatattaagtacctctcaatatgattattggaagagtgacgttcgatatcaattggtatagtctcctctaatattctgacgaattcttccaagtccatatcaagttcatcattataatcattagaatgattatttgagatatttggtatctgatttactacttgattggagattagtacttcttcttcttcttcaaaattatgctgcatttattgaaatatagctaggtaccattagtatttaattaaaaataaattaattttcaaggtagaaagaaaaaaaaaattaaatctattttttggttatcatcatcaatctttattttaatttttactaatttattgataaaaaattaatctctctaaaaaaaatgaaaggaagaagatcaaagagagaaataaagaatgatactaacaatgatcaagaaagaaagaaactt

SEQ ID NO: 39719 - DNA, 1098 bp, Cannabis sativa
tttaaaggcatcaggattagaggagctagggttggggttgttttagtttgcaggatagtaagtagagttgacagtgagagttccagaaggactatgtcctcaaatgagacagtccttggtggtggggttaatcgggatcaaggtcctcatcaaatttttttttgagtttattaatgtcccaaagaccatcttccttgataaaatatgagacagtaggctcatgagaggtagaattatttttaaagtaagtaaagttggaccctggaacctaatttgagctagtgatttggacaaatttaccatcccccactttccaagctaagcctttttaatgaagatcccttccccaaagaagacttctccaagaaaaggatgcaaaatgacctaatttggcttgaagaaagttattatgtttgaaatattttgcttttgaaagggaaaccactagggaatctagattagtgtatgtacgtcaagcttgttttgctaaaatagcttggttgtgatgaacaatgtcacgaaagcctaagctcccaaaaaatttagatttacaaatagtggaccattttttccaatggaccttgcgttcattattacccaaagatccccatcaaaagttttccatcagtttcccaaagtgtttgtagatagataggggaattctatagctggacatagcgtacgaagaaaatgcttggataactaccttgagcaaaacttctttacaagcttttgaaaagagcttttgattccaaacagaaagcttactactagccttttgaagaaggaaaagaaaggaagatttcttagagcaatgaaaacactgaaggacacccaagtatttgtcaacaaaaggtttatcttacatgtggagagaatggaagaaagagtttttttcctggggcgtagtgttaggagagaaaagaacagaagacttggccaagttaacagattgacatgtggctttatcgtagatgttgagaatatcattgatagctttacaattttgggtgttaacaagagtgaaaagcaggctattattagcaaacaaaagatggggaattgaatgagccaatcgacatataaatatgcccttaa

SEQ ID NO: 39720 - DNA, 1893 bp, Cannabis sativa
aaaaatgtttaataaattgataagcattaaaaatgtaaaaaagtaattgaatttgatacctagtgtaaaaattcctaatttgatttcatattttttagaaaattgcatggataatttagtttttttaaaaaaaatatatatattctaaacatatacgtacttttcaaatgattaattgaatcgccaacaaataatgatgtcattgatgagtaaagggtatttttggaatacctgaatgaagcaatctcgaagtttattccacctattatttcatttgacaaattatttgttgcaccttaatttttgtgaaatttttattgcaacgtgtcacatcgtaatagaccttgtaccttttttttgtattcaattctctatataaatgaatcaatagcactcatgctcgttgagttgggtttttaatttttgtacttttctcaaaattaaacttagtatcaaagcttttaaaggctaacgccaatggcaaccgaaggcactcatgatgtcacaattaatcacaccaggaaagactaattcagaaaactcttcaacatgctccagtgctcagccaagttcatccatccctgcatcacctccggtgactcctttcaataacacattgagtcaaccattttcactcaagttagataaaaataactattcactatggaaaattatagttttcactataatcaaggaacataaactcgaaggcttcttcactggatagaggatgtgtccacctgaaacactcacagttcccacaactaatgagaaaggaaatgttggcatagtatagttgacaaacccagagtatgagccatggattgtacacgaccaactgctaatgggttggcttatggttcaatgacagaaggaattggatctgaggtgatgggttataaatctgctgcaacagtactccgggagctctatagagctcactcaagagcaaatatggatgaacttcgaacaaaactatagactactcgcaagggagatagatctatggcttaatacctcaacataaagaacgtgggaagatacactggctattgcaaaagaaccgtatccagaaaaattggtcagaggtaatatactttctggtttagatgccgagtacttatccattattattccacttgaagcttgtgcagagctgtcctagaaaaagcttcaaagtacttttcttagttatgacaacagacttgagagactccggtctctatcacccaccaataagatgctcaacattccttcagctactctggcttaaaacctttaggatctgacaataaaagaggttttcaaggaagatgttcttgcacaaacaacaacaataactctggtcgtggctacacacctcaagaatcttctccaataggaggaagtagatataaaggaagaggaagaggtggcagaaacaactccaaacaaagctgccaagtctgtgaaaagtattggcactctacaacaatctactataatcaatattatgaagcttttatgggccaacctccctcatctgattacaatctcaatcaggaaagacaatcttagatgtcaggtcttgtggtcgctctctaaactctaattgatgacagttggtatgtagatagtggagctacaaaccacctaactccagatccagaacagctgaaaaatatgaaagaatatggtggtaaggagcatatgacaattggtgatggtactaaactctccattaaacattttggaaatattgttctaaatattccaaatttaagtgcttagtattgaaagattttctacatgtaccatctattactaaaaacctgataagtgtttcaaatttaacttatgacaatgatgtatattttgaatttttctcaaatttctactatttgaaggatcaaa

SEQ ID NO: 39721 - DNA, 1744 bp, Cannabis sativa
taagtattcaatacccaaaccagatgtaacattcgaaataagatggctctctgggtatgggtcaccagccagtgctatcggaccacatctttttttgtctaagatattcagccatagatgtgttacctttttttgtggtttggatcaaggttcgagtgtcgtctagcttggctctcaagtgagctccatagaggttttcaagtgcactccacagggctgatgaagatccacatcccatgacttcagtggctatagattcggtcatcgaactatagatccagcccatgagcagctggtcactcactatccactgctcatagtcaggattcagcatcatttcaccttctggttctccttctggtgttgcagcagctggaacaaattctggggggcagggatgacttccattgataaacccatcgagtctgtggcctcgaatgattgttgacaccatagttttccatagtgtatagttgtttcgatctagcttcagggagaacgactgatttagggtattgaagggttgtgtatagttcagagaggaattactgccataggaagaggagaagttgctaacaggttgtgtaccggggttatttgtgcgaggaggttggttgttggtcggagtaggtggcggtggagtctgagattgatcggttgacattggcgttggccacacggctctgataccaagatagatttcaaagaaaaatgaattcggcaaaaactcagctcagcttttcctgagtgaggaatatttcatttatagacaagagtggtacaatggattgacacgtatttacaatcaataatgaattgacacgtatttacacagaaaacaataagattctaacaggattgatacacctaacaatattgaaaagcagaggaaataggatctttgtacataacagaattcaggaaatgttggagtgtgactgcagtccacagtagctgctgtagggtctagtgttactcaggttcttcaacaattgcaataagggtttctatataattttttgttgcaaattaagttgcagttctaagggtaataatgaaaaaatctcaatatttattagtatccaaaacaagataatccattcgtacatatagctagagagtatatatagtacttcatttctcaaatcattactaattttatacttacactactacgagtccatgcatcaaaaactctagcctccaatacttaccttgaaaattttatctcttgatcatcatcatcactgtcttctttaagaataaaatcaacgtctttcttccacatttatcttatattcaattctttaaaaattttccttgaagacattgacctcaagatgctttgacattgagaaaatcacatcatttaaaagcataataggaaattcaggactgcaaataccaacttcgaaaagcaaaacttccatgattatatgatgaactatgtcatcttcagtttcgtcatcaaaaataatgtcacctcttcttcatcatcatctttaatcttcttgtatatattttgtaaaattgaaaagaaaaagtgtcaaaaatcattacaaaagggcatttataactaattaattataattatcaattctcatcataataatcatcatttttgatcttttatttggtaaaattgaaaaaaaaaaatcaaaattcatgacaaaatcgacacatataagttataactaattaattttagagtaaatagcggcaagtacccaaagttttatgtttg

SEQ ID NO: 39722 - DNA, 1196 bp, Cannabis sativa
  modified_base (448)..(460): a, c, t, g, unknown or other
tatatatatatgctatacatatagtaaaagttaatatattcctggcttcctaacaatacactaagagataataatagtgactaataataaatatatacattaatgaaactgagaaagttgtctagttaaatataccggctattaatattgatgctagctagctttagtatataattaagtcataaatcttattggtaattaaatgtatacatatttaaattttttcacctgcatatttagtaaatgtttaccgaaagtaccaaatctgggcatgcaaaaaagaaagacagcacatgcataaaggttcctagcaaggtctacgagttttgagtttttaatttctgtacatatttctatagccatttttaatacataatattatatataggatagctttgctttagtttctaaatccaatcaaggttaatgaatatatatatatatatannnnnnnnnnnnnatatatatatgtgtgtgtgctcaagagtaaaaaggcagaatgacaatatatatatataccattttagtgaaacatatttttgggtaaggtgtgtgatgacaaaattattcaattggtagttttatacttttgctgcaattatgagatattaataattccatatttacctaactcatcactttctctatgctatattatgcagtatcttcaagtacgtgtggtagatacttatatcgcatctacttcattaagatattttacataatcaaatttaaagttgatgtaatttttttttgaaattaagcgttcgttgaatacaaaaaaaaattagacttctcgatcattataaaggataatgttagatataaaggaagagtccactatattcaaatattttgagcaaaagctcacctaaccacattatgaaccgcaaaattataatatctgaaaataaacgagaaattacaagataaaaattaattagagaattgattacacaaagaaatataattagcaatattttaaatggagttgattcccttcagcgttttgataaccttctccaaattactctcaactaagatgcttcatcgaaagagaaggttactgtaatttcagtgcttatataaatatatatatatatatatattatagggatattggcggctaaaccacctgaactttacggtttgtaacacttaaccacaaaaaccgaaattttggcagctaaactacc

SEQ ID NO: 39723 - DNA, 2478 bp, Cannabis sativa
ttgacgggcggcggggccgggggtagattaagggttaatattaaagttaaaatcatgtaagtttctggaaagtgcattagcatccaggagcaaggcataatactagcggggctcccaaaggtcagttatgactcaagcctacaggagggcgagaacctcctagagcttctaatatatgtaattcaaggagatgtctttgagatttttggcccatacttgtctgacattgcatctccccatgaacgcctattgatggcttatttctgcgctgtcctatcagccgcaaacacgtccaatcttgtctcacctaatgcctacatcagatcctactcaaaacaaccattatcaaaaattatttctgagacttaagaatggccacatagatcctagttggcaatgaaggatgtaccaaagtcactgagatactcccttattttcgcctattaatagagaaacagtagagaaaaaaaaacaaggagattttgccttcgtaaaaaaatcctattataacgacaagattacataatattaatacaaataatttgtggactaaggctaattaacgccttaaccacgtaaaaattctcttccactaaatataattaaatctaacttaataaaattaagtagttgctaaaaattctcgtcaatattttggtatttttattgaaagttgtgggaaactttcacctaggaaattttccgtcgcaatggtgaagactaaaaataaccaacgacctccaccaccacctcaccacctgatcctcaagaacgtcacgaggaagaggtagcttcctaagttgaaggggaagaaggcaacaccaacaattcaaattataggagggatatagttacccaaaagattacgaggaggatgattatgcagaacttgtttctttatgacgacaagtcgtggagcgcaatgcctaattggcaaagaaaagagaggcaagcaaaagtttgcaagaaaccttgactgccgtgaagcgagctatggctactgcaagccttaatgtgaactttgcggccatactgcatatgcttgacgatgcgggagagggtacttcccaaccacagggaaactaaaaacaaaaagggtgagtaccaagccctataaggaatcattcgaaagagcctcctccctcgatggctaaacctacagtacaacaaattgaggttttaagggagacaaatttataggcaacataaagtcgcctctaataataggggtatcaggggcaagaatacaatgtcaccctaaaggaatatgatttaatcttttgttcattcgtatatatttagggctcgcctctaaaaaatttagggaaaaatgtttaattaataggggtgataatatcacccttaataaaattagaatatacctgttgtgtttaggcgttatttttcccgcaaatagtattaggggcaacaaatagtgtgatctgacacacttttttaattaaggtaaaagtttgtctaaagaaaaaagaaaccctaggaacctcgatccccattctcttcttcttatctttctcgcatttttcatttttcattttctcagtgccgcttctcagaccaaaggcactcccccactcacgtatcaccaatgaaacctcttcctctttccttctcctttctctgttgttcattgtaaaggaaggatatgatgacaacccatggcatttagcaaaaattgtagcgagttttgacattttaacggaatttttaaggttcactaatggcaagctttgacaggtctgtcaaggtacaaaggcacgatggtgtggcttaataggtgcggtggttcttagaagcaaagagctaggttctttgcgaagcttgtatcagatcacatcaagaactgggacgatgtcaactagacgcttagtgaaacaacatacgagcattttctctactcagattattaatagtctgagtctagaatctgatgctaacttctggattggtgtaaataccagcctaacttattattatacagaagcttggctaacaaagtatcaccggtcaaggtgagaattttttgtgcctgcaacattttttggcaataagtttcaacaatttgttgatgtgataatttgttgctttgatgctctctctacaaaattgtacatgtcattttgttcaagtttattagagtttttaatcataaattaataatgaaaatgttttgaggactttatggagcccatttgcttcaaatcttattacaagttttatgcattttcatgaaaagcttaccttgtattacacaaagggaatgatactcaaaagaactcatccaaaggagttaaagttctcctatctactctcaaagggtgccttagaattcaaatgtaaactattacttcacatttactttacacatgtcatatatataaattatatttaaaatacaaataatgtaattataattgttatttataactattattaaaagttctaatatctccaaaagct

SEQ ID NO: 39724 - DNA, 1927 bp, Cannabis sativa
ggctttcctgtactgcagctctatgcgatagccattgcaagccaacatctgatcacctcgcattactcctacacctactggtgtttgaaacttgaaggaagagcatttgaccgaactaattgcccctagtccgattaacactaggcaacctaccaatttattgtaggcccatggtaggtcgatagccaaatattcttgtgtgattgtggtcgtcaaccaataaatccgcaaatgtttaccacaccaagtttcaattaggattttttgagcccctaccttatttaatgtctcctggttggcgagctggtgatgatcactgttgggtcaatcgtgtgagtatctcgcgttttctttatcttcctcgaaaatataattcaaggcttcttgttttttactttcttatgttcctcttttgggcatcatcgttcttctcttgcaatatactatcctccgaggtaaccagggtatccttcccttcaacagggggaggttgtagtccctggttgcttgggttgttggatagattgggctttttatgttcactaatgtgcccttttacatattgcccgaagtgtcctcgcgcgatgaaaccttctatctcatcttttaattaacgacactcttctattgtatgcccgatatctccatggtacttacagtgtctggttgggtcccttttacaatctcgcgtgcctcatgggctttggtttgctgaaagtgaccttgtgttcatgcgcgaggtagatactctcccgagtttcattaaactcagtatagatagtataaatgggtacatatttgtcgtgtttcttttatttcttgtctttggatgaccgcttaaagtcgtctttcctttttgacccagaggctcccgactcgaattctccatatgaatcacatcccgattgttttccttgctcgccaacttgatgcctcctgaacttgtcctccaactcatctatttgcaattggatcggatccccttgctttggaccaagttgtggcgaagatcaagtttattccggttcaagtgttctcgtaaatggctggtggatatcattccactcatagaccttatcctgctcatggaccttgtcctcgagtgactcgcagccttatttgtgtctatgccttcttgatcattgttgcggcgagtattctctcctcctcgcattgatcgactgtgggttatcgtgtgcctcgaggcaacactcgccttctgacgccccgttcttctccccttggtgtggttcatctcgttccctccaccaggatttgtgcgagctccttccttttgagtttgggaagaacattggcgattccctaccaatgactcgcgtgctctaggttgtgtcccaacatttcccttattttcttatgctgccctggccgcggttgcctcacgttcaaactcagcattgcgccagtttgcctcctccaagtggcgcccaagatgacgattttctaatttgacaattgatatgtactttgttggatcataggcgccatcctcaccaactggattagggagaggactgccgttgttcattctaggcccttcatgactgattcccagattctgggttctctccgaactagtagcccgttcaaatggttagttgaaaggcctccgagaacccattgactcttttctaggataatgtggggtttctttgtgaggtgtgtcaacattttcttcgatgttagccatgaagaggattatattttgtatataaggaaggtttttctaagcttttttttatgaaggctctcaataaaagcaccaaactattaacgtagattttcactaactatatttgaaccttaattgtgatgaacttgcacagaaaataaaaacaataaagagaaaaataagaacacaaaggttttttacgtggttttaaaattataattctgcatagtccac

SEQ ID NO: 39725 - DNA, 5324 bp, Cannabis sativa
  modified_base (5251)..(5268): a, c, t, g, unknown or other
tagtataattacatcttatataattattggtattttaaataaagtgcacacacgtggcgtccctgttggacagggcgttacacctcaaatttctaataaggcatggcgtggcatgtgtgaggggagacgagaagtttgcctgtcactactacaacttttccctatccaaggataaaaaggagaagatacccgccaaaagtcaaaaagacaagcccagtactaaggggcaatgaagtcttccccaaggcagggacacaaacatagaccctaactttggggatcctgcaggaagcttcagacctatagaagagtttgaagaagtggaggttaatcccactttcccaacaagaagactaaagatcgataatggtttggctcctgaaattaagtcaatctttataaaatttctaagggaaaacctagacctttttgcatggtcaaatgaagatatggttggaatcgacccctccgtgatgacccatgcactcaacattgatccaagcatccagcctgttcaacaaaaaaggagattgctagacatggagcacaccaaagcgctcaatgatggagtcgaaaggctaagagccaatgacttcataatagaggcattctaccctcagtgggtatccaaccaagtgttggtgcctaaacccaacaagaagtggagagtttgcatcaaattcaccaacctaaacaaagcatatccaaaagactgctttccgctacccaagatcgactagctagtagatgccacgactggccatgaagtcctgtatttcatggatgcgtattctggttataatcagatcaagatgcatccactagactaggagcacactagcttcatgatgaacctaggcctaaactgctataaagccatgcccttcgggctgaaaaatacaggggccacgtatcaaaggttgttgaacatgatgttcacagatctcatcggccacaataaggaggtgtatgtggataacatgcttgtgaagtccaaaaggctggaggcatgtggaggacctaggcaagtgctttaaaatccttcacaactacaacatcaagctcaaccccctcaaatgctcttttggtgtaggctcagaaaaatttcttggcatcatagtcaacacctagggaatagaagcaatcccagaaaagatttaagcccttttggacatgaagtcacccacaactatcaaggaagtacagagtctaacaagacgcattactgtattaagtagatttttgtccaagacaacagacaaatgtgtacccttcttcaacattctcagaggtaataaaagattcgagtggatagaggaatgcaaaattactttccaggagctgaagaaataattggcccaaccatcggtgctgtctaagcccctagacaatgaagagctaggcgtgtacctagtagtcacaaagcatgttgtgagtgttgtcgtcacaagagaagaagacggtgtacagcaccctgtatactacatcagcaaaaggctaattgacgcaaaaagtcgatacccgctcatggagaagttgacttacagcttgctcttggcttccaaaaagctgaggccctacttccaggcaaaccccatgaaggtgtacatcgatcaacaactattgtatgttttgtagaaaacctaaagcattaggctgactactcaaatgggccattgagattttccagttcaagatcatataccaaccaagaaccgcaataaatggtcaagcccttgcagacttcgtggatgcgtgcaccaactaaactcttgagatcccttaagaattaggagaaaagcatgagccagagaagaagcgagagcaagagcagcaacaaaatcccaaagaactaacatggaaactccatgttgacggaagctacactgaccaattgtccagtgcaagcgtttctcttacagcacctgggggcagaaacttcatacagcaatcaaattctgcttcaaatcctcgaacaatgaggctgagtactaagccttgatagtcggcctcaagctggcacatgaagtacgggctaaccatctcaacatattcaacgattctcaactagttgtgaatcaagtcctgggtgaatacacaactcaatgtgaaagaatggtggcctacttgagaaaaatcgaaaacttactaagtcagctcaaaggctacacgattaagcagatccctagagaacagaatggcacagcagatgcactttcctgtctggcaagtagcaccattggtgacaaagcaaacttggtgcccatacagttcctagaggaacccagcattattgtcccagaagaagtcaacatgttagatgacactccaacatggatgacacctatcgtagcttacctccaaactggagccttgccagaagacaaaaatgaagcaagaaaactgagaagaaaagcttctatgtacctgatcctaaataggataatgtacagacggagcttctccattcctctcttaaggtgtgtcactataacgccctaatctatagggacgtcacgtgtgtgattttataaactagattaatactaatatattaataaattattatgtgagaatattaaaaacttgactaaagtaaaagactgaaaatggacattataatagcattgaaaaggtattttagggatccctgttataaaaagatttacccaaatgactatagacaataagaattcaaaatacaattcaaaatacaataaatacaaccagtccaaaacaactcctgacaactcggcacacaggtcggtagggtcattatgtacattactggagaaggttgtcacctcatggtagctctaacttttccttgccctaacatgcactacatagcactcgtgagtcacaaggactcaacaagaaaagcaataataaaaatcatataatttagtattcgaatattatcatttatacacaatcagaatcaaaccattacgcattgttcaatagatgaaatccaaatcactactggcatcttccatgaataagcatcaggatatagatatatagtaatataaaaatattataccaataataggaatcatattcatttaaaaatttaaattatatacatgttacctcataaagtaaccatcttcattacatcacattacctaatcaggcaagtcgatgctttggtctgataaacctttattgtgttgcctaatcaggcaagcccgtgtcatagcctagcaccatatatcggaaaatcacattacctaatcaggtgagcccatatattatatccattgtatcatcacattatcattgcttaaccaatcaatctttttattatataacaatattaattgtattacaatacaatgtactatgcagtacaatatacttttcttacctttaatctagattcatacatgtcggccataccaagtgaggaactatccccgatgatctcggtcctatgtcacaacaacggtaaaccaataattgtttatcctaaaacactgcttaatattgatataagacaatctaggattttctaccaaaccccacattataaatacactaaaataaaacatatattttggctctaaaacatttaccgtatggtagagctcgttgcaagcttcgaaatagtatatagaacgtccaaaatagatacccaagtgaaaatttatggcaaaaatacaattcccgagttcccgacgctgcccgaaatagtaaactagttggctagaaccggttgaccagttccaaaaccaattgaccggtttttcacaagtaaaaatgtgattttctaagtttaggcactcaccgaaatgctatcggaacctgtccaaaccaccccaaacttcatagggtacatacataccatacatactaccatacttatgcaatataaactaaaatcgagcccttaattagcaaacgccactaatgtttggacttaagctatataaagttctaactcaatttctaatccaaaattacctcaattgtagcaagaaaataacagaactagacccatgactacccgagaacaattctataaggtcagaaccttcataactattctaattcacaaagcccctatatgaaacaaattgttttaaacttaaaatgaaattaaaccttaccttaagttttcctgctctgagaattcgctatcccactactactagagcttagattactaggttttggatttaaaatcgaagaaaatgaatataaaagggagagggtttcgtcgaagggggaggacgagggttcgttcgtttcatttttgcttatgttatcacataatatatataataagcttttaaaaaaacgataatttatatatatataaaataatattataataataatatattaataataatgagataataataatataatattaataaaaactttattattattagtttcctattattttttagccactaagaaatttttacttttagggtatttggccaacttcgagtacactaaaataccctggtatttctaaaataaacttatcccaacaatcccattaataattctaactaaaactgttgtgacatttttggcatccaatctggtcttcagggttaccgaacctaaaaatatttttattcaacatatagctcatattacattcatacatgatatataaatctttgtaatttataaattatgcttacttactcacttttagcgaatttaaattttatgttgaactaaattagttggatcataatcccacttaatacctgcctaacccataatataaatattcataatcaaaatcagctttacaaatatgtcggacagtgactaacccaaatcgtcccgagattgaactctctaattcgtaccatcttgacatgtacaatcatccccgagctctggacacattgttgcttagccatagcctttcttttacatacaaatgcaaacaatatctgtgagttgacatacttagtaagaaaagcatacaacacataatatattactaacttgtacttaggcacccttacacttatccacaaggcttaatagatgatttagaacgttcttaatacaagtacgacctctgtaccacatgcactaagtaccgctaatgtactactgttggtaggacggaaccgtacccagagtattactgagtgttgtaccacatgcactacgtacttaactatactagtgttggtaacaccgaatcataccctttgaaattcatatactatattaaagcactcagtgttggaatatattttaccannnnnnnnnnnnnnnnnnaagtatgtttttaacatcctaaacatgaacttctaaaacaatataaaataaacaca

SEQ ID NO: 39726 - DNA, 1343 bp, Cannabis sativa
gttcagtgtcaattgtgccataagttgggacatacacttgccaagtgcttttatagatttgacaaatcattcaaggactagaaactctgtaatcttttgtaggaagtgccaatattgctaagctgcacaactctatgcctcaccagaaatggttggtgactctagctgctatccagacccaggagccacccatcatttaacctccaatgctcataacctatcattcacacacacactacaagcaaacatgcttttgccggcgcatttttgcaccggcaaaagtacactaattgcgccggcacagctttgccagcgtaatactacgtcggcaaaacatgtcagtgaatcttagtcggtaaaggactttttaccgacgcgtaggtgaaatgcgtcggtaaaacgtagttttaccggcaactaattgcgttggtaaaagtgaatcgccggtataaaaggatacccttatccgctctgaacctacttttataattttttgccagcgtaataatgcgtcggtaaaaagattcgcgccatttctcagattcgcccaaaaagttttgtcgacgctataggtgtgccagcaaaactattcgcgccaatctgagaaatggcgcgaacgtttttagtgttatgttttaccggcgcattactgtgccggcgaaactattttttaaaaaaattaattaattataattatttaattatgttacgttttgccggcgcagtaatgcgctggcgaaactattttttgaaaaaaaattaattaattttaattaattaaagataattaattatattatattttataatataaacacaaaattaattatattatatttaatattaagaaaaaaataacataatttacattaaaagataaacaagcatcaattatattatgttgtactaaaattagtatataaacaaaacattaaaagatgttcgaattggataataaaaaaagtaaagttctaattggtatataaaatatctaatgatctataggcgagtaatgtcatcgtcgttgtttctctgagtctcgggaggatgcgataacgatccagcaccaggagcaagcggtgacgatccagcaccaggaggagtgggcaatggtggaagatccatgggtggcaagttgaaacccgggacagctcgagaaagatactcaaactgatcttggaatcgtctgaggtagagttgttgtgtttcatattgctgcctcgtatattgagttttctgctctgctttctccacttttttcttgtaaagcctcgtactgttccattgaaacagtcagtggggctgaagaattcgtggcaggggctcttttggccccaactccc

SEQ ID NO: 39727 - DNA, 3790 bp, Cannabis sativa
aacagggcaaggcagcaacagtaagtcttgaaggctggcctccatcacagaaggctgatctccatttttgaagtctggcttttgctttcaaaggctgagctccatcccaaaagtctggcctttgcctccaaatgctggcctccatccccgaaggctgacccccatctccaaaggctcgcctccctcgagcgcacaggcagctgccactagctctgcccaaacctccaatggcaggacatttaggggttgtcattgacggactccatattacaggcaagaccaacaaaactagaaagtgctatgctcggacactccgtcacgagctcaaaagtgactccctagcaggtgaagaacgaggctctaagcaaccaaggctttgagagcccacactctctttctcaaaaaggagatcctgcccaagatagtttcccgcgcaacgatcccctggtcgttaccgcacaaatcgggaatataactgcagcaagatatatggtggacaatggagcctccctcaatattcttttcaaaatcaacacatgaaaagatgagtctctaactcactgacttggtgccctataatcaagtgatgtgtgacctctttggtcgaagcatcacacttattaggtatattagattaccgctcactgttggagaaaatccaaccactagaactctgatggcgcagttggtcgtaatcgacattcccttagcttagtgcaccgtgataggctgaccaaccctatacaacttgaaggcgcaacatacatttaccaccctgcctgaaattcctagcaaggcaggggtaggatgttgaaagatgaccaatgatttgcctgtcattgttctaacttggccttgtccaaagccaagaaatagaagatgaatccatcagatcaggagcacacaagcttcatggtgttcaatgatcttatcaagcacaacatggaggtgtgcgtggacgatatgcttggtaagtccaaaagagctgggggcacatgaaagacctagacagaaaacttcaaaatcctctacagctataacatgaagaagctcaaacccggataaaatctaagccctttcgaacatgaagtcgcccacaacaatcaggaagtacaaagccaaatacgatgcactgttgcactataggtaatcttctgtccaagtatacagacaagtgtgtacccttcttcaacatgaagcaaaaacaacaacaaatttgagtggacaaaagaatgtgaaatttcaatctaggagctgaagaaatagattggctcagccacctctgttgcccaaatccctagacaaagaagagctaggtgtgcacctagtagtcacagaacatgttgtgaatactgccctcacaagagaagaagacggtttatagcaccctgtatactacaccagcaagagactgatcgacactaaaagttggctcctactcatggagaagctgacccacagcttgctcttggtttccagaaagctaaggctatacttccaaatatgccacataaaggtgtacaccaaacaatattcacgataggttcttcagaaacctagagcattaggccaaccactcaagtgaaccattgagactcaaccaacataaaagcacctcacaaccaagcatggccaccataggccaagctctcaccaacttcatggctaatcatagaagcatatctccctaaacctctcagagtttgggagaaaagtaagagccagagaagaagcaagaataagaacccatgaggtgcattaaccacttgtccgatgcaggcctggcccccaaggcgcctgggggcaactgaggcacgaggcaataaggtcaattacaaagcttctaacaacgagcctgaacatgaagctctgaatgctggccccaggctagcacacgaagtgcgggctaaccacctagacatgtaccacgactctcagatagtcgcaggttgtgtcgtaggtgaatacacaattgaatacaagaagatgatggcttaccagagctgctaagatagctcaatggctatactagaaggtatgccccaaaagacagcacaacagccgacatactcgctcaactagccagctacaccttgacaaccaaggaaaacttggtacatgctcagttctttaaagaactaagtactgattcacaaagaacaaacatgctagacaaccaacacggatacacatagagcaacatacctccaaataaagaccttgcgagaaagcatggactaggaggacggctacaaggtgtccagtcctacacagcataacacatagaaatagtatcccaacaccaccaaggagcatttccaagaaagaagttgtatagctattgacagaagtgcacaaaggctctacgaaaattatgccggggggcaaagccaatcggatgtagatgagatccaaccacaacatcgaccgaccctttagaaggctggccgaccatgtccatagcaaggtggccggccatagattccacgatctggccaaccattacctctacatgttggccggccatggcctcattcaactgcccatacaatgctccctcaatgtggttggccacttggtcttacctggccagtttgatccactagtactctgctctcataattctggtctacaatgaccaagaggtacacgacatcttgttagtaggatttcttaacaaaagggaaagcagaagagaccaagccaactgaaaacagcatgactacacacaaggagttaccaggcccgtcaataaacaagtcgaggaaagaaattcttcgaaagagaataactccctgaagattattcctggacaacaaatcctctatagcaagcatgttcagaccaaactgagaaggtccgcaccatgttacaagataacagtgaaggtgcacacaagtttggcgagtacgacgagaacttgaagttagaacttctaccctaacactaaaataaggaacatctcggtaagtactctcactagccaacttgtcaattaagttcctctaacgtttcatcgttcaagaacccataaaagcgctagtacccgcgaccttcttggcgtggtctcttaccgttcttcaatggtggcctctgcttctttaagccgcgcaggggtagccactatgtgttttcaaaagtggacaataagctataagcttttgttacacgttagaccgaccgtgtctaaatcacttgctcataagattaacttcttaaagttactctttcagttccacatgcatactatggacaccaccccaaggaagaacccaggcaaagtctgtgaaacttggtgaatagcaagtgaccaagggatttgcctgcatggtcgcttgaggggtgcccataccgtaaaacgcatcgaactagcacaaagaacttatgtagataaatttttaggcttaaaataagctactaaacctgcctttaagttgtgcaggcatacttcggcttgacaaagtaaatctagacccttacctgtcaaggccataagaagatacccaagacgatcatatgtccgtcatagatgactttaaggctaaataatagtaatgttcaaaaatagagggtctataggccaaagcaagaacacgaaagctttaaggccggatatgagattggttcacatacatgaggccaaggccctgctagaatcgtatagccagaaaagacctagacagagctcctatagggaccacgtatcgagctatggctagggtagagtttcttacaggatccaagccatgttgagtcttaagttgaaaatttgactataatagactcacca

SEQ ID NO: 39728 - DNA, 1359 bp, Cannabis sativa
  modified_base (34)..(47): a, c, t, g, unknown or other
tgcaacataaaatgatttctaatcttttattaannnnnnnnnnnnnntattgaaatagattttatttacggcaaaaaaacttaacagattctgcccctaggggcttatcagcaagtgctttcctaaattattccccatgtatgctcctccaacccttttttttttcttactattatctttacccacaccaaacattctataatatatttattaataataaaattagttattacattggaactagttaagtaacaaaggaaacatgtaattgatataattaattatgagttaaatattacaatattttcagtctacaactcctcctcctcatcatacttattaagtattacattattttcatcattttggacactctttactttcttttttccgacataagaacctttatttttcttattttttgtgtcatattcatcaataatgaaataatctaaatcacaacttttagtattcacacgaacgatgttagtcacttcagttaggtcgacatcatgacagatatagtcaatatcatttagttatggaagttgtacaactaactaaattctcgaggagttactttctttgaaaattgatatatcttcatcatcctcatttgggaaacttcatacattatgcaagatgtaagcactgacgagcttccaataatctttgttcttcttgtaagggatgtaataaatcaactttcttgagatacaagtatgaacaatttattttggtacaatttacaggaagcttccaatcatctccattcttcttgtcaaggatgtaacaattaactttacttgagatgcaagtatgcacaatttattttggtaccattcacaggaaacacatatgctagtgacaaaaccatcatttatgtccagcaattgttccttcaaaccactttcactttaaaagtataacactacaattcttgagataagttcattcatagacatgttgccaaacaaaatgaaccagtggccaaacccaactgcacatttctagggtccactgcaaggacatatgaagcctgtcaaattgcttccactcctttgcatccatgcgatgcctaagtacattgtctgtttcgggtctcttaaagtaatgcaaccagatatcctcaattaaatatcttgagatatataacctctttaatctcagactcaagggaaagttccacataactttgcgagcaacccttttttcatctcttttaatgacatttgccacaaatctaacaaaaaattattcttcgtatttttcttccaaaacaaagcacaattgatcatgtttgcatatgtcaatcgactaataaactaaccctatattacataatataatctttaactc

SEQ ID NO: 39729 - DNA, 2113 bp, Cannabis sativa
  modified_base (1633)..(1658): a, c, t, g, unknown or other
tttttttttgggtaagtatacttatatttcatcaacaaacataccctgtacaaccaatattgctatcacatgaatagctacagatttacaactcaatagaaaactaaatcaatctcaaaataattctttaaaccaaattctatcatttataaagctctgtacagttgaacttcactctcccaagtcccaatataagccttgtccctagtcctccaaaccatgtattactagcattaaaaatcatcagtatgtatacctactttggcagtttactatgcttgcttgcacctgttaatccagttaagaagtcttttgaatcgttattgatttgtgcatataccaatccaatttaatagctgactaatacaaagtttcctgaaaacacatgaaaaacaagaatacaagtaatcatgtgttttttgttcacttagtgctttaatatgaataatatatatgagattataacttatgaagtagtaataatttttttaattattgcagattgtactatgggtagcaattccatctctattagaaaaaggatcagtgacgatagtaatgacggtgttcttgataatatttctgttccaatatctcccaaagatttaccactccatctgcctcttgcgtcgcatgcaaaacctctctggttacatctttggaactgtttggtggggcattgctctaaacatgattgcatattttgtcgcctcccacgtaagtactacttctattattttataatatataaattatataaaatctccaacctaaacaacatatcagttttaatataatcacctttttttagtcgctagtcaaaatcatttaaatttccatccaatatattataaacgtccgtactatctcaatattgtcgtttcctttttcacatcttaaaaaatattattaataaaaaatttaatcaatttgcacatttatatgagtgatttttaagtttgtaatttaaaatatactctaccaatcttcaataattacaactggattattatattttataataataaacaggtcttattatacatgcacaaatttaagagtataatttacataaagttcaagcccttaatttattgtgtacaattagaaaatttatggtggaacattaatttgagatataaaaatcattaaagtataggtcaaatcaaataggattacttatatatatatatatatttatgaaggattacttatatattaatagacgggtttaaaaaaagaaaatagaaagaccaggtagattacgaacaaactgacaaagtaaaaactataatgataagacacatgataagctaagtaagaaatttcctcgtcgaagctaaaaagttaaagagaactaggtatgttaaagaatagtattaaataaaagttgaaagtgaatagggcaggtgatttggctcctaattcttttgcatgtgagatgaaaaaaaaaaaatagcttttatcactgaactaggattcgggaaagagataaaataatagtctgaaagtagtacttaattattgtcttctttaaaagtttatacgcgtatatagtaaattaactccatttttctaagaattctctttcttcatgaatgttatgttagttttgaaataataataataatannnnnnnnnnnnnnnnnnnnnnnnnnaataataataataatatatatgagattcaagaaatcacaaaacagatccaacagctatatttcaatgctcattcaataccatgatcagattttatttggaattagttagacaataaatgcgcataccatgcaatattgttagatgttgaatccattccttgttcttgaataatcccaatccatctaaaacctagaaaatgtacagaagattgagaataacaagagaagaaaatatggatcataagaaccctcttacccagaaccacttctatcacacttttctcccttatattacttatcatattgttagaatttgggaaaaaatgaatgaggttcgatctcaaattcaattgactatgggtagagtagcttattcctcttatatattttattatttttctacgcattaacaaatgtgagactttatatgcccttttttgatattctaagaaata

SEQ ID NO: 39730 - DNA, 1022 bp, Cannabis sativa
aattttgtaagagaaaaccagcatacggttatattacgttaacgacagtgctcttgggaggtaccctaggtaagttctcttttttagtctttagggtcacttaaatttaggggttgagcttaaaaaattttagttttaattttagttatttttgtgtttttatgtttattgtgtgttatgagtcaattttctaagtgtgagtcaatatgaaagtaagtggatagcatggtttgaaaacttcatttattttcaaaaaaaatttgtgtgcttggttagatcacagtcttgactaatttcaattttgtgctttaaaagaacatagagtcataataggtaaatttctagcaaatgaatttgtttatgtatgctaattttgataagtgaaaaattttagaacttgcttgctatctgaggcgaaataataaatgatgcatgattaagaaagcgatttaggcattctttggatcgattgtgcctttcaagccatccttgaaattttaatattagttacctttattgagctttaactggccagatttctttgtttctacacattttgagcctaaataagataaactcattattatccaaagttgaccctaattataccataagtagatctttagtttgggagaatttggatgggaagtttgctgtctgtgtgtgagaagaagagttaaaattgggagaatgtgaaaaaaaattaattggcaacaacttgaaaaaaaaaatgataagaaatgttaattcgaaaacaaaaataaataaaaataaagttgttgcaatattgtaaaaaaaaaattctctcaaagtattagaaagaaaaaggagatatcgagattgtttgtaaaaaattaatgggtgacatgattggagaagtttatggtataggcgagtctaaatgaccattctatctacatgtacctaagcctaacattacaagcctagaaatactgttgaaagtaaatccccacattcactgtaaaaccagaactgtcacaatatgattacaaaggcagtaa

SEQ ID NO: 39731 - DNA, 4048 bp, Cannabis sativa
ttaattttactagaaggttttatacatagaaattttattgaatgaaattagacaaaagtctttaaatctaacaatctgaatagttcaaagggaacttttaacggccaaaaaaattcagggtggcatgatttggtacatgtcaaaattcggttcggggaaaaaatcttaattagcctaataaaaactacaataaaatttaatatttactaattaattataaagatataataaaaaattatttttatttttattttttaaaataatatatatgatttatatactcaatcaaacactgtatttcaattaagggtaacataattacatattaccctacacaaccaaacacactttacacatttgtattccaaatgccccctcacaaaaatatgattactactatcctacacagtaacacaatttacaagttttcctataatcatattatcgtttcttataaacaggacgttttgtccattccgtggtacattaaatgggtctcagagtacattagatgagtgtctgggtaagttactatttttttaacataaattacccctagattaatctcagccttcagatcaaataactctctcatttaacggctgtcgtacatcacataatacatcccggagacaaaatcatgtccgaaacaaattatgctaaataattataactctcatagaagtgtgagggcaaaagagtaatcatagaccaacctaaaatctttcttaaaccctaaagggagcttgagtgtcccactatttcatcgttgagagctcaaagctgagaagaagcttctacactctactacatacattccgctcttttctcttctctgatttcatatggcgaggcgcctgatcccattgttcgatcgtattttgattgagaaaatcgttcctcctgcaaagactaactccggcattcttcttcctgagaaaacttccaaggttactcttttctccacaccatttcttttatccgcatacacagatacatatatgtattattctataaaggttggtcgaaacatggctccaaaagtaattccaactccagctccctgattctgataagaaatgaaaagaaaacaacagtatttatgtgagctgaagactaataaattttgtctgttttgtttgtgatttctgttctcgatttatatgtttttcaactgggttttcgtttttctctttgttgttacaattgttctttccaatttttcatgttcttattatctgtacttgtttgtatatacttgtaattagtttggtcgtgcttgcaatacttatctttttgttttcgacttctttggggattttgatgtaagtatgaacctctttgttgttttcttgttgtcctcccattttcttattgaattttatgtgtgtttcctctcttgcgaatattgttgtcatgttcttgatagcctggcttgattaggtccttcattttacacgaaaaaaaggagagaaactactagtgattaaccttaaatttctgcaataatttgaaacttgtttccaataagttaagcattctgtggatcttacattttcttttcttttctcttcatgggctcatttttgctgtgtgtgtttgataatttagctgaactctggaaaagttgttgctgtcggtcaaggaggtcgtgatagagatgggaaactaattcctgtacatgtaaaggaaggagacacagttcttttgcccgagtatggaggaactgaagttaaacttgcagataaagagtaagattttggttgctatctttcttgaattataaaaatgtgcatttaagagttcttaatgctgtgttgatatttttaaactagatagagatgtgttagttctctttgtctttgttgattagcttttaaaatcaaaaagtacatttccacctttagacgaatatcagtccttcctttctccttttttttgttcttcttttcaagttcattacttcattgctttgaaccatgaagagtcgtgtatttcattttgaaatttcctcccccatcttggaattaatctttatagaagttgtagttttgcatttactcatgatggatgagatacaaacctgtataagaagaaagtccacatgttttttttgcagcatattgccgggagtactatttacttaagcctagcttgggggcataccttattgttacttagtatctttgtgtaaaatgagggtttctggtttgattaaaatgtgatcattattgatgttgtcaccttttacaatctaatgtgctgaatctttacaaacagggaatgaatagaaaataaacttagaacagcgatgtaaatctgataaatgtaaaagcctgtggttgtggatcccaagataaataataattctgaaaatttaaaaatcattccctactagatgggacagatactggggttcttgaggccttgatggttttgttgatgacatgtggaaaattaaggcatgagtgaggatgaagagagttggcatctgtttatgccatagaagaggtttcaatggtgttgatgctaagaggcattgttaaggttgagaaagagggcagatagaacttgaggtagattaatcactagtgaaacgaaaagcttcaattgagctaatctatgaaaataaataactggtttgtttgagttattcggtttctgaatgtctgaataactctggtcaagccaagttagtctagactctagttctttagtttgtcttgtggttttctagtattataaaaatcccatgcatttctctccaaaatgtctcacgtttcaggaatcaaaatattgttcattgatcagaaacttcatggttgacacagaagtgtatttcttactttgttcgttttatgtttcaggtatcatctgtatagggaaggcgacatcctgggaactcttcatgattagttcatttgattgctctttcattgtgaggagagtagttcttccccgatatagataatttgttcaagtgaaattagactcttttggttccacattttgatactgatgtgggctgtatcgtttgttttttgagttatatgctaaaactagaacacaaaattcagcaatcgaattgtaatccttaatatcattgatttcgtttctagctgagtctacaaatcgcttatctagataatgacattctaataacccatgtcaaatatggctataagaattttactcttcactcgagaaattggagttattatctgaagttctggtcttctgttcgcatttcacttttttgattattcttcaaattacattgtttgctatttttctaacttttattttgtcgacaggtctctgtcgacaagacacccttcctcatattcatatataattttattttttaattattgtttttaaagggactcataattgcacattgttaatgtgtgaaataaattgtgatatataagatgaatggactgtttttattattatcaattaattttgtgatagaatcccatttactttatcttaaattttaacattaaaacttcatattatatatgggagctaatacaatagttattgtaatttttacttatcaatagggatagtaatttataggtcttgatttaattcaatgactcaaatcaactcttgaaaactacaccaaaattaatatattttttttatttataattaatcttgaatattattaattacaagttcaactaacaaactccaaacctaagtccaaacttaatttttttttttacttatttatcttatgattagctataattttcaattaattagttctttaatttgaaatttatatatatttatttttaattaattttattttctacttaacacaataattgtagctaaaaaagtacaaaatatttttaatcctaccatgatcaatacaaccaataatataataatggtgtaagaggtaaaattattgaatagacaatgacatgttttttaatttaagattttaaattaatttaataatttgaatttctttattatttttttccaaacaatagttcattttttttaatatatttactaatat

SEQ ID NO: 39732 - DNA, 2312 bp, Cannabis sativa
gggtttgggtccaaagtcccgattcgggtttggattcaagtttgggacccaatcccagggtgggtttgtgtccgagtctgggtcctggttcggttacagtttttggtctgggtcgaggtcctagtcctggtcctgttcctgggtcccgatccgcttctattttcgtttccagtttaaagtcacagggtacgggtttgggtccgagtctgggtttaggtcttgatttgggtctttggcgaggtttaggtctgggtttctgtctcggttagggtccgaggttgggtctggtttcgagttcgagtctagatccaggtcttagtcccgttgcaagatcccagttcggttcaagttaaagtttcagttttggttcccgagtgtgggtctcagtctaggtatttgatcgggtcaaggtttgagttcgaatttgggtgcgcgttctagtctaaggcctagatccagacaccgactacgggtcaagtccaagcatcgagtcccggatcccaggtcccgtggtgggtcctaggtctaaatttgggtttggggtcgggtctcagatcccgatccaagttccaaggcccaagttctggtcccggtttgggggcctaattccaagttcgtgtttcggttcgagttcgagtctcgagtaccagtttgagtccaagtcctagtttggatttggtccaagttcgggtacaattcctagtgtgggtccgagtctggttcttagatcctaggtctgaccccgatttttaggtgtgggtttgggtttgggtctgggtccgggtcccggtctgggacccggtcctggtcttggtttaggtcccaagtcaccagtcctagtctgggtccaagccccggtatgtgtttttgtatgagtttaggtttaggtttgggtcctattactatctcatgtttgagttctagtcccaaacctggttcgattctgattttgtgtccaggatttggtctagatcgtagtctaggtccaggtctaagtctgtgtacggatacaggtcctggtcctgaattcaaacaccgactacgagtcaggtcgaagcctcaggtacagattcagatttcggtcttgttccagtttggctcttgggtcttgggtcaggtcctatgtttgggtttgggtatgggttcggggttgtgtaccggtagccaggtcctgggttctgggtccagggtcgggtcctgtgtctcgtgtctagagtcgagttttgggtctcgatcctggttctgggtcctagtttcgggtccaagtcccccatctaggtctgcatcctttgttcatgtctgggtctaggttttagtttggggcccaggtcccccatctaggtctgaatcctaggtcccggttaggttaaagtttaggttcaggtttggatcccgagtttgggtcctagtctaggtaccaatacgggttcaagtttgagtctggctccgagttccagtttgagtccaggcccctgttcgggtctgggtcggggtcaagatccgggtcccagtcaaggtctaggtcccagacgaggttctggtctaggtttgggttcgggttcaggtcctgggtctgggtctaggttcgggtctagattcgggtccaggtcttggtcttaggttccgatctcggtatggatatgattctgggcccgtgtcatggttagggtttaaggtttagggttttgggtttagtatttagggatttagagtttagggtttatggcttagggtttacgagttaagtgtaagtagggtttaaggtttagggtttaagggtccgcttatagttctggttccaatttggggtcacaaggtacgatttaaggttcgggtgtgggtttgggtccgagtcttggtctaggtctaggtccgtgtttgggttcaagtccgattcggatcttgggtcttggtccgtgtccgtgtctgggtccgagtctgggatcgagaccgagctcaggtcttgggtcccagtcctagtcctgggtcttgattctatttatggttctaatttctggtttgggtgcccaatctaggtcagagacctgggtctaggtctgagtctccaatcccggtccgggtcatgcgttcgggtctgggtccaagtccatgtctgggtttgggttagtgccgtgagtcgtgatccgagttttgattcgggtcggcatctcagtccgggtcttggtctggttcctagttagattccagttccgagaccgaggtcgggtcctagttgttaggttttatgtcctaaataaaactccatttcaatgtaatctattttattcaacatcaataaagaaatagaagta

SEQ ID NO: 39733 - DNA, 2061 bp, Cannabis sativa
  modified_base (308)..(314): a, c, t, g, unknown or other
  modified_base (1992)..(1996): a, c, t, g, unknown or other
tcgcggcggaggcaatggtgacggtgaaggcgatgactgccgagggttgggaatgggttggggttggaaatagagcagaatgtcagggtacgtggggaggtgtgagaagggagggtgagggtgtgactgagggtgtgattgtgagtgaatttagggttaggagtgtgggaagagaaaagagagtgagagtgaaactgaaggagagatgagagggaagaaggagccatgaatgaaaatgatggggctgattttaggagtcggctagggttagaaggaaaaaggcggaggatagaagaagaagaagaagnnnnnnnagaaagaaagaaagaaaagagaaagaaaagaaaaagaatataattttttttttttaatttttaaagatatttttattttttttattttttattataaaataattaatttttttattttaattttaaatatttattgcgtgaactaataaaattgtgccagtgtacacgtggacattccactatggcatttaacagagaaaaatggacagaaaggactaagtgctaacagaacttgagtttagggagttttaccgcaaaaaatttagaattggtggttagttgtaaaaacttccctactttaagggattttgctgcaaataaccctaaataaaattataagtaagttgatcatttgccacggaataaattaaaaaaaaaaaaagaaataggttggatgaaaaatagtaattaaaaactagaataattaatatttgatagataaaagtatatgtatatagaacattgctataaaatatgagtggtgtttatagctccccttaaagtgacgccttagatatattccttaaaaactattattactttcaatgagattaattaattattcaaaacttaggattatctaagtacttaatttgataataacaaaattatatgagggattgataaggtataattaattatgatagactaataaggtaactaatatttatatatatatacatatagagagagatatgtataatacatattatacctggtctctgcagctgttggaattgtaagtagaaccaggttcagaagaagtgtaatacaagtaaaaaccttcatgcaccttaggatcattcttgcttccaagtatctgcgaagcagaaactaaattacatttggcatcaataccatactcaatctctggcatcgttcccctaagcgacaccaaaatatcccttctccccaacacctcctttccttcatcagtcgtcacggccacaaaccccagccactttgatttgcccgccaccgcgatgggagagacgggcagattattggctggaggccaagatgtacccatgaatgcagtggaggagtagaagtacttcttcacctcatacttgaaaggattattcccactctctaacccaacctttgagaagaggtttctcatggagtacctacaaaggccgtagttatccgatttggactctgtaatgaaggaatccaccacagcctcgaccctttctccgtaatgaattatgtagcggcggaggtcagagtcgagagggtcaagaagaccctcccactctccctcaccgctaagagctctccacctttttccgatgtttccggccatttttgtgtagctagctagctaaaagattaaataacaataataattatatgtggagtgatgttttttctttttttggtagtgtgtagaggtgaatctaaaccatcttctatttatagataattctgtcatgttttcatgaatggctcattttacacgttcatatttgatagtgacaaaagtaggccctagctagtcctagtggtgacaataaatatggaggcattgttgttagtgatttacaacatgactctgatcgattttactacagaccgtatatagatatgtaactaattgtgaactataataataaaataatatatatatatataagttacccataaataaatagttactaaataaatttaactnnnnntattaattttaaaaatattaaatcatcgaattttgatctaataacgaattttgatctaataacga

SEQ ID NO: 39734 - DNA, 3374 bp, Cannabis sativa
gagttaattctaattttacgtttctttttgagaaaacaaagaacaaacaattacccaaagaaaatgtgatgccacaattgctaattcaatggaaaattggacgaaatggaattttctattagaaccaaaccaatagagggacagacttaaatatggagcaacaaaaacaagctcagatggaattatcacttaagatgagaaattaagaaaaaaaagctttcaaaatcattacaacataaaaacgtatgaatgtaagcttacttctttcacgtgcttcggaagataaaatttgactaagcatcatctgccttcgttcatctgcctctctaattattcactcaaaaacattacaatcagaccctaattcttaacaaaagcaaaacagtattaaagataactagatttagttaaaacctcttagcatcttcttgtgcattctgctgttcaggatttgattgatttgcctactcatgaatacagtttaacaatgatcagcaatgcaatttcagataaactaaaaaagtctcatttttcagtagaaaaacaatttttctatacattaaaagaaaaaaaaaaaaaggtactcataataacggagagccattaggcttaccatgccatgctgagccataagctcctgcattcttctctgtctgatagcttccaattcaggatcagcctaaaccaaatataacaaaagagagttaatacacatataaacacagatgtagatgcacatatccatacatacagatgttaagagaggagaaaaacgcaagcatgatttcaaaacagcgtttcacagccaagctttgaaagattttattttttcattaataaaaatatttcttcaaaaagatttatgagaatctttcagaatcatccagatggctagcttcaaacatactctcaaaactggtagctgctaatttccccaacatttgatgtaattaatcaacaaagaacatgaatatcaaaacttccttgcatatataaatatatatgatccaatccaattgagaattttgtaaactcctaacataaacttctctaatcttgtattgcatttcctaacatataattttctaggattatgaatttcctcactctgccaaactcagaaattaactaagaaaattctgatttctgagtacagttcatttttgggtttctttcaacaatcatttgtactaaaatctaatacacacacaccagcgcatatttatagccaatcggtttctcaaatcaacaaactagaagtacacagcacactcagtactcagataatcaaacaactttgacgtagaaacagcttatagtttcgaataccaattagataatcaaaaaatgaagaaccctaatagtgtgtttggttgcagagaaaataattaaaaaaaaaaaacaagaaaaaaatataaaataataataagaagaattggaaaagagggaaaaagagaatgaatttaccattggaagaagagagtttgagtttgagagcttcgatctggttcgtcttcaacaaaataccttttggcttttgccaacgccataaatatttatatttccacccaaaaataaaaattaatttatttaattaatttgttttttttttttttgctgaaattgtttttttttttgaaaaattatatcatatactattttttaattactatgtgaattttgattgcgatttaaattactctgttggttactattgaggtttttatatgaagttctgtaaaattgtaaaaaaaaaaaaactattttaaaagataaaatgaaaaaaccaatttttttaagtagattaaataatttattatttaatatttatcttttggaaaattcaatttgtgttcgacaaaataataattgcatcctaatatttttaaaaaaataagcttaaaataatttttaaaaattactcttaatttttattattattttttttctcatattattttatgttaatttcattgtttttttaattttatttttataatttttttaaaattatgcatagttttttttttttttttaataaaatttcacataatcttttagttatgatatttgaaatataatttatttttgtttgatagatatattttttaagaatatgaatcgaaataaaaagaattataaaaaaataacataattaaatatatattttatgtcacgttaaaaaaaaatatatatttaatgtaaaataaaaattattaaaatatggtgtatttataagtttttatatcaatatggatttaaaatactatgtctttagaatagataataatgagttattttttatgggaggccctcctctttaactgtgctttatttttctaatcaaagtgatcatgtaaaaaaaaatacatcatacatggatcatagttacaagttttgtgttaagtttaggagtggtgtcaaattgaaaatggtccaattacatctttaatactaaattaaaaaaatcggaatacataacttaaaagaaaaaaaacaaaaaaatgttaaaaggtatcagtgctacttagcatccatatacatgttaatatcgttattattacaattaagtattaaatctcatataatttaatgtaataccttttggaaagtatcactaaccaatcacatataccactgtgtcattcgaggtaaaaatcgccttaatttcttgtgattaccatttagaaaaaatctcgtattgtttttattttataattagtcatcaatatttattgaaatcatgttactataaaagtaaaaataaataaatattaaatagtagtattttttaagagtgtcaaaaatttttatatcacttaaaaatataatattttattatatttttaaaaaccttttcattgtgtgggtgggtcaggttcaacctgatggacctaacaagtgagtttatgtttaatttttttggacacaccgagtttcaggttggacccgtaacccgcaagccaactcggtcaatttatatatattaagggtatacatttgtcggtttgatcggattgtagtatacttttactagcccaatataaatgggttacaaatatctaattgtaacctgtctaataaaaaaataaaaaataaaattaaccaacctaataatttcatcgatttaatcgtgttaacctgtcaaaaccaatttttattactattattgttaatttttagtgtttaaataattagatttaaaatatatatatataatatatttcaagattaaaatcattatagtttaaattaatattaaaaacttagacataaaacaaaaatctattctatataaagtgtgcttatataacagaattcttcgttttttgagaaatttatgggtgagtttttatttatattaaaaataagat

SEQ ID NO: 39735 - DNA, 1699 bp, Cannabis sativa
  modified_base (1655)..(1655): a, c, t, g, unknown or other
tttttttttttttttttatgtggattatataagtaccaagatttaattaattagtgatctggtacaattataatcacaggctctgtaagggcgtcttgaaaaatctatatgtacgtacgtacgtactgaattactttgtattatatatatagatatgtaagatgtcatgaagtgtgtattattattatgtatcacttttgctctatactcgtttctcaatgtttgagttttttttttccaaaggaaatttgtgtatttattttatccatattcgtagctagctatactactattacatgaagtaatgatattaacaatcaaaatgatattaacacaatttttttcttaaaaaataaaagaaccatgcaccgacaaagaagaaaaaaatggtgatatcacaaaaaaatcaagagagaaagagaggagagagagaaagagaaagaggaaagaaaaaaaaaacttctagggctagcggtggtgggtcttcgaggttgaggcaccgtcagtgctagggccggtggtggctgggctaagagaaaccgagaaagagagaggaaaagaagaaagaaagaaaaaacataccttattttgttgagtaatataattgtacacgtggcttagcttgttagaatattcctaatggtagcatcttttaacgatgctaagtaaatttacacattatttaaaagtataatgttttattttatctttcttccacattattttgacattcttacttctaaaaatactctaatatataacactctttaaaaatgctataaaaatacaattttggaccgtgtgttttgtaaaaagtaccaattagaccctttgttttgttaaatgacaaaatagaccatttgttttgttaaattgtgaaaatatgagtctgagctcacttttattttttaaaataatcaactttaagataatttctaacacgaacatatacaaaaaatgtaactagttttgtcattacatatttagatcggattattattaagttttattatgacaaaaaatcacttcagggtcctatttgtacaattttagaaaatacgtggtccattttgtaatttaacaaaatagaaggtccaattggtaacttttgaaaaacacagggcttaaaatggaatttaccaattataatctgacacattattatttaatatatatcctaatttttagctacaataactttttagcttcaattttttattaaaaaaaatgaataacatcaatgctacaacataatatccatgcaaatttctagaatgtcatttttttttctctccaatagtatagcatctcaatattttagcacataatatgtccacctcaccaagtattatctgaagttttactattggagatgctcttaaagcatctacaacactagcatttttaaagagaaatgttaaaaggtacccgtggtgtttaacactctcctatgtgttattattgatattgttataattaagtattgagtcccatatagtttaatttaataacttgtaaaagtatcgctagcgaatcgcaatgccacatgtttagagttactatacactactaatatctaataacaatactttttttaaagtgctaaaaatttacatattattaaaaataatagatttttttttttttatttttanacttcaaaatagttttttttttcgtatttttacggaattctaca

SEQ ID NO: 39736 - DNA, 1668 bp, Cannabis sativa
ttttgtttttgaggataagattttaaaccgaagaggagtaagagggagtaaaaaatacttgtctacttgtctacttgcttctacaatacagaatttaatttttggccgttggataaccctacttttttaataaaaaatagaatagttattatctaacggtggaggcatcaataaacgtcattacatcatttcctttctttttcttatttttgataaatagaattcctttttcttttattaatggttggataacataactgtctgcagtcggtcacagcttacgaaaagtatgttaaaactaaggcccctttacacgtaggatattttattaattattactcgtatcatatgaaaattgtaaaagatttgaggtttgacatttttggacaagtttttttgagctggatttatttattggtgaaattgattaaatatctcaccaaaatttgcatttggataatgtttttttttttggcttaactcatttggataatgttgtagttaggaaatgcggattaggagaaagaattttagaaattgccaaattttattgtgtgaacaaaggaaaaagaaaaattaaatatggaaatggattagaattggggaggagggaggactactagaacgtgactcagcgcctttatgcggaaagtggcagagaagagagaacagattaaatgctaaagaaacgtatagagtatatacgattttctggcaatggcatcgtaattttgtaaattacataacagtgtaggggtatattggtattttcgcccgtggtttagtcaagatacacgtggctatcctaggtgtacgtatagctggagctgtagcctaggggtatggctcaattcctcaagtctcggaaaacagcacgcgaattcctttttcatttggctataaattggaataatacaataaataaaataagcaaatggatggtaatttccttttctttttcttttagaataagtggtaatttctttttttttttgaagtagtaacttcatttggaagacaggaagagtgaagggttttaatgttacttttttatttggtaggaattaattagggtttaaaggggatggagatacgagaaattgtccctttttattttttgtttttcaaaaagggaaggtgaaattgcataattcattaacacaaatattcttatatcttaaacttatttcaaataccatttcaaaaataaaacttattccaaatatttcgtatgattggacaaaagataaaaattaccattataaatatatattttgaaaaattaatttttaaattttattttttgataatttagtccttaaactatataaaatttgacaaatttgtcctcaaatttaattttttggtaaattattcctcaaacttttattttcttgaaaacataaagttctcactcttgtattttatttatttatttatttttatattaattttaaatagttttatattaatatattatcaaattaaataaatatatattttttatttataagtattttttttaaaatatgccaaaataggaagaagaaaagaccaatccaaaaaaatttaaataataatattatttttttataaagtaccaaagtaaattatattttaaattttttttaaacttatgctccttagtgaacccataaaattttacca

SEQ ID NO: 39737 - DNA, 2525 bp, Cannabis sativa
caggattgaaattagaaaatatggcagttgtgaaagaaaagttaaattattgaataaaatgacaaaattgtaactagtggggcctacattgtgtagccgaccacttaagggtgaaattttatttatcatatttttaatgccatgtaatttaaatctaaccctagaagaaatcctatataaggaataagatggttctcattctcatccaacctaagttaacctagttttcattctttgtcagataactagaaattgagagcctccttcaatagaattcgaatcttcctctctttctcttcataaatttcgagtcctatagtgaaagaatacatgcccacccataacaagtcaagtactcaatcattgtgtgtaagactgtgaagaatctaacacttgaaggaaaatcaggctcagatcttgataatactctgcgacagaaaagaacaagggttagagataagagtagaaggagacatattattccattgcaatcaatgtaaggtttctcaactttatatgtgtttaattccattgttttagagatttcatatttagggtgttaaataacatacatgttagtaaatttagatcttggtaaaataatcctgacaaaatgtgaacgcataataaatcaaagaggaattactcaagagaatactgctagctcaaaaatatttggcttaatcctctaaatcaaaaaatcccaaataacaagcatgcatctcaacccaaacatatgggaaaattttcaattaagtcctgaaaaaacagtttaaattggaggaatacttacttgtgaaacgatttaggagcgaagacgatagttgttcctttataatttcaatgcttatttggcaatggtgcctcccctagctccgacaacaagatagtttgagaagacgatggacgtcaaagaaatacaacgacaaagttgagaaagaaggggtttcgttttggttgagtgagatgtgaaggggctaaaatttttgggcaagaggttcgtcagagaagagttttctctaggcaaagggttactagtaaaataggaaaagaaaatgttttcaatcgtcaagacccctatttatacgagcggcaacggttcaaacatttttgaaatatacggtccagattgaattgatcaagggctacgccatccaaaggttggggatatgaaaggttggaatttaatgcgtctgaagtaagagaataaagtgtttattaatcatcattttgtggaagcctccccaatgtacctaaggcctgacgtcttttcaaaacaactgtcactcgtttccctcgagaaatgcacctaaaatacagagtgtgagtttcacgactccactgattaagcaccacgcttcaacaagtcatcagtcatatcacaaagcatggtaacctttcgggtacccaatgtgctatgaaagattccttccatatcaatatgcttagtcagcgagttagagacatgattttagcattcgggagaagactgcaagctcccgacactcttaagtcatgggagcttagagggtaaatgttatccctatccccgaatgaatggtacgtgaaaatcacggaggctaccacattagattagatattgttatcccttatcaaggttatggaaggtgctataatatccagaagaatgcctctcgagcaaagatagaagtgattctagaattctcatcgatcctaccgctactggaagtgaacgagagtctcacacgttctaggatggtagcgaattagctagtccaggaaggtcttagccagacctccctggaactccataatgcctaatccagagttaaacccgaaacttgtttatcttctgacaccaaattagattttgtcccctgcatcagactgtggtagtgcgcatacatgcttctatagtgcttattatccaatgacttgtctaggcaaccacttttaaggagaaacctttaaacaacatgtgtcgatgctcttacgaaatgccttgcaatggtcgtgcaccacatgatgtaaaagctacctaccaaactagcagtctgattgtcctgttgtggtatttgctttttttacatgctgagtaagaaaccctaggtgggtaaatggtaggtgggtaaagggtatgcctttacccacatgtgtacctataaatacctctacttttcatgtgtaaggggtgaacaatttttttcttagaaaacatctgccaaaattcctacaagcttcttcttcaagaggaacaagaggaatacagagctcatactgtaaacacttgtaatacttaacacatgccggcaaggctagtacaacggactcgtggactagggattattaacgtccgaaccacgtaaaaaattcatttgtctattattttttttatttttatttccttaagctctcattaatcagtttttgaaaatttcggtaaacactaattattatacaaaataaaatttaaaaattctaaaaataatactaatatactaaaaaatacaaacacatattataaaatttaaatgtataaaaat

SEQ ID NO: 39738 - DNA, 2406 bp, Cannabis sativa
aatatatagatatgggtttctcgtttgcgtatcatttttcatctcgattcaattcaattaggctatgcttagaagttggatttaatgggaaaaaaaaagtacggaaatagtaaaaaaaaaatagaaaataataaataataagaagtataaacgacttctctgaatcatcaaataataaaggggatttgtgtgaggggtaggttggagcttgcatacattgcttgtataatctggtctaatgacattagatgaagtgtttgaaagaaagcctcaacttaaacaaaaggtattaacatatttgtactgtataatgcaggtctatgattgtggaaggaagacatggagcacaaaaggagaagagcaagaggctgccaagaaggaattcatagaaattttgaaggtgttggaagcagagcttggggacaaaccatactttggaggagacagctttgggtatgtagatgttgcccttataggattctactgctggtttgatgcctatgaaacctatggcaaattcagcattgaggccgagtgtcccaagtttattgcatgggccaagaggtgcctgcagagggagagtgtctccaaaactttacctgatgggaagaagatatgcgaatttgctagccaaatcaggaagaaatccggcatggaatagagaaaatcagaaagcttctaggtcatatatagcttggtgttgctgctttaggaatttgtactctagtttatgagctttctttatttcttttgtttctttcttatatttgtgttgttctctttgttggagctgtgctttcttttctgcttagaggcagctgtgggttatgtaatagacacttgttgtgtctgatcatcatgctatgttaaaatcagctgaaacttttatatcatatgccaataaataaatagaaagctttctcatttgtttgtttaacctgttttcctttaatataccctcaaacctattttcatatttttcctaaatagagagaatactttaataaaattattaaaaaaataatatctagattgtggagtattaacttaattcattattgtaaaatatatttgagaatcaattgttattttttttttatttaggatttttgctctagtatttggacatatatattattatgtccttaaattaatctctgttcatcatgacaaacaaaataatgacttactaattaacacatcaatgccaagtatataatttaacattaaaaaaataaaaattagaccgttttaaaaaattattaaactattaggtaaaactaaattaaaaaaaatatatatttttaaattaattacatagattggcggttaaaagacaatgacgtgataagtgactaagtattatgtcattattttattattttattattttatttatcacttgtgataaaatttaagataatgaccaatatataacactattaaactattaatatagttcataaactatttttagcagaataaaaaattttagggtacaatatataatatataaattattattcggaaacaaaaatcttaaatagccgttaataaaatgcaaaaactcgatctatgccagaggtttacttatttaaaagcaacagaggtgttttattttaaatgtaaaggattaaggagttcatcaaattaacataaaaaagaattactatatacttttattatagaaaaaaaaaatgtaattattttttaggtaaatactattttggacattattttttgtaaaagttactaattggacctttgttttgttaaatgacaaaataaactatgtattttctaagggcatctccaatgctcaaagttaaatatagtgtcaaaacaacaccaaaaaagtataattttagcactaaatttttttctactccaaccacaacactaaaatttacactaaaaaatattctttattattatattattttatcaaactatcacacattattatatttatataaatataaaaatttaatcataaacacattattttaatattaaaaactaagaaaaatatttagtgtagtctatagtgtcccactatttttagtgtgacgttatagactcccacatatatataggatggcatttagagttctattggagcaattttatgttaaaattttactatttttgagattttagtgttctattggagaagccctaaaagggtacaaataggaccctaaattgattttttatcaaaataaaatttaataataattcgatctaaaattgttatgacaaaactatttacattttatgtatccgttcgtgttaggaattgtcttcaagctgattatactaaaaaaagttatcaaaaattaaactcaaggtcctacttttactattttgaaaaatacagagtcatataaaatataacacgaatac

SEQ ID NO: 39739 - DNA, 1235 bp, Cannabis sativa
tctctctctctctctatactttttcacactcgtgcatatcaatcaatcaatatttctataaaacgaaaattctatttctaagacaaaaatgagtttatttttttctatttttaaagacaatatttttgtttatttttttttcaagctttttaatggtatttttatatgattttcaatcctaactttttttattattgaataaagaaaaaagtttaatgcttgtttgtgttaatttagtcttgcttttccaaaaaaaaaaagaaagggattttttcatttagtctaattatttttagtatttttttctaaaattaatttgtagtcaattaattttaattgctttgttaagtatttgtgtcaagttttaaagtaagttttctaaaatcaatttgtattcaattaaaattaatctctcaaatgattcattcctaattacattaaatatatttatttcgtaccataataaatttagcctaattttaaatatggttttattattttgtaatttcttagttattaatgttaggaatagtttatatttatatattagatattgatggaattaacttaataattaatattatcattaaatagtgtgttaattaaatttacttatgttaagtatagtttacttcactcaattagttattcaaaaatatcaatgaaaaaaaaaattaattataatttattttttaaaaattattacattaaaagatgcatgattgatggttgtaatgtaatggatgattttgtgttacaagtttattaacgctcttttaggaagaagggtaagattgaaatgaacccaagatattagattatttatcacgggaattttttaaattttcattgtcttagtgtattggcttgagagtcgttcaaagtataccaaattaagtaggagtatcttttttgatattaaaatcttattaactagctttccggagtcatctctctcttatgtcagttgttgatagatgaattggttaaacatactcctagaatagacattaaacttttttaaaatggaaaaaatccctctaccttctcttgatgacatttctttgatctaacctaaagaggttctcttaaaaaaatacttaatactttgttatcatcttatttggggttcgaatgatttttttttaatgacaatataagtcaattttttcatttagaaaacaacccatcaattaatacgtagtacacagtacattacattagttactaaataa

SEQ ID NO: 39740 - DNA, 2035 bp, Cannabis sativa
ttctaaccactaatcaagtagtatagatgctttgctttagtcttctacttaaacctttattcttgccaagtttcatatttatttttctgttctcgtctataagctgctaagctttattcttcactttgattattagatattcagattaaaactagcatggaaatatataatgatatctatttttttttttgggggtggggtgggggcctaactttactgtgcagcattatatataatgcaattttttttttttttgcatgatatatattacaatttgatgtagaaaaaaaatatatagaaaagaagagtttatgagggaagaagagaaaggtcattgtcgttgagagctgcctaacttgggggcgtaaaataagactggtcttttgattctatatgtagatattgtgcgtgtgattctctcttgttgttcagatttcacaacagtggtagtagtagaattagtactttggtaaaactgttttcaacttttccttttattagactcactcttgttctttccctttctgtctctagctatatttttttttatttttatttttaaaacaatctttcagccagataaatttattgaaaatattgtttcactgcatcattactacaaatcaatattaactatcgacataatatttttctttttaatgtgtattttagaatcgactagaacatgaatagatagaacactcgttaattatataatcaattacaataacttggttgtattttatcatgttttattaataagcgacttgtcgtttgtcattacattttaggaactcatggttagagatacccgtacacgtgatacgtatatagacacaaattgattatcacaaactttatttggttggtttctttgaaagaagcaataatgtcaaagaattgggtaagtggataaaagtgtagctgattcattattatgttcttcaaaagattatgaatctcagttcagtcttcttttacattattatcatatctaataaccaaataatgatatgtgtcattttctcaaggccatataacccttcatttcttagtggaagacctaggtcttccactttgttaataaatttaactgctaagaattcacgaaacctgatctacaaattacaaaccatgtataataattaattagccttttacccataaattgtttaatatatatttcaataactaaacatatttttcaatgtatattttaccaaaaatattaagctttaattgtatatgataaatataaaataggataaattgcggcataaatacataatgttttagtcttttaaattttatatacttaaatattttatttttatttttagaagcaagaatactcaatgttataattctcttacacccattaataacacttctgtttcctcataaatatggacacgtggagggctcagatgcattacatttatttattttattttaaaatttaatttttgtaatatcagaaacaaaacgttacttgtttaaaaaaaaaatgagatagatgcaatacaagattaccatagctgagtgaactagtgcagtatatggaacatgattatataactgaaatgttaatactatgtgaaaattattatgagcattgctatttttttaaaacaagtagcatttaatttcagatattaaaatatcaagttttaaaaaataaaaaaaaaataaatgtaatatatttggtccctccacatgtccatatttatgagttaacgaaagtgataataacagtgtaagagagttgtaatatgaggtattttttcctccaaaaataaaaatagaaaatttaagtactatataaaaactaaaacattaggtatttatattgcaatttactttataaaatataagtttttattgaattgttaaaatttctttcactggacaggagtaggactgaacatttcgagcaggcaactcgcctgaactcgaaccggtgaacccgtaatttttttttaaaaaaaaaatgttcgggcgggtcgggttcaacccggtacccttcgggcgggtt

SEQ ID NO: 39741 - DNA, 1736 bp, Cannabis sativa
  modified_base (1162)..(1167): a, c, t, g, unknown or other
tttaattaaaaagcaaaatttaattaatcacgatttccataaatctcgttgattagcaacgagctgcacagtacgtttaaaaagcacgttaacacgcctatgctagttagggtgtgacaaacaccgtggatgctctagaaatttgctatcaatctgtattggcgcaacaactcaatggtcaccaaatcctccacttttagttcctctgaaaaagcttcatagaaggttgttcactatttcaattcgtctgttagcttagatttggggacgattctataagaaataagaaaagtcagggacaaagatagagctttagttaaaacttacagaaaaagttgtagaacgatgagtatcgtacctaggatttgaaagtccaatgaacaagctgggactcatttcagagggaagcctatgataaagaactagtattctcacagatatgggcagtgtgatgaggtgcttgtttgatagcatgtgcgtttgtacttctagaggtgataaaacctaacctttgtagggtgcccccacatgagcagtgacttcagttcgtaaaaatacaatatctcgtctggggttaagtagccttgccccgagattggcaaaatacaaaccatccaaaaagaagtttgtatgagactagaaggagttggaaatgcacaattccaactttaacataaaattggaaaaaatatgttatgagaggaaggcaggatccacacgagatatatgaccaattccatgctccaaaaccttccacgctttgggatagagattcctcgaggacggacatcctgtgccatataagtttgggaatgtttcggacaccaccatcattggaatacaatgatttataaactttcttgtgcaatgatatactatcttaagcaattttttaataaaaaagctaagaggaaagctaaagaacagttttgattaaagtaagaattgaatgatgtctcagttaggagagagtcaaagttattcttattttataaacatcttcattgttttagaattgtaaacactattctaagttatcatctattaggaatgactcaactagatgtagcatttacaaaatatttatcttacgagatctaacactattatgttgtctaacggatgacaatctattgaggattgtcccattaaaaacaacaannnnnnttagaccaacaatgaagattcaaagttgatgctacataatcaacaacagaaaataatacaggttcaatataaattcattcataacttttggaaatttataaacatttagcaagtaatgaagacatgagaagatacaaaaataaacatatctcaaatattttttaaggttttcaactaagtgatatacaatatcctgtttaggcgagagtcaaggatatcaccacttgaatagagttgttagctcctcaaaaataaatactattttagcaaccttttattcgatcaaaataagaacccaatgttgtctcttttagagagagtcaacgtcattcttattttatgagcttctacaattttattatattttgtaaatcctattctgagcagtcactatttgagtgatcgttattaagaataaaaaatttataataatatttatctttcaaagttctgaggtgttaaatgtctaatgaatataacatctattagggatgaatctcattaaaaataataatcatgaagaaccaacaatggagatcgaatatcttaaaactaaagctcattatttt

SEQ ID NO: 39742 - DNA, 2000 bp, Cannabis sativa
ttaattatttataattaattaatttattttttaaaaaaaaaaattagtttcgccggcgcagcaaaacttaacattaaaaggttcgcgccatttctcaaattggcgtgaatagttttgccggtgcaactatagtgccaacgaaacttttcgcaccaatctgagaaatagtgcgaacctttttaccggcgcattaattattgcaccggcaaaaaaatatcaaagcaggttcagagcggataagggtatccttttacaccgacgtttaacttttgtcagtgcatttcacttatgcgccaataaaaagtcctttaccgactaagatttgctgacatcttttgccggcatagtattgcaccggtaaagctttgccgacgcatttagtgtactttttccagcgcaaaaatgccccggcaaaaacagtttttcttgtagtgcgattgtatgtcactgctataagagtgggaatggtagttatttttgcaactggagtaaaagtctactcaaagtccataccatactgttgtgaaaatcctttagccactaatcgagccttgtaccgttcaatggacccattagacttgatcttgagtttatacacccaacgagaaccaatagcatgtttaccaaaagagaaaagtatcaaatcccaagtataagtcctttgcaaagcatagagtttctcattcatagcacgttgcgaaaggggttaataactacctctctataggacaaaggctcagaatgacaatgaataaatgccaaaaacaaagtaaaagtagcagaataagaagagtatgtaaaatttggttagcgagtagacttcagaatgcattgacgatagtggtgagaagggtccacaatctcaggaggatcgggaatagctgcaggtggaggggggggagcgttttcaggttgtgaagaaccaatatctaatggaggataaatttcaagtttcaaagtgctagtatctaatggaggagcaatttgaggttgcaaagtactaatatctaattcttgagacctatcaacaggacacatgcgagagtaatgaagaggaaaaagaactatagaattagtggatgattcagactcagactcagagaatgggtcaatgtgaataagatctgattttatcaaattatgaggattactaggaatagaaaagaaaggtaaccctcaagaaaaactacatgacgagatacatacaattttttagaaactggatcaaaacaacggttaccctttttcccttccccataaccgagaaacatacaaagagcagagcttgacgacaactttgtacgccctacactagaaagaagcacaaaaccagtagaaccaaagactcttaaagaagaatagtcagaaatacaactatatagtttctcaaaaggagacaaacccaaaatgacaaaagacagaatcatttaattaggtgaactgcagttagaactgcctccccccaaaacaaactaggagcagaagatgacaacaaaagataacgagcagttttaacaatgtgtctatgctttctttcaaccacactattttgttcaggtgtatcagtacaagaagtttgatacatagtgccatctaaggcgagtgaatcgacaaatttattcaaagtatactcaccaccttggtcacatctaaaacatttagtaacatcaccatattgagttttgacataagctcaaaaacgatcataaatactataaaagtcataacgatgttttaaaagaaaaatccaacaaaaacgagtgtggtcatcaataaagaaaatataatatcgagaacccccttttctaacttatctcatctaattatttaaataccaaatttattttaataattataaataactagctatcaaaaaaaacacaatttaaatatatctatttgttgtgttagacaacaacctcagccagcaaacaaacattaatcaatacaccagaaatgaattaatgaattgcagaaaaatataataacagaatttaaag

SEQ ID NO: 39743 - DNA, 1388 bp, Cannabis sativa
tgaattttgatttagtagccttctaaggaagaaaatgaatatggcttcaaagtaaaagaattataggttcatgaaaaaaatccatgcggtggcatatcaatctgaagaaatcttggcttagctcttctacctattgtttattatgcaatttgtttttttacatggaaaaatcattgacatttggtatatctttttcttcttccctggctttaccatacctattatttattatgcaaattgttttttaaatgaaaagatcactgtcattgggaagtacttatcgattaaggacatttggttatgtgctaattaccttaaacttttgtcttcaatttaggttaaagtgaaaagaaggctcaaaatgagagatctacatgaaagagtcaaagtactggataatcgtggagctgataatttgtttcatggatttagacctgttgctactaatgcagatttgtaagtggtgcatttaaaaatgctctttctttctagttcagtcctttatttcttctaattttctcttagatttttaccaagctatttacctagtgtaagatattttctacaagtgtatttaaaatgaaatccccttgtatgtgcttcttcttcatgtgtaggaaggatatacataatgaaattattaggttatatggcatatgtattgcatgagttgggatcaacttgagttcaagtcattctttgtaatgttattgggatcaacttttttatagaaaacaaataaaaaacgataactgctattggttctcattgtataggccataataatcctaaccatgagagatgatagtataattaaatcgtataatttgttcagtgtctgtagtgtgtaggtgtctaaccatgataatagaaccttttaaggattttgttggtgaaagtgaaactaccaccatcatcacatgattaaagacaaattacaaaggcatgtggtttgctctcacaagtctgagattcgagtctctcctgggtatctacatagcaattgctatagtttttcggcccccaaatattgtagggttagacggggatcctagtaaaaaaaattggtcgcagtccgtgagttagtacaaatgcctttcaactcttttacataataaccaaattgataccaaatatctgattttttgataaacctcccatctggttagtgtaccacaggaagaaaagccatgtaggccgattatgactaattgtttagagtggcgtgtctttttatcattggctattagattgtaattagttgtggaggtgacaagttcattctctataaatagagggaataaacccttgtagttcttcctaactgtatgacccaacatatcgccattactgctgtccttccacagtcttctctaccatcaaagttt

SEQ ID NO: 39744 - DNA, 1197 bp, Cannabis sativa
accatagttatggtatattttaacttttctagttatcttaaatcttcattttataaaagttattagtgatcaaggtggtaaaacacttatgagtttcggtattcaatccttattaatcaccatcaaaatatctaactcaatataattacaaatcatgtagccattgtagactaaacattataattaaataactaagctttatttattaagttaaaatatgtatgattgcatgctcagtgccttaattaattgttaaggttaaggaggtaatttaacatacaagtttcaattattgttttttgtttgtattatatttaaagaaaaagtcacacatgatcattttagtgaaacatctctatcacttaatcagtttaccctacttaccaaatattgatggcccatattttttcatcaatttgcttcagtcattaaaatagacaataagtgatcattgtaccacctttaatatttttttgtttattcagatccgatccagttacatattagatattaaattttaccatttgatccgatccaattcatttcattcatccaatcgatccagtatccgttggatgttggattggttcggttatacccattgaatgtttccttcttcaaaaaaaaaaaaaatgctcattgaatgtatttcatgtatatctattacagtaatttagatttatcaaatattttagacctagtattttttgaatcggatcagatctatctaatattttagatccagtatttattggattagatggatccaatccaatccaaaaagaaaagtaaaattttaatattaattttcatatatacatatatttttttaatgtataacaatatatatatatatttttttgaataattatgtataacaatataaaatcaaattactcatccaaattaaatgaaattattaagaagttcgattagatgttggatgtattggatttttggacactccatccagcatccgatccaatttaattggatcttttaaaataacatccaatccgatccaatccaatcacaattggacatccaatctttggcggtcatttataattggattggtcggttgtcattggattagattgatttatgcacacccataattatcacactaaagatacaaattggatagaaacaatacaatcacaatgtgcgaccttatttatttatataacgttttaa

SEQ ID NO: 39745 - DNA, 2118 bp, Cannabis sativa
gttaggcatcattcattaatgagccatcctttccacttcttttccatttttatccattagatcttctacattttgatctgacggtaactaagttttaagtataaaacggtaaagaatccatttttccaccatttttgcctttttaaaaactcaagtttttctgataaattcctatcctgagttttttgaaactttgcatgccctccttgtctttgatattctttctgcgaatttcctcgaacttgcttttcgacctcaagtgttcaaaaaattcatcacgctgttcactccgtctttggttacaggactttccccccacacaactactcgacttcaaatagtaagtgtcccattcttctctgttcttcttccttttttttgttctgggttatgatcgattattttgcatcttgtcactccatttggtttagcgattttggtttaagttttctagttaattgttagggtttaggcacaatataaatttaggtttatcacattctttaaacctctggtttaataactttcatccaggaattgggattgttcttttttgtagaaatgtcccaacctggttcagaagtttattctccagagttcttagaaacagaatatcccaaacaattagccctcccattcaaacctagaaatttctaaccccaatccaaattggagataaatgatgcaaaaattagagaccatttgattaagtcgaaccaggaagaagttaccagtcgttatagataatttttgcaagagatttctgagggcaaacgtcttttttgcgagacgtagcctggcctgaacccataatattagcttctattccactcgtgagactaatatttttacccaaagtcactgttgcttttgaaccaggtgacctgagtttgacattatgtctcttaagcctcaaaaatcaaagaccccacaggatcccagtgttacattcgaggttgaactcattgaatccaaggttaggtcaattggggcctatgttggtggtattctgaagtctgcggtatcaagcagaggaaaggttgtatcataaggtcagtggctcctggggaattcagctgtttccctccagaaagggtaatacgcaaggaatgcaatggacctagcacgagcaattcctcgagcattggttcctggagcatcgagcacatcaaagctggggtggttcttccccttagggattattttaaggagttctgcaactacctcggggttgcccccttccaactgaatcccatctcgtataggatccttgcgagcttgaaggtcctataccatattttaggatgggagtgccctactcctttaaagatagcctatttttacttagtcaaggtagtccttgcgaggaaaaatgctgcatgaggctttaactatctcgggactcatacaggcgatcgtaagattatagttaggttgccaaacaagacagagttcaaagaagacttattttggacgacaggcctctctccaataaatacaaccgcctttcgcatcatacgtaagttccctttcttagaaacttaactttgaaatgtattaatttatatatttaaggtcgcttactaaacttttgtctgtttgcagcggttcctcgaagaccagttcctactcctgagatagtcgagtgccacagaatccagcagagggagcttgtgattgcctcggtttaagctcgacttctactcgctgaatggcctctttgagcttgatgaaaccgtctgcgcgatcgaggaagtcactcatagaatctactggtccatctctcttgatgtccttccaaagctctccaagaacttcgatgccccccagtattgcagttaatttcccttcttcagttaaccgtgccacttttgtcgcctccgtcatgaatctactgatataagctcggagaggctctcctggcctttgcttcacttcgaccaggtcgtctaaatgcaatgggagttggcgagaagaagagaattgtgcatggaattccgaggagaaagcctttcaagagttgaacctccctagtgtcaacttgaagtaccattgttgggcggcttctgagagtgtggcaggaaaaactctgcaacacacatctcctcgtactccttg

SEQ ID NO: 39746 - DNA, 3298 bp, Cannabis sativa
aatcaaatttccaggcataggttggccagcctatgaggaatgccccttggctggccagacccccaaatagccatccttagccgaccttgtcttaaacaaaacctccttggctatccaggatctgtacagatccaaacatgttatttttcaagaaattcaacatgttctttgtgttcttcatgttcttcgtgactcaaagatccaagaatcacaatgaaagtcaaattaagatctttttcatctagaaattgcacattacgtatgctaaggctatcatacagatcaaaatatcgaaaggacaaaaatctaacataggaattggaagatattcaaagcgaagaccaatgttcatgcattcatggtaaaatcaactcaatcaagtataatagtgggaatataaggcttacccactacaggaaactaatgaggaagaaggttggaagcttggatcggcagaacgacacgaaaatccagagagaatggcactttatggtttcagccctctaaagagaaggaggagactcttcaaatgttaatttttggtgagagaaagaaaagtataaagtgaagaggcattccccccaaaagcacttatatagtacatgtgggaccccttcttcacttgtttcacctacaaaacaaaaagacatataaagcagttagtttcctacatcatatgagatcagacagtcaagaaaaatatttcaaaaggctaaaactttagcgacttctattcaataaagtctacatcaattccaatcacaccaatctgactggaacgtccctattcgtacaaacatccgcatagggacatgggggcaaatgtcatcccaattttcccccacctgatgtggcattgcttatgtggccaaaattagcgccatgtggcaatataactcaccaacaagaagaccaagttagcacctcagccaacagggaccctgacactcaaacagggcatcaagtgacagactagcttcctcacagaagctggccttatggtagttcagcctctagataagacatggccagctagcctgccttttacaagtgtttggccaactaggaaagggtgtggtagaattttttgtacaatttcacacgtggactatgagttgggccctaatagcccaatgaaatagttagaaaatatctatatttaagggaattttactcttattattattaactaatttaatatacaaatattttaaggattcagttgtaaattagggtttaggctttcctatataaaggccttaactctaacctagaaaacctaagtctcattctagcctctaagtaataaagctctaagcctaaatctctaagtctgataactctcttcctcactctctctcacacgcccatacaagcattctaaacacttgacatttgccaaccttgattctcactttgtatctttaagggagctatatcagtcccacatatagtgatctgaatattatccctcaatatcaatacaactaaaaaaggagtaggtcattacgcgctatctaagagggccaaacctctacaaaattctgtgtgttctttactttataattctaattgtgtaacacgtggaaaacatcaaattcatacgaccccattgtcgattgaccacttttcaaggtcaaaaagcattatgtgttctatccttaattcttgcattctgttgacattgaaagttaccaacactagctcgctatattggcgagacgaataatgaatgtaagtaataatttgagagacaaaaaatttatagttgttcactccccatgtcgcgatagtaatagagctacgtctacttcaagtttttatttcacatgagaattacaagaaaattgattaagtatgaaagctctaatttctagagagatattctctcaccttatgggtactttttttgaatgtgaaaaatgagttagaggagctctccttttatagggaatgaggtcctattcaaataataatataatattccaaaaaaatatagaaaaatatatttaggatatttttgaccgttgatgatgatccaatagtgaacttgactttgaaggttggtcgttaatttttggagcatgagtcgcgtccgggggacaagcttcgggtaagttgtagcttaaattcataactctctggagaattaaatttggagttgataattttagaattatgattggagtatgagacataactggatagagcattgacatatcttcaaaaatcaagtttactcacattaatcagatcaatattgagtgagttatgattgttttactgatggtttctttgatactagcacccaggttgacatcacaacgcctaggttgacatatgacgttaactggacgctgtatgagtggaaaatactgttggggatgtattttttgatgcttaagtgatattttgacagcacttagtcaatttttttgctcttctcaagctgattaccatttctcgaagatgttgttgttttgctaaattaggagattgagtcaaaactaaccaatttgcaactgtgtcactacgccaaaaaactgaaaaatattaagttgtgaattttacttgtatgagttctagcttccgggatgtcgttttgatacttctaaagttcttgaaattgaggatgaggtcccctacccaatttttgaccatgttggagagaatgctcggaatagaattttcatttgagtgatcgaagttaacacaccaagttgattgtcaacttggacgctaggcttagcacaaggtaacgttgtgtgctgggcttaatattttgccccttcgaattctagttttcttcttgagtttacttgtataattttttttcttggatgacacaataaatgcccaggatacttttttaagaatttttttggaaacaaccaaggttgacaaaatgtcaacctacgcacttggtccaacaccaagtgtaacctgagcattcattggatccagtttcaagccagcaaatggttctgtttgattaccaaaaaataattgtatcttaatctttgaagaaaacagataatatgctcgaatgaattctcgaaaaaactccttggaaatagcccatgttgacaaaatgtcaacctgggtgctgggccagcaccagctgtcaacctgggcgctgggccagcaccagctgtcaaccagggcactaggcccctattctaccctcaaggtttgcctatttctatgctaaaagcacttgtttcctcatttttgatgaagtcaaagaaaattctttggaccattctttagtttgacgcttagaattgccccaggttga

SEQ ID NO: 39747 - DNA, 2240 bp, Cannabis sativa
catcgtttgttacttataggatcaccaaagtttattatgcaagcacatcacttctagaagcatgggggtaattttcatttctttatatcccatcttaaattttgtggtgtctgaattacaccaagtttgtctgctaagaaattaaacttgtgattagctaagcccttggttaggcaataaaactatttgatcactggagggaacatatcaaattttaagtgttttgttgatgaccttatgattagttaagctcttgcctctccttttttgatatcaagaattctagcattcttgtcgattcttgcaaattaagccatgagtaaggccttgatctcggcaacagagtatgtatctttctgtaggcagcagatgtgacaaacacatcatatttaggaggaaggccattgaaaatggatttgatgtgatcttaagctgtctgtttgtgaccaatagtggcaaggaggtccacaatacatttgatcttcaacaaattgtcatttaaagatcctagcatcttggtatttctcagttgagacttgtataggttgacattagcagcattaaaagtagtataatactcatgaatagctttccaaatttgatatgtggtgtcataatcaatcatccgatcggtagttttctcgaaaatggaagaaagaagccaagaaactaaaagattgtcttgttgtttctaatcctcaaaggtgggattgcgatcattatttcgttcacctgctggtgtgagaaatttaggaggaatatgagtagaatcaataaatttatgaaggagactacctttgattgaaactaaaacttgatggcgctagaggaggaaattgtattcatcaagcttgatcgacaaagaatgtgtaaaagaaattggatgactttggtaaggggacctactagtttaggagttgagcggtgttcaatcttgttcctactccattgaacaattcaacatactccattgatggacgattaaagctctgataccatgtgaggttttagtgaaagaagagtgttttgagagataaagagtattttgtattattcaatgaaaaaatgattagagaggtatatatatacgtttgtagttacgaaacagcctctaacacctaactactttctaactaattgtgtacctaacaaaagctaatagtacacaatataaataactagctttctctcttcacaagaacacggccaaacagaacaactactttaattaattaagtatttaaaaccatactatatagtataactaaaatatgtgaacataaattatgcacgtctatatcactactacaaaattgccttttttcaacggtttataactatcttttgtactatttctcaacagttcctaaaaccgttggctatgtgggtgtcataaaaatacagaattttaaatgatagtttataattgttggaaaaaatcattttaaatgacggttcataactgtttgaaaaaaccactttaaatgataatttataactgttggcaaaaatattatgaaaattaaattactttttaatatatatttttaaatatttaatatatataataatatttattttaattaaaataaaaaaataacatattttaataattcacaatatatataatattattctgaacaaaaaatacaattaaaaataaacaataaacatgaatattacaacttaatctttaaacaaatatgtaataataataatctctaaacaaaaaatatgtaataagaatattacagatcttgttcttcaagaaaaaaaatatattacaacataatctctaaacaaaaaatgtctccaacctcagcacagtgatgttcttcttgacagtaatgatctttttcacaataaaaaaactcagctggtcttcaacttgctcatatcagatttcatctcatttttctcaacaaaatagaccaagcgatgcaaaaaatgtattcacatggatgaataaaaatataaaatcctttaaaattaaaacctaatatgaaatagaataaaagagaaaagagtacacactgaaaatccacaaacggagacgacgactcaaccgaacccgtcaaaatccatggattttgttgccggacacgacttgtccgaaacacgagagagggagcaaccccaatgatcaccccgatccaaccctcactgtgcaaagcccgttgccatctcctccaccacccgatgcgcaaagcccgtcgccattgttggaaatattttaccag

SEQ ID NO: 39748 - DNA, 2283 bp, Cannabis sativa
aatttatataaatatcccattattatattcaaaatacttacaccctttaaattgttataaaccatgaaaggcccacatactttatataaaaaaaaacaaataataataataataatactaatatattgtatatgtaatgaataaacaaaagaaaaagtaaattatgcagaagaagacaaaagaaatagtatatggattattattatggaatatataagtaaattagttagttaattattgccacgtgaagtgcacttttcgaagtactttgtcgatgacagtgcatattcttaataattaaatcatgtgttataggattattatttgtattagacgtttgattcatacttactttttgctgattaatcttttaacaattaaaacaagtaatcaattaaagcttgtcaatatttcttgggactttccttttgaaagaatatagacattaagtaatatattttgcagtccatgttttatgattatatatataataagttgaaatttgttgatgaaactctgcagtctgcacaatgtatccatcaatggttatcttagtacaaattattattattatcttttcctttgtatttggagagtgtgttcacaatcacattcaccaattgaatgtgacttgttctgagtatgaaagaaatgctcttcttgacttcaaaactggtcttatagatccactaaacaagcttggatcatggaataatggcagcagcaacaattgttgtcaatggtggggaataggctgtaacaaggcaggagcagttattacagttgatcttcgaaacaggtatcataattcgaaccttagtggggaaataaggccttcattggcaaaacttgagtcattgagacacttagacttgagtaacaactccttcaaggggatcccaattcctgttttctttggatccttaaagcatttgaggtatctaagtctatataatgcagggtttagtggtttgtgtcctccaaatataggaaatctctctagattagagtaccttgacttagattcatcaggattgtatgttgataatcttgaatggatcacaagtttagtctctctaaagagtcttgtgatggatggagttgacctttcaatggggggtttagattggtttgagataatactaaacaagctcccatccttgacagagttgcatatgtcacattgtaacttgagtggtccttttccatctatttcttttgttaattcaacaacatcacttgctgttttagacctaagttttaacaacttcaactcaaaaatacctgattggttggctaatatcagcagccttgtgactttggatctaagtcttgcctctttgcatggaagaataccactcggtttcgcagaactaccaaatttggagaccttacgtctgcaaaacaatgagaatcttgctgcaaactgttctcaatttttcgggggaagatggagaagtataaaatttgttgatttgagtgttaataagctgcatgggaatcttcctacttcagttgggaacatgacatctctcacttactatgatcttagcttcaacaaagttggaggtgagattccaagctccattggtaagctttgttatcttattcggttttacatatcaagtaacaaattgaatggaactttacctgaattccttgaaagaacacatgataattgtcattctaagagtccacttcctagtctagagtacttgcatttgaacaataatgaattgattggtgtattaccacaatggttggatcaacttaggaatcttactgagcttgatttgagctataacttgctacatggtccaattccaaaatctttggagtcattgcaaaacctttcatatttaactcttgctggaaatagattaaacgggtctctccctaaaaggttaggccagctatctgagttgtctacctttgatgtttcttccaaccaattgactggtaacatcactgaaacacattttttaaagttgcacaagttagacaatttacgtctctcttccaattcttttacactaactgtaagttcaaattggacccctcctttcaagctaaatactcttcttttgggctcatgccacttaggtccttcattcccaacttggctaagatcacaaaataaggtccagtccttggatttgtcaaatgctggcatttcaagttccatacctgattggttctgggaaagtttccctaatcttttgtggttaaatgtttccttcaatcatttgaaaggtcagattcccaaaacattcaacatagttc

SEQ ID NO: 39749 - DNA, 2015 bp, Cannabis sativa
gaaatggctcagaaaattatccaattgccgaaggatgctcggaatatcactttgttgaccacagaggccaactttgtgaagtacaagctttatccggcagattttataccaaagcccgtgaaggagaagaagaagaaatctaggccgagccaagctgaggatgccgagcaggagaaagagctcattcaactgaagcatgaggctaagttgaagggaggtgctggagccaaatagtatgctcaagaatatttagagcaggagaaggatgctcaagaatatcagaagtaggagaggtcgcgcaagaagaagaaagctctctcgaccgagcaagcgcgaattgaacatgccatctgaattagggaacccggcgtgcctgctcgaccatctacccctatggagggaaaaggattagccatcctcgtggaataagaagactcttcggatgatgatgctccatctgtgattgtttgggagagcatccctgtcagcgtgcagagtacttcaacttacatttattttttctgagttttatgacttcacatatcttatgtcttcttctaattgtgttgctttatctgtgtagagatgtctcagaagatgttccaggctctaaagaagagagtgggagatagttcgggcctgtctcctcctgccaagaaatcaaagggtggtgagactccgtctaaggaaaaaatgtcgattgacgtggtcattgatctctccgaggagcgactcgctgtggacccttcaacctagaaggttacgaagtccaaaagttcccggggggagttcgaacgggtctgagcaaggtaagactggatctgagcaggttagggctagatccgaacaggttaggcccccttcaacaaccctggtgttgtgcacggaggccaggagaggcaaagatatacttcatcactatgtggcccgatcgcttcctgaagtgagtgaacatctgttcggggcggatagtgaattattcttagaactggtcctaggaggagttctgaaggagatttctcgagtaagttccctctatcctttttctttcattcttctttgaatagttcggattttaacacatttttgtacagggtggtgtgaaaatggcttatgcctactgccgagccaagtcagctgctgacaagaatcttgccacctccaacacgatgcaaaggaacatggacttggcaaagaaggacgctgaagaggcacggacccaactcgaggtcatgaggaaggaacttggggaggtaaacaaaaaacttcttactgccaacaccaaggagctgcaagacatgccttcgaccacgcaacttgaagcggacaatgttttcttatcccaagaagttaccagtctcaaggatgagagggagggtctccggactcttcttaacaagttggaggaggatgctaaaaacaagaagaccagggaggaggaacttgtggcaggggttggaggactcaagaaagaaattgagaacaagaagtctaaggtggaggagcttgagagggagttggatgtcttggagacagctggtctcgaggttttttacgacttctggaaggccaatcccaaagggaattttgattacctcggtgcttccaaagatatgtatcttatttattgcatggcccaggcggccagtgaaaacttcgaggcgaccacttccactactcctactgaccagaaaattgacgctccttccatccagactgatggtcctccagctccttcaaacccagttgatccataccaagagcctgggactcctgctgtttgattgccttctttttatatttcttttttatatatgtttgttcggccagtaggccttcttttgagataaggtgaccgaccaagcagtctttaaacttggaatatatttttcatttttcagacaattggctgaccaggcagcttttaatcacgggtttacatgctttgttatccttaatgaatttcgttccttgttatgatcattgtgcagctgtgtttgttttttttttttttt

SEQ ID NO: 39750 - DNA, 1469 bp, Cannabis sativa
tgaacaatggaagtattagaaatgctagggacaaggaattgatccatagcatcctgaaggctttggatggacaggttgttgagagagggaatttcttcgaatggggttgagttagacaactcaaaaatacttttcttataaaaggacttcacaggagctcttagcacatccttatagctaagagagagggtgagcacgagtatcacagaaatgaaggaaggactcacatcgattgaatgtgtgatcaagcttcccacagtgatagcagtagttctggatgccttcatactggaactttagccatttagtgagggaaaggttacgaaagtggacattcatacccttacacaggggcttggtggtgtcaaggagaacacgaatgcgcataaatggggtgatagagtcatacagagaagggagataaacttcaataagatcccctatagtatcagcaacaaagtgagccaagccatgggaccgattaccaaaagggatgaagtgcacttgcatccaggggggtatatacctaagctgactagggagaatggtgtcgaaaccatcagggatggcaaagagcatcaaggcacggtcaaaatgccaaggctggcgttcgacaactctgcggcaatcccctttgcagccaaaggttgccaagaataaaccaaaatgatattttgagaaagtgaaggggagacaagctacccaagcatccttcatggctttgcaaatccatttgggtttaattggtttaggggtaaggactttcacaacaaggcagaaggattgaggttgagtttcaaagtgtatggaaacgtggtcgaaatcgtgaacgagagcttcgtcaagagtgagattaagcgagtggggaggaagattgtatgggtgttgagacatagttggggataatagagatggagaatggaggagttgacttatggcagtaaacagggaggcatagaaaaaaaaaacctcaaaatataaccttaaatagacatagaggggaagataatacctgaagattttcgacattggaaggtgagaagatgctaccgtgatcctagctggtggtagcccaaatctgtaggaggtagtttcatgatggagatacgccgcctcctaagtgtatatctgaggacagtgatggttaataaatgaggagggagaggccaaggaggaggagaaccaagagttctctggtagagcattaaatgggtgttttgcctgaggtttttgcagagtatattaaataaggagtaatgattatttggggaagaaggatacgacaacaagaaggaaagggcgaggatggcatcacgaaggatgagcagggggactagaagaaccagacgaacaaaggggctggaggaaccagaggagcctagagtaggggtgttcactaagtatccgatccaatccaatccgcacgatccgatccaatccaatccaatccgcacttgcgcggattggat

SEQ ID NO: 39751 - DNA, 4115 bp, Cannabis sativa
aattgataaccataatcatctacactgtctttgttcttcacaattggtttccttattaaaaaaaaaaaaactgaaaaacgattattaatcgtttgctttatcaatgaacccaggccaagaaaagctaccctaaatccaccaaaaatctctatcaccgaaacccaagccaagaaaagctcgcaaccctgtcaaaccaacctccgaaaataatatcgagaaacataggccactatgagaagctcagagcaaaaatagaggaaaaagaaagtgttttcttattaacttgaagttgaaaataataggccttatataggcacgagtacaatggctaacaacagattaacaagttggcatgaaatagtgtaactgaaataactaactgatcctaacagcccccctcaagatagagtgtaaatgtttattacacccatcttggaaacaatgttggaatagggagttggtagtaatggtttggtaaatatgtctgccaagttttgttgagaagagacatgaagaagttgaatggagccttgctgaattttctctcgaataaagtggcagtcgatttccacgtgcttggttctttcgtgatacacggggtttttactgatgtgaattgcagcggtattgtcacagtataggttagctggttgtttatgggagacaccaaaatcattgagaagagcaaggagccatgtcagttttgaagtagcattagccattgcgcgatattcagcttcagccgaagaacgaaaaaccacttcttgtttcttggatttccagaatataagtgactggctaaggaagatgctgtaacctgaatcgatcgacgagtgtcttgacagctgccccagtctacatcaataaagaatgagacctgaacattatccctgcacagactagtttcaacaaagcatgcaggttgggtgctgcatcagatgggaaaaaaagaccctacccaggggtttgtttgagatattgaagtatcttgttagtggcctgcatgtgtggaacccgaggacatgacaagaactggctgagatggttaacagcgtatgtgatgtcgggtctagttatggttaggtagatgagtttgccaatcaaacttcgatagacagaagagtctgggagtaggtttcctttgtctttactaagtttgagatttagttccataggtgtggaagccggtttggctctcagatatcctgtgtctttgagtagttgtaaagtaaaaggttgttgtgaaattgatatgccctgtgaagttcaaccaatttcaaggccaaaaaaaatgaagtttgcctaagtcttttagtttgaacttggcatcaagagtttaggtgaattgtgagatggctagctttttgttgctagctatgatcgtgtcatcaacatagatgaggatagccataaaaatggatggtgtctttttgataaacaaagagttgtcagacaaggactgggtggaaccatcgtccatcagtgttgagcttaacttggcataccattgcctcgaagcttgtttgagtccgtatatacttttgtttaatttgtaaactgtatttaggggagcattatatccaggggaattttcatgtagacttcctaatgaagatccccatggaagaatacattattgacatcaatttgataaatgatctaattattaatggcagttaaggccagaaacacttttcgagtgttaaaatttgcgacaggtgcataagtttgagagaaatcaacacctggtttttggttgtatcctttagccacaagacgagctttaaatctttctacttctccagcttgattgtatttgactttatacacccatttacaaccaattggtttgtggtcagggagtaacttggtaatgatccaagttttgttcttttctaaggcttgtgtttcattgtccattgattcaagccaatatttaaattgtgaagcctcaacataattttgaggttcagtttgtgtgtatgctgcaaggacagcagccctaaatgttggatgaagcttgatgtgagacaagaattgttctatgggatgttcagtggaggccacatgacacacatagtcttttaagtgggtaggtttggtgactggtcgacccgttttagtggtctgaatgtcacgagatgggagtttattggaagtggaagatgtggattatagtttattttgtgttattgctggtgcaacaagttgctgacatgggatgattgtttgtgataaacagtgatcaatctcatttgaggaagtggtggagagctaggggtagtcactattgtcaaaatttaggtaagcatttgccccaagtttttagcagtatgactatacggtaaaaactttcctgtgcagctcacgcttcaatttagttgttgatgacttagtggtacgatgtcgagaatgccatgcttgtactagaattacatttcaaactcaaaaaataattctcccacttttcatattttcgcaacatatcccaacgataattttttttacaagaaacattaaattacaaagaaaataaattatttacaaaagaaataatctaaatatttacatagacaaaaataaatacattacttgtagcattataataatacttggaagctttgatatccccatcttcatagtgggtaagttctctatacttcctcttgcaattttctccttgaaatttgaaatttgatgaagtatttagcacttcttcttggtagttttttccatggccaaaaatggcattaaatcattaggatttttgagtttttgataaaatgtgagtgtttaacgattgggttatgtagcataggctatgggtaatgtatttttttggctctggtttgatgaaattttatgaaggaatggctaattttcaaacttttggttgcaagtgttcttgagctctggaagaatatctagaacatggataattttgactttccctctcttttcttgctttgattctcataaaattgagaaaaaggtgtttatgaagatagtatgtaccctgaaaaaaattgttgaccatgtattgtgtgttagtggttgagatttcgggttaccctttatttcccttcaagtcgtgacaccaattcatggggtcgaggtggctaccatgagatgccctgagataaatccttcgggggtccgcctcgaccgcttaaaactttgggctataccccgagataggccatggacaattggggttgaccgtcccaaatcaagggattaaacgataataccctaagataggggttgttacctcaagattagggtgtcggggtacaccccgagttgggatgttaccccgagagatgggtcttggggtacatctcgagcaattcattttttttttgaagtggaccgagattggttttaggggcgcactaccctgaggccaccatgtaggggtcggggtgtaccaccccgagaccacctcatggggggttggggtgtggtgcttcgtgacgatcgtaacacgacttcatggtttggtgacgatggtctcttgtctacttattggggtcttacatatatacacttcatgtattatttttgctttacacacttagtaaaattttaaagtgtgtaattgtcattgttgcttcaggccactttgtcacttggaaccatggttgttttggcccgactgtttggaggttcggggtatactccaaaattaagcaatctcaaggtaccccgagattgggatttgtgagtgccccacctcgagaccaccatgtggttgtcgagatgtcacccctgaggccagacatctgaatgtactaaccatagtggttctttggcactctctccctttatgaagaaagaacgcttagtcatttttccttctaggcaagattcacaaactggtaattcacccaaagttacatttttagatggaccacctttggttaacctgtgaagtctatcatagcctatatgaccaagacataaatgtcatagatgtgttttatcttcattatcaatcttttgctttttatggtttataggtttaacaacgttaaaaagtttgttcataagtgcaattggtacatcaagtcttaaaatattaatccaatgctccatgtgagcaacacataatt

SEQ ID NO: 39752 - DNA, 1555 bp, Cannabis sativa
  modified_base (1485)..(1505): a, c, t, g, unknown or other
ttcttcctcaacatccaaccagcactgtgaatggtggaattttttttggaacctgaaattgccccctaagataagaatctttgcctggaaagtgtttcaaaacatacttcctactgctgctttatttaaaaggaaggtgttagactcaggggaatgctcactttgcacttccaattgggaatcaattggccatgccctcttttgttgcaagcatgctaaggacatttggaaactttcaaagtttcagattgattttagacaagcaaatagcatgtttaatggtgattatttgcaccatttgtctgctacacaccagcaacatgaattcgagtctctcttgtgtgtgttgtgggggatatgaactgataagaatagagttgttcatggtggaaatccaagacaaccagctgctattattcagtatgctacccgattctatgaagacttcaataaactcaaagctccggttccacctgacgttgttatcagcaatcaagcttctgctaggccaggttccattacaaatcagcaggttcaaaaatggaggacaccgcaaattaatggattcaaattaaatgtagatgcagcaactaatttggagcacaaaaagatgggcattggtgctattcttagagatcaaatggtacagtggttgtcgcactctcaaaagcagtacaaggatgttttatatcgaatgaaatggaagcaaaaacgctctttcatgctattaacagggttttgcaatcacaatttgctcttacacatattgagacggatgcttctctagtctccaatgctttaaatgtattagatactgatttatcatgtttttctgatcttattatggatgtacggtgtcttttatcttttttccttcaggttttagtcacccatgtgaaacgaactgctaatcaagcagaacatggtttagctaaatatgctttagggttggatgatgacattagttgggtaggagaaattccctatcctattttctttgttgttgtaaatgactttaatttataacaccagtgaactttctcaaaaaaaaaaatattacttataaaattgtaaatatatggttataaacttacaaatttgtaaacttcagttacgaaagaaatgtattttataattttgtgaactttatcaaaaaataaactcagatataatctaggataagttgaaaactattcttcttattatacattaacggaatataattttaaaataattttaattgataaatactattttttataatcaaagtactaaatatagtctggtataacttatcgaaattagaatctctaatgcatataatgagatatgatctataaaactatgtaaaaataaaaataaaataaaataaaataaaatacaggtaaaaattaaaatatagtgtaatttcctcatacgatttcacctcctccataattttatatctttccaaatttcgtattttagtgcatgtttggcatcatnnnnnnnnnnnnnnnnnnnnnttttaaaaacagaaaattgtttttaaaaataatttggcttgtttggcctt

SEQ ID NO: 39753 - DNA, 1442 bp, Cannabis sativa
aatccaacatacatgatagtaaatagatcctagtaaaataatttccaacaaaaatttattcaattcatattcaacattacataaacaattatgtatcttataagacaaatcgattctgatgcttcataaagcacccttaacacttgttaccaacgagctccatatgtcactatcgttgcccgatgaagtaatcgatgagtaagagacctatctgcgatttcaaagtgagtaattactcgttctcaataatagtaattaccgtatctttacctcaattataattgagccacaagcgataataattgtttttcatatgacatgcttagcagtgtaaatagcttttcttacctcaatccaatatcaagtgtgcgggttgacctgagtggaactacgctcaacgatctcgggtgctatgtcacaacaatgaaacttggtaaacaacttaatcacgcaattggacaatcctaacccctactgactttgaaatagttaaaaacatctttaaaataccccaatccaagctctaaaaaacaccccaaacaaaaccggtttcgaacgaaaaactagggtttcccctgctagcaaaccggttgaccggtttcacagtacctgtagaacctgttaaccagttcttgtagtagaatgggaaactatggtttttagaaccacaacctcttcaaacctgctcaagccttccaaaacaattctataaccaaaatacaatgtatacaattaatcaaaactcagtaattctccaaaaacacaaattcaccattaaagagtgacaaatgagttcttaaactcaattcttcgaattcaagacctagcagcctaagtgttacccaatcctgggcgaggctagacggtgatgaagacaagttgcaatttttctcttgtgcggtgagaagacgaaggaagaagctttaagtttcttgaagttgttcttgatttttctctcttgaactttttcaaggagtaaaaaatgaaagtaaaagtctaaaggagaaagaagggcctttatataggcttcatttaattacattcccctaaaaaaataattaaaggggaaattgattcccaattagatcatcatgggaaatggaaagagcaaaaaaagaaattatgggggaatgcagtcgtcagcatgttttcccacaaaatatactttaaaaactaccattatcggaattgacatttaatgtttagttgaagagacaaaagtgtgatcgttcacttcggcacggtacagtcaccagagcattgaccacatgatcctctcatgcttccagcacccgtacaggtatcaaaagtccccatccaaacaactattcatacgacaacttggggggcaaatgttatcccaaagtttgcgcatctaatgtgacacttacacgtggcatactccagccaacacttttacctagcagaaaacctccgggcag

SEQ ID NO: 39754 - DNA, 2056 bp, Cannabis sativa
gtatttattcgtgttaggaataattttcaagtgtacacccaataaacatatttttattattgattcctttagtggttgatgataataagcttattagttatacactttttttttttttgcttaaacaaacgagatttagatagtgcacatcttatctctagttctttcagctaataataatctttaaattcatcgattgagatttatatacagtccttaaaatggttatcagttgaaaccgttcccataaaatacctattgcttccaaatgagtaccactgcataagactacacaattcctttttgaaaaggagataaattctctttgtatataatataaactttaataataattaattaagcaagataaaaactttacatcacattactattattaatataataatgagaaatgtttaactgctcaaaacacttcttcacactaataataatttattaataagggacaatccccgatatacacgtttgactagattgtataaaatccaattaaaacttgtatttttggaggatgaaatgaaagtggagtggagattatacaaatatcttacattattaacttcttaattgattttcctaactatctataatcttatgactcactcttccactttaattttctttggggtcaatctttagaatccgtacaccatttcttacatcattcatttaattaacttttaaataaattaattaaattcccttaatatatgtttgagtaaagctgcttttccaaatttgaaaaacaaccaaaactttatgtataattcagagtaaggagaaattaatccagaaattaaggtttgtatattgggatcaaaaatttagaaaatattcaaatgtaaaaattataatctcaacactattatgaatttgatgtaaaattaatctataaacagatagcaatagagactaatattataacaaaatatttatacagtaatttttgccgctaaaaataaataataaaaaaaattataaccaaaaaatttatataaatatctaagtgtacaaaatgaataatataaagatttttacaaaaaaaaaaaattacataaaaatttaactgcaacaaagtgaaatatataaatatttatgcctcaagtgacaagtctttcaataatatttatattatttatgtgacttgggttagacaactcactaataagcatattagttagttatagtgtaataaataactaggcatctaattatcacaggcaatctttcgaaaattcccatgtataaattttgatatgaaataattataataataaacaaatattggctataattatattgaccaagaacaactagtaaacatgggatgtctgaactccacgggatacaatttgacttggttgtttatttatttataccatacacatgtttttgttttttgttatttttggttaaatcctaaattattatatgttctctattaatttaggctctcaaatgaaaataataataataaaaatatatctatatatctgtatcaaagttataattatcttcaataatgataattttaataaccgattaaaatgaactacactaattaataaaagtagaataatttatggtagaaatatctaaatttaattttcgattacaaatacatatttaaatttttaatttttgataataataatacttaaattatacttttaaaatttctgtaagtactttaagtgtcaagttaattgtcacgtgacaatatttgattggtccaaattattaaatttttattttttatttatttactttaaatataccaataaaaaaatgacacgtggatattactctaaatataacttaaatattattaatgtcaaaaattaaacttaagtagctataccgcaaatgtggttatagcatagcctaatggttccacagttctcctcacaaacaggaggcccttaattcgaatattttcttctccaatataaaaaaatatctatacaccaaattactctaaaaaaaattacattttaatataaccttatgtacctgacacattaatgcagtagag

SEQ ID NO: 39755 - DNA, 1238 bp, Cannabis sativa
aatggtacctaagcttgcaggtatttatatatatacatacatcttatattaaaattttctttttaattatataaatatattaaattttgtgttatatataggtttgttaagatgtgggaagagttgtagattaagatggattaattatcttagacctgatcttaagagaggaggctttacagaattggaagaaaatcaaatcattcaactacattcacgtcttggtaacaggtaacaatatataatattagtgttactaaaatttatatttatatttgtgtattaatttttggtgttatatattattattaggtggtctaaaatagcagcccattttcctggtcgaacagacaatgaaatcaagaaccattggaacactcgaatcaagaaaagacttaaggtacttggtgttgacccaataacacatcaaaaaatatcatcatcatcagaaacaacaacaacaactactaatgatgatcatgatcataagaatgatcaagatggtcagtctaaagtagatgatgatcaagttgcaaaatccaacaataatgatgatcaacaacaaataagtactattactactactactagtactagtagtactaatattcatgatcatagtaataatgatgaagtaacaaaatattatgaggatgttttgttggataataattttgatgatcaattgttggagtttcaaaagtttgattttagtacatggatgaaccaagaaattataatcaacaacaatggtagtactactcatgttgatgatgatcagagtagtacgtacttggataattcattgttctcatgggaagtttttaataatcatcatcaactcgaccaagatcttctcttcttcaaaaattattaataccccaattaatatatatatatattttttttacatgtaatttatgtttgaaaaaattacttcatgatcatgatatatatcgtgagtgtaatatatttatatattatataatatgtgatcgtatatgtttcaacaaactttgatcctgtattgatcatatatagttttgtttgattatcgaggattttttattataattattgaaagtgtagttttaattactatataaagtaaaaaaaaaattaattaccataaactccatatttatttatataataaaaatgttaaaaatcattatcaaatctagaatatgttagaatgttttacaatgttctaagaaatttgtaagaaaaatcaagaa

SEQ ID NO: 39756 - DNA, 1909 bp, Cannabis sativa
ttgtaagagtatatgtattggcttgtcagctacaaaattattaagatagaaaggaattattctaatatttttctgctataactaatctctaaataggatattcttatcagtaatggctatctgattcttttgtaatttgagagcctagctctactgggaaatagagaggaccaagcctctcaaaagcttggaacctatgctatcatttgtgtgtttctttcactacgataagaaaggaacaccagttttattatttagtttaggctttttagaatttttggtctccgaactatttgtggctgccacgtttatcagcagatttaatgtcagggacatgcagcgcaataaaatccattacttttatatgagttatttataagtgctacaaaaccaactacaaagggagttttcccttagtttaatatagtataattccaagcttttctatcaatttttattttccccctctaacaaacaaaagaagttacaagtcagtgtctctcctgattatgatattaaaatgctgataagaacatttattctgataagatcatgtcttgtgtggtcatatttgggtgaaagtacaatcgcagatgagtaggatgaaatactatggaaatattaacagcttagtttgcaggaaaagcctttctcttcagagtgtttcagaaactgttgttcaagagatgaagaggcttctcctaatgcatcctatgcttgttatagctacaaaaacagtcagcttgggggacagatacgccaatgaggtccaacggttagttctcgaaacttatatatgtttttgttggatgcttctatatgtgaaactaattgattttcactctgtacttaataaatacattaagactgcagactggttataaacacataatccttgccccaaatttactataacacaattagcaaaccattgtagatgtggcaaatggtgttgccttctgatgtaacaaatttcttctgtacccacgtggggagtttgtgcacctctctcgagggttgaatattttgttgatcgataatgagagatttgtagggtctggttcaatatcatagttgtaacactaatgctaagaggttagctgtaattactaattcgatatatttccaaacatccaaattgaatggcaatagcaattgtgatttggagggttgattcatttgttgttttactttcacttatgagtttagcagactggattaatgagtccagctctcattctttgagttagtctaaagggaactcctctaagggcctgtttggttagcagaactggattggattatgaagcaaatgagagaaaatgatttgtatttttagatgatcaattttagtatatacaaagggtatatataatacattgtgaacacttagaacactagagtaaatgataaaacattgtaaatttacacctaatttacagctagcttgatttcctacactccccttcaagctagatatatactaaacattcctaattttgaacttagttccctaacattaggatgatggagagctttggttaagatatcagccgcttgttgtctcgagggaatatgcttcaaggtgatgatcttgttttcaatcttctttctgatgaagtgacgattaatttcaacatgtttggtcctattatgatgaattggattctttgctattgctatggctgattgattatcacaaagaacatctattgggccttcaagtttgattctgagttcattgagaagacgtttcaaccacattccttcacaaattccatgcgctaaggtacgaaattctgcttctgcactgctgcgagctacaacttgttgcttcttgttgcgccaagatacgagatttccccaaacgtaggagcagtacccagaagttgatcttcggtcagtgaga

SEQ ID NO: 39757 - DNA, 3320 bp, Cannabis sativa
  modified_base (1401)..(1406): a, c, t, g, unknown or other
aaaaaaaaaaaaaaattaatcagtggtgaagaatggtgaagatcattcgctaaggacagaagattattatactataacgttttaaaaacaaatagcaaaattacaattatgaatatataaatggggtaagaaaattagttgttgccatatatttatattaacacatgcaaaaaacataacttatcttttacaatcgacaatatatcaattttggtggctacgacagcagaaaaaaaatcaactttcccacaaaaaacgaacactacaactcttgtttaacatatataattgggggagcacgtatataattgaatgtacatacgtgtgccttgcggccaactttgaatggaacaataaaattatggtaatgacagtaaaaaaaaagaaggaaacgatgactgatgaaggtgatcagtagggctgggtcggcagttattagatcggaaaaagaaaaatatgggatagaaaagttgtgaaactctattattcctgactttttttttcacattatacctagttttggattcggaagagctccagatctgtttgttagagatctatattacatgaatctgaatttcgatattaggagaagtcgttttgattgaataaaatcgaaaatcggtgtttaatttcagtttcgtctcagtttttatgatctattttttgtcaatttttgtttagatcgttccgtgtctttttttccagtgatatttgccggaattaatagtggtcttcctcttgatgtagtttcatttcggttgtgttgctgatttgaacgatcgaagattgttgttgttcatcgttctctttcgtgtagctgaaggtataaaggatgtggtatttttgtaaatatttgtttgtgagttgtataatagtgtaaatggttggctcagtatattttagtaatttttttttttttgtatttttctgttttttttcccataaaagaatataaatatatttatcgcacttataatttgatattattgatgactagatataaactatcatattttctctttttcttttatttttaaaataattagttcattgctacaacaaaaagtcattagttcactgatataaaatttgttattacttttcatttttattttaatgtattaattatgtgctacttaattttaaaaagattatttgacaaaagctttcattatataacaaatttctctttttctaactaattttttatataattattctaattttctaattaatatacaatatttctattttgtattaagtctattaaaataatatgttaaatctgatatgtttgttgatgcttgatggaggagtttaaaggttctcctaataatattcttcatggttctctttctaaggattgatagaggagtttcaataataataataataatnnnnnnaataataataataatataatttagttttaattataaatttattattatttagatattttataattaaaatttaaatattattcggttgtagattcgaattcaaatttaatttgataatttaaaaaatattttattaattattatttcattctactttaatattatttataattattaaatatatatatttaaaatttaaatttgaatttgaattattttttcattttataattttaattcaaacatatataatttaaatttaaatttgattatatatttagttatgatattgttttattaaattataaatacaaatttgtttttaggatgctataaacctcttggttataatcgatatcaatttaaaaatcaacaataagtaataaatatgttttattatttttaatctttttgaaaagaaaaaaaaattacaagtgcaaaccttaattttataaagtgaaaggtcaaaaaaggatatcacatatagttaaaagttttaagacataaatttttgaatatgtaatttaaatttttgtataaatagttttaatattttgacaaaatgaattgtttaaaataattttttaatatatattgattaaacaatattttatttatctatttatctcgattttataaattaagaattaaggtagcgatgtgacaatttaaaaatattttaaagtattttatatttttttttccaattttttagtcactttttaaaagttatattaactttgaagtttgatataattttataatttaataattattaaataaaatacaaccggaatatattaactaatttaatattaaaaagtaattattttaaaataatgaaaccaaatagtactaatactctgcactatttcatcttgaatttaagttgttttgcatattagagtaaattcaaaatataaaatagtacattctgttttgtatacacttacaataaataatgaatttactccattgaattttcccttgtatttttttcttaatggaaatgattttcccttgtattttgagcatatgtggtgcacttattgattttattcaataagcattggtacgttccaacctggtttttttctttaaaatgtacaacactagaattcatagtggaaaatttatttacttcaaaaaataacaatacttataatactaaaaacactaatgtggaaaacaataaagtcgttcatcccaagaatttcgactactctaatttacgtggtgaatgcgagttaatcaataaatctgactgcaaatctattgatcaactcacatgcaaatctattgatctaactcacatccaccacataaatcaaaatggtcgaaaaggagggttctttggaaaatacaaaaatcaagaggacataaaaattggacattaaataaaccaaatataattataaaaataaataaaataaaccaaatatagctacatctgattggcatagacaattatggttctagaggcaccacctactagatcattaccccataaagacaaaacaatttgtttgtacacaagataaaatgtggataaaatagatacttaaaaatccttccaagctttgtgattggttcattaaaggcttggaccccatcacaaaatttccccaaacttcatctattcttgaccactaatctctctcttttagtttccgcacataatatttactcacaccagagcttctcctcttggtataaaattctcaagaagacaattcaaaaactgtgaaccaaaacccaagaaatgctaatggcagccaccggtagctcaagcacattactaagacccaccccatttcttggtcaaaacagaggaccaagctccaatgccttgaaagatgttgtcccaatgggaactggcaaatacaccatggtatgtttttatattatatgttt

SEQ ID NO: 39758 - DNA, 1355 bp, Cannabis sativa
gaattaaattgcttcaaaattaaaataaaagtaacaattgcataaagttagcaacaatttttgctatttctatcattttggtgattttaatttccatcttttttttttttggttaccttttattttctaaattatatttagaagatagttatttttatcaatttaaatctaaaatatcaagatctaaattaaatagtgacttgatatatattaaggtgattttaaatttttttaaaaaaaaaggtaacaagctttcactaattatggtctaaatatagaaatcgactaattatagtcttttaatctattattttaaatgataaggtcaaaatatactatattacatctacttcaattagatgacatatttatccttattaattaaaatactatattttaataactttatttgtcatttaaataataagaaaattcataattaatcaaaatattttgtaaagattctaaccataatgtttaattttcatatttggtttaatttataatattttattgttttaaattataatattagaaaaataatataagaaatatttttcttaaatattttactattttatcttattaattatttaaatcattaaaatattattgaaataacctaagattatgatagtattttttatcacaaccatttataatatttgttacatatttgtttatgtaatgccttaatccttaaggacgctacatttgtgcgtttataaaatagtttatagaaataaattaggagtttagataaaatgcgatttataataaaattttactaattaatttaaataataaaattatggcatagtccttttttacaattggggatttcctattcaaaatattacaaggtatgccattacagtattattataaaatatatttaaaaatttagaatatttgaaatacagcttcttataactcagcaccacttgcctgacaagctgatatgtacatttgttggagaaaattcctaactcatagttgaccaaatgtctctacatattacctgcaacacatagcacccgtgagtcacaagtgataacaacaatcatataatttaccacacaataacaattagtagactcacatcatcaaattcaattaatcacacattatctgattatagaattaatgaaacaactaaaatacaacgagaaattaacatcacgataactataaaacaaatataaataaattataaaataacaaaaaataatcaaaaaaagaatctcaagataactataatataactataaataaattataaaataatcaagaaaagagttattgttttattgaagatgtattttgtaaataaaaaaaagtttaaaaataaaaat

SEQ ID NO: 39759 - DNA, 2144 bp, Cannabis sativa
cccatttgtactaagacggtcctggaaactaaaatcctagtcgggaatgtcaacttgggcgctggggaaaaccctaggtgcctaggttggcttctagtgtgtaggttcgtgtcatttcagctcctggggcttggatttgcaccatgacttcatggcacagaatgctgaaagatagtgagttggatccaaattattgaggtctgaactttcatcttggagctcccgaagttaacttgggcgcatggctagggtcccctccaaggtcgactgctatgacttgggtctactcaactcagtgatgtcatgtttcttgccacgtgtcaaacactgatgtccacgtgatcaggaaaagttttcgggttaacactcttaaactttgtcactaaaaagttatcccctatacttatatgtgtattaaataaaccttttatattttagacagttataaaaaattagtgttaggttacattttgtcaattttctcacttatcttactaatgttgcataatattgtctaatttagtttcttacctaagcaaactaaaatagaaataaattttacaaaattttattttaatttaatcattaatatatgttttaaattttttctttgataatgaaattagtttcaacctttttttttttctttttttttttagaaagtttagtttacaaatataatttttatgtcaaaataggattttcattataaatttgaaattcgtttcaaggtttttttttttagaaagtttagtttacaaatataatttttatgtcaaaaataaaactttcattataaattagtcttgttatattttcattaagtttcattttaaaattaattacctttttttttttcaaccacataagcaaatacatggatatattatttgtccaccatgtcatactttaccagcccaatttatgaaaaatttaactgaaatcttaattttttactatttataataaagttaatggaacatttttaacaatgttaatattataagagatacaatcatataagtaacaaaattgagggggacaaaatagttttattttgtaacaaaaatcttaatttttattaactgataaaagtaagaagatatttttgacgacactaatattacagaaatacaatcatatataagtaacaaagtttagagatgagagataaaataatttttttttaatattaattgaatatatatatatatatgtgtgtgtgtgagtagtgagtgtgtgctagattaatagtgaaattatgctttgtgcttcttgttgtttggttgggactttgggagtgtttatatgctatttttatagtaattcatgaaaagaaaattaatttataagagagtcatattgctgctaagttatatataggcacatatagagaataataagcatgaacgaactatgatattagtaaaaagtaattgatttatatgctattatagatcgatccttacaaaaaaaagaaaaaaaaatctattatagaaaaatattgccctaagaatcacagttattattagacttgttgtgttgttgatcataaaatataatagcataggaattaatttagccattttctccttggcctacacagtcaattacatacacacattaatatatttggcaaaaaatacacacaatatatatatatatatatttcatttgacgatatgacaattttcacatgcaaaattcattaaatttccattatagtgttgactaacatgaccaaaatctcatgaagatcatactataaatagattcaggcatggtattaattaattgatttaattatatatatatggtatgtatagatagtcaaagtacatgacctgttttaccatttgaatcgatctgcatttatttaggtatattctctttcattatatgtaattttaatctcttttcgatatcgtttaaagcgaaatatactataataataactttcaaaattacatatccttttataaatatacaaaaatttacaattacataatgttgcatctagctcaagtacaatcattttcaaccagagtatatggatatattttaggcgatgacatatttaatagtggaaattaagacaaatatgatattattttataaatgtggttaaaaaagttttgtatgga

SEQ ID NO: 39760 - DNA, 1301 bp, Cannabis sativa
ggtgtctcaagggtttcccaattgtccaattgggacagtctataacacccttaatgtatgctgatgatcttgtggtgttccttaaggctgagaataatgtgctagattcttttctggagtccatggagaaatattgcagatggtcgggacaaatgataaatgtgcagaagtcaaaagtctatttcttcaagaattgctcgaatgcttgccgtgaagatttcctgcacaagctgggttatgaagagatgaatcggggagaaaagttcctgggaaatccttttcttatcaaaggtagaggctcagtggattttgacttcattactgaaaaaataagtaagaggcttgaaggatggcgggctaggcttctttcgcaggcggcgagaacgattctagtcaaaaatgttttggcgtcaataccgctttactctatgtcgacttttcttctcccgcggaagactactgatgccatagatggcaccctgcgaaaattctggtggaaaggaaatgttcaagaggggagattccttgccttaaaggcgtgggattcgatgtgcaagccaaaatctcgtggaggcctcgggtttaaaagaagtgcggatatcaatttcagtttaattgctaaactgggatgggtcatggcttctaatactcagtccctttggaagtcggttcttttggaaaaatattgtcgacattctgatttccttactacggagattcctacatcggcttccctggtggcgagaggcatttgggcaaccaaagacttcattgcggataactctatttgggcaattgggaaaaattcacaggttaatatctggagtggattatggtcgagtaaagatggagtcttctgtgatagtggagatcttaatccgatgtgcaaagttgataccactgttggggatcttatgctgaactctggggagggatgggattataatcagcttgtcatttggcttagacctgaggcgattaatcgtttggagggggtggactttggcactttactgaatgaggacaaactgcattggaagtcttctcctgatggctcctttagtattaagagggcttattgggacctcaatcggtcgcgattctttgagaaagatgttattggtagtcgaatttggaagttgaaaatgcatgaaagagtgaaacttttcctctggaaattgtattagaattctctccccttcggttgcaaatttagagagatatttggctctcatccaggcctttgtatgttatgtggggaaagtgagggagataccgtgagccattttgttgccaattgt

SEQ ID NO: 39761 - DNA, 1627 bp, Cannabis sativa
gattatggttttgttaactcttattgggaaggttccttttcgttacctactatctaccatttggaccttttttgttctgaccatcgagcattgaaagtagttgttgctctagttaatcaatcacctccggaaaagttcaaatcttacttttgattcgagaaactttgttgcaagaggaggattgttgtaatatcctatgattagtaaaatagattagcaacactaattaaaataaattaactataattgagtaattatatcattatacaattaattatatgaaattatttgggaactattgtatttatgacctcatatatgagttaggggcatttttgtaattttgatctgagaaaggtaaaatcatatttttaatatttattgtgctaaaagattatcttattatataatatgtttattttgtctttttgtaggtaatttttgataagttggcacggtttagtcacaaccgggtattttgggcccgaactaagttcgggatccaaaattatttttgtgtgtgattatgttatagcacaatttaattaaaaatatctgaatgtgtatttagaattgaaatataaaaaatgcccttaattgccatttatgtggatttttgtgccttgagggcataatggtcatttgaccaaaatgtgataaatatgataatgattcatttttaaaaaaattagaaagaaaatattattttctttgttcttaaagccccaaccgaccccccattctctatctcttttaacttttgcaaattttgaatttaaagaagaaaagtgaatattgagtaggaatttttggtgttcttacttgaatctgactaagtggtgtcaacacatcacttaggcataaaaaaaaatacaagtctaggatattttgacactcacccagcgtctaggttgacgtcaaaatgtcaacctgtgcactaggtgtcaacatgggtgctgggttgtcaacctaggcatagagtgctggacaactttcagtaaaatggccataactcacttaatattgatttgaatgacacgatttaacttgcgttttgaaactatttcaaagttctatcaaatcatgtctcacaccaacatcgcaattttgacgattttaagcctgaaattcatcctcaacaaagttgcaagttttccaacaaataatgcaaaaacaatctgatggacaagattcaaagttcaaaaattgacgattttcaccaagagtcatttttcaccattggatcatcatgaatcatcatcagtgaccaagatcaacccaaattaattttttttcatattttttttgtattttttaattattatttaataggatataattccttataaaaagagagctcctctagctcatttttcacattcttctaagtccttgttaactcggacactagtcctgatgacgtggagatcaatggttgacacgtggtaagaaagatgacatctcagagttaagtagtcttgagtcatagtagatcgacctgggatgggtcactagcctgcacctaggttgactttggaaactctagaatggaagttcagacttcaataacttgaatcaaactcattctctttcaatattatgtaccatgaagacatggagaaaccta

SEQ ID NO: 39762 - DNA, 3389 bp, Cannabis sativa
gagttggccaccgctccactgttgtcatagtagagctctaatagtttgtttacttctagaattacttccagttcagtgtcgaattccttcaaccaaaccacttctttagcttttttacaagctgctatatatcggcttccatggttgaatctgcgatactagtttgcttaatgcttctctagactatagctccaccaccaagagtgaatactaacccagatatcgagtttcgactatctttgtctaattgaaaattagaatagtatatccagtaggatttaactctcttctggaatatacaagcatgagatccctcgttctccgaagatacttgagaatgtgctttacaactatgcagtgttccaaacctgaatttgattggtaacgactaacaatccctacaacataatatatgtcaggctttgtacacaacattgcatatattaaactctaaattgctaatgcataagggtacttcctcatgttctccatctcctgaggagtctaatttggacattgatcattgcataaagtaatttcatgtctggacggtaactgtcatttcttggaattctccattgagaatctttctagcaccttatctatataagttgtttgggaaagtgctaatatttttcgctttctatctctatagattttaatgccgagaacacaacttgcttctcccaaatctttcatttggaagttttcggctaaccacttatttacgtttgataacctttccaataagtacaatgccatcaacataaagaaccgggaatactactatattacttttaatgtatttgtatacacaggcttcgtcttcattttgtttgaagccatactttttaatagtcttattaaacgtaatatttcaagatttagaggcttgcttcaatctataaatggatttaagcaacttgcaaaccttttgaccttcccctggtagcacataccctttctggttgttccatataaatggtttcatcaagaattccatttagaaaagtaatcttgacgtcaattttcatatatcataatcataagtgataactatggggagaagaatacaaatggatttaagcattgctgcaggagagaatgtttcgtcatagtcaacgtcttcttgctgtgtgtagcctttggctacgagcctggctttaaaggtttctaacttccctttagtatttatcttattcacaaaaatccatttacacttatccttatgggtgtaacatcttcaggcaggatttcattatcgaagagtacttttttaattaggcgtaatttattaattattgttaattaatttttaaattaaccacaatatttaataataaatctaacgattaaaaataaataattatatatttgatgtaactattaaaataatttcaaaattaatgaagtattcacatattcttatatctatactattatttttagaaaaagattatatatatttatatataaatgcccatgattaatgaatgaatgaagatgcatgcaaatacaattggtgtgtctccttcttaagtaattgaccatatatattttagttgcggctggtgtgtcacattctcattgtcgatatacctatttagaccattttataatgtagttcaaccatctcatttgttacaattattacttcttcttctacttttttcactataataattgatacttcttcttcttcttcttttatgttttttatctgaatataatttattcttcttttgttaaactattactaggtgtgggccacttaattattgagcataaatgcatgagaatttccattaatcaatttggatctaatcacagaaacatgtattgtgaaattggcctatgaaactccttatttttacattatgtaattattaattacatgaaatactattttttttataaaaaaaattacatatttacgtttatttatttatttttttatatttttatagtcttctatagaaataacaagaaactacataaaagtaacaaaaaaaaaaatatccaaacaacaacaaaaaataacatacaaataacaaaaaattaataagaatataacataaaaagatcgtattttctgtaaataaaatcataaaaatcgtaattttatttaaaaatccgtacaaccatatttttataatttttctcttgttaattttgtgtattggtataataatctcattaattagctacattgttttgtgtcctcaatattcatgataaatatataacaaattgatttttgatattttgtctagattttgaatgacaaaatacattaatattcattatgcatggaatgagtagtaagtaatttgttataatagttattaaattaaattatgttaaattacactaaaaataataagatctcacattaattaataatgagattggttaatagtttacaaccacttgtgttagaaagtcccacattgccaatgtgtggaaagataatagaatatataagaggaatgagttactcctcccattgccaattggttttgagatggaacctcattcactttatatccccaaattctaatatggtatcagagcaaaacaccgatccgaaaagtagagcaaaaagagccacttgccaatgtgtggaaagataatagaatatataagaggaatgtgtggaaagagctaactttacaaagtgagttctaattggttgatcaaatagtatcagagtcatacacttttaaataggaacagatgttactgaagtagcgattgttagattaggcccaaaatagactactatagagtgatccgccatggacgtgggctctaaaaggagatatatagttaagatctcacattgatcactagtttatgagatatatgcaattacaacaaatcgctaaatattgtatatccaattgtgattgaatctaaattaaattcaaattaaaccaataaatatacttgaaatacatctaatggatatgaccgatctaattagatcagatcggatcagatagtaaaatttaatatggatcgaatttggatagatttaaaaatattagatgtagaccaacttaaattattttttgtctttcaatttacgtaactaaaatgtaattttaaagtgaaaataatatttttttttgtcttagttagttaaagagatttttaatttaatatttgaacaagttttgaaatttatttttatttatttaatactaatttaaatttaaagtataaacaggttttacttaactttaaacattcttaaaaatttagatattttaaaatttaaaatttatatttatattttattattttaaattttcacaatattttttttaaaaaaattaaaatatctaaactacccacgaaaacaaacctagttacaaataatttta

SEQ ID NO: 39763 - DNA, 1725 bp, Cannabis sativa
gtaagggtagctctcaactaaaaccctaacctaaaaatagtagaaacttgcgtgatgttatcttagttctagtaccaagcatagtctccaaactagaaatcaagcttctgtcctctaggccgagagcctccatctcagagatagtctggtccttcacctggagggcggcctccaaggtcttcacctgctctcgaagagacctcgaggacccccaggagttgtcatgcaaaaagcctagtttcataaattcctggcagccaagtaaagtcaaagtaagtgtgaaaacataacagtggctggccagcctttcaacaagggtgttatggtcagccaggtcccttaaagacacaccctttgtcagccagccccatgcaacatcactttagctagccaacctgcaaaaattgccagaaaaatgagcaaagttagatgtgcaactcacgatagacaaatcccaaagtcgggcagagtagagccagtctgactcactttcaccaagctcttaaagctcaccatcattcatagaaggaagggctctctctaggttgaactctcctagctagaggttcataaatcatgggcttcccacatggagcaggtcctgaaggaggaagagggagagatgattcaacaacatctctaccacaggtggtttgagccactttggcccttgggtgacccaaaggctcattagaacgtttgccagcaagagtcctcaacctagaacacaaatttgctaaaagaaattagcaaagttagaatgcaggtcacaaatattcaatgcaagacaagagtgtaaaagatggtgtaatcaatataaaataccatcatccttacaggaggaatcatctaactcctcagcaaccaccttgcccttacccttacttgtatgtaaggggcgagtaggtttcgtatagctctagcctctgggactaatcaagagaagcatcaccaactgagcccttgtagattaaacgccgacggagggctgtctccctcctctctaaattttgagctattcgagatagaggcttgtcatcatccatgttagggacctatccatcactagaacaaactccctctacagctaaggctccatttgcaccaactgatgagccctaggcacctattactctaggaggatgagggtacaagctgtacttcaaaaagttagccacactgatcaatttgattatgattctcttcttcacagaaagagataggatgagattttccctatccctcatttgcaatgtagggatggagtacttgtaaaaagatactcactggaaatggcagtgtcgaaccctgttaacatcttgagcaattaagtagttcttgcatactcgccaactcttgacatgggtgtgctattagtgtcacccaaccactgatgtcctacttgactaaagtagaagtatcaagacttgttctgcttcataatagacttgaaatcaaaatattatccaatctcatacagagtgggctgaggccagcctagctccgcatataaaacaaacattgccaaaaggtactttatacttttaggggtgatttgtgttggacatagcctgaagtaagcaggtgtgtcttggaagtatggatgaagcggcaacattgcccctactcaatgtggcattcagaccacacaatcaagtgttatatataaatactatattctatatattttttaaataatgcatcaaagatattttaaaatattat

SEQ ID NO: 39764 - DNA, 1053 bp, Cannabis sativa
atgtagttgcatgcaagtcacgatacaattgattctctcacttttgatcaatgatatcccaaatctccttatagaaagacacatctccattctttgatatcttttgttttcctcatccatagcaccgtaaataaaatttcattgctggtgtcctctctccatcaactattcttaaaacatgcataagggacttttgtaattttaatagaataaaccatccagaaaaaaaaaattcgcatccattatttttttttttacctctattccttcatgtttctttgcccatagacgacttgtccattcttttgaggcaaacatcatttgtaatggttgcttcaatctatatatactctctaaagtcaaaaaaacagtcgcaaatcgagtggcagttggtcgaacaatatctttctttacaatttttcttgatcaattcaacacccattgatgattgtggataaaattgctaactctttttgctttcaggaaagcattcttgtgctgtggcaattcaccaatcttcccaagcatcaaatctatacaatgagcaccacatggagtccaatacaaactttttttcttctccattaacaattttctagctaccttgtatgcacttgcattatcagtgatcacttgaacaacaatgtctttcccaatttctgtaacaacatcaccaagcaattggaacaatttttgtacatcttttacaaaatctgatgcattagcaattctcataaaaatagtctcatattgattgttaactaaaaaattgatcaaactcttatttttcatatctgaccaaccatccatctgataataatgaaactcttgtttttgtccatgtggcttttatgtcactcacaatttcagatttttcttctcttcttcttttagtatccaagtcatcaactcatacattgtaggagctttcaatcctcgaccataatttctagcgacacgctgttagggtttataaaacactcaagaaatatataaatcacagatctaaacatattcctaaagtgcttcaatatagaaaaccctaaatcataa

SEQ ID NO: 39765 - DNA, 2461 bp, Cannabis sativa
  modified_base (916)..(920): a, c, t, g, unknown or other
cttttcttgtggggcacagagctaggtaatggagggttctctctggttttagaaaaccaagacaagtctgaattttcattagaagaatcaatatcaacatacttgtcctcagatgggttaggaggagtaaaaggataatctttctccacagtactcttgtcaaacaccataacattgaactgagaattcccttcatatccaaacactaggagatctccacagcttaaagaacagtgttgtgcaaatttatcccaacccttttctatccataccttttcatcactacttattatcaaccctacctcccatgttgatccacatggaagcttaagaaatacttgacttgatgaagacccacaatatttcacccaaaatgtctttggaatttgctgcacatggaagagagaataaaaataaagctattataaaatcaaacatatgacaagtcaacactaactttaacatccaaaatcctattgtcaatatacaaaagtaaagccctaatatttgggtgtgcatgcataaatttacttactaacttgttgttcaaaagagtttgttgaagaataatcttgtaaaaatgagggtgaacagtaacacaagccattcttgaacaaaatcaactctggtaaaagcttgctttgctttaatttcataccttttcaactcaaactttgactaatctgatatatccaagccacgtgtcctcgttttgacaagtcacacgtggattctaaacagaaaacgttcttccttggaagtattccgaaaacaacattgaaactcaagtaacaagacacgttttttttatctattaaaaaaaaaaagaaaaacaagccacgtttttgatgtccataaaaagtgtcacttattaattgccacgtttttttttttttttttccatttaaatataaannnnntttttttttccatttaaatataaacattcctgaaaggaaatgaagtataaaaaattaaaactgaatgaaatttcgccgcaaataaattcaaaactcgataattatcatgttaaattaattaaagttttacacatgaattaattttttatttataaaaaaattaaaaaatatttttaacaagtgatcttgattctgcacttataagatgtgtagctcttccttaaaatatttttggtattacttctgccatttgagtaatttttttccggcaaggtgaattattttttaagcttttagtcgccttaaattgtgtgaaattaatttggctctccaaaactaatttggaaaaagtccaaaccaacacaaaaaataaatctaagtctcttttgtttaacctaaagacattcagttgttgtgaatcctaaacacgagtcttgatttaagaaactctatgggaaagaagatttaaacactttccctcactaatatatatagatcttccagcaaaaacatacataaaaacacatctacatatataaatataccattgtgttatatatatcttccaccaactttctttagctcctacataagcacttacaatctacataacagcaggcctaattagtctagaaatggtaacatttagcaaaatgttatctttatccatttccttggtaaccaattcaaacacacaagaatctccaggcttcaaatggttctcttttgcaaatctaggccatccaccacttaaaatcagtccacctgaagtactacacaaattcacagaccacaatttcttcccaacctgaagtgttacaactccagcctttccttgtagataactatttgcaaaatcatttggaacacgctgcagaaattcaaatcgacagtgagtgttgagaataacaaacttctactcacatttcctaaatatacagttatcatttgtaaaatcctaccttgaccttatcagaagactgccccaataccatttcaaaactgggattagattgcttggttgatcctccaaaagatttgctgtctcttgaagatgaagcagcgccattagcaacctgtccggttgagtgatccttggattttgcaccatatttcatgtttccttcaacatatgatatatatgaacaaagtttataattactaaatttattaagatcataatttggagtcatttactaaccttcgcattgttggttgtttcgatccttgcattctgtttctcggtgaatggaaacatggaacatcatttcatttatgttagtgagttcaaatatacaaacatcgccaactttcaactcattctcttcaacaaattcctgccaatctcttctcgagaaagtaggcctcggtgaactgcatctatttctagtttttgtctgaagtttcactagccaagtcttcctcatacaaggaacatacaaagtaacatcatgacaagaattatcatcgacatgtcttttccaaaattctgttagtattgcctaaaaccattaaacaaaatgaggaaattagaaaagact

SEQ ID NO: 39766 - DNA, 1663 bp, Cannabis sativa
ttctgaccaaaataacaattaattatttaatcaagtcaagtgttaattagtggataagcaggagcgattccgaacacgcgcacacgcgctctttctggtgaatgacgtaagataacacacacaacacaaggagacgagatagactctttcgtcctttcccggcttttttcttctcctctcgtctccatttaattatctttttttaggggatcctagtcttcataattaaaataaataaaaatgtccaattttattgaatttattttgggtgaatcgtatgttatttatttggaagttttctgaggctttccttttcttgttttgtttttctctatttccaacttttatttttattttttttttgaaaaaaattacaaattcaaaccaattaatttcctactagttttctgtttgggggcaattcgtgtgacagtggttttctgaggctgtatactagttatttatttgatttggctgataattaattaatggtaaaatttaaataaataaatatatattaattatatgatactttccagttttgcttagtatttctcagatggaagtgtaatctgtaataattcctaattaaatgtgagggagatatatgttttaatgtgggatattattcccttttaccataaatgtgtggtctttgacagttaatttttatttgttttgtaaaataaaaaaatattgtgacagctttttttttcttgaacaaactattattgacagcttatgtatgagttactcaccaaaattgattgaaagataagattcatttcaggaaaacctttggctttgaaagggaaaacaacctaccttactggacaaacaaaaatgctgtattttatttattactgtggcacttggatttgttttaattatttgttcaaattttatgtaactaaaaaaagaataagacattgaaaagagctgtgctctatctattcatgttattggtcaattgaaaagttttaattgaatttgatatatatttttaaaagtcagacacaatttttcaattactatgtaaattattatagcttgtaattgtataatagtggattgtacagtagatagatattattttatactaatctagataataagtagtataaaatatatattatatgaggtgggttcaattgtgggcaagtgttgtgcacgctccgttgagttgaatttcgtgcgttttatgtaattaagaagagggcagatagaaaatatgttggattggttgaagagaaattgttatttaattttagatataataatttaattgagaatagtgaggcgtttctactttctactttgtagcttacaatttagcatgcaaagaaaatgcaacacttgtacaaaattatctgaagtgcataacactcaaagcactacctgaaatgaataaagtagaatttcagcaactgccaatacttaaccaatcaattccttaacatattctctcctattataaataacaacaaataaatcaaataaaaggcatacttattaatagggcttaaattcgtgagtcccgcactatattttttttgagtaatttgcagcaaaaccccctcaactatcaatttacttgcaaaaaaccatccaacctcatattttggtgggaaaaccctccaaagtactgttttgtttacatttt

SEQ ID NO: 39767 - DNA, 1925 bp, Cannabis sativa
agtgtttctaaacatctatagaggaagagtctgattttgattttgaacttgactatgagtttattgaattatctaaagttgctaagatcagtcacttgtttttgtgtgtgtgtttttttttatttatttattttttttatattattttgttttgtttattacaattctaatttaatagtattttatttgaattgtttttttggtgtttgttgttttgagttgattcgtaccttttatatttattttttgtcttttttttatttgttttttttttgtaggggaagggtaaatttgctattgtgattattcctattgggttgaaagaagtttttggtgatattgttgttgaggtttgtgaactttttttttttttaattatttcttttattattttttgttgttcgttctggtattatttttgagttgtttttatgtgtatttgcatgattattttctcaagactggacatataaatatagactagacatgtaaatttgcatgttgttttgctattaacgatatcaaactattcttacccaatccaattgaaaatattttctcaaactgtttttgatcacttccttcgaattctagagtatattatttatttccaagtcttgcatgacctatccttgagggaagttcaacaacctaatgagatagaattgtgggtatttgttgctggcaagttttttttagatttagtgtagaggaatttaccttagtcacaggtctagattgccacattgatctatattttttttagttcaaacaggataagaatatgctagttgaatattttttaaagggtaataaaaaaattactaagaattcgattcaagttgcctttattgctaacaacttagggataatgataatcttgcagtcaagttggctgttttatattttgttcagtattacttgattggaggtcctcctagaaaagttgtttctattgatgaaattgatactgtgaatagtggtaccctaaattgaaacacaatattttggtagtattcccacctaccacattttcacgcaaaaattgtcactctttttggaccttttgtcagtgtacatttgtgccgataaaagtaaaattttcccctaaaagctattttttttttatagacttttgtcggtacaaatatgcgtcgacaaaagttttcccccccatatatttatttacgtaacagaactcctcccaaaacattttggaccttttgtcggcgcaataatagatctacaaaagtaatatttctcgtagtgatttagaattttctatattaaagtacttttagaaatatgattagaagtgtaattatttgtatttgttgatagttttataaatctttaacagacactgcttttggaagcactcttattcccacctctctaatctggcattttttaaacggggtaggcctattgtggcccttctttatagttcttaatttcctaagaaatcctaatttacttaggccatatgtaacctcgttgaggctataaagttataatgattaagcaaaatgttgtacttttattgtgtcaataccatattcgcatgtacatatctatttagttttgttgatttgctcatggtcacttcatcttaatgttaactagaactagagtgtaaaatgaaagtggaaattgcattgcatactcacttttttatttttactttcatttctatattctttaagatacactcacttttattaataatgtcctcattataccatttagattaatataaatcatgtgctacatttaagtagagggtaagggtatattagacaacctactggctaaattttaatgaaatataatataagtgtatttttgattaatggataaaaaaaagagtatccttcaacttatctcaaaatgaaatcctattctttaaaattatttgcatctat

SEQ ID NO: 39768 - DNA, 1469 bp, Cannabis sativa
tgcgctatttttattagtaatccctattaatggattagggtttcataagtatttttgggtaacgtgcctaattatttaaggcgttataattcaattctttatagaaatatctgttatttgttgtagttgaaaatcaccatcatcaattgagaattgattatcaattttgctgctttgtgaagagatgttggatgtttgtccagcatgaatcagacccatcatagcccatgcaatttgtaccaaatttgatccacattcttcatcaaaagatacatattcctacaacaacaacaacgttatcaagttattatataatattctattaattaattttattttacttgattaatatttttattaccttacttaggcatgaaatataactttcaccctaaccaccatcctctctttgtgttccaagtaaaaaatcaacagctctacaaatagtttcactagtattgaatgtctccccagcaactgccaagcttttaaatccaaaccatatcccatatgtaaaacaaattctccaatttcaaaatctgtaaaattaaaaaaaaaaatagatactatatatgttattattattttaattattatatattattattattttaggcatgctgtttattttatatcctctatatacatgcttcttttaccttattttaaagcactttgtttacctaatattgcatgactgagcgtggtgttattattgtcaaaatattgacttaaaaagagttttctgtggtatatgcttcacatcccatgtcatggacaaagtgctcttcctgttaataaatgaaactcttccaatggaaaattttattatttttattattcaagagcattcattaactatcactcttaatgacattatttctaaaaggcaccattgtgcctactgtttagcactcttctcgatatcatataagaaaaacttttaaaaaataatttttttagaaaatattgctaaccaattgtgggacgacacctataaaagtaactgggcaaaagtggtgcccaatagcaatgttgtttctacaatatgtctatagacgttctctttccctcacttctcacgcaaaatagaagtccaataaatcatcaattgtttttccttaatttaggtaaatagaagaaattttaatatttttatgcaatattcaaattataaaaaggtaaacatcatgccttaatttaggtaaacaacgtgtctaaataagacatgttgtttaccttattttaaggcacgttgtttacctaaattaacacatattgtttatctaatgaaatattgtttaccttattttaaggcacgttgtttaaaattttgaataaattattatttgtttttttaaatgacattacaaattgttgataatgtaatgattatgaacatcaaagtgtcaagaaacaaagattttttttttaaaaaaatagtgtttaaaacttattattatactttt

SEQ ID NO: 39769 - DNA, 1453 bp, Cannabis sativa
  modified_base (1424)..(1427): a, c, t, g, unknown or other
ataaagtttctttttcagtagcggttttttcgtttagagtaatagtgtcctctagaatttttaagtgtaattgtaatacaatttgtaaacggctagttcataggtagaggcaatgaaatataagtacataatttttcgaaggtcttcctatacccgtctccaacattgactacgtttttctttagaaaaaaaggtcctcttgtggaccactacatattttgacgttattgcgcagtggacccataacttgccaattatagtaatatctcaacaaagtgttaatttatataaaaaaaaataattctcacagtgataaataaatctatatccgttgatattacgtgtaatgtatgtttcttttaattaaatttaatttaataacattaagtgctgtatgtttaatttttataattaagtattgtatttttattttttaatttttgaaataagatttgaaattttgatctgtgaattttttttaactattttggttacaaagtacaaatctttttcatcaagaaatcatacattgtgtattctaaagctattgatggaaaaaaatcttctgtcacctgtcacattcctgtcccttcaataaatagctatcacgtgtcttttttttttttttcctatttaaccgattcaatgttcaagattcactctgttagttccatctcttcttctctctcctcataaataattatttcctaattaatgagtatattaaaaaaaatacatattctacgacatttaatatattattcaaaaaaattatgatatattcttataaataaagtttctatggtatatgcaaatgcaattttaataaaatttatttaaaatatttcatagcctaaaaattaaataaatggctactataatagaaaattaaatatacaatccatttaatttattattattattatatatatacaatccatttaatttattttctaaaaaaattgctctaagatttatttttttttttttgcaattaaaaaaattataatttatatacatgcaataaatatatatatataatcagacctaaatttttattttgtaaagacttaattattgtaaaaaaatatattgtatttatattaactataaataaatattacaataaagtagaatttcaaaaatatatataattaaaataagtttaattaatttttcaagccttaattgttataaatatatatttgtgggaactttttatttattattttgatgatataattatcaaattaaaaatgattttattctttttaaaaaataaatgcacattttttttttcaataggactaacattgagtatttagagattgcatggattttttttttttgaaactggagattgcatggatttttttttggaataattacataatgcaccattttttttgtaaaatatttacatnnnnacgttcaaagaatatttttttttaca

SEQ ID NO: 39770 - DNA, 2826 bp, Cannabis sativa
tttttttttttgagagaaagggagcccgctaaagagaaagaaactcaattagatcacaggggtcatcgcctatccagattgcaacttcatctaaccccaaagcccgatgtgccagcttatcagcaagaacgttggcaccacgattgacatgagagagctaggcgttagggataagagataaagcttccttaatttgacaaataagatctccgaaaactgaaacatcttccttattattagttagtgcatcggtaatggctttacagtccgtttcaacctcttggaccaagaaatgttcgtcgatgcaccaacgtaacatagagaggagggatttagcttcaagagtagcgacagctcctcccccgatataaggctgggctagggctgctactaccaaaccatcgctatttctgataatcccgccaaaacccactttttcgatattcttagagattgttgcgtccacattgagtttgaggagacccgaggccggaggagaccgagaaaccagaatatctcgcgttctggagatgggaactggagccgactgggaatgttgaaactcagctaggtaggagtgtgccaggtcgaggattgcgtgagtctgatcgtgagcttggccttttagcgctttgttcctgttaaaccaaataaaccaaggagtgcaaacaaacaattctacttctttcttggttagggaggtgtatatcatatcagctatatcatgaaacataatctcagaagagcaagaaaaaaatgtaaggataaaattgcgtacctttccagactcttctaatgctctgacagaagaacaaagcatgagacaccgattcttctgaaaaatccacagcggtcacaccccgggaagtgaataatttttctataggctaagttttttgtagtagggagggttgagtttgtggctcgaaaagcaaagtgttttaccttaggcgggatattaaggtgccagagatttttccaccaaggagaaggagaggaagaggagggaatatcagggggagaagtagaggaaaggctaaggtgataaccagatttgacagagtacactcctgattttgaaaattcccaaatctgatcattaggggaaggggtaagagggaggggaatggccaaaatttgctcaaccacatgagtcgggtagcatctgtgtaaggcggctgtatcccaagtcatagaactagtgatgaacgattcaactttgtcaggaacgggggagatgggggtaacatgacgaaagcccgggatccaatgatcacgggtagtacaagtgttctgccccattacctatttttgaaataattcctttgtgcagcagctcttttccccagcaaatgctacgccaaacaaaagatggagagtgaatagggaaactatcgaggaaggatgagtgaggaaaatatctagcagacaaaatttttgacactgttgagtttggttgttttaagatgtgtcaggcttgctttgcaagcagagcttggttaaaatgaacaagagaacggaatcctaacccgccatcccgctttgacttgcagagctttttccagctttgccagtgagtcttagggcggttattttcgttgacaccccaccaaaaattggccataatggactcgagagaatggcaagtggctgctgggaggcgaaaacacgccatcgaataagttgggatagcctgaataacgaatttgagaagagtttcttttcctccttttgaaaaaactttattcttccagttgtgcaggtggccccagaccttgtcgtgaagataatgaaacaattgcttttccgatcgcccaatgtgctgggggagtcccaaatatttctcgaaggaggaacggaccgggatgctcataaaatcagaaattaaggtttgatctctgagctcgacatttggggaaaaatagagtgaggatttttggaaattcactttctgaccggtggccctctcatacgattgcaagacttctttgatggtgttacacgagctgatagaagcttggcagaaaagaaaactatcatccgcgaacagaagatgtgagattgcaggggctcgtctagcaactttaaagcccacaatggcattgttcctttcttgttggtgcagaagggaggagaaaccttccgcacacaagaggaagagataaggggaaaggggatcaccctggcgaatgcctctagaaggaatgacattgccaacaactttgccgttaaggttaaattgaaacttggctgtggaaatacaggcaaagatcaaatgaatgaagcggtggggaaattggaattttcgaagaatggccacaatgaatggccattcaactctgtcaaaagctttggccatatcgagcttaactgccatccatcctgatttccctctggatttaagcttgatggagtgcgcgacctcctgggcaataatgatgttgtctgaaatgagtctaccagggagaaaagcactctgattaggagagatcaagctgttgaggacgagtttaagcctattagctattgtcttcgagataatcttataaacaatattgcaaagactaataggccggtactcagaaatagatgtgggctgcttgactttagggattagagtaatgagagtggtgttcaggggagccacatcaccgttgccattgagaaaacttgaggcatctttaaggacgtcatttctcacggttgaccaggtagctttaatttatttttcagtgttttaggaactaatttctcctttattttttaattgtaatcggtttaaattattgtgtgttacttgtttatattcattatattttataaccg

SEQ ID NO: 39771 - DNA, 1249 bp, Cannabis sativa
aagcagttgagaaaatctgacctgaatattatgacacaaggcaaagttttgactcctagcttggtgataaagaatggtgcattctgcgtttcagacaagactgttaataaatcatggcacaagtcaccgaaacacttaagattgtaatgcaatattacaacaaatattcaagtatactgacctcagcatcgagcttgatgaactttgtatcgagatacttagtagcaagggtcttcaaatgcttatccataatcctagaaagaagcattttaaaaactacatcaatttttgcaacacaaagcttgagtggggagaaaagagagacatagaaggagagggtggactttacttgcagcggtaaaaatcatggtgatagaagtggcaaatcactttctcactcccggtaacttcacccaagaaatctccttcactaatatctctgtattctccatgaccttgcctcttcaatgcttctcgcttctcaacttctttctaatcaaaacaagaatcgaaaaaagtaaatatgtacttgtgaaatttcccattgaactgcaaatcacagatgaaactcactaggtggaaactgaaatcaaaccttaagcgcggcaatcctatcagcatgcaatttttccagctcgggatcctaagcaagatcactcagtccaagttaaacataacagataaaaagacatcatttttatagcgtggggagttagattggaagtctaagatacttacatccatcaactcatcaagatcaacctcctcgttgacagagctcgatgtctgggccttttgctgagaaatcacctcctgcaacattcacaaatctacacatgggtacacattcaccaagcaaataatagaacagtagttgtaaaatagaacggtagcaaacagtaaaactaagccatctcaaccatggtttttcattttaattttggaaagacgaaagaaatacagaaaaggtagtggtcctttcggacctacaatgcagagaataatctcaattcttgcataactctctctcctgtcctataactatcactcacaatgactcatctaatcctttacttactgtcttctaccacatagtatgctatattggggtctaacattaccagcggaccgatcagtttcatggagcctccagcaggttgcatttacaaactactaatctgataggatattgtcatagaaagagagctaacagtagccaaatagaagaaacaaaacaaactggtatata

SEQ ID NO: 39772 - DNA, 1427 bp, Cannabis sativa
aagacttgccaaatcctttgtaataattatttgtttcgtttgaatgaatatgctttcaaaaaaaactgtttaaaatttaaggaatataagtaatactcatataagttaatgggcatgattttttcatggctaaaatagatttttatccataattttatgaatagtgtcgaactactactactccttttgcaaaataatttggtctctttatcattatcattatccaataggttattatttaagaaacaaaaattaaacacaaaaatcttcttttttttcttaacaaacacaatgaattctctcaaaaaataaaagaaaaatacactgaatcttaaattggtaaaagagaaaataaaattctgatgtgaagaaatttgagtagttttatattcttaccaaactaaaaggtccaataaaaatgtgataggtagctagtactatgggaactatagaagtgggacagggagaatcaagctgcttataataaataattctttatttaataaaacaataataagaaaaaggttgtcacttactgataacctctcaagttgccaaatcatttgtgtatataataaataaatatttatatatatgttatgtagagttagtacaacacattcagatttgtttttttactctttatattataagtggttggtgggcccatatcaggtcagtgctgtgtcatttacatatttgggtgtctgaaaacacacttgttttcgaaaaaatcaggttttttgggcaatataaagatttgtaaactaaattataaatatatgtatggtgcaagcatgggttttacatttcctaatatatatgataaggaaataatttattgatgctctcaacctcaagtagggtccattttttgtagttaaaaagaaagaaatgcaagtgtctttctcatattatcaaaatgaaatacaaagggaacaatctcaacaattaaataatctttatatatataaaaatattagcattggaaacatttcaaatattctcaccataatttattttattactttttttaaaacctttgggatgatggggttgtagatctcgcaaagaaatcttattttgtaattttcttctctctttctttcttttgggattggccctttcacatggtccataccattataaatcacataaaattctccatccaaattaagagagagagagagagagagggagggagctttttttccaagggttggacttgtgagtgtcttcccaataaatagaaaccaactattaaaatgttttactaagcaaaatatatatatatattaaaatgttctccatctacccctcaaaataaaaaagaaaaacaaaaaagaaaatgatatgtgtccttaggagtgttcacaaaatatccgatctaatccaatccgcacgattcaatccaatctaatccgcaa

SEQ ID NO: 39773 - DNA, 1425 bp, Cannabis sativa
aaagggtttgaaattttgagagggtatttttgaggttttggaaaagtggtcatatatttttaatgttgaaaagtattagtttagggaaaaacttatcccctaatgcatacatgcattataaatttaaattttccatttacaatcatctcagtcgtctattcaatattcttcattctctctccaataagtaagtttggaaaagaaaggtcttttttttaatatgaagataataaacgtttctctcttgctctaaaataatatttaataaatgtgtaacaaccaaagatttgtctatatcctaccttttactaagaacctatatgtaccattttcatagtaataattcgtataacctttccctctattttcgagagtgtccactcctttttcttgttgtattctagctatatatgataataatatgttggattaaaattctgggcacatattgttatattatttaatataataatatgtagattaaaatgtggtaatatatgttattatatggataatatatactaagtgtttagtagataaattgtgtaatgtataatttatgtaacataaaattgtgtatgttacaaaggtaattgcttttgtaacttattttggttgatcatatgttaataaaaaagatgttacacaaaattgatgatatattcaaatgttatgatatatagttgttacaaaatgtattaatactcatttatatgagagcaatgaggtggtattttgaatcttaagtgttatcacctaaacactatataaaggagtctaatgtactcattgagatgaaaagttttctaccaagaaagcacatatttctagaaaaccctaaaagacttgataatttccaaagctattttcacgagagttcccttagtgcttagagataggaagaaataagtttttgtacaaaggtgtaataccttgttcaagtcatggtgatccctactaatctacactcaagattgtgagtgaggtgtattatatatattcatctcttgctatatatattatattgcatgtgttgtaatcttcttcttctacttatatataatatatatataagtgtgttgtaacacatatatttaatcaatctcttattttaatcattttattattttacaataaaattgtaatgtatcttaatttttttccattataataaaatctctaacacatatttgaataatgtacaagcgcgatcttcggtataagtagactaagcttatagtaaccactaaccttgaggccgaaaagatttatcttttttaaatcataattttttattgattttgaaaaatattatatttttctctaaataaaggcctatttttttttctatagctcatcaaattttaaggccgactctgataatatattgttaggttatttttagtattaattttagattaagtt

SEQ ID NO: 39774 - DNA, 1629 bp, Cannabis sativa
tattattattattattttgtaaggacatgatcaacaattatatatgcatccttgaaaggattatgtatcaacaatttattttaatttaaatattttatatctataaatggagtgtttttttaaaatggtaaataaagtgtttccataccaaaacaaacgtagatattttcgcacttctttatattattattattatttttagtttcttccttatcttaatatacacactttgatacttatctcttcaacttatatttccaaaattagttaatttgtttcaatcaaaactactatattgttactcgtgatccctttttaataaacaaaacaaattcattttaaatataaatttaaagtacgaactaattaaattaagatataaaaaaaatctagttaattaatataaatttattatttttctctacataaaaaatatatcttgccatgcgtaaatacacacacctaaattttattatagattaagaaatttatgatatctctttatagtctaccctcaccacccccattttttttttttcttttgcaaagaaaaaaaaagttggtgacacgatttctttgactttttttaattattattactactatttttattttatagagttgataaattttggtttgttcacactattaaggtaagaaacatgtgtgtgatagtgggaaataaatggacattaggataaacatgggtgccttatgtagatacgtagaagacttaaattttatagtacacaaaaattaaattcagataaaataaggtatcaaatcataccacttattgagaaattttaggatgcaattgtaaataaaatttaattaatatgtttaattattttattttatattggtataaaatcattgtttgaactctatattctataagatatattattttaaatttttttaaaaatttataatatgttttaaatagttgtgtgtattatgttcaaaaaacaatagctgtgtgtatattgttatatatttatatatatataaatataatttgaattatcagcagaatgccgaaaatatatatatatataaaaatttatataaactattatttttggtaagttttttacacatttacatttaaagttttttttttttacatttttttacagtgtttataaaaataacactaaaaaaacaacaaaaaaatcacttgaaattaacaaaaaaaaaaattaaataacaaaaaaaacaaacaaccaaataacaaaagggaaatttgaaaaactatactttaaaaactctaatattttatacctaaaccaatacatttcaaaataaaaaaaatatgacacttttatgaaaaacccaaaaataaccctcacataactaacaccccaattctctctcttcctctatctctctagcttttctctcaacctaacaccccacaccattcaaaccccaacacagcaccgcgccatcaccccctcaccaccgcctacgacccgacccaacccccctctccacctcgtagctaggaccctctcccgtcaccccctcaccatcgtgtatcgcaccaaaacccaaaaaaaaaaatcccagccgaatgagcatcggacccatcgggtccatcggacccagagccaaaaaaaaaaa

SEQ ID NO: 39775 - DNA, 2122 bp, Cannabis sativa
tatattactctgtcaaaatgtatatataattgaaaataattaatgtataaattatttataattagatttttttttctttgaaattttgacgtattaaattgtataattttttacattaacaattgccaagttaataaagtgaacgaaacttgataaaaattcttaattctaacaatctaaatctataatatcagagaatttcacattattgatttgtggaaattatataatagctagaatatataagatccataatttatttttttcattgttaataaattttaaaataaaatttcatgcatcttacaattttaattaacatgtaatgacttgaaatattcaaaaacacgttttgacacatatcaaaactcgagcatgatttgatacatatatatacaatatttgtgacatgcatttaatacatacttctacgttttgatacatatattgttattatacactatgcccaacaccttctatagtaagtgtacaattaattcacgatattttttaaaaattaattttttaatttatacatacttaattaaaccaataacaatataatactaaaataaatataagaataatattttttaataattctcttactctaatcatgaatattcaaccatgtaaacaaatatatatatatatatatacgcttacctcgaaaatttaacctaacaatatgtaaccgcagtaatgagagtagtatatacatatactatgtatatatatatatactacttatatatatgttcttccacaatctacaaaagagagagtaataagctatgactctccaaaccaaaacctcaacactactcatattattattattatcaacattccattattccattgttgtagctaaccaagctggaaaatggaagttgttgaaaaaaagcataggaatttcagcaatgcacatggctctaatgcccaacaacaaaatcatagtctttgatcgaaccaattttggtccatccaatctcaccaaaaaaaactgcccaaatattaattcattacaaccacaacaagattcttcttcctcttgttacgttcactcagtagaatttgacccatcaaaacgcaccgtacgacctcttactatactcaccgacacgtggtgctcatccggcgctttatcaaacgacggcgttttaatccaatctggcggttaccaaagaggcgaacgcgtcgttcgttactttactcaaaataccgattgggttgaagatcctaatgggttagttacgccacgttggtacgcttctaaccaagtcttaaacgacggtaaaattattgtcgttggtggaaggtatcaattttcttatgagtttattcctaagaaaactgaatctgatctcaaactgtacgacttgtcgtttttgaaagagacgaggtatttggataatgttcctaataatctttacccatttcttcatctctctcctgatggttccctctttatcttcgccaatgaccgtggaattttgcttgattatggttctaacaagattctccggcgatttgccgccatgcccggtggagtttcgaggaattatcccagtactggttcttcggctatgcttcctcttgatttaaacggaaatgtgggtattcctaaagctgtgattttgatttgtgggggtacttcgccggactctaatcttaaagctgttgccggtgagtttattccggcgacgaggagttgtggccggttgactatcacggaggtgaatcctaagtgggaaatggaggaaatgccgattgggagagttatgggtgatatgattttgcttcccactggtgatgttcttattatcaatggcgccggaaaaggaacggccgggtgggattctgctcgtgacccggttttaaacccggttttatatcgacccgggaatgaacccgaaacccgcttcgaaactcttgctccaacaacaatcccacggctctaccactccacagctcatttactctccgacggccgggttttagtcggcggcagcaacccgaaccggagttacaacttctccacactttttccgactgagctaagtcttgaagcgttttacccaccatatttgagtagtcctaatcggccattgataacttc

SEQ ID NO: 39776 - DNA, 1329 bp, Cannabis sativa
caacaattcataccaaagaattgtcagtaaaattgagaatgtacttaaggtgtgtatatttctggatatgtttgggaagattattaagatccttactaaagaaagaatgggatctcaggatcaaggtatgatctttgattaattattgttagttgaggaatcaggaaatgaatactcccagtttagctatgggtactcggtacgagtagtattgcttttatcatatgcattgaatcagttaactttatagcagttattatgtgtaaaaaatgattaaaatatttaaaagttgtgtcaattcaagaaaaatcgatacagtttgaaattagttaaaatgaacaaggttcgaattgatgtcaagatagggactcctcaagtttaagtaaataatacagataaggaattgtaagaggtgaaaaaaaggaatgatggaaattagatataactaatgaagggatgaaagtaggaaatacaattaggaatgacaagaacacatctacttttcgataacccaccataacttaccttagagttaaacatacttaacttggagtaatctcaagatgagaaatattttgggaagtcatattggaaagtgtacgagtgaggacaaagtacgcttgaaagattagtattagaatgcaggatcagcagtcgttccagaaattatcaagaggaaggaatgtgttaataagtagagatttacaaggcattgagatgagtgtatatttgtggagggaagtaaggaatgctataattggatatctatcagaagcgaacattcaacttgttaataagtaaatcagtacatcagcaactagtaaaattacatcagcttaagagatcccataagaagatagaaagacttaattatggattatgtactgtgggatcttatgattttgaccgagtagtagtaattggacatgccaagttaatatgctttctatcaatgcaaacaatttatacagtaaatgaagatatggagttcatacgaaggaatagttaaatcttgtgaaatcccaaagttgatatctttgtctatgatattaaaagttaaagaaggttattgagaaccatggagattaaaggaaaaatagtacaatgtgtattcttgaaggatgggtaacctgaaagaaggttttgatactaaagtaagtaggctagctttaacttctgtgttgtctggagtgtataatgtgtttcatatctccatgatgagaaagtatgcatcaaatctgacccatattctacgcaatgatgattttgatttattatatggggaatagcccgtccagattttgaactggaacgagaaagtactttgga

SEQ ID NO: 39777 - DNA, 1551 bp, Cannabis sativa
ttagtaaatatgatattgattttgtcactgggtccattttatcaggtatgatggggagctgtccgttgatgcagttacagagtggttcacaacaaatatagtcggtttacctcggattttttactactcaaaagagacgctggtaatattttaagtttatttaattttcagttatttacaactttctaaaggaagattcatctgaagcatgcttatgtcgtatcaaattaaaatcatgaactcatctaactttttatcgactgttatgttaaatagcacttactatagtttacgtctgtcacaactcatgttggtctctattctttcctattcttttgttcttttatgaaacgtgtaatcattaattgaaattatcctgtgggattttttttttttcatttcccagggacaaaatttcctggcaaaagttagtcctcataaggtaaatttctcatttacaaacctgaaacgctcctacagtacgtagggagacacttatgaaactttgtaacccttgatggtattgatgctcttgacttgtaggtaaaagtcattatcttctcaagaacaggggagcgagcagttcctgttgtacgtcaagctgctaaaaagtattggtctcatgcctcttttgcatttgtgctatggcgagaagaggaatcttctgtttggttcaatgcgtgagtggatctactttctgtttagttagagtggattgctataaacttttttcttgttctagaatggataataactttagtgtctaactttgggaagttttgacaatgacaacgtgacaggtttgaagtggaaagtgcacccgcaatagtatttttgaaagatccaggtgccaaacctgtagtgcaccatggtaactctctgatagccaataatccaaactcagttcttgaatgaatctaaaaatagtttctatattgatatagaacaggtggatagaagaataatggctattcgagatgcttggggtctccctagaatactcgactcaatcttcacttaaaaatttcatatattttaaatgaataagacttagtagttataggtttagtgtaagactcaacatgacagctaggactaagataatgatagctcattaaaatgtaaaatacacactaagcccagcccatacagttacatcttaggactaagttatccttggtctcctaacataagtaaattgaattgtaggcctaagattaccccaatgccaaatattcaccttgtcctcaaggtgaaactctggaaattggttgctaattgtgtcaaaatcttcccaagttgcttcaaactcgagtaaggtagtccatttgatataaaccttaacttggttgctgtctggggctttttgacgcacatccaatcataatgctggttccatggtcatctccaagtcgtgcgatagctgcttgggaatggatagagaagtcgggtttggtccatgagcatgcttgagttgtaacacatgaaaaactgaatgtatgcctgccagttgtaggtggcaatcggagcttgtaagccactttgccaatg

SEQ ID NO: 39778 - DNA, 2808 bp, Cannabis sativa
taattcttattagctaattattatgttcggtcattttcttaattttttttaaaaagatgacatttactaacttagttttcaaatttaaagtcattttgcatctcaacccaaatatatatggtagtttcaaaatggttagggagagaaatgactccaaatacatatagattagataatttttaatgaatggtgtaaattttgttaaatttagctcaaaaaataaattagtgttatatttaattttaattttataattgtgttccaatgcactaagggtaaaataaattttattttaataaaaatgtgtaaaagagtcaacaaaaatattaaatttttattgaaagtatataaaaactatattaatttctaaatttagtacaacttttaacatgtgtcaaatataaatcacattatacaccacatttagagttcaattttatgaacatgggctaaaaaatacatatgtacctcatttatagctctccgttcaagattctcttctacgtgttgtgtcacgaaagaagaagaaaaactactcatggtagaggtacatgaaggtttttgtagcaaccacgctaggggtaaagtctctcaaaaaagatattgagggaagggtatatttttggccaacaatggtagaagattcgatggactatgtcaaaagatgtgacaagtgtcaatgattctctaaattacttagggctgccccaaacgagctcaagagtatgcaaactccctgaccatttgttgtttggggaatcgatctcataatctcactgcctaatggaaagggcggagtccaatacgcggtaatggcagtagattacttcaccaaataggtcgaagcagagcctttagccagtataacatcgaagaaaattctcgacttagtagtcaagaatatcatataccgctacatacttccacagaatatagtattttgtaaaaggcacagaatcatgaagatttttttgacagtcgcttacccacgaaaaaataggcaagtgtcaaccaaactccttaagatacgcttaaaagtgcctagagcaagctaaagaaaactggcttgaagaattacccaaggtgttgtagtcttaccgcaccataaaaaaatagcaaccggtcacactcctttcactttgatcaacaggtatgaagcaatgatacctatagaactcacatcgttgtcacatcagagactcacttatgatcaatacgccaatcatcaactactgcttagcttatggacaaaattgaggaaatcagagagaagtttgagctctacaataccgtgtatcaacaaaggatcacccgacactacaactctaaggttaaagataggaaatttaatcctaaagatatggttttatacgatgagtattcctgaaaacaaaaaatgcaacagtaagagtactcagaccttcttgggaaggaccatatgttgttattgaatcactagaacctgagacgtataagttaacccactatggttgctacttgaattcagtactcgtaccaaggtaccggaactgagtgcatttaagacgatactatcaataaagtaactgtctcaaaaatagctcgcttcacaatgagatttactttaccacgagtaagtgaatcgatcgcgtcttgaaccaactagatgtagtgaagccatctttaggtcaaggggtccattgttgttaaggattttccaaaacgtaataagtaccaaacaattaaattattgtctctatttgacaatcgaatgaaaggattttaaaattaaataatttaaacaaaaagtaaattattaatgtttatcaaaagttgataaataaatttagaaatacaacatttatttttattttgtgtcaaagaaaacttattataatcatatattctatttataggactttcatgcatattgcatattattttgtctcaccaaaatatactaaatatatatttctttttgtgggaaaaattattgtcccaaatatagagagaaagatggagttacactacttctcttttttatacaagtggagagagtcacaggcagattaattatgatcatatttattgacaagatatttggcatgattatataagatcaatgtcgttttccttggagatttaagagcagcttccaggaaatgtttagctattgctatgtagaggtatagctataaataaaggccagctgtaattaattaccatatatataccatgactttttcattatatcaaccagatatcataattattatttattacaaagtcccccacttaaccaatgaataatatgtgtaaattgtacatgttaagatgtgaaactattatagtccaaatcaactattaaatttcattattctttcctcttcacttgactgactatatattatatgtttatattgaattactcgaattcggtcttatatccacacatgctaaatgcttattatatataaaataaagagaaaattacgcggtaaaaataataaaattagttacattatagaaagtattatatatattaattttaaagttgactgatttaaataaacaattcaacgtgaataaaaaaaattatcttccaacaatttttttaataaaaaatagttaattgtaaaatactaaaattctagtagggaaatattttagtttttttaattttcggtaattattttagatttgagtatttatagtgatgtggcatatttgatatatatatatatgtaaataattttattaaaactatttttgtaaataaaattaattttaagtataatattaaaaaatcccttaaatttatcattttaa

SEQ ID NO: 39779 - DNA, 2180 bp, Cannabis sativa
  modified_base (2142)..(2150): a, c, t, g, unknown or other
ttatgttatgctcagttttatgaatcaataacaaggattgtgtccttacttttgtgaaattgtaataaaacttgtctttagatgtatacatgttttcattctatcttttttttttttgatgagggtatatataaacaggtcaacttcagctcaggacgttatttcagcggtaacagcaaaggtgctggccccagtcttccatttgatgctggttttgaggtacttattttttatgatggtgttagaaggttacctagaacatttattgttctggaatgtacgccatcgttcattacataatgattagaaatctacatatgcttttgctattttaggctgtggggatagttgcagcagtcggggactctgtcaccaacctggaagttggtactccagctgcagttatgatttttggaagctatgctgaattcataaaggtacactaatactaccatggaaccttatactttaattagcagcagttgtttatctcattattctttcatgactactttgagtttcagggcaatggtattgtgtgaactattttcatgctatttgtaattgtgctttgttattttgtcataagaataattactgaagactcaattcttgttttttacatgatttaggtgccttcaaaacacatccttcctgtggcaagaccagatccagaagttgtggccatgcttacttcaggattaactgcatcaattgctctagaaaaggtcattagtcaagctgaacactttggcattacctccaatttatatctctctctaacatcattttatatcaaaatttgctttatagccattacatttcttactcctgacaacatttttttccgtttgaattcttaggctggacaaatggattctgggaaagtagttttggttactgctgctgcaggagggaccgggcaatttgcagtacaggtcttttttcttttcccctcttatgtgttagtatttctcatatttaattttctgtagaggacctttacttgtatccatatatttttgattaaaagtatacaattgggaaaatgcttaaattggaagtgtttgacttacagcttgcgaaagtggctggaaataccgtggttgcaacctgtggaggtgcgcaaaaggcaaagcttttgaaggatttgggagtcgatcgagtcatagactataaagcggaagatatcaaaactgtaaatctcattaaacttttcaattatttaaaggattgaaaggtgaaagtagagttacttgtggcgtattttgtttaattaactaatgtagttgtcctatcttttagagctcactgttatggaaaactgatgcaatcatgtatagttgaaatacctttgtagcctgtaggtgccacatgtcttattaggtgttcttatttcttttactaaaccttctgagtaaaatttaattgatattagtggactcctaaaagaagaatggacagaccgaatcacacttttggctccacaaacactttctaattaatttttcttaagtcaaattagaagagcttgttattcatgttagtaagtaggatcaggattaaagtttaattgacaaaatacttgaagttacaatgagtagactgcataatacaaattctgttcaatatattaaactacacctgtttcttctctctgcaaatttcaggttctaaagaacgagtttcctaaaggtatcgacatcatctatgagtctgtaggtggccaaatgtttgatctgtgcttgaatgcgttggcagtctatggaaaactcatagtaattgggatgatttctcaggttagtttatttgattggattatagtttcatcttttttccagcttattgctttgcaagaaatttttgttagtaatttggtttgttgaaatcaattgattcatctggtttcagtatcaaggggaacaaggatggaagccatcaaattatactggattgtgcgaaaagattttagcgaaaagccaaacagtggtatgcatctaatctaatacatgtacagttggttccatttcctctgtatgtattttcttcatgaaaaatcttagtaggtggtatttttcaattcaattatgatccaatctacttggtgaatccaagtcttaactatggtggcgtttggtaacnnnnnnnnnttttaattttaaaaacagaaaaataaaagt

SEQ ID NO: 39780 - DNA, 1879 bp, Cannabis sativa
cagaacatgtcgttttcattttttacagtaattctacgttactttgtcgtttttcatatatattgtcgtttatttacatttatgtcgttttgttaatttcccatttcttcagaacatgttgttttctttttccacagtaattccccgttaatgtgtcgtttttttatatatattgtcgtttctaaacatttatgtcgttttctttttcttcagtaattatgcgttagtgtgtacatttacgtcgtttgttattttcctgttatataagactatggggagtagaaatatattataatattacattatataaataccgtcgttttcttctttccacgattcactatttacgttcgtaagaaattcaatgtcgtttttcaaaattattgtcgttttgttctaattttgctgcttcttttctccctattctctccttatttctatatcattgttttgattaaaaaaacacaatttaacactaaaaatgagaaaagaataaaaaataaaataaagcaagtaaaaaagtatcaaactttataataatccattcatcattcactttatagaataacattacaaacaaaaaaaaaaaaaaaaatgcactctaaactaattgtaataataattaattaattaattattgttaactaaatttggctgtaataaggccttgaagagatccaatgaggccaactatagtaacaagtaagcaaaagaagctaaaagttcttagaacaatccattttgatgaccaagacactattttcttctgtacaaaatacatctcaactggaaaatatatggctaatggccaaaaattcaaggcacccaaaacacccaaaacttggttgaaatatgggaaaatcatagcaattatagttgtgcatatcacataaaatgttctgaagcaaagtctcaatgaattcactttgaattttggtagtaatgggatttttactgtgtgaaaatcattcacaaaactgttgtctggatatttctttgcgaaccatttttctaccactgaaaatactgcttgtgagtatatctgcattcaaattaaaaagaaaaaaaaaatgagaattgagaaagtgatgaaaaacttggttttttgaaacacttattttcgttcacttgttttcttttgtttttggttcggtattgggcctgtcttgggttaaggccaacctagctcaagggcccaaaagaagaaaaaaaaattattttaatagtatattttttaaagagaattttacaaaaatattagattttaggtaaaagtttataatttaactgttacacaaattacaaaattactgtctttttataaaaaaataaaactcaacaattaaaacaaacaattaaaaaataccgtaaaacaactgtgaaaacttaacacagtacacaagtatttttttaaaaaaattctacctcacaataaaaaataaaacagttaaaaatgtcagtatgtggtgtaaaaatctcttttcccgctaaattttgttatgtttcttatttatttcaagaaaaaaagtaattattaaagtttggaaaaatgtgttagattattacctgatatcctccaaccaaatgcaaaacaatgcaagcattagcgaagtctatgagccaataaggttcatagaatccgaatccagttaagaggtttccgggtgtttcattaccaaaggctgcatagccgaagcaaccacaacctaggtagaaaaatgttgtcacaaagattgcaatcattgaaccttttttcatagttttgttctctgctggaggagcctttaaggtgtcttgaatctcgagaaggataagcgcatatggataggcaaaagcaatgtccccgagcgcttgaaagactagaaatagtttgttcgcg

SEQ ID NO: 39781 - DNA, 1467 bp, Cannabis sativa
tatttctggcatagataagttagtgttgctaagtgatgactcggacaacacatgttgtattctcaattgtctagcttataaattttatggtaaaaaaatgggtaatgttgatccaaaattttgtaaaatatttttgcggcccaatactatcaactatcatttcacttgtatttaactctttaaatttaaattttagtggtaaaaccctcaaaactactaaattgatagtaaatttaaagtattatctatttttcacagttaactgccaacatagactagttatgcgtacactctggtacacgtgacacatttatattaatacacataatattattatttaaaaattataaaaaattatttcgaaacttataatatttttttatttttatatttttatttaattttaaaataataataatattaagtgtaccaatataagcgtaccgcgtgtacaagagtgtacacataagcagttcatgatggcagttaactagatgtcatcttgaatttgctaacagttcaataaattagaagatttacttactgtcaaaatttgagcttaaaatattaagtacaagtaaaataatcattttgagggtttagctcccaaaaactcaacaataaattactcaactttatataatactatttaatattataactccaccaaagacccttgtagtaaataatttaaagtccagacttagagccttgtatccctttgggatgctataaactcctgtagtaaattattaaaagtccaactgtgttttgtatttttctttgattcagactatctgtcattaataccagcttccatttataggagatttataactccaccaatcagctccttttatgtagatactataaattcactgaacccaaaaattatcttgttttgaagcaattgcccaaacatacttacccagagcaacaatattccaacacaaagtatgtctaaaatctaaaccttcttcagatttggacttgcacaacttatcccaagcaacataaccaggacaatttatttcagcttctcatttttataaaaaagctctacaaatggtatttattttcttcgccgccatctttggcaacatcattagttgtgcccaataagaatggatgaggagaagaattgagttaatcaaagttatcctatcagcaaaggataagctccttgttccccaaacctgaatcttttgaaccattttctctgtcaagcctttgcattccaaagttgaaagtctccgagcacatatcagaatgcataggtatttgattggtaaatcacttctgctaaaaccagatgcttccaattttctctgtacttctccttcctccattccactacaatataatgtagattttaagtcattggggaataaatccaaagtgactgcaaatagcttgagacattgttgcataaagtagatggatttgaagtcaccataacaaaacaaa

SEQ ID NO: 39782 - DNA, 1744 bp, Cannabis sativa
cccaaaaaccagaaaacaagatcaatctcttctgatctgctcccttgaaaaagaccaagcatctctgtttcccttcaatactctcctaactgtatgtgaaacagaatgaaagaagacagagattgagatctccaccatgttttttttagatgacattacattaacaagacatgacattatttttcatttatatatatatatttatgtttttgtcatttttatttatatcaattttcaatagttggtctagtgatctaactttacagatatttactttactttcaatagttagaaggtttcaatggtcagaactaagccccaggatttacaagaccgtatcctcaatgctatcattgctgcaactttgtatcagttatgaaaaaatcgtgatagatgtgtgtttgatcttacttgttcagttgttaaaaatattaatttggaagtcaaaaatgttgtcaagctagcttagaatattaagcaagagtccctataaagattgtcgaaaaaacaaatgtgctcaatatgtaattaatagttggtaataatagggcgtttggagctgctgttgctgctagtttttgctgcagcagtttgtattatttgagattttcggcctcctttgttttgttttgctgagttttgtatttcatatttcaatttttttttacaataattatttatttttcggtaactttatttattttaataagtttatagtacataaataacaataaaaaaaattattatcataattgtggtatagtttctccaaataaaaaggttttcacaatcattatttctggaaagttgttcactcgatcgcggttgccagtcctaaaaggagtcgtgcagaatgatagtagatttcggaagggagttcccaaatgactatcatatcctctctaggctcaatcttgaagatggctagccctccctagctaggataggagtttcagctgactagttgattctcctgtatcggtagatctggatagtcgactacaatcgatcacttatatccaatctggaagcatcttcagtaagtgtctgtggtccgcgagttcgaaagatcgtttatgttcccggaggctctggtacttaagctgacgtggagactttgctcaaagaagaaattgttaagttagttatttctaactaacttaacaacctcatttcttgccgccactaactttagaatcttgatcctaagtctataaatactaccttcacttatcattttgaaaggagaacaaaacttacgaattagagatgagaatgagagtttgagaaaattgagaggtagagagagaggtcctgagaaaagagagagattggatttagattttgtaagaagaatcatctattgatggagaagattcttgggtataaagtgtgagagttgaaacactttgtgaggactcaatagaaaatctcgtctcgactgtattgtatttattcttgctcaatcaacaaagaaggattacggtagtgttctagaactagagtagaatcgtagatcacatcgatctatcggacttgaacttgtatatatcttgttgttgatttttttattttctgcatttattgtttttggttttatatattctgtttgctcctgttttgttaattttcaattgttgttctcgtttttttaatcttgtcaatgctaatcgtttgattgtttagagtttcattgatttgattctacacatttagtcgtaatttttccacaataacaataagt

SEQ ID NO: 39783 - DNA, 1260 bp, Cannabis sativa
aagtgtggatctctttcttatgctcatgctctatttgataagacaaaatttaaggactttgatattttgaaatgcaatgattattaccaatcaactctggctatatgctttcgcacaaactatttttttttttttagtagtgttcaaaattataaaaggtccagtaatttttctttttcttacgatccactcaattttagggtcgacctttaatgttctccctcaagatggcaataaaccttaaaacccaatcacacaactttccttttggcctttagtcactcggtcaaaaaatggtttcttctctcatgcaaaatgatttcaagattcaattgtagagaaaagaaaaaacaattatagtgttgtagaagtgaatgaaaactttcattattttctaaaggaagataacacccaccatcaactttcattattcttcattataagatgagaattatggaacatgtgcatgattttgaactagaccaagaatcttaacatacttttggtccacttgaaactgataaattgatcaaatttagtacaaaaccagctttgacacttgagtttgtcaagcataagtcaaaagtcaaatatgttcttcctcttatttgcccacaagtcatgaaaacttaaatagagccaatacttggattggtatgatcatgaatcaatgaccatatataatgctcttagaacaaatgagttttaataatatgacaagtatattctcatgcaaactattctcttctttggttattttatgttttaattaaagaaaaccatttagtttagctcaaagtgattggtgactaattattattattataatgttggttctgattaattgaagtcatttcttttcttcatgcagatttgtgagaaggaagtatatgagtttctaattaagtgcctatttacttttactaattgtttgtgatatgtagaattttcaacacttactacttttcaatgtttgacaaaatcacatggctaagagtaagacatctctgatgaattgtgattagaattcagattgaagaatagaggattttctcattgcttattgatatcttcaaccaccccatattacctttttgaactgtgtcttatggtgttgattcccacatcagtactgaaaaatgccacatataaactatctgttagctatgcaaggttggtcttaaactttagtaggtcgtaaaagaacaaaattaaacacttatttagaaagaaattatattttcaaaatcagtaaaaaaa

SEQ ID NO: 39784 - DNA, 1598 bp, Cannabis sativa
tcttacttcatgtttggttagattaacataaataaattttaaaaatgtagtgcatgtttggttaggataaattaaaatatagaacaaatataaaaataaaaataaagaatggaattgaatgaaataaaataaaatttaaaatgcatgaaaaattattatttttttctcgtcttattttaagatttaatagtcgttccactaaattgtcatagtttgaaatataattattttttatttataaacttttaagagcatattttttttcatttttaattaataaataaaaaaaataaattagtaaagataacacataaatatttcagagaatttttccctttattttatctcaaattgcaacatttaataaataaatgaataaaaattaatatcatataattgattgtcatcttcttttaagttaacatgtgattatagtgatacctaaatttgtaataagttagaggtagcatctaccgattcacatgagaattgctaaaaagtattactgaatttttgaataaagtattcttaaattatgtaattagaaaaggctaattagaattttcgcctactgaatttttacatgtaccaaatcatactctatgaacttttcaagccgttaaaatttttccctaagctattgaaattgttagatttaaagatttttattaaatttcattcaactttactaatatgacgattgcctatgtactaaatcctgcctcccgaacattcacatctactaactcatgcccttaaatttttaaatgtataaaattgtgcctcctaaattttcatcaaggtgagacattatttaataaaattagacaaaagtttttaaattcaatcatctcaattcgagaaaaatttttaatgacctgaaatttgttaaaaaagatataatttggtaactctgaaagttgcaaaattttaaattagccaaaatggaagttccctaaacgacaaaactcttttgcgttgaagaagttgatttcattggcataaaaaagtatatccatgcgatgcggccctaacccattggccattctcacattaactaaacccaaccacatggaacaacccaagcctaatactcctcctccataccattattcactcattctcattctccaatgcagagcttgaatatgtctccaatggtggttttcacacatgggtcatcgatattccgacccatggtgactcccatcttctctaatcgatcaactgttagccactcaacttgttcccttgtccgacttagattgtttacaagagaacgtggatgtagtaagctatctcttcaatcttttagaccacaaactactttcaggtaactttgttttagattagttgttagtctttgatgtattctggtgttttagattgtttaatgttatttttgttattaacaaataagaatccatacaatggctctaagcttctttaagcatttataaagattgtttttagaagtgtttgtgtacaaaataataagtacttgaagcttttccaaatttttataatggaaatgagtatgctaatgatgagataggtgtgctgtttttggatatcataactttgttgtctagatttcc

SEQ ID NO: 39785 - DNA, 2007 bp, Cannabis sativa
aattttcgtgttgccattataagtgcttatttggtctttaaatcaactagttattcttaagctaaatttcccatgtggagaaaaacgatagatactgaaattattacacttacagctaataaaatttggattgatatctctcttctcgctagctaccatttcattggctgtaactgagtatataaaataaaatataatgaaaaaaataaaattgaacgatataaagctcgtttagtgtagctaaagggttctcccaacaatttgatacttttagaggaggatttatgattaagcaactccactttattttttttatttttttgggtatacttttttatttatttatttattttattactcactctttaaatactttaattttgaggttcttttaatctctcaacctctcttaactaaaacccgtttaagtaaaattattacaccaatacatacacagccgaatagcaatgctctttgttgaacacttaaatatcatagggcaacattcattgcctcatggtgaccccacacttcattacaatagcaattttttcatggctctcattattactccatttatatccaatatgttatgttgttgtccatcttttataaacaaggtccacctaaatatcaagtataatttatttaataggttctataaatggtactatttaagaaatttacaccttttcaattattctttatgtcatagcagaatatgttctccgagcaaaattaaaattaaagtaatatatgcagtataaatatttaaatttaaatttcaattgtaaataagtacttaagtgtgtcaatctgattagttaaagtcattaaattttattttttaaaaaaaaaataatttaaatatacaaatatgaaaatgacacgtggataataacttaacatttattactcaggtacttacagagttctaaaaatataacttaggtattattagtgctaaaaaataaaattacgtatttatttacaaccgagaattaaacttaaatatttatgtcataaattactcattaaaattgcattatcttaattataaaaatagttatatattatgttgccaagtggatcattttaagatgtgttatttcttgtaatatgactgagcctatgtatgtatgaattagtccaaagtagtttaaattaagctgaagcgcaaaatgattagattagaagtaatatatagcattttgcgtagaatgtaaaagcttcggctagatatatacaacatatatattggataaactaagttaattttgattaaattaataataattaggatggaaaacgtttggattggttgcaccaaacacgtacagactgtatctttgtatgttatataccttgcaagtttcaccattaattaatacgtggatatatataattatatattatctaatcaagcacaccttaattcttctttctctttcagtacacgactacacgtattcatgcatgtcatatttgaaatctcaatgcatgtagccgccaacataatgaaactagttaatcccttgtggaccaattacagttttgtctagtcaataagaaacttcacactccacacagttatttcaacaaaaccagcaaaattttctgaactaaatttatagaaaagtataatacttgagagagctttgagatgtccaaatctttttacttttatttgcgggacgaactcataagtttccaaagttgttgggacttaaaaatgtgctttaggattgtttgaaaagaaagaagaagaaaaaagtgttttaggagagatgttttatatgagtttatagacttctagttataataacatcatcacttattcatcaatatctaatcaaatgcatgacttaatatatgtacatggattatgagaaggtatatggaaatcttattgcgaatggagtaaataatgaaaattattatttgttaattcgactgtaagattcaatgcagagcagactcaactcgaggcttacaataaaatatagg

SEQ ID NO: 39786 - DNA, 1468 bp, Cannabis sativa
  modified_base (1060)..(1062): a, c, t, g, unknown or other
ttaacgtacatttttaacgatactattaataataaataaaattttaaaaagtcttgtttcaaatttcgccctaggcctctcatcaccttgagacggccctgactattcatcactaacaagtgtttggatagaaatatcgtttattatacaaaaattattgaggatacttaatatgcttaacaagcttcaagaagtaggatacttaatattctaaaccttgttataatttgataattgcatgcatgatatataagttgcatatagtatatatgtttgtatatatattattgtatctttatgattgtgtatatatatgtataggcacttatatacgtttcatgattaacaatatgatatattaatataagattttgtgatcttgagtatataaactgtttatatattgagattatgatctcaagcatagaaagtcatctaaagtttcaaatattaaaatatcattatagtcatccgaagtcttaagattatagaaaatttttaccaattatcattgggtgaagcttataggatgttagaatttagaagacatagcaacatacgacgagtggggttgtaattatccaatcaatgatcaaatttaggaggacaactacaacaattcagagccaaattttgacaagtactcaatgaacaaatgaagagattttagaagatttttaagagttcaacattgaagaagtacctcatcaaatagcttaaccaagttcgttggaagtgttgatgatggagttcatggctaaaaacgatgttttaattcacagtcaagcttcatccttgaagaaattggtgttgagaatttatgcattaaataaaacttaatttcaatataatcttatttactatcaattaagataacaaattatttcttaaccttatcatatgctttgctcacatatttattttatggttatatgtttaacatatgagtaatgttaaatcccgaacatatagttatatatagttatttataattatagtgatgtcataatactagaaaataattattttaaagtcctttttggcaagttagttgacaaannnttttttatttaatggtaagatatttttgcatttatgaccgatgatcttaccttgtatatttggatttagttgatcttttcttggttaggaaagatgcttttattgctgaactttcctttgtttaaaaatttcttctaagagaattttttctcttatagaaagttgatttataaaggaaacattgattaaatgccttatcctcattaaattcgattgtatcttgatacaatcagaatatataatttgtttatggcaggaatcaagacttaatagaggatcagacccgattatagcaagtttcctttttctggtcagatttcctgcgtaagcatccgaaactgatgctgaagatcgtgtttttcttaggaaagttttgtatagttgtagattcgatcttgtgactgtc

SEQ ID NO: 39787 - DNA, 1986 bp, Cannabis sativa
  modified_base (1756)..(1761): a, c, t, g, unknown or other
tgatttggatgtcaagatgatttatattatcagctctatacttttatacatttttttttttaatgaaaatagagagaacaactatacatatgagaattggctgtagagggaatgacagtaaagtatgttcaactatgtgcaggctaaattgagaagctcttcttggtggataaagttttttctccaaaatagcttagaagataacgaagcagcatcgaccaaatttgatcaagcttcaattaagagctcgtacaagcctgcctgccaagtttttcacctcaaatcgtatcaataagactgcagcttgcatttctgtcttcaaatctttagtgcccaagggcaaagttcataccgaaaggaaaatatactttggttctgtgtttctattggaagacagtaaaagcttctatcattagtgtatgtgtcaaggaaggaattcggcatgaatgggcttctttcaccagagtattctttctcgagtatttgctctccaacagcctgctttagaatccttagcgtttcaacattttccttttatattcttggcacaagtattgtcattcaaagatacattcaagcacatcaattaatacattgtatattggattgaacgatctattaattaatcaattaatttattattattattattattattgaaattgaaaaatcattttcctcttaaatgacaattgaaacaagcaaattgtcatgtgtaagccatgtgtcgttttatgataacgaccttaatttctcacgttataatgatgtcgtttcctctttagaactaaatactttcttgacccaaagtaagttgcttctgctttgatcctacattagcaaaccacaaagaagccataaatgttttccatgtcaaatatgaaatattaaactaaaagggaataacgaaaatgagtgaataataggaatggaaatgaaactgatcagtaggaaggaaatggaagaagtataggaatgaaatgcaattttgttcattcgatctaatccgtatttttttggtcaaacaacattcaattcgcattaagtgtggatttcatattttggatccaatccgatcagcacagcagtttaaattcaatccaatccgcaatagtgcggattggatcggttattttggatcagttattttttttttaatgataaattatttaatatttcatagaaaaaaattaaaagaagactattatttcttaatctccaataataatctatttccatctccatttacatacaaatcaaaccaatatacatataagtcaatatatatgtactcattttaaataaaaaaaatacaaaataatcattacaatatacatttagatttatactaaaatatatatgtatccattaccaaaataaataaactagtatatatatttatttaaatttattttatgtgtctatgtgaataaaaataatttttctcgtgtttccattataaaacaaataaaatatacaaactgaatatattactagaaaattagaaatttggtattttttttttttaatattacttgaaaattaatatgtattatatatttcaaaaaaaaaatatgtattatatattataattttttaaaaatatatataattaagtatgaattaaattggatcagttactttttagggtcaaacaacatccaatccgcacaagtggggattttagatttttcaatccaatccaattcgcgcaggtgcagatatcgacagtttgcggattggattggattggatnnnnnngattggattggatcggatactttgtgaacaaccctaattttttaccatggaaaatattatacccaatttttgcaaaaaaataaaataattataaaaatattcatcaccccatgactcattccgctcagatctctaaccattgttcctttctgtcgcagagtattatctaaatctgagcctagatctctttctctcctttgagtttgcttaccaccgtcttactca

SEQ ID NO: 39788 - DNA, 2319 bp, Cannabis sativa
attattaatttatttttgtttgattaaaggattgtaaataagtgtcaatttcatacacaattttatagatttagcaatatatttattctatcttattgcaaaattgtataattattaattaataatgtttgatataattaataacctagtaataataataaatcaaagatttgaatcctaaatataagggtatgtacctaactatcagttttgtgattgggactgaatcaatacataataaggtttttgaaaataacttactatctacctcaaattttcaagtgagacttaacctaataacctaaattaagtgtatgcattatttttctttttcatgtaaagtattaatttatgctataatcaacaaattaattagaatatttaaatatattagaaaactttttttatataaactcgtttggtatatcgtattaagtcatattgtattatattaattaaattaggttatatatcatacttttatataatactatatatataaaattttaatttatactgaaatattatatatttattttcttaaaaaaaaacattatatatttatatactcataaaagttaatactatatatagttttaattaaaatatattttaatataatactatgtagagtacattattacagtgtaatatgatgtactaatcaaatccataaactataatatattaggctatttatcataattaattagagttgttggtatggagacggcatatattacatatataaaaatattttttttatttaataaaacataaaatattgattagatcatatatagtatttaccaatttctttctatcttttttcttttaagaagtcattagaataattttaaaaaattcacaatgtagatatcaacaaactataatagatatatagtcaatcaatgaccgcaaaaaaaaaatgtgagctataaaattgacaaaattaccataaaagatttagaccaaaattaattaaaaatttttaataaatacataataaaaagtatactagaacaacttttttgagagtgtactttatatgcacttaattacattttatttgtcaaaaaaaaaaaaattactttttattttggtgaagaagtcacaatcatttattgacttttttttctctttatgaatcatttattgactttatttacatattaaacttttaatttaatgcctatatatttaacttcattatttgtttaataacttgtggttgtggggatagtacccacatttacattaattaaaaacaatgatcaagagctggaaactgaaaaaattaataaatacaaataacacttttctttgcaaataattaattaatatatatttctttatcctaatttacacaaccaagaattgactactttaattaaattataatcattttaatgaagatttattaggcttaatttcttgccaaatcgacctggattaatacccgaaattgcttattttattaattgtttaaaattataaatcaacttaattattaattttatatttaatgttttcaaattaataagtgaatcaaatctaagagatctaatttagatgtctttcaagtcacatgattaattttgatgtatttttttttctttttaataaaaaaaaaatctacatgaaatatatgataatatgttagtgtggttttcgaaaggtacacgccaaaggaatatgatcatgatcacttatattttcttatttattattattgaaatttctctccttattttttccgtaaataaaaattcaatgtatcattttctttcagtgggagcaaatgaaattaaagaaaagaatttgattgatagagaaagaaaaaaaaagtattgaattaatatgtaggccacaagaaagaaaattggacaacacatatacatataataataattcttcaaataataataataacatgcatggacaaaaaaaaacgtttacacttacacgtagagtatgagcaatttcaatggctgaattgggtttggaattcaactctctctctctttatatttgtaaaatgtgattgtttagtaataaaattatagtttttgttgcggtatcaacccaagtctcgtattggaagaatagacaaaagttgtcttggatataagcgtttcaccttttcttttagtatgaggtgtccgaaaataaaaccgtgagggcttagacccaaagcagacaatatcatactaatattagagtcaatgtgaggtagcaacccaataaggtggaagaacgggcccaacagttttaacagattttgttgtaaagtgatacatggtcgcgtttagtaatatt

SEQ ID NO: 39789 - DNA, 1716 bp, Cannabis sativa
ccttaaattaaaaacttaatttctttatttattttttttttctgaatcttttatttttatttgttatttttcttaaataattatcaagatgcaacttagatgttcctagttaccatatatgggtaattaaaaatatatccctaattcttactgtgtttggcacatgtaaaatgtggtactgtaacaattatatcatatatttaaatatttaatttctattatatatatttgcatggagatttttgattatcatgcattagtggcagacatatatatagaattccccaaaaaggtggtaatcatgatcatgtcaattataatattgaacatgttccattgttcccagccccaccaaaaaaatattataaacacgtaaatatattaattataataatatataacaaagatattgtgtatatatatagttaataaaaaatttaattttaaaaaattattatatgttacaatatatgtatatttatgtgtacatatatatagttcaagttaataataattaatgtcaattttatttacaatttctctagaaaaaatgaatgtcgaacttcatgatagttgataagattagaggcacaatttttatctttagttatatacataatatttgaacattttatacaaattataccgtatgattaattgagcccactttactgcatatgtgtatatatatacatataaataaaaaaaataagaaaaagaagaaagggacaaaaaggaaagcagagcatatatatagatatataagagatgagatgatggaccacactagaaaaatatgagtttatttttattattatgattgatcaacctccgcgttgtgcgaaaaagttgtacgacacaaattacaaatatataaatataaataattaaaacaaaacatcaaattattataagtgcactacaactgtcgaataattataatcataatacattgctctcaaaataacacacttttattttaatttctttctttttaatatatgatgaaatgcggagaatcgcttctttttgccttagtttctataaatgataataatgaaagaggatcttctttatcaactccttttattttcgccaacttatatatcttctccttttttcctgcaccaataacatattttgatgctttgagaattagtatattatgatttgattaagaaaaaaaagtggtactttgattaaggtaagaacttaccaactggtattgttgctaactcgaaccccatatggatggtctagtagtgaggaggagggggtgatgagtagacgtactcatggtggtgtggaggaggaggagacttgtacttgtacactggagtaggtgggtggtatggcttcttgactggtggtggtggtgacttgtatttgtaaactggggtgggtggtggtggtgatttgtacttgtacactggagtgggtgggtggtatggcttcttgactggtggtggtggtgatttgtatttgtaaactggggtgggtggtggtggtgatttgtacttgtagactggagtgggtggtgggggagatttgtacttgtacactggggttggtggtggtggtgacttgtacttgtaaactggagtgggtggtggtggggatttgtatttgtacactggggtgggtggtggaggagacttgtatttgtacactggggtgggtggtggaggagacttgtatttgtacactggggtgggt

SEQ ID NO: 39790 - DNA, 1656 bp, Cannabis sativa
aaaaccacgtaaaaaatcctttgtgttcatacctcttactttactgcattcattttttttgtgtgaaattatcagtgtgagactcaaattttgattaactttagaacttaacttttttttttctcaaacattttttaatattttttttatttactaataactttagaactttttattacttgctaattttagtacaaaatcgaccatgtttttatattagttcaatcagaatactttttgattatcaatgtcaatatcgttttttaattatgcttctttaaaataaattaaaatattattataaattattagaatataataaattaaaaaaactctttatcaacacatttatgcgccgataacagtttctcgcgccaaaatctaaatggcgcgcacagattttgccggcaaaaccttgcgcgcaaattaagaaaaaggtgcaaaacttttgctagtgcattattgtacaggcaaacgttattttagccatcgattagcagatttgggaccataatttatattgacatttagtttttcctagacatattaacactggtacaagtcaatattgtcggtgtaaatgtgaattgcgtcggaaaaggctcttttaccgacagacattcgtagactatgccaataaagtttaccaggatgtttagtatgcttttgtcggtgcaattatgtgctagcaaaagttatatttcttgtagtgaatccacattttatttgattgaatattttactttttcattctttattttgaattttcaaattattgtgtattctcaaaatattcatttttagtaaaatttattagagtaaaacactcatccctaatctttctcctgaaaaatgttacatgaataaaatttctcccgaagcttgatgaataacgtctaagtgtattcaatctgcacaattatcacaaagaaaaaaaatacaaaagcacactataataaaacactaagaatattttgaactcaagttcttcacatcataaacttctcgctcaaaacttgattgtatttgaaaaataataaacaagagagttatttcaaactcgcgaccttatgatgtgtatatacttctagagacaccttagattgtaaaaaaaaaaaaagaatagaaaacagtcaggaagtaaatgcaaaatgttctaaaagaaaatcaaaatcttttcaaacagtctaagaatccactagaacaaattcaatgaacttaaacagtttttaagtaaaattttcttaaataaaggaatggaattctcatttactacaacaatattcaaattggttaaaacaagaattcaaatcaagaaataagaataaatactaataatttccatatatgaaaaatcaagataatatattcttttaaaggaaattattatttatttcattagcacaaatgaaatattatgattttaaaatattttgacatcaaaacatagtcatgccatatttttttttgagagagtgatttgaatcacactatgataatcgtcgacgcggaggaatcatcaacaagttccagtcaacaagctaattgtctagctaaagatgtacaaagtcagaatatgagtcgctacaagcaaaacaacttatataagaccaagttatttcggaaatctaaacaaaataacttgagaccaccttc

SEQ ID NO: 39791 - DNA, 1798 bp, Cannabis sativa
ctttttcaacacttttcagcatgcaattttgggagagtacgaaagttagaagcaaaaagcagctctgaagacttttaacatttctcgaagaagtctttcttttcctctattttcttatgttcttacttaaatgttatcagatgttttcaatgattatgagtaactagatttttattggtttgttaataaagattgtttgaaattttattctaattttaatgggatttaattcttcctcaatttgatgtgtatttatttaatttgtatttaattttttttatttgtctgacaactaattaattgttttatgatttcaatataaaatttgaaaaatgagtatggattatgttctagtgaaatagacatagatttcgatataagacgaggaaacctatatagtttacgtaatacttagaatttttatgcttaatgtcttctacgtgtttaaatttatcacgagagtagaaaatttgcatataagttgagatttatatgtcatagccctaatgtaaatttttttagtagattcgctattacataaaaattaaattttgagaattaaattatgttaaacttaatctaaacttattaattgttttatttgtttatttttaatttaatttttacttagattatatatttagttttaaaatcattttatttgattgtcaaataaaaataagaattttattatttggtacttagctacaattttcctatattgaatttatcacaatatgggtaaaattgttaattatttcacaaaagttttcaaagttcaaaaataatatttaacattgttaataattcaaagagtatttttttctcaatttagagcaaatacctatttattattattatttgggtctacatgaaaatatgaatataacacaaatatattattgactaaagaattaactaatatacatttcaaaaaaataaaaagttaactaatacataaaagcaattaccttgtttaaagggtaacatctttgttgttagagaaaatttctttgagatctgtgctgaaaaagatttctaaagttgtaattttattaaataaacaattccaacttcaaagttcaaagtatagacttgtgaagttttatattcctcataatccaatcttttttaaatgaaaattagtaacaaaatatataagtgaagtttcccattttatggccatggaattggaagatatatacattagaacttttagcacaagtacccaataaattctctcgaagatgtagaagaaagatacacatgtaattattttattattactaatgagaattctaaaaagtaatgtcaaattctatggccattgattggtcattagtatatagatgaaatagatggatgtctcttcttttgtttcacactaaagagaaaactacaaagactttttttccaaaaaaaaaaaaaaaaggaaaattacaaggagtttaataacataaaaaaatgcatctactttcttcccatgtaaatattaaagtaaaaaaaatcataaattccaaataccaataaaccaatttcaccgaaaggctaactacataacagtaatacactagaatatttttgcacgtgatggcacatgctgaccacttatcttagtttttcaacttacaagagattttttgtttagattaagaataattagctccaaaaacttttgataatactaattatgtcttttaaaatatacgatttgtaagaaatttttttaaaatttttacattttacagaaatttaatttttttgttaggttttgacacattatttcgtttaaatattg

SEQ ID NO: 39792 - DNA, 1894 bp, Cannabis sativa
gaaacccgccaacccgtgccttattcgggtccgggtcagaattcagtttcatttttttgaacccgaaaatgttgaccaaaaggagatgggatattcaagagccttggactgcctgaacgacaaccaaagagccagtttcaacttgtaattgcttccaatatttttgttttatccaattcaaagcctcattaaccctcacgacctcaaccatagccggatcaacacgaccaacaaatgaggcagtaaaccctcaataaaccgattgttgtgatcacgagccacaccaactgccccaaactttctttcattatcaaagattgctccatcaacatttaccaagaataaaattatggaatgtaaagctcagttgtgtcggcttaagggtaggaaagatgaagattctgtggcgtggtatggagaactgagaaggaggtttttgaagttcttactaagtgggaagttttttggaaacaaagatcaaagtaactttagcttaaggaaggtgaccgaaatagtacgtatttttatgcctccgctagtactcgtaaaagacataatacattccataagttgaaatatgaaagtggcgcttgggttgcttgggattaggggttgaagaacctatgattcagtatttttttgagattttttcggcctctactactcgatgaacacatatagaataaattatgtagactagatgttctttaaatatatagaataattatagtgttagagcgacaaaatttaaaatttataattaatttttctaccaaccattgataatactaaataaaatgcaaaaatatattctacttattgataaatatatttaaattttcaaataattactcgagcttagccaatggcaggtattaaattgttcttgattatgcttttgaataatttaattatgagtttcattttatatttggttattttttttagggtgatacagttttcaaatatactaatcatcaagaagtcaaaagttacatgcatgtgttaaccagttaatcttaaaagtagatcaacatcacaaacaaatacaatatatggtttaaaaaaattctaagaaaagttgatttttttatgagttatttatttatttatttttaaaaaaaaaccattttaacaatttttcttttagagtcatccccatgtaacgattttttttttaaaaaaaaattctttcaaataaaagaaatttgtagatagatatatcttaaaatcgatgagtgagtcatccccattttaaatacatatttatatattttttttaaaaaaatatatatttacatattagtagttataacaatatatatatatataattactgaaaaataattataatccaaatctattagatatatgtatatatatattatttattcaacactaataaacgtttataataaggataaggaacctaagtaataaaaaacaaaagttataaatcattctttttgatctattattacaataactgggagaggcgcggttatgaaaaattaataaaaattaaaatttgatacaatttattacttagttataattaaataaaaaatataatttaaatttaaatttttttaaaaaattcacaacgaatcgcgagttgtttactaatttaattaatcaatcatactttacaacaaatttattagttatattatttaatttatttacttattttattgcttaataaaattagttagatatattttttttttttataactaaatttaaaattaaataatttatattttctaaatataaatatgattaaattgtattaaatttaattattattattattattctttaaattaataataatagtaacactaataactctaaacaaacatgcatattactaacaactagtatgtatatt

SEQ ID NO: 39793 - DNA, 1504 bp, Cannabis sativa
  modified_base (37)..(42): a, c, t, g, unknown or other
aatagaaaatacatagcataaaatttagtatacgtgnnnnnnacgtaactttttactagtatattataagtctacataatttcaaaaaagagaaaaaaacaaaaaactattttaaatctactttagcaacaattttatatagcatattttgaaattttagggtgcgcttttagctttccttgggcacaatgttggtccacttgcgcaaatattattgattttgtagttttgctgtataaataccatttttttttaatttgttgctagtaagtactcaatttttaaaagtaatttacagtataaatatttaaatttagtttttacttataaataaatacttatgtttaatttttagcggtaataatacttaagttataattctgaaacttctttaggtacctggataataacttaatatttaacggttatgtacttacagagtttcagaaatataacttaagtattattactgttgaaaattacttatgtatttatttgtaattggcggttaaacttaaatatttatactaaaagttattcttttaaaaatattaacaaaaatactcaaaatattttttttttccaatttttcataagtatccactcctctctagttaactagacacgtggacggagctgaattaattccatttttttttctttttgctaaatctcattatttatcaaaattaaataataatgaaaaaaaaacatttcattataataaaaatagaaaacaaataagaaaactaaaaagaaaaattaaagaaactcagttctggagataatattgatgagcagctcccctcttctgaactcgcattccttcacgattcagggagaatcaaaaaatagatgaagaagattatgattggtatgtcttcatactatttctttgtctctttttctgtggaagacaaagtggtaggttggtgatgtttatgtttacttcattttctctcattatgtgtgcttacctataccataacctattcaatttagaatcctctgagaagaaagaaagagtggccccctaagaagaattcaaaccctaaaatgtgaagagggacaagtgaaaaataaggcaaaaggcaagagaagtcagtttgtcccaacaatctcctggctaagcgcgcatctttaatgggggcaattaaaatagttgtccaactgggcgctttggcaattaatataactggtctaattgagatgagttcaataccagttgtaattagtgttgtaaatatgggttagaatttctgatactgcacgaaatcggtacaaatacgactagggataaaaaaaatataagcttgaacataacacaatactatgttaaacattagcatgagacggtataagaaatatggagttaaagacgacacgaaaaacatgttacatcacataagcatgagtagattaacccaaaaacatgacacatgaaagcccgacacaacaaattaaaaaatcatttaattttataatgattataataataataata

SEQ ID NO: 39794 - DNA, 1726 bp, Cannabis sativa
atatattgatattgagatattgattgtgttatggattgaattatatttctagatttttacatatttttttttattattattatttacttgtagttttggttatagaattgtaacacttagttttaaaaattttgtatttgttacataattttataattttataatttcttgattttattattcatcttttattttcttccgttatatttcaatatattttttaacaagttaattactagatattaagtggtgggcttttaatcttagtttatatttttcgtgtaaaaaaaagagagtcaacttaagcttgagcaccaagaaaagaaagttgactttctagacgggtgccaatgccacctaagtaatgttgtactctctccaatctcaatcactctctattcttttcaatttcaagtcaaagttctatgatcaactttatttccctctatatccatttatttactcaaattttcgtaccatacattagctaaaaacgtgttatttctaatctttaaaaaaaaaaaagaaaagaagaaatatagtagcagctctactaaatgatcttaagattatgtcatttaaaaaagaaatcattgccaaaagaaaatatagaaatcagtgaaattgatgaattttgaaatgtaacaaggttttgaaaggttgcgaaatcacatactcatttacagctagttacaaatttacaataaattcattaaacaataacttaattatcagttaattacatattcaaatgtgtaagataaattttgtttttatttttgtttttttgacgagagtaacccaaaagatacaacaataagctcaagcagttacagtgttcaaatttggagaagaatctttctagactaattccctatctagccctaaagctttctttgccatatgatgggcatgcatattacaagatcttggcaaataatttaaagaagcattagggaaagaagacaaggagcttttaatgtcttcaacaatgtctggaagagctgagaggtctttctttgtgctcttcactttgcttaccagctgcttggaatcagtgagaatgttagcaaggggtattcttatattgccgcaccaggttagagccaaccttagagccaaagcctctgtcgtagaagaagtggcctaagctgctataggcgctgaaagaccagctattacattaccattccagtccttgattaccactccaagcctgatcttaccattccctgcattaatagctgtatcaatgtataactggtaagatcctacaccatcctggttgtgttctgctagattgtgtgagtgtcaacttggtgtatagtcaattctcttggactgggagttcctgtaatccattaaataattgctggtccaattcactaaatcctcagcagtcatatgaaccctcctgaaaagctttttatttctattttcccaaatagcacacaaagtacatagtaacaaagtaaaatcatcattatttaaagtagtaattccactcaaaataaattctctaacatctagatttctatggtgaaaataaaagtgatttagagaagaaagtttgcaaacctgtctcgctctggagcaatctaatagtgtatgagttacgatttcaaaagaacacttacatgaagagcaagagggagaggaaatgtttttttttttaacagagattagatgcagtaggaaggatatgataaaaagcttttcaaccaaa

SEQ ID NO: 39795 - DNA, 1154 bp, Cannabis sativa
  modified_base (771)..(771): a, c, t, g, unknown or other
  modified_base (872)..(896): a, c, t, g, unknown or other
cctcaaggcaactcatttattaataattttttcttgattttcgtgtccaattatgtacgtgtcatgttcatatttatggttcgaagtataggcataacaattgccccttaaaaagtatttttcattttttgaagaaaaaaaacatttcaaatcattgttattttttttttcttgtctttgtgtgtcgaagaagctctttaatttttattttggcgatttttgtcttcttaataaagagctaatcatggctttggtgataaatgcacatctttttaactaagtgtaacaaattcaatacaaaaaaaaaaaatcactggaaatacatatatattttaataagtttattatatataaataaatataaatatttttaatataaatataatttaattaaattaaatcgattttcaattaaattttaagaacgacgtttaataactgatataatttaattagaattttatttttaatatttaatttaattcaagtattatttcagttcaattagattcaattagattaagtcttgttcatcactattagtacacatataaatactcttaattaacatgacataatttatgatgttattatatcatagtagtataacgtcaaacgtagtctacattttatagaggagtgctaattacaaccttctattataattttttagtcaatttctatgtctgaaatcacatgccgaaacatttttttttcatagcggtattcattatagttacagtatcattcctgtaaatttttgaaaaattntgaatagtttacagtaccgaaacaaagtttctaatattctagtttaccatgcgtgtttaagaaacttcaaacgtattttcgacattgtaaactattcgaannnnnnnnnnnnnnnnnnnnnnnnntgttgtaagcataacgaacaccccgtgaaaaaaaaatattccaatatatatttttaagcgtaaaaaatgactaggagattataacaggaagttcacggtaattgagacgatagctctattttatatatatgtatatatatactagatgtgaattacgtggtgagccacgtaaatattagttttattttaagttctagtagtttttgtttaagaatttagtgactaattgtaaattatgttataaacgatatgttttat

SEQ ID NO: 39796 - DNA, 3121 bp, Cannabis sativa
tttttagtcacaatacttattgtggctaaaactaaattagttacaacttgtatctaaatattatattttaattacaagtaagttatggctaaaagtcacatttagtcaaaagaaaattgtattatgattaaaatattttctatagcatttctacattgtttttatatcaagataaacactattattttaaattttaagttgatgaaaatgaaaatatatatataattttagttttgactagttggggtctaacatgcttcgcacgtgagctcgtagttcaaatatatttttttaattgtaacatgtaaattttatgtcttgatctttattttattttttggtattttctagaagtaaataatagcttaataatagtaaattaagagtctggttgttggaaatttatacagaggctaactatattagataccactcaaaatgttgtattgttattgatacaattaaatatcatattcaacatgatttaatataaattatataataatttttttcgttagattgatttaatataataattattataaaatatcgttaacaattcttaagatatcaccttatagtggtgttagacattattagtgcttaatagtaatatttttcaaaattatcaaacaatgaatactggctaaagatttatgttggcttcgactattattagctacgttttctttaagaagaatctttttgttgttgttctaaaataaaaagtaccttattcttaagtattagacattagtttattctatttgagagagtgtcacaaaaatactttcaaataatatatataaatactaataagttggtataagtagattaaactagattagaagtgaggaatgaaataaaatataaaccaaaattattatattattattattgttacatttttttttaatttataattaaaatttgtcttaaaagttataattgaatagtaaaagggtatttttgtaaattaatatgtaaggactaaaattattgacattttgattgtagttatagattatagataatacatacacatacaatgatgtaaaaatcaagcaaaaataacttgggtcatgaatagaatatttaggtaagtgtagagccataaattttagccgatgaaaatttactttggtaatagcaacgattaattaatctagtgtatagtcaattatatagagaaaaattgacctgaaaaataatagtattaaacacatcatgaggaagaaaatattaaataattaatgttggtgttggggaccaagaaataatgcagagatggcatagtaaaaagaaaaagaattatatacatacataagagtaccaaacaagaaactccaaaggctagtcttaatttgatgaaagcaaatgatcactgcaaagagcatatataagagcccatagtacaatttctttggcattttcctctgaaatattgtgaatatatcaccattttcttttttcaaactataggtatcataaacatttattttgtggtaatatatgtataggtaaaaataaactttgcaatagtggccttagatcagcaccttcaatgaagtgttaaaaagatggtgtattattatatttaatttcacttacaaaaaattattattacaataatattctaaaagtgttaaatttggtatatactaaagagaatagctaaaaagtactattgatgtttaatactctttttagtatcatactgttattgatgtcattaagtctcatgtttcatataatttaggaaaataatttttagaaaatattgataatcaattgtaagatgctacctatagaaagtgttaggtaccattggtactcaataacaatttttatactaaaagttgtgttaaatttggcacaaggtataacacattgtgccaaatttgacttacaataaatgttactttttttattcgttttgtacgtcgtattgcagcgtattgtattgtataatattatattaaattgtattttatgcaatattttatgtaaaactatatatggtattaacttttatggacacctaaatacttaatattttagtataaattaaagtttaatataatattatataaaaatataatatacaatccaattcaatataatacaatacaatacaatacgagctaatacgacgttccaaacaagccatttatttactataatgtcactattattatgatttattgacttttataaaatttaaccttcttatattattatttaaataataaaaattatatattgtcaataaaatattaaataatcatcaatataattaattaatttttttaaaaaatatataattaattattttttacttattttatattttgtgtaatagaactaaattataaatatagctagttggttaaatataacacaaattttaaatcttgaattgtagattgtcttacatgaagagcaagtggggtacaattcttaatttctggtaatatttagatattagcatatttatgaaaatttcaagatgtatagggaattcttgaaaattaaattttcaattatttaacacttgcctttttattttggctaattaatatttttattatataaacttttagttgtattaaattatgtcctttgatttttgtaaattgttaaaaagaaatttcgaactattgagaatgttgaatttaaagatttttgttaaattttatttaattttactaatgtgatgattgtctatgtactaaattgtgtattcaaactttaatatcaattaaataatgctcctaaattttaatatgtagtaaatattatttcccaaaaattttcatttatattagacttccgttaataaaattgaacaaaaattcttaaaatttaataattttaataatttgagaaaaaaaatttaataatctaaaatattaaaaaagtataatttgatacatataaaaagttcagatataaaaatccgctatttatttttattggttagagggcatttgtaaatttaattagtataataatttatatcaatatatatatatatatgtgtgtgtgttctcatcatatttatgagtaactcaccaatgtctgtccttttcttttttttcttttctaattcttttttttt

SEQ ID NO: 39797 - DNA, 2724 bp, Cannabis sativa
atggcagaaactcaggagttcgaactgaacctcctgaaggtgaaagaacaaatcaacaacaaaatcgggctgcaaatcaagaaatagaagcccttgttcccctcccaaacaacaatcttctccctctcaacatcagattggatcgtcacaattacaccatttggagatctttggtgcttgctgcaactagagcatatgatttggatggataaattcttggcactcgtctccctcctccagaatttcttgcaggtaatatccctaaccctgctcttcctcaatggatgcgttttgatcaattcttgatgcattggctaatgaattctatgtccgaacatatgcttggtcatgtgattcgttgtcgcacctcctctgagatctggaacacttttgcccagctgtatgctaccagatctcgagctcgattattacagcttctaaatcttcttcagaccactaagaaaggtgcccttatggtcgaagaatatatgttaaagatgaggcaattctccgatgatcttgctgcagctggtcaaccaatagccgatgatgacttaatcctttacattttaggtggtctcggatccgagttcgaatctgtcgttgtgaatcttacttcaagaactgaatctctcactcttcaagaggttcaattcatgttgcaaagccaagagatgagaatccagcaattcacaactgaaactcttcacaacgttcaggccaatattgctaatacaaataccaacagcagcacaagaggctcaaattataccagaggctatcgtggttcaacaaggggaggccgattcaacaatggaaatcgaggtggaagaggccaaagaccaatgtgtcaactgtgtggaagggttggacacacagccgtgaaatgttatcatcgcttcgatatcactttcaatgggactgcaccaggccaaaataattccacttcatcaaacagtgacaatcctcaagcattcttgactgaatcgaattccactcctgctgcaacaacagatttttcatctgcttggtatctggatacatgtgccacacaccacatgactaatgacacttccaatgtcaattctgcagctgattataagggtaaagccaaagtggttgtaggtaatggttcaactcttcccattcatcatataggccatagttctattcttaccaatttcccacatcaatctttacttttacaagatattcttcatgttcctaatatcaccaaaaacttactcagcatatcacaatttacaaaagataaccatgttattcttgaatttgatgattcttgttgtctcattaaggacaagagaaccaagcaagttcttcttcagggccatctcagtgaaggcctctacaaacttcaagtctcctcttccaaattttcaagccctcaccagtcctctacagtcaccaaaccaggtgcttataaccacaccactaccagtaatcctgtctacaacaaatccaagactgccaacatttggcattgtcggcttgggcatccctctttccctattttgagcaaaattttatctactgttgtacctaatgaaaaatgtaaactttttgtttttgtgatgcttgtcaaattggtaagcttcaccaattcagctttaaaagaacagaaaataaaacaactcaacctttcgagttgattctaactgatgtgtggggaccctccttctattcttccaatgatggtttcaaatactatgtcagtttcatggatgattttactaagtttgtttggatatttcctatgaaagctaaatctgaagtgcatggcctattccttcacttcaatcaatttgttgaaagattctttcaaactaaaataaaaagcatccaatctgatcttggcaaagaatttgaacccctatatgctctttttcgatctttaggcattgtccaaagaaattcttgtccccatactcaccaacaacaaggaagaatagaaagaaagtttagacatgtagttgaaatgggcttaactctcctttctcaagctgatatgcctttacatttttggtgggaagcttttgcttctgcctcctatctcattaataggcttcccacacccattctcaattacatctccccttatgagaagctttttcatcaaaaacctgattataacatgctcacggtgtttggttgtgcttgcttccctttactaagaccatatgaacaacataaagttgcttttagatcatcaaagtgtcttttcattgggtacagcatctcctctaaaggatatagatgcttacacccttctggccgtgtctatgtttcaagaagtattaccttcaatgaggaagaatttccttacaacatcttattttctgctcccagcagtaataacacaactcccccagccattgacagcaatagttttcgtgtccctactcatacacctattccatcacctctaattcctcctacagaccctacacctcaatctccaaccccactgcactctcccaacatcacagatcacaccagcaacccacctctctcggccagtccccaaaccagtaccaatattcccacaccagaaaatattttacctgctcacactcacaaccaacaccctatggtcaccaggtcgaaaatgggaatttttaaaccaaaaacctttgctgcctacactacccaagaccaagaacctactacactcaaggctgcccttgctaatccaaaatggaatgc

SEQ ID NO: 39798 - DNA, 1409 bp, Cannabis sativa
gtctgcaaaggatgtaagtttggtgttattgttgtttgatttttgtttagtttttttctggttgttttattttttcgtattacatttgatgatttaatttttttccccttcttgttctaggttatatcagattctgattttgaggatgaagtgcatgatgggggagaaaagcctaaaactaaatccaaggtattttttaacttgatttgtatcattttattgagttcatttttacagcatatatttgtttttttgtcaatgatttattcatttatcatcactgttttatgttttgtatcattctttttgtatttcttttatgaatttttgtcaatgttattttcgtgttgttattaagttgttgtttgattgtttttatattacacagttcaacgcatatttggttttacaaggatttacgacatttttctcaatggttgtttatctatttatttttagtttttttttggttgtttaacataatttcagggttgacaactatttttaaattttcatttttttagaagttgttacagtgttgtcactatatttcttcgaagttgtttatcttttaggcttagcatactggacttcttctattaatgttgtttttaggttatgttttgtttgtttcctcgttgcttatttttagatttgccttgtacttattgtttgcattatattttttttagttgttcaaatttgttgcttatgttttatttgtttttctatttttcaggtccatgttaagagctcagagaagtttgaagactttgacttacccaaaaaaaaaatcctcctaaggtgtccttttttttttgtcttatttttattagtacttttatgtttctggttttagtctttcattcttttttctcatgttttttgtttcaactgctataggaatgggattacatatatgatcagaagaatctgtttattgcaaaagtcgtttccactgctacattccaggttatacaaaatattaagtcttgcctttcccctgaacagcatgaaaatttttccaaaatctgttttggacatttccttaagcatcctgagtttaaagttcaactgcaagtttttcatgggttgttgcgggaggttcaacaacctaatgatgctgaattgtgggttatgatacgtggtgttaggattaggtttagcattgaggagtttgcattgataactagtttagattgtgaaggtgattgtagtgtgttatattttaagcaagacgttaatagtctttgtgagaaatattggccaacttcatcctctattactaaagaatctgttaggaaatgttttaaaaccacgtggtggggtgattctgatgaggatgacgtgaagttggcagttttgtattttgtagaatggtttttgcttagtggtactaagcataaaaa

SEQ ID NO: 39799 - DNA, 1895 bp, Cannabis sativa
agtatatatatgaaaaatcccctaaaatcaatagtggggagagttcgggacaaattactaattattctttctaaaaaaccaaaatgtgtgagtgcgagacaaataggcccgtatattgtccagcacggcacggctcggcccggctgaccctctcacttagccaacttcatgtcgccacgtgtactagattacttggagaaaacgacgtccatacttactcccccacacacattctaatctcatgtcctttcatcttcttttattttcccgaaacacccatttaatataataactaataagacttgtccaatattaataaaaaacggttcgtccaatgttaaatagggaaatgctaaagggcacttgtgatgtctagtacttttttatgtatcaatattattattgattcaaccaagtatcgggtttcacataatttaatataataatttttagaaagtatcgctaactaatcgcaatgcaacatgtcgagaagatactagacaccactggtacttaatagcaatgctctattaaataatggtttaataagaattaaaaaaaaactagcatgtgaagtctaccgtctcatctcaaataatcacatccattgttactagaaataaatatataattttctttacaatattaatcaatccaacggtttagattcttttgaatggaatctaacctttctctttttatcgaatgagtctgtcatcggtctttctagactttatttttatttttattttttaatatttaaatttagtattatttattgaacaattaatatttttacttcataaatttttaatattatcgtgtcctttaaaattcatagcttattaaaaaatcctcaaaatataatatatacatttttttaatgaaaaataatattttattagataactattccagttatcaaaccatgtaacaaattagttggaataaactctagactgaaaatacaatcaaggaacaatacagatgctctaacaaacttatgagccaccatatttgctgatcgacgaacaaaataaatagaaatattttttaaaaaattaatcatagccttaccatcattaaccacttgaccgaacgtggatatcataacaattgagcttcgcaaggcttgaacaactgaaagacaatcggtttccaggaccactttttgccaatgacgagccttgaactttgaattcaatttatatatttgtctcattattatatgaactaaaatataacaattgaatgtgaaaaaaataaacattagtgtttgttttgggtaaattaactcggcaaaaccaaccaatttttattgggcaggttgaaatttattttattaatcggatgagttgcatttagattttgtaatccgatctctacgttgagttgaataaattgtaacataaatcgaccaaactaggtacactcctaatttatatatatatatatatatataaatgagggctattatagtagggattaggtattttacctatcaataggaatagtaatttatagccttgatttaatccaattgctcaaattaactcttgaaaactacaccataattaatatatttttttttatttataattaatcttgaatattaataattgtaggtcaactaacaaactccaaacctatttttttatctttttattttatttctatttaaagtttagttttaattatattttttttatttaaaatttacataaaaaaaatattttaattaaatttatttttaaaacaataattatacttataaaactattacatattcaacttataataattttataataatcactcttaaaataattaaaatgtcatgagtgcaatacttaagtaatattttcttttcttttctttagttatatttaatttaa

SEQ ID NO: 39800 - DNA, 3092 bp, Cannabis sativa
tagtttgttaagtgaggctatttttatgcaacaaccttcatgtttttttgatccaattaccagaccatgtatgtcatctgcataaggtcctttatggcccaaacaagcttcaagagcttggaatgacaacctcagaaccagcttgcttcaatggggattcacagcttctaaatctaacatttctctatttttccatggaattggtagtaatctcatcattctcctagtttatattgttgatattcttgtgacaggcctaagcaacactctcatgtccactttggtgaaggatccaaaccatcatttttctctctaggacttagtagatgttcactactttttaggagttgaaatttctagagattccactggcatgaatctatctcaaacacaatttattaaagatatttttgttaaacttcatatggacggtgccaaaagctatacaaatcctactactgctgctacaaaattgtccttacaagatggagaacaatttgatgatcctacactatataggagtacaatcggagcactctaatatcatagtctaacaaggccatatgttgcctttgttattaacaaactaagtcaattcattaaagctccaactgttctgcactgggaagcctgtaagagattattgaggtatgtcaaaggaactattagtttcagatggcctgataataagacatgttgctgtaatgacattgaaaagctactctgatgcggattgggcaagttgtgttgatgacagacgatctacaagaggtttatgttatcttcttaggtgataatctcatctcgtggtcagcaaagaaacaagtacttgtggttcgttcgagaactaaaattgagtttagagctttggccaatacagttggtgaactcaagtggattgtctctttgcttagtgagcttcagatcacattgcctcactattctattatttgggttgacaactagagtaatattacactagcaacaaagtcgtccattctcgatcaaagcaaagtgagattgacttacactttgtaagggaccagatcctagacaaaagacagtttgtttgttatgctccttcccttgatcaggtggtcaatattcttattaaacctctgtctaccaatcgttttagctgcctcaaatccaaattaaaaatggctcaaaccctttttcgtttgagtaagaatgttagcactaagtattactaactaaagttagttagtttagttaattagtttgtttagaggtagttattctgtcaagtactgttacatttgtagtcttaattttatttatctagaaataacatggtccctcactaatattgggttaagctttctttgagctaatcgtattagttttctctcaaaattgtcttgatctactttcaattctttacattattaattagctggttttagattaacatattaataagacatttattatttggcttatttgtaccgcaagtccctaaactatacatgttttggcaagttggtcctcaaattttatttttttggcaaattagtctccaaactatataaattttggcaaattggtccccaaactttatattttagtagattaattcccaaacttttatttctctagcaacattaacttctcattattagatattaatattttattatctattttacttgctttaatttatatttttgtgttaaattcaaataattttattttttttaattttaatactttgagaaaaataattatattaattttttttatttattatataagtattagtattttaatactttaatttattatattcatatacattaataataataaaaaaaaaagataaatactagcagacacatataatagttagagagaattttagcccctcatatttttatattttagcatttatagtatattttattgttgatttatgaatatgtggtattataattttaataaaaaaagaacaataattgaaaatgcttaaataataatattatatttttttaaactacaaaagtaaattatattttaaaatttatttttaacttatgtttcgcggcgatcctaagaaaatttaccatcgttgatgcaaaatttaaataatcaataaatatataattaaaaaattattaaaattataataccacatattcataaatcaacaataaaatatactacaaatgctaaaatataaaaatgtgaggagttaaaattctctctagctattatacgtgtccgctagtattttttttttcttattgttaatgtatatgaatataataaattaaagtattaaaatattaatattaatataaaaaataaaaaatattaatataattatttttctcaaaagtattaaaatttttaaaaaataaaactatttaaatttaacacaaaaacataaattaaagtaagtaaaataaataataaaaatgtcaatatctaataatgggaacttaatattgctaaagaaataaaagtttgggggatcaatttactaaaatataaagtttggggaccaagttgccaaaacttatatagtttggagactaatttgtcaaaatttgaggaccaacttgccaaaatatgtatagtttagggacctgcggtacaaataaaccttattatttagggtattttacaattttgtatacattattttaattaattacaaaatatgtgtaaaaaaatttattaccattttctcatacatttttatatacaactagaaacttttttcaattttttttataatatatatatggtaataattattaattattgtatgtatatatgtgtttattttattttttattaataataatttaataaacaaaataataatattcacataagtttattatatcactctatgtgtgtcatgtttattttttagtaattttttttagaaaaacaaataatatatataattgtttatttttttttctttttctttgtttttagtgtcatgtttatttattctaattagataatatttagagtttataaagttatgtttttttatttattttttgatgtaagaattgtatttccatagaaattttgttcactaactcattaaaaaa

SEQ ID NO: 39801 - DNA, 2330 bp, Cannabis sativa
  modified_base (117)..(132): a, c, t, g, unknown or other
cataaaaagaccgtatttttcgtagataaaattttcgtagataaaataaaagtagataaaataaaaaaaatcgtaaaaatatttaaaattcagtgaaaccgtatttttgtaattttnnnnnnnnnnnnnnnntatttgtgaaataattcctaaattaaaactcatttttttaagtcacatcaaagttttaaactttttttataattatattttttaaatcaatttttttaattatattacgttaataaatattataatatttttcatttttaaaacggtacaaatttttaattcaattgcaacatataataattagaagaataaagttttaatcgtcttaaaaataaaaaatataaaagacttttatagtagggaccacttttttcccttattggatatggtctctatggttaacatttagagaaattataattttaaatctaactatatattttaatttgtatcatatattcttatattattataaaaatttagagcttaacaattattataaaatattttaaaataatatataaaaatataatcatataatactataatattataaaatattttctaaattattataaaatatttcacttaaattttatattatataaaataacatataatatcataattaaaaaaaggaatatacattatatttacaaaacataaaatttaaaattatattttcattattacaaaaatcgtacgaagcgtgggtatatttcctaattaactaaaaatctaaaaatatcttatctgattgccacgtaaaaaaaattatatcgcttttagtcacattgtcattcatcctattagtgtcgttttaactgttttatttacgttttgattagtaattcctctataaacttttctcaaatcgatttttgaaatcttagagggtatatttatatatatatatataaaagtgtgttttgtgacttcaggttgtaccctattccctcagcctaatgctttattcgtccaattatcctctttttttttatagcaaaaccaaaagcaaaactcacatattactcactcacattttatgctccaaaccctctcggtagagctataatgggttttaatctggcgattaataactcattcaaccattagttcttagactcctcaactcttcctattaatgtcggatttttagttttattgatgtttttgataagtttttcttctataaacttttctcaaatccgtttttgaagtttttttgggtatatttgtaaaaagtgtgtttttgtgacgtcaggttgtcccacattccctcaacctaatgcttcattttatcctctctttcttgatagcaaaagcaaaaaagcaaactcacgcattactcacacattttatgctccaaaccctcatagtagggctacaatgggttttaattcgttgattcaaaacctattcaaccattagttgaattcttctataaattattttttttaataatatattttttatcttttaatctctaactttatttatttgtgattccattgacagatggcagatatgaataataataaatatgattttattgagaatatgaattttcttattgggataaaaaaacactcccaccatcaaatttacccaaacttgatgatacctttgatagagatgaatgattaattgttattaactaactcaaactcactaatgtatgtattagttaattcctatctcatataattaatcattatatttatgtgtgctaattgatatttattttaaatattaaagttttcaagttgattacattcctaataacaaagcgatttggggttcatttgctatctattgaagcagctcatgcagcagttgctgaatttaacaggcttatatgaaaagctttgtataatacataattttatataaattttataaactaatatactagtttatgttcacctagagccaataaggttattcatgaattagttgtgcatgcacttagagtgagattatctattttttctaattgatatgtattaaccttttattcttcttaataaaagtgtaatttttttttttttgaaaaaaaaaacttataaatatttatataaaataaagagaataataaaattgggtgccaaataaatagaatcatttttgagacattactttgtcttccgtttccacaagaaaacatgaatatcctctagcaaacccaattaatcaaattgctgcaaattgtgcatgcaccagtgcatgtttaaactcaacacttttatctatatcttttaaatctacaaatttataatgcttaattaaatgagtaccaagttttttttttttttttt

SEQ ID NO: 39802 - DNA, 1781 bp, Cannabis sativa
gcccaaataaaagtctaacactcagaggtaaaaagcttggctgatatggcagctaaggcagcgttgagcccagctgatactccccaggcgtaccctaattaacccttctcttttcatgttcttcttcatcctcaacctcaacctgcttgtttatataaactcaattcagattcgtattcaaattttcactatgttggttatggttagacaaagccacgtgaacataattttaattgtttatagctccaccaaatatgtaccaaatgtccccaaatgccttcagaaccagttatttataagtcttttatgggaactactttcccaataatccattcctttctacatatatataggtacataaagctaagagtcttcacattctctactacaaaaacatattttgtgaactactttatactcattctcaataaaatatataagaaggctctcagaatctgaagatggctttcaaccaataaagaagctgcttttaactccaagatcatttcaaaaggctacattgcagtttatatatgttcgaaaggagcaaaagaagtgacattagtacctctttcatacctaaatgagcctgcatttcaagaattggtaagcatggctgaagaagagtttggatatgatcctttggtacaattccttccagtgtagacatctttattgattaaattgattgtaaattatagaagaactaacataatttagaacagaaacaattttgtaaatcatatactttgaccatgaaaaggaaattgattggccacttgtggaacttacatttatgtatagataataatctataaaaattgaatgaagcattgaatcgatcttcaaaaatctgatgaaatgtcagtgcagcgaccaaaggtctaatagtacactgatactttttctcctattgctaaactcacatctgttcactgttcatttccgtgacagctactcatcattggcttttgcatcagcttgatattaaaaatacttttcttcatggagatcttgaggaagaagtatatatggagcaaccttctggctttgttgctcaggaggagttaggacgtatttgccgtcttcgcatatctttatatggattgaaacaaagccctcgtgattggtttagtaaatttagtcaggctgttgagaaatttagtttgttgaaaagaaagtcagaatattctgtgttttataaaagatcaactgctggtatcaattgttaatggtgtatgttgatgacatcgttattactagaaatgatactgaaggcatctcatcccttaaatctttcattcatacctaatttcacacgaaagatttaagggagctcaagtatttcttgggtattaaagttactcacagtaaacaaggtatttttctgtctcaaagaaagtatgtacttgatttgttaactgagacaggaaaattgggaacaaaaccttgtaatgttccaatgaatccagctgtgcatcttacacgtgatggggaaccatttgaggatcctgacaaatatcgcatattggttggaaagttgaattatctaactgtgactcgtccagatattgcattctcggttagtgtccttaatcagttcatgtcttctccaacaattcatcattgggcagcactagagcaaattttatgttacttgaaaggagcaccaggacgagttataatttacaaggatcatagacatacccagattgagtgtttctcttatgcagattgggcaagctcgaaggtagatagacgatccacttcaagatattgtg

SEQ ID NO: 39803 - DNA, 2194 bp, Cannabis sativa
  modified_base (1137)..(1143): a, c, t, g, unknown or other
gtcatttaaaaagtataattattaatgataatttgttgaaaattaatatttataaatatataaaattttataataatacgtctctttaaaatagatatattgatgcacgtatttgaaaattttaaaaaattcaaaaaagtttagcatgttaaagataaggttcaaagagtctattgcaggtgtattttttttttttaaatttttgtgcgtgtgaaatagatgtttgaacattgttttttatattgtaaattattatgaattttttaaaattttataaaatatcttaaataattataatatacgcgactatcaaaatatttagactaaaaaattcttatagataaagaaatataattaaagattgtacccattttagtagaatgcattgtagaaacacccaatatattataagatcaatcatatcccaacaagaagtgaaattttagttactgtttgttttccctcatgcttatcctgtttaattactaataaaaacaaaaagagatatggaagaaaatatgagaagaattaaaagaacgggaactatatacagtgattaagatatatatagagatagaaaatctaatcatatatgatccttgtaataattagttaaagaagttaatacatattatccttatacatgcagaatagatatgatcattattatatttaattgggagtttatatataattcttaaatattaattggttttttttttattactgatgttcggaaaatggattttgatgggaaaaagaaaaatggaagaaaaaaaaaaaacaattttttaggtttggtatgatataagaaaaattgtaggttgcatctccaataaagcacaattcattaaattggtatatggggtttttacattattttatgggtgttcatcaaaccgcccacaccgtcaaaaaaatacagtttgaaaaaatttttacagtacggttgcggtttgattttttcttaaaatgcgtggtgcagtttgcggttttgaattgataatatgcggatcaaaccgcacagcacattataaaaatacatattttaatatttatttaggtctaatatgtgaatgttcaacttaaagtctactattattgtattgttaaaacttaattttttttttcatattnnnnnnnaagccttatggtatttttgacaagcgttgatcaagttttgttatatttgtgatagtttaattatttggtgatagtccaaaatcacaaaaactgcaccgcaccgcaccattttttgtggtgcggtttatgcgattttttagtttcgtgcggtttgggaaattagaaaaaccgcatgtgcggattggtttgaaaaaatagtcaaaaatcgcatcactcgcaccgcgaacacccctacattatttaagtctaatggcacattaaattatacacttaattaatatacattaaattttacactattaatagtgttaaattttaaatctacacaaatttagtgtgtgactttttttttttcattctaactcttatttattttatcttaaaatataatgttacattttagtcctcatattataacaaaaataataaatgatttaaaacatttttaaaaatacaaaataataataaaaaaatactaatactaataaaataataataaaaaaaaacataatactgagttataaaactaaaaacaacatcaataaatattaagttaaataataatttaatagttaaattgttcacttgaaaattttagccttcaagaatattaaaatatcagttatatgaatttaaagtattttgagaatcttaatatttttgagatgcttgatattattagtgagttctaattttttgcataatttttatttgcttatttttaaaataatcaaatatattaagatcaattataaaattttaataagttttttttttttaaaaaaaaaataaattaaattatttcaaagttataaatttttattagtatgtatggcataattatatcataaattaattattgtgggttattaatgtaaataacacaaataattttttttaagtaaaatatatttatttaatagaatattcaatataaattattagagttgtatgaaaaaaaaataaaatattctacatcaaattagtttaattattgaaaatggtctaaaaatgtaaagtttggttggaccgaattctcttaaaaaaaaaa

SEQ ID NO: 39804 - DNA, 2067 bp, Cannabis sativa
  modified_base (2019)..(2027): a, c, t, g, unknown or other
aaaactgttttaaagtataaaaataaaaaaaaatatatctttttattattattgacaaaagaaatgaaaattcatcaaatcattattaaatcgttcattatttcaaaaatatactttgagagagcattactcacttgataaactgttaccgcacaactactgcaaacatcaaaaagtaactatacgcaatctctttgtagaagtccatgccaactagcccaagtaattatttggccaaatggccacactaagccaagagtgaatcacctctatataattctataatttgcttggagaaatgacactcaaagaagagatgggcatgacagtcatcacctatattgcacactttgcaaagttgagacataataggaatacctctttttctcgagtgatctctagttaataaataattatgagaggtttgctagacaataaatctatgatttggtgtgtatagtctaatcactttacaattattcacatttgcataaggagtgagaaaaatattgtagagtttactaatccaaaatctctcacatttcctagcctcaattaaaaatcgtgtcctgagagaagtggttcatgagattgagaaacttgcaccagtgccaagtcacatctccttttccctcacacacccaaaaatcttggtgtggaattaatcaatttaacccaaagaacatcctgctttatggttagagccacacaaactaagcaatcgaggctttattccacttgccccaagcctcataacacataggcttattaataagattccaagaagcaagatgcattttcctagtattttctttcacaccctacaaaaaaatctttgcaaagcatttgactactttttggggagcataaaaatactcatccaataacaacagatgtctaacaacattgactgaatcaattgtactctaccagcaaaagagaggtgatgggttgcctagctatgaagcttcagttgaatcttcttgagaaaaaattacaatcttctaccttccattttattagcttcataggaaaaccaagatactcgaccatttagcactaaataataagttgaccccctgaagcatatcatgatccaatcaatgaacatggaggaaaatagataactcttcagaagatcttataaaaagtcccaatcgatgatgtcataagccttacttaagttaatcttcatgagacatcttggagatatcccttttctattgcaaccacggaacagatcttgaagaacacgcacattatgagcaatggatatgttcttaatgaatgttccctgattcatattaatgattgagggtaaaacttcagacaacttactatacatcatcttagagatgcatttatagaggatattagaacaagcaattggcctataatcaatagcttgagatagtttatatgtcttcaaaatcaaagagaggagagtattatttagctgagcatgaatctttcctgtttcaaaaaataacagcacagccttagagattttctcaccaatgtcaaccaataacactttccattaggacatgggcttttcaactcatgaatatcaatataaaactttcttaacatcgagctagtaaaaggcttaattagctgtgtaaagttgttagagaattttggattttttagtagtgaacccaaaaaccccaagattgagataaagggattgagagagagagtgtggtgagaaagagagaaggggatcgcaattctccggtctccgttcaaagttacgacgtcgaagattgcgcaaaggctttgtcgattagatcaattacgagagagaaaaagattgaggaagagagagtttggaaagggtattttctgggtttataggttcagagcttgtagtggtccatgggcaaaccctaaaacactaaaccctaaatcctaaatccagaaacccaaatcccaaaccccaaaccccaaacccataaacatttattttcaatttaataaactcactaaaagacaaaacattaatggggcaaaaannnnnnnnngcccctccacactaaaaccacatacagtagaacctctatt

SEQ ID NO: 39805 - DNA, 2413 bp, Cannabis sativa
attccattgcacaccattgtctaccacattcccacatattccaattactcttgttttactcatctatatttcatattggggccttgcattttgtagtttcttgaagtcagtgatttttggttcattattgtgcttgctatccattttagtatcatgtcgagctgcagttattggtttatattgctaattggatattgcaactaattggctgacatgtcttgctttaatttttgtgtgcagcaaggattgtagtactactaggacccgtttggtacgcaaaactggattggattagacaggctaatttgtccaatccagtgtttgtgcatggcagaagtcttgataactaatccagctaatctcatctgtctgggattatttatcccatccagcacagatgaaattttttttatagttcttttttaattttaattttattaatatattttaaatttaatatgaatcttgtccaatctagtccaattattttcagtccaatcctgcgtaccaaacgggcctagagtactagattatcatgtgattttgtcctctttctcttgagttattgtttctttccaaaatctaaatacaatttgttttgtaggctctttgtacagacaatacctatggcgttgattgtggaagcgatccaaaagttattcctaacctcacatttgaagaatttaaggtttgatttggtcactaaaatgaagaattcttattctaatgcattagattagcataggcttccaaattcaagctataactgcacagatgttgcaactgtatttatgtttctttttcttcttaatttattattgttaatggtagatttgctaagttttgcaagatttttacctaaatattaccatcccagcaatgccagaatatggttttatggggatgatgatgttagttaagatgtcaccgagcgtctacgcattttgaatttcagttaagatatttgtagggtattaatatatatgcattgattttttattgtatagtgaccggatggtatgtcagtcctctttttcaaatattactgggagtgtgtaggtgatgacttctgcaatgcggtttccgacttctttggatctggcagaatgcatagaggtattaactcgacaaatgtggttctcatcccaaaaattcacaacccgaaaagacctaaccacttcaggcctatatctctgtgtaatgtgatgtacaaggttttatccaaaatagttgcaaatagaattaaacctatcctcctttcgataattttccctactcaagcagcttttgtcccgaggcggaatatacaggataacaatgtaattgtgcaagagatcatccactcttttaacaggaaaaaaggcgaagaatgatattttgcaataaagattgatctggttaaagcctatgataggttaaactggaagtccattgacaacgctcttgattggtttggcttccccctgaaattttgtaattgggttactcagtgcatctcaaccacttcgctgaacgtatgccttattggtggaacaatgggaaagattatgccctcttgtgggcttcgccaaggtgacccactctccccctacctcttcatttgtgctgctgaaattctgtctagactattggaagagggcctgaggaagggagacttcaagggcgtaaagttaagcaggggagggccggtcctctcgcacttattctttgctgatgacttaattctggttggtcgggccaatgtgatggaagccaaaggcttttggaattgtttggaaaagttttgttcctggtcaggtcaacaggtgaacaagctcaaaacgttaatctttttcagcaagaatactcccaacggaatgagaagaggcattaaggatgtgttgggtattggctctcaggaaggtgtcattaaatatctgggtctgcctctgtttagatctagacagaaggatgcggatttcaacttcatccttgatagacttacatccaaattacagagatggaaagcaaaaacgctttccaaggcagggcgtgcgaccctgattaaatctgttggactatcgctaccaatttatgcaatgcaaatcaccaaactttctgatcgtatggttaaaagaatagatggtcttgtcagggatttttggtggggttttgagaaaggaaaccatggcatgcatctaagagcttgggataaactttgtcttccaaagtctcttggaggccttggttttaggaaaacaaaagaaataaacctggctttcctggctaaatggggttggaagattctaaatggttgtcgatctttatgctgcagagtcctggtgttgtcgagtgaatttcgcaacaccaaattatattgtattattaataacaagaagaattttatgtgtgaagacaattgcgagtattcaac

SEQ ID NO: 39806 - DNA, 1614 bp, Cannabis sativa
aaattgagaagccaaattgacatgtgaggcttattatatctaattctataaatatacatagctagctacttcataaacctttgaatcttatgcgtaaatacatattttagtattccagtttggtcgtgtaatatatattatatagacattgattaattactttgaaattataaaatgctttattataatttaattgatcacttcaatatttaatcccctttgatgggtttattctttagtatattacacaactgcgtacgtaattaacaattttgatgaaattgattttggccaagagtttcaagttgtcggtgtataggttattttttattttaattcttggaaaatataaaataatatattaatttattttagcatatatgagaaggttagaagtaatttcttaaggattacgtacgtacgtagttgcattattaattattactaattgatattatttttgtggggtttagagattgattgcatatagaactaaacttcaactcaaatgccaattagataaggaattaaacatattgatttaatatatcgagtgattatgacatatttttggaggtatatatatacatttcaagttgtgtgacacattatatataattgagtgttaattagggttaaaactttattgatcgtcaatgctttttttttttttttaattttctcctcatgatttttggttgtttttttgtgttaatattatatctatatatatattaattaaaaacgtataatcacaatatattacaattatttgaataaacatgtttcatacacataatgactttttaggggaatatgttgggttatagcatgaaaataaatgacctcaaattttgtaactatacttatagctttatatatatatatatatatatatatgcttagcttggttccatgtacttataggtcgtacttgacaaaaaataacatatctttttctaatctaatattgtttataattagtttaaccttattatgattaaactttctagattaattattattttggagttatattaaattattattagagattgctattatgtaatatgtcctgacatgatatattaatcaactgaagataattaacctagatttctgttgatttataaaacatcatgatctgtattgcaattaataataatcttacagctataaattaagataataatagtaattaaattcattgaacttcgatcatcatgtactaaaatcatgacttttctttacattctagatcaaatactcttctaattaactcatgagaattaataatccccaaatttattaacatgtcatcttttacaattatgtttcctaattaatattagttttcatgtgtcacatatatatatatatattataatttaatcatactaatcagatatgtagaatttatttttctattggacaatgcattccactaaactaaaactttacatcctatagaagcatcatttagatctgccaattgtattaatttgcatattctaaaaagtttcattcttagaccactatatgttatatattaattgtttgctaatctaatgttgttaaaaaaaattgacactaaaatctgtttagtttcgttct

SEQ ID NO: 39807 - DNA, 2039 bp, Cannabis sativa
agatctccacgaatgcctaaatgaggggagttagattacactatactctttttctttttatcaagattttcagcaaggtttttaatgagacacaatttttatggacatccaaggagaagtgttatgaaatattatttatggatgtccaaataaccatattaattatcaccattaatgcttgattgtatttttatttattacatattaatttagttttccatttctttagtcaatacttttgtataaataggggttcaccccattggaataaacaactgagaaattctcattcagtttccctttctctctttatcttcttcttcttttcttcttatctattttattattttttaacagataaaactaagttgatcaaatttaaaatttaaaattattattataaatttaactgttagaaaataaataactatttatataaatatataaaaaatttattaggtaagatattaatcaatcatctaaaataaaaataatatttcttagacaaaagaaagtaaataataaagctattatttgtaacctatataaataatacctaaacaatttttaaataatgtggaatttttaatttataagtataatgtatttttcaaaaaaaattaaaataaataaataaataagagaatgtgtcacaacataaaaaaaaatggactaataaaaaaaaatcacctaaactcttttacatactttcctttatagatgtatatattgatttttgctaagaaaagaaatttcattaaaccaagaaagacgaagaagcgcacaagggaacgctcctccctccaaccaattatttaagtaaaatggtagtgacaaccgaagggttcacttcctacaggttaacaaacccattacacttgtgagtaagaccccacttcgccagcgcattgtgagtacaatggtagatgtatatattgattgattaatataatttgatgtgtatgacttagttgcttttgtgttattatattgttgttgcgaattttaatttttattgataaatttcagcttagatgtcttgttcattttttgttttgttttcgtttattgtagtgttataatttgagtttgatcacttgttgtgcatgtgttattattttataatttattttttactgatacaaattgagtacatgctttgcttcttcttatttttatactgttttaatttggttgatattttatattgaaaaagttagaattgaaattataaaattaacacaaaaatatctatttattgaaaaaacccctaaaatgatatgttttcatcatgggctttgtcggcttatttcatttgatggaatactatagtgagactaatattatcttggagatttacattgtatattaacttttgccaattttttacaaaaatattatcagacggtattttttacttttttactgtattttttatttacattgtatactaacttttgctatttttttacaaaaatactgttagatggtattttttacttttatgctgtatttttttataagtttcatattgcagtatattgtgttaagttttcacttgtgttctactggtgttttaagttgtactgttttgtgttttactggtgttttataaaagcacagtatttttgtaaactttttcgtgtgatagtatttttgtaaaagttacccaaaatttcagtatttttgtaagtttatgtagagggtagaaatggatggaaggagaggaataaaagaagtgatgaatttctgttggtaagaacaagagagaaagggagagaagagatggccactcttcctagctccaaacaaaaaattaaattacaatccttcaaaaattgggtgaatccaataaaatgttttcaataattgccccttgatgctaaaataatcttgccacgcttatttatttgcttgaacttcccttttcatctttcatgtttcatcctcttcgatcgtaacaaacgtacgtctttgggaaattaacataaaagtaatatcggatataacataaaatcatcatgattgcttcgtccatc

SEQ ID NO: 39808 - DNA, 3422 bp, Cannabis sativa
taaacgtttcgggaaaagaggctaattagcataccctttagctttgcctccaactcttacagcagttgacaatgtatttcatgtttccatgtaacggaagtacgtttcagaccctgctcatatactaagctatgaaaatcttgagctgcaaccagacttatcatacggagaacagccagttcagatcctagacagaaaggataaggttcttcggaacaagaccatagattgggtcaaggtactctggagaaagagcaaggtggagaaagccacttgggagttagagtcctacatgagggctcagtatcgagagttgttcaggttagattttaaggaggaaatccttttaaggggggataattgtaaagaccgcttaactttaatgtaggaattagtagataaatagcgtttaattatgaaacttacatattagttatgattttttattttattaagctgatattatattagataaaaccaattttctatttctttttatgaaaaataagaaattaaacaaaaaaagagttttctctctctaagtcctctgtctctttcgaaccccccttagaacccagctagggtttagtttttcttcagcaattcaaggtgattttagcaagctttaagttttaacaagtcaaggtaaggttcttagcatctctttctttggttttaaaagctttaagttgagatttatgcatgaatttgtatgtttgggtactgtacttgttgttgttgatgtttattgttgttttatggagttaggttatggttaattatgtttaattaagctagttttgatagctgttgtaaggtttgaacaagctttgagttttagaactcaagcttggctctttaatggtgaattttgattttgagcatgttatgttgttcagttgcttgggttatgtttattggggtataatatgcaggtctggaaggtttggattcgaatttgttgggtttcgaaattgtttgggttacctagtgtggcttataaaactagttaaccggatctgcagctgggttctcgaacttttcgtgttagtttcagagttttggttgggcaattcctggttagtttagggtattgccatgttaacttttagtaggaaacttttggtttaaaaccttagtccccggatgtgatttagcgtgtcacttacccgtgttatgaatgatgtgatttaggggcctgtaattcaccgagtagttgttccgctcaggttggtcggcacacctaaattcaaaaataaggtaagattagtataattttatgcatatgtatttacatatttagcgtacatgttgtttatgcctgttagagtacattgatagcagtgtcagtatacatagagttgtactggatactgataaatgtaagtttggctagaatgctgatcgatgctatcacattaatatggctagagtatgactagcatattgagtatagactgatactatggtcaatgatattgtcgtatgaacgttctaaactcagtaccgtggacacgaggacagggttttggttgggtgtatgggcgcctgagtataacccgagatattattatgtttaatgttatgcttttcttactcagtctgttgactcacatttgctatttccatgtgcaggtaagggcaaggctaaggctgagcagccgtgagagcgagtagatggagattgtacatgtcgaggcggttaggcctggagggtacggtctttgggacatcagggcttattttgtatagttgctaggcgacaaacttttgtatatgctcaatgaaatttttgtaaataattttgtaagcggtaatgtgaagaccgcttaacattaacactttgggttaattaataactagggtttattcatgagattaaatttatttataatatgcatattgtggaaatttatttaagttagtatatatttatttattatgctatttatgtaaattgcttaatttctgtgactgtgttcggaagctgtggaaagtgacgttgggcctttagagagtcgcattttgttgggtatagaattttattatcatcggggtgttatttttaggttttgataatattgaaaatgagttatttgactattgaccaaactacccttgattaccattaatttttgaattattagttaagggaagataggtaatttgatggatgattggtttgtcttttgtgggcattgggggctagtttccttagttattgataagggttgattttattttcagcaagtaaaataaaaagaaaaagaagaataaaggttatagaaaacaaagttagaaccttctctatctttctcttcctctctttcgaattccttgagccagcaaggtttgggatttttcttggtttaattcaagaatttcagcaaggatttagaatctctaacccaaggtataattttctagaactctttttgtggtctctttgaatttagagtgagttgtgattatatatttgtaattttagttgctatgataattggagttgttggatttcatattctggagctaaattgaagttgattgtgttgtttttaagttaatttggttgaatggttaggttttgtgaaagttggatgtttgagaactcaacctaggtctttaatggtgtctttggattttgattaaattgttgagtccttttgcttgggttttgtttattgtagtatttagaggtattctggaggttgtgagtgaatttgggtttgatttgagttgtggggggactttttcgggttcccaacatagaaccggtcgaccggttttgggggacttatagaactcgtcaactggttggtacccaggaaccgggcttccggttgggaaccggtctgccggttgggccattttctagaaccttagctttccccatttttgtgttgtttagggtattagcatcctatttattgatagggttatccttagtttcaattttaaatccccgataagtgttttagcgtgtctctcatcgagttttgaacattatggtttagggccctgtaaagcgtcaagctgcgtttccactcaggctgacctgcacacttgagcatggaacgaggtaagataggataaatgatatgtatcatttgaatatatgcttaatattcattgtttacactactaacactaaatgggatgtgaatttaagggtgttagtatagtgtaggattccaggatagttacagtgttaccaacacgagaaacttccgggagtacaataatggctctaccaacacgagtacagagtttgtactttagtgcatttggtacagtggtcgtacttcccttaagaacgttcttaaccatttggtgggctcggttgttgagctcagggcggcttaaacataaagtcggtatagcattgcttatatatgttatccatatcttactgagtctgttga

SEQ ID NO: 39809 - DNA, 2656 bp, Cannabis sativa
aactctttattgtcgggtttttactaaaaagttttggcaatcctttctgtcatgtattaatatgcattatcatcacatgaggactagctgactagattaaaaataaaatataaaagttctagttaccttcttctcatattcactggaatcaagatcatatgccatgtctagaatatttttgttttgttggttgaataacattttattcactttaggatgagacatcaaaacttctaagctctctgaataccatggtgaagtggcaagcatatgaagcaatggagtatttccttcattatcttttctatttaaacggtaattattgagtagtgaagaaggatctaatatgagttttaatgtggaaggagattgtctcctcacagcatagtgtagcaaatttttgcctttctcatcaacaacttcatagctatctggacatttcgaaagaatttccttcactaattcataacctccaaacctgttggaagctgcaatttgaagagttgtggtgccatttttatctttgaagtaggcactgctttcatcattttctaacaacatcttcacaatctccaaattattatccgagtaactcgaagtgggcatcacagcataatgcagaggaatgaaaccatccttatctgcttgtttggtcagatctaatatgctctcctaaatctttcttgttaggcctgaacattttgttttttttttaaaaaaaatacttagtatgtaattataaatctgtttggtataagaaaggaaatcaacttattagttattacctgtattttcagttaaaattgcagcatggagaacttttctgccattagggccagtagaggctggggtggaacaattgtttagtatttcatcaaccaaatctaagtactccgcctctacaaccatgtaaagcggagtttcttccgctccattagccaaatgtgtgaaataagggtcttgtttagtcaatccttacaaccttaagatggttgaaacgcacagcctcgtgcaacgcagtgtccaattccttgttgctcagtctcatcatgtgttggacaacatcactactatccaccccaccaaggatggccttctcaagatcagattgttcaagtagtttagctcgattaataagaaactcaacaataagatcatgtccgtactttgctgccaagtgtaagggagactctcctcttgcattggtttgtaataacagttgtggacacatctcaagtatccattccaagaaagttgttgtattatgactacttgtttttgtagcagtgatattgacatggataactgtgttcttttctgtggtcaatatttggtcaaggcttggttggttaatattcttcaacacttggatttttccattggctgcagcttggaacagcttggaatccatgcgtgtgatgatattattgctagtgttgttgtttgaatctgccttagaaataaccaaagtagttgatgaagaagccatagaagtatatatattgctcttttaattaaaagtgaccaactacataatcacacaacaccccttatatatacatcaagttctaatacattttgattaatttaacaattcaaaaaagacaattttatctaactttcaaatcaacattaccaacccccactcatatttttttattggccatgcattagtataatttgtatagtagtctagaaggttttaggcactttggtgttttatatttttttattggccatgcttagcactttttagacgtgtcgttttgcgattgattaacgatactccctaaaaattattaaattaaattatatgagtttcgatacttagttggaccaatagcgatattaacacgtaggagggtgctaggcaccactagtgctttttagcatttttctaaaagagcgttgctattgggcaccagtggtgcttagcactttctagacatgtcgctttgcgattggctagtgatactctaaaagttattaaattaaactatatgagacctgatacttagttgaaccaatagcgatattaacacgtaggagggtgctaggcgccactgatgtcttttagcatttctctatatgaaattaccacgttggcgaacatttactaagaagatagagaaacttttaaatcctaacatttagtgatctgagatgtgttgatatgagtgataatcttttatttttaaatcattttattggataatattaagatgttactcaaacaaaatttagaaggaatgggatgagtagaaaaaaatagtaaaacatgaaaattatatggtgaacaatgaaatcaacaatttaattcatagctttcttggaacttttgtgtttgggatccttgaaaatgaaataactaatttcatgtgctacttaatctgttgtttgggtttcaggagatatccagccaataaataaattgtctaaccaaaaagtagggctgtactgggtccaaaaaatttgttgagtgtgttttatctaaagtaaaatgtgagtattattagatcttttcttacaaaaattttcaaaaatataatttttttcaaaccaaaaaatatatataaaaaaattggtacaatatttaaaaaaagagtcacatggagaggatcttgaagtgactgaggcaaaattggtacaatattta

SEQ ID NO: 39810 - DNA, 1182 bp, Cannabis sativa
taattatctttattaataattataataaggctttgcaagtaatactctaatttatcttttaataacaataatatacttatttaagtgattagagattttaatttttggtgcaataacatttaatctttagagatgatgagatagtactcatatttcacttcaagaataaattctaaattgcacacatttaatgtaatcttattaagcactaatgctagatatataagagattatatattatattctactagagtggaagatatatattattcttgtttcactcaaattaatccacaattattttgacataacccacttcttcaatttaaattccaatattaaaatggggacaagaacattaaggaatctttaaagacaagcaaagttgttgaagaaaataaattatgccccagaaaaactggtgaaaaaggtttttatgaagttttgacagtgacagaaagaaaggggacaagagtattttttttcccttactacttttatcttataaatataaatggccacttacatatttatatatatatatatatatgtatatgcttactaaattaacaaatcaaatgtaccaacaacagaacaaatttggggaaccttcaagggaaattccctatactttcatccaagcaatatttccataaagttttataatctcattaaagaatgaattgtactatcatttcatgacccatgagaattgagtcgagaacaaatttgaaatcatcaacaataattattagcttttctggggagtataataccaaaaataacaaaaatgaaatagaactagttagcttggcatacattttatttttggacctaaataggacactttatatatggacatataccggtatgaaaattcacctcacaataaataaattaatctaactaacacgtttttcttgtacaattaatacatatacacattttattagattattataaatattagattattattagagaaatgttaagaggtatttatggtatttagtatttttattaagtgtaatattactattggtataatttaatatcaagttttacttattttattttaataaacattataaaaaatagttaaccaattataaaataatttttcattgtggtaccaagcactacaagtgattcgtaacgttgttattattattattgttatta

SEQ ID NO: 39811 - DNA, 3301 bp, Cannabis sativa
tttcaacacaaataatatataatctctctaaattaaccaaaaaaaaaaaactaaaaacaaaatttttttttaacaacaccttgttgttgctgaaaagatcttgaagctcaagggctccatcacgatgtcatctgccaaatccgcttttgcaccggtgaagaagcacgctgcgaaaagctccaaaagcttgttacaagagaggaaacgcggctgggggacgcggggacgcgattgggggaggcagctgggggatggctagggactcgacttggggaggcaaagaagaaggaagatgaaagggggcgactagagagagaaattgttttgagtttatttaggttttaaaaataaataaatataagggtatttttggaaaaatgagaagttaatagattagtattgtacaaaatatttaagagggcattttttgaaatagggttttttttatgtacattaaatgaaatacccgcttttaaatcctaagggaaaaggagtattcatgatatctggatgatacagctcgagctcctcgtctgagtcgtatccagattgtctccctgattcccccacttgatatctcctgaacttgtcctccaactcgtctattcgcaattggattggatcctcttgctttggaccgagttgttggcgaagatcaagtttttcccgattcaagtgctctcgcagatctggctgggagtaattactatcagacctcattttactcacatactgtgtcctactcccggactcgtcttgctcatggatcttgtcctcgagtgactcgtagatttactggttctcatgctttctcgatcattagctcatcgagcactttctcctcttcgagttgatcgactgtgggtccttgaaagccctaaggtcacactagcttcttcacgctctgcttttccccctgagtgtggtttgtcgtatttcccccactagggtttgtacgagccctctctctatgggttcaggaagaacgctagtgattactcacaggtgacctacgttccccaggttgagtcctagggtcttcctcatttccatgatgaatttcttattcattagcttctagttgcctcccattctcatttctatgagagggttctagctgatcattcggattttcagggggaatctcattttccccaagttgttcttcttgggcattttcctgtcttttggttcgtgagccacgaggtctgccccgtggtcttctcactccaagttcagattgatcttgagtgttagtcccttgtgccgccctagctacaactgcatcacgctccaattcagcattctgccgttgtgcctctttcaggcggcgtctaaggtggcagttttccgtttcgagtgctctctcccataggctgagtaccttcacgattgtgtccttcatctcttattccaggattccggccattcccatgctgagttctcatcgaacgtgtcgttcgtgtactgggaccaacgtcaggttgggtcctctatgaatgagtggtccgagtgctggggccactctcgcagaaaaaataaaaacaatcaagtaaaatgtttgagcacaaagaattttttatgtggttttgcagttaaaattctacagttaaaattctacatagaaaattctacatagttcacgagttagttcacgagtcaatgttcacgagtcaatctgtcaatcttattagatttctgatggtttttcagggcctcttctcgtatgatttttttcgtccctttttttaatctaactttcctctatttataatcacatagtaggcagttaattacagagtacagatttgactgtgatctttacaacgtttatcccttgaaatcgtgggttttgattacatatcacgtagtataaatgcaattaatattcgaaaatcacacagttgtgattaattcgcttttactgggtcaaaatgatcgtgtatttaaatacgtttgaaatcatagcattctgggatgtcttgacaagaactcagtaccaatgaccttgatagcgagttggagctttttcacctatctttccgaggtcgacgatgtacgcctcgttgcttctttgtttgaaggcttaacacttcattttaacaatcgcaatttttattaacaaagagtactttaacagtcatttgaatgtcaacttctgacttgtcaagactattattctcactaaaagatgtcggaaattgattggtgatagtaacaggagcgcgccttcctatagtgagataggtgcctcgcttattaggtcttgagtccaccccaactgttatacttagtttgtatataatacgctaagtattttcacagtcaatatgaatccctttcgtcttcgaagttgatgtctcgccttatgcatccaatgttgtatgatttctcgttaatacatgaggcaacagtttgtatatatttatctcgcataagaccttatagtcaacaagttgcaagtatactctgttacttccacatttaatgagttattccattaaaagttattatcgttacacgcatcgatccatatttctcttaacttgacacatgtcctccactgaaatagtagccgaattttgggtataacagtttaaattttaaatctaaataatagataagtagcactaagtttttttttagaaataaagtaatattacaataatgtctacataatgaaactaaaatatctaagctcttgcagatttaagcacttaactatatactattttttatttaaaataactaataggtgtaaaagcatagattaaaaactgcacaagaaaataatagtgaagaaaaagttacattaattcatttatctatgaagtaggtatgtacacacacataaggaaagacattaataataataacaaataattggaaaaaaaaaattaggattattcccatttctatgaaaaactagtgaaataatacgtgctccgcacgtgaactactcacaaatgagtaaatattattttaaaccttgtgttttgtaaaagttattaattagacattctgttttattaaatgataaaatagaccctgtattttccaaaattatacaaataggaccctgaattaattttttgttaaattaaaacttaataataatttaatctaaagatgttaaaacaaaacttgttacattttctatatgtattcgaaataaaaattatcttaaagttggttatattaaaaaaaataaaattgttgaaaattgagttcagggttttatttttgccattttgaaaattacagggtccattttgtcttttaacaaaatagagggtccaat

SEQ ID NO: 39812 - DNA, 1775 bp, Cannabis sativa
gtgttcggatactttattgattattattttctaattgttagtgagtgttcacttgattcgttcttcttactataacctacctatcttttacaactaccaccgctggtaaggcttttcttaaattataatttctcctgtagtctgcctaagttgaagtggcccttaatgaccgaatcactaaataacaattgagaaagcactatacatttttttgttataaaagaaaaaacaagtcaaccacaaaaagcattaatacacacaattttgtctgtctttaaaaatggggccaaactaaaggcttttggaattgctttatgggacaacaatggagaggcctatatcattatcatacacaaaattatattaccaattgtacttaaattaaacgcatttttccaatttatgtttttggaagttacctatactccgttcattgatcttattattgttccttctcaattgagatctaaatatgtttgaaaatatgatgtgaactgaacactattggcatctgtgctggtattgtatatgtatgtgttgaacatgggtccttgtcgtacttaggccgtattaaggataagcttttgaaatttcaaaacagaagaaaattcaactttagcatatatggaatgttttttttttttttttgaaagtaaatatagaatttttattaatttgttaaatgagtcaaaagataagattgtacctcaacatgaacattatttgtgttgaccatgcaatttaaaaaagaataaaatgctgtaggaagactatcagtatttatgttaaaaaatcgtttaataaaaaaatattgtttgaagatgcaaaaaatttacgacaatcttctataataatccctaaaaaaaacataaataatgaatttcaaataacttagacggctaccaagcaatcaaactctttcaaaatgggttattagtacattacctatactattaatctatcataaagatatggttaactaatctatgagccgcaaacaactaacatgactaaatgaattattagatatattttattgtaataaaaatatatatactattaatatagcacattatttagtagtacacaacttaaaaaagtttttttttttttttttaattttttttgtttttgtttttaggagtttttaatttatttttatatttcaaagtaatttttcttttttttttgtatttttaaggaaatctacatagcaaccaatgaagcaacttaagtcgcaacctaaatatacataacaatctacatagcaaccaccagagcaatctaaaccgtaaaaataataataaaaaaaaaagttaagtaggatatggggtgattctccttatttttatcataggactttttattattatatttttgatatatagagtaattatatatttgttttaatgtgataatgtagattatagttatagtaacaatttttatattttttttttttgtttccaaatttttttttgaataatttatagtgtaaaaaaaaaaaaaaaagatttaactattgagttgcacacgtatacatgtatcttttttttatatatgtgaaactaattattttgaacattatttttgacaccataaattattcaaaaaaaattcaaaaataggtaagatgaattataaatataatatgtagcatcatatatataaacaataacgaaaatctataatacactttctaaaaaagatgtttgatacactcttatttgttttgacatttaggagacttgtttagtctattttttttatggtcg

SEQ ID NO: 39813 - DNA, 1215 bp, Cannabis sativa
agttttcagcacgaacagataaaagaatgtaatcattcttgtcataatacttttaggtgaggttattattaagtttaaattaatttgatgaaaattaagctcaaggtctaaatctaccatttttgaaaaacacaaagttcaaattgtcatttaacaaaataaaaatcattgataatttttacaaaaacacaagatccaaaataatatttatctatatatgtataaatatatattacacaataatctcaaagaagcacacctatataaaaaagcagccacaccattcaccccatatatttttacaaatcccatataatgtaattaaatattaagtctcacacattttaattttattatcacacaaaatatttaaaccagtagttaactattattatagcaaaaatgctttcatagaaaaggtagtgttatattatttgttataatatgatatagatcaaaatatttaaatgtgacctattatatattaatatgagattaatatgtattatgtgtttaaggttatattatatcatgtatagtataataatacacataaaaatcataacatatgaggagttacaaatataaaaatagattgtaacttaaagatcactactgataatatgtaattaagtgagttattacatatagaagttatgaaatcaatgggatgagtttctagttgttagaaactgttacaatactcaaattatatcatttaaataagtattgagatattggagaaagatttgactcaaagaggagttacaaaactaaatattgagttttctagaaacagttattttatggttttttatggttattttttggacacctacaactattttttgaaaacgtccataaatgtacgtgaattgattgagcgtatttctaagtctattgtccaacgtttttatcccattaaacaccaattaaagtgctagtaacagccatgtggtgaaaaccctaaattataaatcctaaaccctaaatgtacatgaattgattgagcattctctgtccaacgtttttatcctattaaacaccaattaaagtgttggtaacaaccatgtggtgaaaagactttgatttttcatatgtgatcctcaaaacactataaatagaggtcttaggttcattttgtaagacaacaaatttctatcaagagagcattgttacaaacactttaggcttgataaattcagaaagttattt

SEQ ID NO: 39814 - DNA, 2242 bp, Cannabis sativa
  modified_base (1555)..(1566): a, c, t, g, unknown or other
ataagcttgaaagggtaaatgttatgcaagtgattttaatttgccctcactatttatactttattgttggctaaatatctgaaaagaatcgagctcagcgcttccctgatttccgcctaacctggccttggcccaagcagacttatctaatctctgtatcactaattacttatttgcgaattgcagctgagacagaaaagaagatggcaaataagccccgggataaaacattggcaaaccctagtgacggtaactagctctcctagtaccccaatcatttgtatattcatttttgttcctgtttgagtaatatgagccaaaaatattacagctgaagcagcaaagaaagcccgagatagtacataacttaaccaaaataaaaagtcagatctttgattcttggaccaatcttatcatatggcatcttgtcatcgttctggaaaattgaaggcaatgaagtgttgtgaaacatttggatttaccaacttgtgagggttactaagaagttgtaaaggggtgaaaatgaaatattataaaagagttatgtgaagatccacagctatttggtgttgcttgctaattatgatagatggggttaagttacagaagccccaaaaagggaatatgggaagtagttgaagcatcactgaccgatattttgatttttatttggtgttttagcagatgaaattttggtaggtgtcaacatgattttatgattgatctttcatactgtaataaaacaaaattttgaaattatttataagtctgataatgaaagtggtagttgttataaagtacattacatttgatttttgactccctgagttttatctttgcaaagaaaatcactagtaaaatgactcaaattactagtaacgccggacacgctactaacaaccattaatataacttaatcttgctaaatcgggattactagaaaataagagcgggaaacttaaatctttaaatcaagtagagagtaaaaatgtaacttgtaactatttaattaacaaccattctaaaaggttacacatgttttgggatctcgtaaattttttacaaaatattacaagtcattttattatgtcgacttaagtgacaaaaaaccgagaatacaaaatacatcagctggtagatccaactcgcgtggtctagtgtggcccgaacatgtataatctctcgtcaagctctcgaactcatggctaattacagacagatttactctttcctgcacagtagagcacccgtaaaaccgtataaatattaacatacacaatagtacatatcacatatatatattaatgccattacacttattgtctatttgacatagacctgcgtgttacgctcacacgcctatttatgtctgtgacatagactcaagtgttacgctcacacgcctaattacaataaggccttagaacagttcatctctattctaattaccgagtccaactaaattatgccttgaacgcataattctttacttcgacatatatagcatggcataacatttcaaattatttaaatcactagggtaataaccctaggnnnnnnnnnnnntcactttagggtaataactctaattccggttctcaattaatcacaattataatattaaacatgagcgtcgtcgtgcttaactcaacatgttaactattgtcttacctggtatcaaatctccaggtgttcctgagcaagcgtcgatagtcctagtcacacattctcgagatttcacaaatagggttaatcccaaaattcactttcaataatcacataattataattccatttacagattaacatatagagctcgaaacaagtttttcaacgatctaaagaacgtccaaaacggagtcccgagtcaaaagttatggccaaaacaaaattcggccttccccaatacaatccaattggaattccaattggaacagctgtgaaccaaccgaaattttagttgtctgggcagaattaacacaaaaaatcccaaattttaagcctccaaaacctgctcaaatcttccccaatcaccaccaaactttccagagcatcatcatataacatattaaacatattttacagctcaaacacaaatattacacaaaaaattaaaaagtgccattgttgagtaagctttgagttcttgaactcaaacttactcaaacttgctcaaccgcacaattaaacaataacaacaactcaaataggtctaaatcattaatagaacaaacccaagtga

SEQ ID NO: 39815 - DNA, 1265 bp, Cannabis sativa
aacaaatgccacatgtcacaacataattggacccttaaataaaatagtcaattaaaaaaagaaattattttttaatttccaaaagaggggtttcctacttttgctagctttgtacaacaacatcatcacaaaacaactatatctaatatctcatatgccttcacaattcacatgtaaaaaatcatcaaaatccaaaatcttcaaaaacttttcttttcctttcttttttgggggattgaaataatattaatattcatggatgattcatttgatgaagattgtgattatcttttcaaggcagttttgattggagactcagcagttggaaaatcaaatcttctttcaagattttccaaaaatgaatttagattagactctaaaccaaccattggagttgaatttgcttacagaaatattagagtttctgataataaactcatcaaggctcaaatttgggacactgctggccaagaaaggtatgtatttatatatatatatatatgtatgtatgtgtttttgatgatcatcataaaaaaatgattttaatttagataatgataactgggttttgtgttatgatttgattattaactaattaagttgatttgttcaataatcattaattaagataaattaatcaagtctatgaaaatggcctaactgtagagattaaattgttctgggaggtttttgcagtttttggctgtattcaataatttacattttggtacatatattatcaagtatattgcagtaatggtcctttagttaactctatattacggtttagtcctcaaatttcaactttaataattaaattctcaaaatttttaaaccatgctttaaaagttccaaattttctatgtaatttttgtataaaaaactaattaagaatttaaaaattggagaaaactgaattttttaattttgattgaggagaaaaggaaaacacattataattctaaataattaaacataatttttaacatatatatcaaacttatttatggttttaaataatgtacaaaattacaaatttgattaaaaatgttattggcaagaattattataaatattaataattaaaaaaactatatataagcattaaaagataatgatgtttgtataaatattatggtcagagttgtaagcgtaaagtagaaactatgataaactatgggacccatttttttaacctaaaatcatgcatcgattaaaatcataaatactcccaaaattaaattaatgattttttctttctttaa

SEQ ID NO: 39816 - DNA, 1402 bp, Cannabis sativa
tggaaactagaggttcagcctctgtccactttgtaaagaagtcgagagccactactgcgtactttgctcctcctcgccctatggggagttccctaatcaaatggatcccccatatcgtaaacgggtacggtgaggtcatcattcttagctctactggtggtacccaaggtaaatgtgaaaatctttaacacttatcgcattttttgacaaaattcgtgtgtatctttatttatagttggccaataatatccttgtcaaattcttttgttggataagctttgccaacctgcatggtctccacaaaagccttcgtggatctctttgattatctcgcttgcttttgtggggagaacgcaccgtaggagaggcatggaatagccccttcgatacaatttttcttctactatcgtgtagcgaggtactaaatacaaaagttttcgtgcctcatttttgtctttagaaagttgcccgttaagaagatagttgactatgggtgtcatccaagtaggagagctgtcaatcatctcaacttcttccttttcacatatactcggttcgtttaatacttccatcaataccaaattcaattcattaagtttggtctgggaggccaaagcgtcagcattagagttttgttctcttagaatttgttcgattttaaagtaatcaaacttttccaagtttttccgaaccttctctaagtattttgccagttttaaacccttttcctggtattcacctagaacttggttattggtttagacaaaattggaagggttcacagatgtttcttatgtttgcgaaggcttcctcacactcgtctgtccattcaaactttttgttacctcgcaacacattgaagaatggtaggcacttattagttgatttcgagatgaatctgttacgagctgtcattcttcctgttaaggcctatacttccttcggttttgttggtgacgacatttctatcaaagccttaattttttccaaatttgcctcaatgcccatcgcgttgactatgaatctaagaaattttcctgagaagactccaaaggaacacttctttgagttgagtttcatattgtactttttttaatatctcaaagtactccgcgaggtcttacatgtggtctccattttttatctacttcaccaacatatcattgacgtagacctccatgttcctccctatttgcttttcaaacatttcattcactagtcgctgacacgttgccccagcatttttcaaaccaaaaggcatgactttataacaacaaagtcccatgttaattacgaaacttgtatgctcttaatcagggacatgcatcttaatcttgttatatccagcatatgcgtccatcaacgtcataagctcgtgtccagcagtagcatccactaactg

SEQ ID NO: 39817 - DNA, 3465 bp, Cannabis sativa
actgtagcgtgccttagcattagggcgttacacatgaagtgtgcaaactccaatcgcattttctcctggtgcttaattgaatacattgaagcattcggggagagaggctctagaaaatcctccctgattcctggaggttgttcttgccctgtatcatcttcatctgagaaaagaatcggttcgattccaagaatggaatccatgaatcgcgtcttcctcacatccgagctcaaattagggccattattcttagaagctctgttgtgattcgccttccccctccctcgacctcttatttttgcaattgcaccagttcggaaactgcagaaaactcaagagagagaaaagttcgtctaacttcaaaaaaaattatatgttatatttaaatcattctttaattcttaataattataaattaaaactttaaatataataaattcattaatttgacactcatttatcataattaacacataagtctatatttctcttatcttctcaatttaatccaatttagtaaaaaattctcaaatatgacaaagtcaattttcaaattttatttgattaaataaatcaaataattgagatatcaaggtaatattaccctaggtactatgaggaccatgtggttatataatcaagttctcaataagttgatctaaaatttaccacgtaaattttctaacttattaattcctcgtgactctaccgtagcctcaaaatttcactgttgattacatagaacgctatatatttccaatatagatacgctataaattctttattatttcgatcacaaaaatcaatgatgatttatagatggtctacattgagtaggaactaaaattacctttacccttaaatgtattttatccttaacacttagctccttttaaatgatattttagtaaactaatataattatcgtaatgaatgctatatcatttatcgcctttagccacactcaaaagaaactatcatttcacttctagataaatatagaagctatagatgtccatatttatgattaacaacccattcaattgagctaccgagttcttaagatataagtgtttatcgagattttcagaaactaataaaataagagcttaagaaataataaaatgcaataatgaagaagataaaggtttttacgtggttcgggcattgatgagccttagtccacgagtcagtctattggctttaagaggcttgtataatatttttacaatagtgtttacaagaaactagcctaactctggcctcttggtttctcttgaagaagaagaaatgttagagtaattttggcagagcctcgactatcttttattttaatcccttttcatatggaaatagaagggtctttataggctaaaggacgggtatggacatgcccgtgacccgcccagggtatttgcaataagtccactaatgggataaaatatatgcaaagatctgactatggggccccaaagaatgttttgtgctcgtgcgtagaagcagctggacaatagggaaccacgatttgtacaggatgcgtgtcaccaaaagatttcaccttgcaaagtaaatgcctagaataattgtctaacaaaaaggtgtatgggggtgtgcgcaccaccatggtctcctacctcatttttgacccttttggagagaacgctcgaagtagaatttgcatttgagtgatcaaaactagtgtaccaggttgattgtcaacctgggcgctaggcctagcaccaggtcaacctgggcgctgggctcagtttctaggccctcgggattgtggttttctctttgagtttgcttgtattatcattatttcttatgagggaaaaaatacctgaaacacttttttgagaaactgattggagatggcctatattgacaatatgtcaacctaggcactgggtccaactttaggccatctggaagttttgtttggtcctcagaaatagttgaatctcaatctttgctaaaatggggaatatgcctggaagatttctcgaaaaaatgcccaagtttacaaaatgtcaacctgagcattgggctagccccaagtgtcaacctgggcgctgggccttgattctggcacccaggaagtgttgttttttccccaaaagtacttgtttctacattttcatgaagatgaacaagatgtacgagtcaaatttttgatctcgtacttggatgtggcctagattgacaaattgtcaacttgggcgcttggtgcctaggcactaggtgctctaggtgcttaaaaatgaactttcttcaaatctgattctgatgcctcaaatatgttcacgacacttatagtttatgtcccaatgcatttgacccattttcactaagacgatcctaaaaattgaaaccctaattgaggatgtcatcttcggcactaggtgaaaccctaggtacccaggttgacttttgaggtactgattcgtgtattttcagctctaggggcctgaatttggttgctccatgtcttcatggtacaaaatacagaaagatagtgagtcagaaacgagttatcaaagttcgaattggcagggtttatgccctaaaacgcctgtaaagacatttttgatcattaataaagagttgaacactttgatatatacttgaatgttaaattattaatatttattattgaataatttatatttaatatctaaaaattctttattcatatatgagattttgacttgtagctgtacggagaagtaagaccacttagctatgaataaaacagtcatagtatattgaagttatgaaatccttaattaatggttgctagtacggtttacagatgcccgttctttagtctgagtaatcttgattcaaaatacagatgtagtatgacatcaaaataaatgtgttgtatataataaagattatatatgacaaagaccgatatgaataaagttatttttatcaaatatgtcgtttactaaaaagacctatttcatatcacaacgatgatcaatagtagatcaacttaaatcctgagtaatcatgaactcttatttgtgttatttgtttctttgactcacttattaaagtttcttagagaagatgattcttacaacttttgtttttggaatctaataatgtggatggctgagaacatgatctacaattatggaatcttgacttttctaacggatcgaatgttggttctctttatatgttaattttagtattagaaagttgcgcgcaagtttagatgtgatctaaattatacttgcactagtgaattaatggaactaaaggataaataagtaattagaagggttcaatggtattttgactaaaactaattatgaatcaatacatggagggctagtcactagaattgattatatcaatggacactgcagtaaaactcaataaatataattctataattactaagagttcaactccatattttttgtgaagtaatcatgaaattaatga

SEQ ID NO: 39818 - DNA, 1810 bp, Cannabis sativa
  modified_base (630)..(632): a, c, t, g, unknown or other
  modified_base (945)..(947): a, c, t, g, unknown or other
agcaattataaacattgtcaaacaataaagaaaatctattcaaaaataaatgaaaagcacaataaagaatttacccatgtaaaaatgacaagaaattgatagagctcaacagatggattttctctgcaaacaaacaaaaagtaaagacaatttattataatttagtaaaaattaataaaagaaatgcaaaaaaaaaaaaaaaaaaaccagattcatataatcttacagatgagttggtgagactgagagaaagaacaaaaaataaaaattcaatctttttgacccaaaaaatggccaaaagaactaattacatgtctcagatcaaaatcaagtgaaattgatgaaaaatcagcaatacccaattcgaaatcagaagaaaaattcaatcttttttcaaccctaatccccaatttcagacaaggaataaaaaccctaagcagcaggttagtttcccctattcagagatattttcttgggaaccaaacagaagaagacagtaccctaattaagaaaatgtaaagatgaaaactttgaagagagaagagaaaggaagagccattaaatgaaactataatgaaagaaagaagaagaaggaaaagtaggttggaaatataataataataataatannnataataataataataattggtataatttagtataatggataatttctctactactactaaattactaataataataatacataaatagttgtaataagttgttaataataataattaatccatttgcaaaaataaagaagaaacaagagtgaggaaaataaggttggaaatctaataatatgataatagtaataataataaatataaggaaattctacaatgcacccctttaaaatgaatacattgatgcaaccttgtctgttttagcactcgaaataattttttagttaaattttttctcatggtcatgtannntatagttatttaagacatcttgcaaaattttcaaatatttggaaaagtttaacacgccgaaaactacgttcaaacagtgtgttgcatacgtgactattttattttatacgcgtgtaaaatagactgtttgaacattattttctatattgaaaattattcagattttctcaaaattttgtaggttatcttaaataactataacgtacatgaatatgaaaaaaaaaattagactaaaaaattcttctggatgccaaaacaagtcaagaatgtatcagtacatcccttttaagagggtgcattgtagaatcacccttaaatatgtatataattgtaataagtcaatgataacaattaatctatttaaaaaaataaataaataatggagaaagaaagaagagaaggaaacatggttggaaatataataataaaaaaatgtaaaattaaaaataatataataataattaattcatttaaaaaaaaattaatagttaatttaccttaatcttctttataataataataataataatacgggttaattacagcaaaacaacatgtttactaataaacaatgggaatctatcattcttttatatttgtttatttaatttattaaatttagaaaataaataacttaattaaataaaggagaacttccccaacaattttttaatgagtgtcatttaagggtaatgaattttatttactctttaatattaaatttataataacaatttggaaaattctacaatgcacccccttaaaataataaaattgatacattgatgcacccttatctgttttagcactcgaaataattttttagtcaattttttttttcatggtcatgtacgttatagtta

SEQ ID NO: 39819 - DNA, 1795 bp, Cannabis sativa
ctcttcttctactattcatttaaggaataattgcggcataagtatccaaaattttatatttgtaaccagtataaactcaataagtacccaatgtttgtcaaactataatttttattcagtttcgtcaatacaaactctgtttgagtttattaaatggagatttggacgtaattcataatacatgtttccgtttagaccaataatttcgaatttgggtcttacatgtttcctgtttaagacaataacagagtctgtactgacaaaacttgtgaaaaattatacttttattaatattgggtacttatgctgcttataaactcaaaactttgggtacttatgtcactatttacccttcatttaatattgacatttttttttcattagaagatgttaaaaacttgaactttagtaaagtaccacacttctattcatttaatcataatatggatgagttaaaaacttgaactttagtaaaggcatgatacttttgattgatcaatccaaagaataagaatgtaaggagaatgttgaagattatgaagcaaaactaagagtaagaaacaaacttgacttgtcaatggtttttatgcaggatttttgttttttgttcttaacatcgggtcgagatccaggaataatcccaaggaacacacggccacctgattcagaagagacatttgaaagtaccccatcaatggaatgggtgaatgctagagtctctaatctaaaaatacctcgaataaaggacatgaaagtaaacggtcaaacaataaaagtaaaattttgcgacacatgtttgctatatcgtccaccacgagcttctcattgttcaatttgcaacaactgtgttcagaagtttgatcatcactgtccatgggttggtcagtgcattggattggtaacttattttttaactcttctattttagactgttatgtttaatttagttacttctatactaaaagtgttatccttgattgactttgccatgaaactaactgcttttcttaaccaaaatcttgtcattgcagcgcaattatccttacttcataatgttcatatcaacatcaaccattatgtgcatatatgtatttgtattttcctggatcaacattcttcgagagcgatccagcatttgggttgtcatgtctcgcgatatcttatcagttatcctcatagtgtattgctttatcgccgtctggtttgttggtggacttaccgttttccatttctatcttatttgcactaatcaggtaaaccttctcctttccttattggtcatgttttgttggattgcctcattagttggagaagttcattggcaaatttacttgttttctaagaactcaacttgactgactatgcttgaagatacattttagtgtgatattggagtctgattgtttacttgtagttcaagccattcgaagttctgataacatcttttgttaaacgttctgcgaataaagttgctcatcttgttataatgtggatcatattattagtaggggatgtccctattgatgttttgcctattttgctaggcgatttccattaatgaagttgctttaatatgatagagtagactagtccaaaatttttaacagttgtcaccataggatcattcatcagcttagcctttactcattcacaagattattttgctttatctatctctaatgacattatttatttcataacgacatgatactcatagaaccatgtttttgattatgtagcttgaaaatttcggttcaaatgtactgattcggttactattcttttgcagacaaca

SEQ ID NO: 39820 - DNA, 1316 bp, Cannabis sativa
caaccattagatatttgatccaatggttaagaataaaatacccatacatgggtaatacccattaagagcatacccatatatatatagtatttatagaatcaaatattcaaatccctttaatacaaaataaacaagattccattaaaataattacactccctcaagctggactatatatattgctgagtccaagcttgtttactactaggaaatcaaacagttgctcaaataattcttatgtgaaaatatcagctacgtgttgatctgtacatgttgagtgctaataatttctttatcaatcttatctttaatgaagtgacgatcatgatggaatggattatgcgcaatattgatggtagattgattataacagtaaatctaaatggggtgttcatattcaatcttcaattcctttaataggcgtttaatccatattgcttctcacaccaccaaactctttctttattgattgattctctgttaagtctgcacaaagtgtttcaactctcacactttacacttaagaattttcttcatctatagaagattcttcttacaaaactcaaaaccaatctctttcttttctctacctctctttctacctctcaatctttttctctcaaacgctcaatctcatctctaaggttctgaatctcttgttttttcaaataagaaagttaaggtgatatttaaagacttaggatcaagatcctaaagtcggaggcggcaagaaatgaagttgttaagtaagttagttagaaataactaacttaataaactcttctttgagcgaagtctccacgtcaacttatggccttcgagaacatgagcgagcttctggactcacgggccaagagtacttgctgaagatgcttttggatagggtaaagactgcggaagtcgactattcggaactaccattccaagagggataactagccagctggaactcctttctagggaggaactagctatcttgagaacttgacaaagagtggagatgacagtcattcgggaacccccttctggatctgactatcattccacacgactccttccgggatcgataacagcgagtgaacatcttcctagaaatgacgtttgtggagacttttcatttggaggaactatatcacaaattccacctagttacttcaaattaaaagaatgtcgacgatgaagaaagaatgcagccatcactggttggtgttctaagaatcttagtatactaacttatgagattgattaagggcccgtttggcacagcttttggaaaagctaaaagttgctttttgaaaaagctgtgataaaagtgt

SEQ ID NO: 39821 - DNA, 4592 bp, Cannabis sativa
acttagctttatcttctcttgaagatatggagccttattccacatgcaaaaaatacttgaatagattcttcccactctaatatcaagatgcacaattaggatcctcagactgtgatcaaaactcccttccgataagaaaatcatttcaggtgcactaaaattttgaagccacaacttgttttccttgatcctatcaatcttagaatagatcctcccctctttctcttgtttgttattccaagtaaagaaattacccaaaaatttgatgtcgtcaactttacaaaattccacacaactttgaaaatgctttattctgtgagacttcacccttttacctatcctttcattcacacttaaatcttcatcaaaattccccaacatgaaccaatgagttttaattccatgagccaagtccatcagctcttgccataaccttttcctatcttcttcaccgttcataccataaacaaaacaaacttagaaagtctccttaccgaccttaacctctaaatgaattagttgattagaacaaaatttgatatctacatgaaacaatattggatttcaactaactattatctttcctcctagatgccaagcattatttgccacaaaaaaccaaccctgaaacatatttaagtataaagctcctaacttaggagcttttactctcgtctcgagaagaacaaccaaacccattttatattttagagattaaatgcttaacctcttattgcttactacgtttattgatcccctagatgttccaactcatgattctatccatttgaggtaggagaatctcccctccttgatttatagcctgattctcctctagccgagagtcatcttcatctagcaagtcttgaaacagcgagcattctccaccttttgtaaaagcttgaaagttttttgtgatcacaaatgattgtgtaacttctaaaggatttttccctattttcttcacttcctgaaacccttcttattccaccttaatctcacgctttccttgttccatctcccctttttgtgtctttttcacccaaatctactttggcttaactcgtagattttccttctttctgcaaactgctgcagtatgtcccaaatttttacattccttacacaccaccaagattgattcatacttcaccttaacctcaatcttttgatcaatttccttatggaaagagatattctcagggaaatcctgaaacattttgactttgaccaagattctgggaaaattaagcctttctctattcttagtaatagaatccaccataattgatgttccctatcgcccaactatcttaaacagagatctttctcctccatatttcaagtagcaatcttcccagcttgaatctgagtcttggatctgttcgttgctcctaaaaaactcctgaagttcaaacaaacctcttgctctagaaacaattgtcgaaaagtagatctggagatacaacttctgccacatcctcaattgttcgagcaaccttcaccccgtctatttcatcttcttcatcatcaaaattagagatagatagagtatcactcctagcacctcagccactgattcagttttgagcactacatttgaagaaataggtccactcttcttagccgataccttcctttttccttgcatcttagatccaattaccttattccccagagaaaaagctttgcatggtcgaccccgacccactgtggcaccaaaaaaatctaaagtcagaaccctggcaaagtgtttccccaaaactaatacaaacttatttactatacaaataattttccttagaagctttattattgctaacattgaaagttacatcattggtgcacaatttcaccattcccatacaagagtgccccttgccccaaaatacattagacttggtaagtatgagtttaccagactcataaatggccttaatatcgagttttaaaagtaagtctccactattcaagttcctattcaagtcaggcatagaaagcacattcaccaatctaactttatttccaaaggtgaaaattacattaatagtaccatttcctaatacctttgattttacttcattgcccatttgtgtctcgggtaccatttgactcttcaaaggtcttgaacaatgacttatcatatgtgacatgaacactgacacatgtatcatacaaccatcccagtacttttccttccacagaattcaccttcctcgatagcattcactttgggttctttcaagtattttctatgtttacaatctttagcatagtgtccacttttgccacacacaaaatatggatattttccatctttgaattggttaggattagactttggacccaaagtgttactatttttgttttaccttgttcttattaagaactttagaggttgcatttgttttgcaagtctctctccgttagacccctccacaaccttatccctacatatcaattcatcctcaattcgaatatatttttggatttcctccaaaaaataatcctcatttttatgaaggattctcttcctataattcttccaagatggtggcaatttgtccactattgtaccaacttagaatgccttgggaaactcaattttgagcatttttaatttgttataaaaatcacttgaagctcatgaattttggggtagaagagggtttgccatcaagaaattttaaacccaaaatattaagaaattaaaaatatcttagtaccttcttcagccttaatttttttttcaaggtgatcccaaatctcattgtgtcagtgtataaatcatatagctcgttagagaggcctctatttatagtgttaggacaccacatgacaccacatttgatatgacacatccaatgattgttactagtcagattagggccttaaataacactctgaacataagttagagagattaaagatggaaacattctcattgaagagaggtgtttttttattttttattttattatttttttttttttttgaaaaactggttctaggtgacatgtcgcgtatatttttttactaatgttttattttttattattttttttgaaaaattactaatgttttatttaaaattagtattttattttattttttttaaagaaaaaaataagaagaaaatgacaatgagattagatcacctaatcttgccaatacttgattggaataatgcacatctgagattttagtgtttggcttattggaagtaaagcatcttatgagttgaaatttttgtgagtggcttaaaagaatctcagttgcaaatattaatacatggtacatgtgttactgcttttcgtttaagattatcatttttattttatgagacttccactaaccattaaacggtggcctccattttttccagacttgggtaagtgaattaactagtatattaattagctaatgcgtacacgtgtcttactcaaaagtaactactttttcatgcaaaattaataataattaattatttagggatggtatacccaatatattatatgataattcaataacactatttacatattttattttattttaaattgaattatttttagactacccaattctacagcaaacaataaaataaaataaatagaaaaatacatgtactacttagcaaatccattttcaaagtaaaaaataaatttcatatttgttatattgactattgtataaggttagtttgataaatatgagggttaaccacttaatatgttatattattaataataaaattaagccaagtataatttaggagttttttatttttatttttacactttaaactttaaagtaatatataaattcatagctaccacatagtaactaataaaatttcaacttaaattgtaattaaaatttacgtaacaatcgacataaacattggaacaacccaaacttgtaaattttttaaaaaataattatgaaataatttccgaaaaatttaataattattatacaatatattaatgctctgtttcaaaaaaaggaaaaaatgttaatcccaaacctaatactattaattttcactgaggcttgtatatatcaaaacttcaaacagaactaataaaagtaaaagtataggctatagcaaaagtcgaaaactagtgaaatagggtcaaaagaaaagaaagatgagagtgtgtatttgtatttaattgaagatttgtttttgatattatatatataaaaatagaaaattgcattaaatatgtatgtacgtacacagcggcagatgtcttctggtagtagagacattctgatacacaaaaattaagtgtaagaaacgaaataaatacctctcacttaccaccccagacaaagacccacccaccataatagacccaagaagaagaagaaagaaagaaaagaaaagaaagatgaaagataattcagaaaagaaggataatcaagatgagcaagaagaagcagatcctcaaaatataagaactacagaagaaagcaattgcacaagtttcttcatgagtagtagtccctgctgtaatttcttatgctatgcagttaaggctttctttaagtgcttgggctatgaatatgacccacacgacgtc

SEQ ID NO: 39822 - DNA, 3043 bp, Cannabis sativa
  modified_base (2317)..(2324): a, c, t, g, unknown or other
aataaagaaaccaaacacttgattgagctttcttaaggaatagcaagtccattccaatgctcattcatgtgaaccaaacaccaccttataaatcatttgttaagcccaattagattgtattatattttatagattattcgtcgcaaattgtgcatgcttaatatataaacgcttaagtaaaaaaaaattgtattatattttatattattatattacatatatttatattttttgtatagtataaagaaatttcgatttatatcaaaattaagtaatatagtcgcttttcgtgtaattaatttaatttttttagtatcataataaagaaaactaatataattatatattaatatattattaattaaatttattaaaaataaaattttatataaaaaaaaattatgtctattcataatagtattaattagattcatttgtagtataaatacttaagcttaactcccagttacaaattaatatctaagtttaatttttagtagttataatacctaagttataattttagaacttaagtaggtacctgacttttaagtgttaagtaaattgcgacgtgacaatccatgattggtccaagtcattaaatttttatttttaaaaaaattagtttaaatataccaataagaaagacacgtggataatgacttgatatttaacggctgggtacttacggaagttccagaaatataacttaggtattattgttagaaattattttatcaggatctagaattactaccatgcatgttggattataattctataatctaacatcataaatataaattttctaaaacaataataaacatataaaagttatagaaaactttgcattgatggcagcataataaaatgacttcttccgttcagatctgtaacccttgatcctttctgttgcagagtatgatcaagatctgaacctagattctccttcagttgacaatttgaactacacaatcttcctcactatgttgagtattgctttgaaatgtgtggacaatttctcaataccaaggaccacgaatttttgtgaagaaaactcagagaatatcaaaaaataataggttttcttttttatttaatttgttagacaggagagagtctaagagggttctattgaatcaaaaactattatgttctatttatagggattcattatgtttatggttagaactaaataggctgatttgaaagatccaatggcttaaattactccctcatgacttatgagttagatttttatcattattttgcttccttaatgaagcaaacttatcttctttcagtaatgtcatttttctgctttagttatttaaacactaattctatctatttaataattgtaattaattatcaaataaaattactatttaaatataattattaattagaccttccaagatttcctatatcaatcttgaattccctttcttctcaattataccattggtaaaattcacaaataagacattgtccttatttagaattctaattgattaaataaatcaattagttgagactacaaaataatattatcccaattagtgagaagatcataggcctatgtaagcaagctcccaataaattgttctagaacttagcaagtaaattctctatcttattaattcctcctaactccactgtagattcagaattgcactcctgattacatagaacgttctattcactaagaataaatatgctataaattatctattatttcaatctaaataatcaaagatcctctacaaatgatttacatcgagtagggataaatttaccgttttacccctcaatattatccttaaaatacttagcttcttataaataatatttcagtaaactaatataattacttaaataagagctcttccatttatgtcagttagccaagctctaagaaaatcatcgtttcacttctaaatagttatagaagctatagattctatatctatgattagcgctcgcacttaattacactgctttatttccaagatgtaagtataaggccgatccaagtggtcagttaacgaacaagtcaaagaacacatgcagtacagttaatcaaaaacctaatctcagtattaagatctttcgatctaagatcaactaagtggtattgacttagtaaagatataatggtaagtttatgatatcttttccactgtcaatatcagtccagtccgatgtatagctaatacaactgatactagtatactttgctaatgccctggaaaggacattccacatatcattttgtaagtaaattttatcgctgattatcacgtcagtgtaaatnnnnnnnnctgataaatcatgggactaaatagtttaaagtatataatcgcaattactttccctatgatcacatcattgtaattgtgagtaactatatgttcagaatttaatagaaattatatattaaaaccataattataaaaatcatgtaaacctaaatgatttctaatcttctattgatagtaaataagattatactaaaatgagttttatttagggcataaaatcctaacaattattactgccaaaattaaacttaggtatttatttgtatgagagttaaacttaagtatctacgtcgcaaattactctattcatttatattatttcgaggattattgaaaagttcattagtgtgttctataatttatttatttattaagaaatttgaaattatactaatgtatattgttgacctcaaaaagtgatcatccgacagttgagtcgtatgaatttaatgtttgccatgtgttacacaacaagaactataaagtaaataagacaaggatttttatagaggttcgaccccctttgttagcgggtaatgacctattttccatttaatactattcagatcactataggtgggatccgatatagctctctataaggttacaaagcatggatcaagtaggcaaattactactgaaagagaggtatagccttagagatgtgggagagaggatgagagagccccttaggcatgtataagagagagagagagaga

SEQ ID NO: 39823 - DNA, 1944 bp, Cannabis sativa
tagtactggtgtttgggagctgttcttcaagtgacaatgccatcttataccctgatttgacagtataacatccatcggtttcatggtgccaaattaggtgatcattccgaggaaaaggtgagagtggaatgctgagaattttctccacatcagatgccaaaaacagagagtgtagcaatggaatatcccatctgttgtcagcagttaataggtccgaaatagtgatagttttgtcaactcctttgaagagaagaggtttgaaataagtaaaacctgggatccatggatctgaagcacaagtaatagtgtgaccaccaccaaccttccatctgaggccttgaattagcaattctttcccccatacaatcctctccaagttagagatggataatttcatattccagcatccaagaaagatttattcttgaagtatcttggcttaagaacatggcttaaaagggaggtgggttcgaaaaaaatcctccaagcttgcttagcaagtagagcttggttaaagtgaacaaaactcttaaaccccattccaccttctatcttagaagtacataaatatttccaagtcttccaatttgtcctagttcccgaagaattggaaccccacaagaacttattcatcatgacttcaatttgatcaatgagtgtgttagaaagtctgaaacaactcatagcataagttggaatcgattgcgctaccgcctttaaaagcacctcttttcctctaatggagaaaagttgttcttgccaagaggataaaaatttccaaagcttatccttaatatcagcaaatagacgttgtttgtctctcccagagtaagaaggtaagcctaagtaacattcatggcatggttgaattggcatgtctaagatttgttgaaaagctgcttgaacttgtggaaccgtgtttggagaaaagagaggacagattttgctgcattgagttgctgaccagaggcacgacaataagttgttagagaacgttgaatagcttcagcagaatgaacattggctttgcaaagaactagattgtcgtcagcaaaaaataagtgtgaaattgctggtgcaccccttgcaacacacaaaccagagagattaccattgcgttcttcaaactgaaacaaccgagagagtccttcagcacatatgatgaataaatatggcgataatgggtcaccttgacgtatgcctctagttggaaccaaatttccatgagtggaaccattgatgagaaaggagtaagagacactagaaatgcagctatgaatcagattaactattgtgagaggaaaccccatagcaagtaacattccatagacaaaattccattccaccctatcaaatgccttactcatatccaacttaatggctgagtagccttctttccctcttttcaagtgtttcagcgagtgaattaattcgaatgcaaccaatacattatccgtaatcaatctggaaaagagaaaagcgctttgtgaatctgagatgacttgggaaagatacagtttcagcctcaaaacaataaacttggacaccagtttataaagaacattacacatactgatgggctgcagctgagacatattggttggcttcttaaccttaggaatgagtgtaataagtgtttgattgaaacttgtagggtcaccaccttcattgagaaatttgaggacagaacgagtaactagatcaccaacaatgctccaatagtttgtgtaaaacatgacagccatgccatctatacccgggcttccatctgagttcattgattttaaagcttcatagacatctgcagcagtaaacggttggttgagagctctgttatcaacctcagtgatggtacatgggactttggagaagacagattgcaagggttcattatctacaccatcagtagtgtaaatgttccgaaaataggactgtacaacattg

SEQ ID NO: 39824 - DNA, 3077 bp, Cannabis sativa
tcatggccccactggaggctcttccgggccagcctccatagccccaaaacgaaaatctgaattggaattttcctcattacttctctgttcctcagtcactgtgggatctagctcagtaatcgtgcaattgcccctggggatgctctgtttctccacaatgacaaagtggttactgagatctatcttaagatcaaaatctcttccttcccaattgcgattgacagtgaatgtgcttccactcggtctcgggttcttttttgtctacttgaaaacttttggagtgggggatagatcacattgattcttggggggtcgtccccttctcttttgaggagtaggttcgttggagataatgtttttcctccccctgggtcttccccgttgttttgacgatcctggcgtaattaattctccagaggaaatatcaacactgcgcatgagaggctcgtgttcttcaggaattgtcaaagagggcgaagaggggggtatgggagtcgaagactcacctggatcctgaataataggatcttgtggaccgttgagttgggatacaatcccatttgagttacgggccttaggagaggggtagaatgtcaaaccatcacaggctttgcgttttctcggcccattagaatgttcctcaactctgaagtcatcaatgtctagaattgggttgaacaacattggttctctaaagaatttatccacagtgagagagcccatgagaagcttacgggcttgaggctcggcccaacattgagttgagggccaatctaccaattgggcctgggtacaattatggaagaggagtaaggaatggatttaccatttaaatctacactaggcccagcacttggtccacagatatccttggactccggagtacaaagtgggtcacccccagttgtcggtttcttgcccaaatggtcattttgtatgggtacacttccaagtatcttatttgcctctccaaaagaggcatttccatcagtggtctctatctccaaacggctagctttggtgctctcagagccctcagcatcacgactcacagtaggttgtggcattccattggtgacatcagttgaattctcaggggcggcatccttcaggtcttggatgactaccacttttgaattattaccaaaaggagcaatctccccaatacccggcagtctcacaagagggatttgggtaatgaccacctcttgttggtgtagcccagaattggattcatcttcgtcggaggcaattcgttttttggccggaagttgcagcctgcattcgcgtagttcgtcggagtctccgtggagaatggccttgtggatcttgaattggtttctaaggaccaagtcatgaccaagtcgcttttggagagtccagtcttggaaccatttggctaaaggagaggtgaatgtggatttttctttggcttcatgtttcaaccaagtcccaaacattgggtagaagttacctttatcgtctttaatcaccgtgggggctttgaagcagatactctgatcatgggttagcattccacatttgaagcaaagtttgggtagacgctcatacctgtattggatccacaggtctttaagcttttgtctgcgaaggaagaagcctgagaagattggcttgttgaggtcgattgtagcccagaatctcagagtgctaaggcctacggcgtcctcaatacccataggcagttcatgaacaggggaggctttggatgccaactgtttcaggtttgatcgattccaatagaaggggggaatactttctacattcacccacagaggagttttgtcaaacctaacttcgcacggggtaagccaggcaagccacgacattatgattagaagatatccacacacaaaccagggtcgacgagaaagcacgttcaatgcatcgttccggttggcgaacgtgaactggatgatacctccttctatttccttccatttccagcctctaatggcgttccaggacagcttaagagacccttgtattgctgccttccctagtttgtaacgactcagaatttttcccaacaaaatctggtttgcttcttcaggttcatcaacctcccctgggttgagcgtgagggtgatatcctcatgggatatttggactgagtctttgaataaattgcttacagtagatggatccatgtcaaatgtttgcaagtgagtgcactagagcaattgcgtacaattctccgattacttccttgaagtgagctccctcagagcattcttgtattaaactgtaaagtcctctatgtttggcaaatgaaagtttatgttagcttatatggtgagaaaaattatttgtcatatggggataaaatagttaaattatattgtttcaaaatttaaataataaataatatctcaaaataataaataaataaataaataatattaattttaattttttgtaaacgaaaaaaggcctcatttcaaattttttcctaggcctctccacaccttgagacggccctggtggttttttagagcttggtattaaaaatttatggatgtagaaattcatttcgacacaaaagaaattccaacagcatctacaagccaagaaggaaattttttaaaccaacactgaaatattttatacttaaaggttatgaaaataatcatgaacaaacttattacaacaattagaaaaaataaaaaaggacaaaataaataacaaatatattaaatgtgagagatgataaagtcataatatcttaaatatataaaaagtatctgttatttataatcatcaacggaagtgtagcactacagaatttttcaatgaaccctcaatcaatgacaacaacaagtataatggcttgtttaaggagatggagtctgagtcgtatcttggttgcgaaaaatttaccatcaatgcgctagtaaagcttaaggttttgaataagtggagtaacactcttttgatatgttgttgtctatcttgattgaactatttttggaagggacaaaattatcgaagtttcactatgagttgaagatgcgattgcacaatctaggtttgggttacgactcaatagatttgtg

SEQ ID NO: 39825 - DNA, 2650 bp, Cannabis sativa
gtctccatctcttatccagctggtttttgccttttggcggagaaataactggtaattcttgtaagcttgtgtaaaagctatcctagcatacgattcttcctgctgcaatactagattttgagggtctaggagcaatttatcttgacaaaaatttacggttctagctacttgaatggttgcagattgcagatccgtgaagccctcttgattgatcttcttgaaaaccggttttagagccttgagtttggcaacaatctgctacatttttgtgccagaaaaatgcaattgctgtcatgtttgttgtactcgggttgcatattctgggtgggaaatccacatcttaaagtaacgaaaaggcttcttcccatttcaattaagctgatgaaaagtcactaaagcaggggaatgatcaaaaatcccttcatttagaaaaatcgcttcagcacccaaccataaatccatccactttgcattagccattactctatccaattttgaataaattcggtctcccccttgttggttattacaccatgtaaagaattttccactactcttaatgtcttccaaaagacagtatgaaatacaatctttgaaagcatgagagttgaggctttgcactctgcttccaaccctttcttcttgttccaaaacatcattgaagtctcccaacactacccaagggtcttgagtagcaatggccatcaagtcgtgccataagatctttctaccctcctcatcattaaaagcataaacaaatgtaacaagacaattcataccattcaaagcggacacttgaagatgaatcaattggcttgtgcacttgagtatattaatgcaaaaggtattcgggttccaagtaaccaccattcttcctcctttgtgccatgctatgttactagtaaaacaccaaccattaaaaactttagagtacaaggttccaagttttgaagccttgactcttgtctcaaggagaccaacaggacccacactttgagaatgaatcaatggcttgagcaaactttgcttgtgggagttattgcctcctcgaacattccaagctaatattctatccatttagagtgggaggcactccccctcctcttgtattagcttgcagtgcatctggtgtatctataagttttgtctccactagtatattatgatcctgtaatagctcgaatgaattcaaagtacttgtatttccttgctactttttccctttatttttccagcctttagaaactggctggaacccatcaacacttgtaatatcttcactaacagtccctccaacacaagcattagtattccccaactgcattagttacaccagcaactgttgcagaacctgacactacatttttttgacccaagaatatggctgacccctcgttcatatctgcattaggccctgaggttgcaacaccagtttgcagctccccgatttttcctttgacaacccattatttaccttgagaagtcggtttcttcttacattcatcagcattatgtcccaaaccattgcaattcttgcaaatagttggcttccattcatacttgatccccactgatgcaatgtaaccatgttcattttcaaacttaatggttgctggcagctcttgttccaaagagacttcaatgagaactctagggaaattgagcttttgcctttgcttggtaatttcatcaaccattataggttcaccaattttccccactatctcaaacaaagtcttttgtccccaatatttcagttccaaatcctcaatttgaatccagatgggaaccctacgaatatcccctttcctgaaattagtatctagatcccatgctttcataatcacaggtctcttgttgaagaaggtgtaacttccattaagaatgttatccctaatttcaacagaagaaaacctaatcatgaatatgccatatgaaatgagtccaaccttatccactttctccttccaaatttgcctagcaaatccctcaaggacttccaatggtggattggcacccaaaacataacaaacaatggctgaattccaataagaaatctcttcctcaatatcatccattgtaatcttcacatttatttcatcattaccagttttcccaacagtctgaaaagtattatccaaacaacgaaccacagaacctgatcgtagtataaggggtacaggggagttacctttccagatagctctgctgcaagagtgatttgcttccaggaaatgagcgaagtcacttcgaacatcatcttggcgcttcagctcaagcagggatgctcgaggggagagggtctggaaagcttcaggttctggttcatgattatcctcctcatcagtgaaaacaatgggttcaattcccagaatttcgtccatcgttttggttttctttgcatttccagacgaagacggacctcgtttcttcgaaggcttggtgaccttagctgcagaaggctgcttcccatgattctaggaccttgtttttgccatggcgccagctcaagagttgagagagcaagaactagaggaaatagagttttaatcttatgctaattaatatattatgtatgttactatcaacatctcatgtgtaacatacacataatatattaattattacacaactattatgttacatatct

SEQ ID NO: 39826 - DNA, 4764 bp, Cannabis sativa
taaccactaataataatattaactgattctaatagcccccttaagatggagtgtaaatgttaataactcccatcttggatacaatgttattgaaatgagaaggttggggaggctttgtaaaaatatcaggtatattgttgtgggagcagacatgcattagttggagggtgtcctgttggaccttttctcttataaagtgacaatcaatttcacatgttttgtgcgttcgtggtagacgggattttcactaatgtgaatggcagccgtgttgtcacagtatagctttggtggagaagagatggaaacgccaaagtctttgagaagaacaaggatccaagtgagctctgatgtagcattggccatggcccggtattcagcttcagcagacgaacgagagacaacgtgttgcttttttgatttccagggaataagggaacgcccaaggaagatacaataccctgagaccgaacgccttgtgtcttgaaaactaccccagtcggcatcagcaaagaaggaaagttgtacattggctggggaaagacttgtttcggcgtaggcaatgatgttgggggtactgttggaagggaaaaaaagcccttggcctggagtttttttgagatattgtaaaactctatgagcagcatgtagatgagggactcgtggacaagtaaggaactgactgatatgattaactgcgtaagtgatgtccggtcgtgtgatagtgaggtaaatgagtttaccaatgaggctacggtaggcagttgggtcagtcaatgtggatcctttgtctttgctgagtttcacattgatttccataggagtagaagctagtttagtaccaagagaccctgtatcagtaagtagttgtaaagtaaagggtctttgggagagtgaaatgccccccttagttcgaccaatttcaaggctgaggaaaaaacgaagttttcccaagtttttgagtttaaattttttgtccagggaatctgtaaaagttgctatgtcagatgtgttgttacttgcaacaattatgtcatccacatagatgcgaattgctaagaaacctgtagaggtgtgtttaatgaataatgagttatcggatttggattgttgaaattcatattgaatgagagtggtgctgagcttagagtaccactgccgtgaagcttgtttgaggccatatatgctctttttgagtttgcaaaccgagccaggtggggccttgtaaccagggggtatggtcatatagacttcttcatgaagatctccgtggagaaatgcattgttaatatctaattggtgaacatgccaattatgcattgcagcaagagccaagaaaatttttaaggtattgaacttggcaacgggtgcataagtttgggagaaatcaatgccttgccattggttaaaacctctggcaacaaggcgagctttgaacctaacaacatttctattttcatcatatttgactttataaacccatttacatccaatagccttttgtccaggaggaagcttggtgatgatccaagttttgttttttctaaggcttgagtttcattgtccatagcttcaatccaatgtttaaagagggaagcttcagcatggtttttaggttcacaatgggaatatgctgcaagaaccgtagctcgaaaaggagggtggagtttaatgtatgataagaaaggttcaatcgggtgagaagttgattgagtatggcatacaaaatcttgtaagtatgctggttgtttactggttcatccagttttgaggggtgcagcgggaagaggatattgctggtgcagccatccgaggctgtggcaacttgctgtggttgttgctggtgtgagaaaccagcagatttgttactggtgcagccatctgaggctgttgcaacttgctgtgattgttgttggagtgagaaaccagcaggttgtgttgagttgttgcttgtgcagccatcagaggctggtgcaacttgctgtggttgttgctggtgtgagaaaccagcaggtggctttggtgggttgttggtgcagccatctgtgacgggtgcaatgttatttgtgggctgctggggagaaggagcagccattttggaatgttgttgttgtatttgtttaactgtgggaagtacagtttgaggaaatatgtcatccatttgtgatggagaagtggtggaaaataaagaaaaaatttgttcataaaagaccacgtctcttgaaatgtatacttgttttgtttcaatgtccataagcatgtaggctttcatgccttggggataaccaatgaaaatagaagccctactgcgtggtgtaaatttgtttcttttagagagaagggttgagccataggctaaacaaccaaaacttcttagatgctcatagttaggagccgtagtatggaggacttcatatgaagtgagtcctttaaataactttgacggtgtcctattaatgaggtatgtggtagtttgtactaagaacgaccaataagacaatggtaaattggattggaatccaagtgcacgagcaacatttagaatgtgttggtgttttcgttctaccacagaattttgttgtggtcgttccacacatgagtggtaatgaagtattcccttggatgtgtaaaaagattgaaggttgagttcttttgcattatccgatcgaatggctttaacattgattgaaaattgagtacataccatgttaaagaaagttggaattatgtgttgaacatcatttttatatttgagcatatagacccaagtaaagcgagatttatcatcaacaatggtaaggaaatacttatatccttcaacactagtgatatgaaaaggatcccaaatgtccatatgcactaaatcgaatatgtgtggcaaaattgttgtttgaaataaatggtaatcctttttgtttagccaattgacaaatatgacaatggttattggtaagagtagaagaggaaacactctctttatttaagaattttgaaatgtttatagatgggtgaccaaggcgattatgccagccgtctacatttttgttttgaaactgaaaaaaagtagcaaatgcaacagggtcacgggccggtgcacggtttgctggtgcattttgctgaagcaaaaagagcttgccaaacttttcagctttcccaatcaccacattcggaaaaagatcctgaatgataccaaaattttgataaaaaatgaccatattagaactgtgatgaacaagttcagacatataaatgagattaatattgaattagggtacatataatacattatgcagaacaagattattgttaatgtgaatggtacccgattttaatacctcagttttgtggccattaggaaatgtaacatacttaggaaaacgatgttgagaaaaagaggtaaaacaagagaggttaacagacatatggtgggtagccccactatccaaaatccatgtaaaaggagatagaaacctgtttttacctgcaagattagaggcagaaggagtcatggcagcaaggtcaacatgaggaatagaattgcttagttgttgactgagaagggaaatcaattgctggcattgagttgagagatcagtggggatagaggggatctcgacatcagttttggtgctagcaaggttgaccttggccttcccttcctcttgtctcttcttgtcaccatatccagtaggaaacccatgtaaaaaatagcatttatcaaccaagtgaccaggtttgccacagttagaacaacatggatggggtttcttggatcttggattggtgggaatagaggttgaagcagcatccatggggaaagattcagaagaactaagagatctttggcgttcttcttggatgatcatggcaaaaaccctagataagttgggtatgggttcattgagaaatatttgagctcgaaccgaggcaaaagattcattaagtccagtcaagaattggaggacttggttttgattgtagtaatctaaaaagattttcattgcaccacaagtgcaagaggtgatgggttgaaattccttcaactcatcccaaagagatttcatcttggtaaaataagaagaaatcgattgatctccctgttgtaaacgggtgagttgagtttgtaattgaaaaatgcgagggccattgccttcgttaaaccgttcagctaaatcattccacatatcaattgctaaatcaaagtacatgatgctttgagcaatttcttgagagacagagttaaccaaccaagacataaccatattaatgcatctatgccaagaattgaaagagaaattaccgatttcagggcgaggaagagagccatcgataaatgcaatcttgttcttggcaacaagagccatggtgatgccacgtttccaagactaatagttgttgccattgaggatggtggagacaagcaccagaccaggatggtcacctgtgccgaggaagaaggggttggaatggtcatcgttgatagatcgatgagcaggaagagtggaggtgtgattagcatcgtcaatggcggaaggatcttggttgtctgggttggaattactctgcgatggaggtctaagattggtagttcttcgtggaagagcagagttgttcacggtgggagttgtagcaggtggatcagatgtgatctcaggtgctggtgtatcgatgagtgatggaggagcaccatcctgtgatcgagtagaaggtctggccatggaggaagtgggcagagaaacctctgataccatatgagagaaagaaaca

SEQ ID NO: 39827 - DNA, 2697 bp, Cannabis sativa
  modified_base (37)..(55): a, c, t, g, unknown or other
ccatgcaacataaaaatgatttctaatctttattaannnnnnnnnnnnnnnnnnntaaaatgagttttatttagggcacaaaacccaacattgcacacaggggttttgaagatattatggaccggaaaggaaagaaaaggggaaccgacccagaggttcctacaaatgccgaggtggtgccctctaaaaggcaaaggaaaaccacttcccataaaaagaagacattgtccgagcccattgacctcgaggtctctgatactgagacccaagaataggttcctcctctagttgatcccaacaccaacgcacctcctcttgagacagctcatgcctctgcctcctcgagccaggccattcaaactttgttggccgcagcgggggaggctggatctgaatttgcccaggcgtttgggattgcatgttggtgcaaactcaaggctctcctttcgccttattgggatctaatcaatcttgggagtctagaagagacgcttttgaggaacttggactataccctcatggtaagttggccgtagtattattatttattatttttttgtgttcctcacattcatttgctttcaattctccaggctttttttctctcttttacttccaatcgatgactcttggagcgactcagatatttggagggcgaggtccaaaaatcactagcccaatgcgggctgtgattaagcaacgggacgacgcccagtaggaaatcacccgtctcaaataggaggtcgaggagtcgaaggaagatcttgaaaaagtcgagaaggtcttcaagacccaggcttatgaatttgagaagacgctcgctgagaaggaggccgaacacccagggaaggaagctgaaaccacagaacgatgtaataaggttggcctccgtaccgtataccgaacctggatggaaaatcccaacatggacacaatcttcctagaggaagaggaagagaaaactctggcttactgcgagaaggccaggaaggaggaggaagaggccgaggaagaggaagaagaagaagatctatccaagtctcccaccatgtaggcttggtttttatttatctcctttttttcttttgaaaatggccttttgcccgagataatggttttccccttgtggaattttttgtaaagacaaatttgtgaagttggatggccaactttgctttctaatgccttatacttttaagtttgaacttcaatatgtagttgtttgctagcgttgcattcaaaatttaagcaatcatattttgatcatgcataaagtttcttagggttttccattgctcgtatttctctgtaacgttaagtagttaataacctactttacgtgcgaggagcttatcatccgccatgcactcgatttgcgagcagtcattgattctgcctcacaatcattagtagtgatcttatttcaagaaaacttaaatatacttttaatgaccttgtcactttgtatatatttttattgcttacatgagtagttagatcttctacccacgtgttaggtttaagtactttttaagacactttgatgtctcgtttaattctttcctttagtgcgaaccgttagtattaaactttatacgcgagttatgagttatatctcatttataacatttgattttcctttcttgtcaaataggttttaaataaaaaattatagttgtttgatccctttctcgccaaaaatgtttgatcaggaagttataacgattcgacccctctctcgtcaaaaaggtttagtcagggagttataacagttcgacccctctttcatcaaaaaggtttggtcgaggacctttaaaaagtttttttatttttgaagtgatgggttggcattatattatgtaaatccagataaatttcggttgatcatacatatatgcccctcaagtaattttaaagggttatgctttataaacttgttgaaataaatgattactttattcacaactgaatttcaaaatattacattagcgatgcaatttacaatcattaatctcataagaacttccccaatttaattgttattttaatcaatcttccagaagcatttggttttgataaaataggttctgatattcaaggtcaatcccctaacatattcccacaattgtttcaatatccatggtcaatccctgtcatatccccaggttccaggtgaattaatcctggttttagttgtttgtcttaactgctactggttgacgaccagctttcctttgcagtagcgccagccattacgagccgatatttgcttactttgcaatacttttacgtaatttctttaccaaactaactgccccttgtctccctgcaacatgtttcctctcgagataaccgaggtatcccttccttctacagaggaaggttatgatccctggtcgattgagttactggtggatcgagctgatcatgggcattgtcctgccccttcacatattgttaaaagtgtcctcgtgctatgagaccttctatctcatctttcaactgacaacattctttcgtggtatgcccagtatctccatggtattcacatcgtctggttgggtcccttttacatctcacgtaggggttttcatcaaaccgcccaaaccgctcaaaccgcccgcaccgcaccacaccgcaaaaaaatgtggtttgaaattctttgcggtgcggtcgcggtttgactttttcctaaac

SEQ ID NO: 39828 - DNA, 2899 bp, Cannabis sativa
atatttatgcctcagtattttttaaaatttatttccatttttttaaaaaaattataatcggttttatgaggtattatgtgttatgaggtattttgttatgaaactaattttccttttaatttatatcgcagtgttttaggaactcattttctatttatttttttaattgtgatcagtttgagttattgcgtgttacttatttatattcattatgttatataactggtttgagttatttcgtgttatttgtttttgttcattataacgttgttatagaaccagttttattttaatgataactgatttgagttatttatttttatttattatgttagagagccggttatatttcaattataaccgatttgaattattatttttaattattatgttatagaaccagttctattttttttttgtttatatctgagacatttacttctggtgacttttccaatgactttttttggcgactgtgactttttcggtgactgtgactttttcgacaactttttcggtgacttttctggcaccggtaacttttccagcaaatcttattattacaagttttttcaaatttatttattgttttttttttcatattttaaaatttaattatttttaatcttatattttttgtattatttatttatgccataaaaggtaaaatttactatatttttccatatttatgaaaaaaaactccttacatattttttcttccaaaataagaatatgaaaagtttataataactaaagaaagaatttaccactttaccaaaaataaaagacaaaaaagaaaaaaaaaaaaaaagaaaaaagagagaacttaccatcatttttttaattttttattctattgttaagcaagatgatgtgatgtttttataaatctaggattgtaattttctattttttagatttttttcaacattattttagtttatcattactctatagaaattgatatttgatttcataatgcttatgtaacgacctttagattattaagaatatctaatctaattgtttcatgtatgcgtttagttatatttattggtttcatgttaagtaagcaaacgtttaataatgagtggttacaaagtgttacagtgtaaaaattctatctagaaactcgagcccaaactcctgtaaagatgacacgtgaactcactttccttgaggattgttgagctgtcagaaggagaccactcaaggataaacctcgcttgacccaaattgttgagatgatgtgaccttgatagaattaagttacattattacgttttgcatgatgcaagaccaagaaggtcgtgttcaagactcgtatataccaagatatatgcggtgtcaataaaggcttcccctgcgaattagtataaatcaattctttacttagcgaactagtccgaatgacctaacgtgctcgatgacccgataaggactcacacgtcctgagttatatatgaacgctaacaaggtattcatatatgcgacttgaataggacgcaaatatcttaacatggagactcattagtcctacggtcacgctaggcccgcgagcttgtgcgagaatatgaacagacaacttgcaccataaaggtcgcatacgttgctgtatttagtaaatcggtttgaaagtgttcttcatttactccatttatatttttcttaatttaatggtaatatattcattgtaaaacgacttgataatcaattaagttctatgtaatccaaatgacacttgctttgtatataaaggagtgatataatatgaatgaggacggacaaaaaaaaatccttgcaacagtggactaagcagactgtgatctgactgaaccactataattcctttgtgttcactgtatttattactttttccggtttgtctgtgtgcctgctatttgaatactcgccattctaagttgagtactcgtgtattttcattaaataattatatcttcatttttatttggtgttgttaaaattcctctagcaacatttggtgctatctgtgggaaagatttttattgttgatttcagaggaaaattgaaatgactagaaatcagacgaacggaaacaacaacacaagttctttcaacgttggaacgatgaatcttccattcccaggcaatggagcaaatcccgttgacacaatcaatgggggtgtgggatgaactactgtcactcccctcaaccttctggaaaccgccaatcatgccggagaaacttcaacaccagcggccaccataggacacttcccaccaatcacaccagccgtggtgtctgaaggaattattcaattaactacggctcagtatacaaccttgcaagagcaaatgcgggctttacatgccaaagttatcggaagggtcaagacttgatgtccacctcgattcctaacacgtgttcagaaaacccccaggtaacaactactaggcgatgaactgaacgtattaataataatcatgttcgcagggaacaggaaattgaataggagggtctcgacttgaaccagcctacgcttaattctatgcaaaatagagaactagtcgctcgtaacgctggttgcgttagagaggagataccgcaggaggaagatcatgagcggcgtaatttgcaaagccaggctcagccgcgaattgaggtaaatgatatcaagtctcactcttcttccacaagtgcttataccaggtcaggatctatcgagacgggacgaggaggaagatatcagttcataggggtgatcttcgtgatctcctcaatgaaattttgagggcacgatctcaaacgtcgaggaataacaataataacgagccctatgatccccaagtgggcgatcatggcacgcaaaacatagtcaacccgcctaacgcatctgttggaaattattttacc

SEQ ID NO: 39829 - DNA, 1289 bp, Cannabis sativa
agaagttatcaaaaagaatgttgcttttgaatggggtaaagcacaagaggaggcattttaactgctaaaacacaagcttactcatgctccagtactcgctttacctaatttttctaatacacactactacaaaaatgactttaagtgacttcattttgcgtcttacacacttagtataagatattaaaagttggagagagttttaaatgacctaacatttgagacactaaatgttttacttttgactaattttggaagacactaaaaataattgtgagatgtgtataataaatatatgaaaaattaaaaataaaaaaaactaattataggcgtctcattgttaaagatacgagagacatggaatgactacttacacaagacgccaaaatccatttagggtaagacgccaaaaagcccaattaactataccctttggcgcctttgaaaaaattaataaaaaaatactctttttttatgagtttttatttttatcagaagagatatactcttggcgcgtcttcttctcccttcatttcagcacccacacacacacgaaaataagatagaaaatgtcccacgtttttgaatgggcgggaaacaccattttcagtatttgaaggtacaaactgtttggattttatgcaatttgcattcattcatcagcatcaattcttgttcttctaaatcatttctctcacccatgatctcccaataccttttcaaattttttttcttttcttgattaccttcactgaaacccctttctttcttctttcttccttcgttcacattatcaatttttcaggtattattgctttgttattacttttattagtaatttattgatagttttatcactttctcactctaagtttgtaattgattatttttttctaattgggtattatttaggaagaaaagttgagaagaaacccctccgtattgagctcatcgaacagataaatacggactcttgggatcttccaagtaagatttctttatgtatatctttcttttgtttggattaattttagcatgtataaatatgtatatgatttgtatatataatagagagtgagagagataaagctggagcatactattactaggtcatgtgagagctaagaacaagacaaacctcttaataacctaaatattgccagactaaggaatacaaattaatatcgtaaataaaagatttatgaatagatcaaatattattatatacagtagaacctctattcaagaatacacttgggaccaagaaaataatattctaattgagaggt

SEQ ID NO: 39830 - DNA, 1432 bp, Cannabis sativa
ctccaaaatagatttaagacttactaaggttggcttgatgtttagacatgaaactaaacttatttagggtattctttaaaattgtaatagattccctaatccctttacaaaagaggatcaaatcatctacaaagcacaaacttatgatcttctaagtttttgcacatagggtgaaatctgaaccctgctgaactagaagccatttgaaggtgcctagtaaaatattccatcaccaatataaataataagggagaaacgagatttccttgccttaaccctttcattcctttaaaagagccttgaatcctttcattcataaccaaagagtagggtgtattctttaagcatggcataatccaactaatgaatcttgaagggaaacaaagagctttcataagatcttccaaaaatagtcaatctacagtatcataagccttacttaggtagatttttatggcacatcttggggaagctttttttctaacatagtgtttgatcaaatcttggaatatcgtgatgttgtgagctattgagatgtgtttaaggaaggtcccttggttttgatgcaccagactaggtagaatagaagctaatcttaagccgaggagctttgagatgcacttataatgcatagtgtagcaagcaattggtctgtagtccactgcttgatttggcctctcaatcttaggaatcaaagagagtattgttgtagcatgaagatatgaagggaactgacatgtatcaaagaaattacacattccctacaaacttccatacctatatcaagccaaagaactttgaaaaatgcagaaccatatccacccgggtcaggactcttatgattagggatactaaacatagcttttttaaaatttccttacagggaaatgtcttcaataaggctaattgattatccaaattcaattcggtaccataatccacactctacaaattgatgttagctcttgctgtgctattgcttcccatgtcagttttatggtaccaaatcattgtaccatagtcccaagaatctttatatgtatatatatattaaattaaaaatattaaatacatgaaagaaatgtatacatcttgatgactatcggggtattttcgaaacttctcgtaagttagattcaataaatctcacactgtagtcttccatatcgacccaccacacacaaggagtagtgctactaggataaagtgtatatgaagttcttgtgtaaatctcaacacatgagcaataactctttcttatgtgatagtgagaaaaaggtttattggtaaaaccctttttaagctttcaaaaaaatttcttgaaaattctattcacaaaacttatgttcagaactttgttatgagatacatttaaataaatccaataaaaatttattttattaattatttaaattaaaatctatttattaaa

SEQ ID NO: 39831 - DNA, 1696 bp, Cannabis sativa
tcggtggttgttgctggtatgaatgagatccatggagaggcattgagcagttaactcccagtcctttttgtgatgattctccttgaaacaggatcgaaggatgtggcaatgatcttttattcaaagatggaactgctgcagttaaagatgatttcgccaaacgagtaagcagaggccaagcatttcctttcccaaaatccgttcgatatcgatcataacccgaagaaggcagcagtgagccttttattgttggtcgatatggtaattcaggttcagcaccattgtcaagttgttcaagaaaaaccatacatttgttgtaagggtgaccaattttgccacattccatgcagtattccggcaacctttcgtagcgaaattcaacccagaacttatcttttacttgtgtaagagcaatcatacgtcctctcaacaaaggttttgtaacatcaatcttaactcggatgcgcataaaaggaccccaaccttcaaataaagaaatcctcaaaaacttcaatgaatttcgcctattaaattaccaagagccacagccagtcctcttgttttactcataaaaggaaggcgataaacttgaatccaaaaaggggtgtgggtgagaaaagaaggagaaatattctgtccaatacttggggagaacaaaatgatatggtgattttgaaaatggaaaggttctttctccaatactctcagtttatctccttcgcaaccgaaagacagcataaataattcatcatcctctgtaattttaaccgggaaacgaccatcccagtgctccgccatttgcctttgtagtgttgataaccatacttttttagaggtcataattcttgcgtacagaacatggctaccaaccgaaccagaagagataggatctcccaaatcaaattcatacaccgactgctcctcatcagtaagggtcagagttgatttcatcttatctatgtaaggatccatcgtgaggaagaatgaatgggctaaatctggaaactcgaattggaatgcacaagagagattagaacatcagagaagcatagatagcagtatgtaactgcagaaaactgctaggaaactgaaaaaaaacttcaaaaaaaaccaataatggactttaactgccgcagagcaacaattgggcagacaatcaaaacattaattagaatactataacaagtcttaatatttaattacctacttttttgttattattattattattaaaaacaaagtaatctcatttttagccaaattatagtttcacaaacaaatgctgatttctactcggtttgaagtttatatttataggttctccagttcacactccgatagtttagtttggttaaaatgtgaaatggatgtttaatttcataatttctttttgtttaaaatgtgcaatgcatgttcaatttcatagtttctttatgctctatagtagaagagttcttattaggattgcacattgggtggatttttcggggtttttttgtcaagattttgggttttctaaaactgtatatactcaacctatccattatggcatgacattttttggacttgggttgggcgaataagacatgggttcaaggttgggctgggctgctagatgggtttttattttataaaattgtatcagattttttgaaaaaagtaataaatatattagacattaagagcttgtttgttt

SEQ ID NO: 39832 - DNA, 2630 bp, Cannabis sativa
ggtaagtgtgattaaaataaaagtgtaaattttttcagaatgcattccacattagaagcatctgattttatcttggtgagaaaaacaaaatctagtgaataagagtggatcagggttttaattcgagaactgtagaggtttgccctaaccctcgatatttcaatgaacccaggaacactagtccaagtcgcttcccaaacaatgtaacatcaccaaacacaaaccactttccactagcccaaaactatcaacccaacgaaagagtggtctagacccatcaaacctcaacaaagagaaagcagtaagcgaaatccacaaactaagccaaggatctcaacaataactagatccacccacaagactgagcccaaccaagacaacttagaatttaatgttgaaaaaagagaagcgacatgagggccacaaatcatgaaacaagagaaaaaaatagagaataggtaaacaatgggaaaatagacacaataatatggcaaaaatatcttggaagaaagaagactatggaggtcagcttgcagaaaggagttggggctaggagccaattggcgacgtgagaagcttcggtcggaaacagaacagaaatagtccaaaaggagagcgaggatcaagctcatccttgttcacgatgacaaggaaataagtggacgtaggaaggtctagtcaccaaagccgccgacgacatgcgagagagagatgggagccccgacggcaaggcgaaggatgacttggaggaacggaaaaaggtagaatctctcatatcaataaatttactttacttttagaaatacactaccaaaatcttgctttttttattttatattgaacttttacactacactatatattaacttatctattttttttatttacaccactaaagtctcattttctatttcacctatcttgttatatctttaataatatttaaaaattaaattagaaaagtaaagagatttttcttcaaagatattaaattgagagatataaaaaagtaaaaaattaaataacatacgaaaaaaaagattgaagcctcttaattccttcactacatgtagagaaggaatagtattatgtaaaatgatgaacaattatcaatcacttggaggatatttttacttgattctttattttttttttctttttaaaaaattctccataataaaggagctggtcggtgtgctttatgtgcattcaaaatatatgaaaccaaacatcaaatagtaatgtacaaattttttacttagagggaataggaattagttatattgtattaattcttattcatttatttcctaaatattagaatttgtaatttgtaacatgatacaatgacacgattcgaaaatgatatgaaataaatagatttgcgtgtacatttaattttcgtgttaaaatcaggtcgacaagtttaacatgtttattaaacgtgccatttcggatcaacacacttaactcaaaagtgactcaattataacacgtataagcatatataagtattttaaaaaatttatattatgtaaaataaaataaaattttaaaaaaaaaacagcataaaaatactattttttaatttctatatgaaatataataaaataataataataataataataataaattaaaactataaattttatgagtaatatttgtgtttatataaataattacactaatcatgcaaaatttgtgtcatgtcataatatgttaaattgtgttatttttgggtttgtgtcatgagacatttattaaacgtgttatcgtattgtgccatgtgacctattaagtaatcatgtcgtgttcgtgtttgggttcttgacacacgattactaatcatgtcctgttcgtgttcatcataaatgtgtcgacacgaaaacacgaattgtcagccctactaaatattgtaatgagagaagttagtgggacccatttaaattaagtaaaaaagaaaggaaaaagttctccccctatttttataaagaattcttttccctttcttaactcactttattttaattttaattttattattttataaatttaaagacaaatatgctcttaaaaaaattataaataaaaaataattaacaatgaaaaatttacttaaattttggtattcagattacttttcctaattatgtaaataaaataaaataattctaatttttttccaaacaatttaataaacaacataaattgtttcttataattttatattttaaatccattattattaattagtctgattagtaaacataagtacctaagttcattgataaagaaccttattcatatatgtatataatatataataacgatcattatatatattttagatatatcatatatatttaaataaactcacacgtgtaagttagaatattactctaaattaatgcattaatatatcaacattgttaatctcgaaattttttctgagtgacgtaaacatcaatgtttgacacgtggcgagaaagataatatctcgaagttgagtagtctcgagtcatagtagtcgaccttggagaggtttgtagccgtgcacgtaggttgactctgggaacttcgaaatgagtgtttagattccgctaaattttttctaactcactatcttt

SEQ ID NO: 39833 - DNA, 1377 bp, Cannabis sativa
tgtaacaagaatagaatggaatgggtgggtaatcagttgggctttgaaggtatttttgtagtagaggcccaaggctttagtgggggcttggccctgttgtggaaaaacaaagatgagggatagttgttgaggttctcttcgaaccacattgacctcggtattaccatcgatggctgttctccttggaggctcacggggctttatggggaacccaacagaggccgaagacaacatacctgggatctttttagagaacttgcaagaaggtatgactctccttggtgtatcataggagatgttaataatgtcatgtcccaacaagataagaagggcggcataccttatcccagatggttactggaaggtttccaagcttgcgtttctgattgtggtttgatcgacttggaccttgttggctatcagtacacttgggagaagagtagaggaactagttcgtgggttgaagcgagattagaccgtgctctggtttccagttcttggcttcagcttttcccaggtgcgactctttctaatcttgagtactcatcttcagatcattctcccatttatcttgaacccatcattcatagtaatcatatcccgtatcatcgatttcgctttgaaaacgcttggcttaaagaaccaatgtgtattcaaattgttaaagatagttgggaggctcatggtgaggattcggttatgaagaagattaatttgtgtgctactaatctctcacggtggggaaaagacttaactgggaactttaaaagaagaattcagcagtgtaaaaatgagttgagtgttttgaaaaataaaagagatactcaatcagtgagtaggtatgaagaggttaaagtcattttggccaatgttcttgatcagagggaaactttttggagacaaaggtcgaaacaactttggcttcgagatggtgaccgtaatagtaagtatttccatcttatggctagtaagaggaagaggcacaatacgatttctaagcttaaaaatgaacatggagtgtacacggactgggatcatggtcttgctgaggttattgtgcattatttcaacaatcttttttctgcttcatctgtgtcttttactgaggtgattgattgtgtaagtaggatggtctcggatagtcataatgtggatttgctccagccgattgttgaagaagaagttcgtaaagctatcttccaaatgaatcccgataagagtccgggtccggatggtatgactccggctttttaccaaagatgctggccgattattaaaaaagatgttaccccctttgttcaaaagttttttgtcacgggggagtttgaattgggatttggtgatgctaatgtcgttctcattcctaagaataagaac

SEQ ID NO: 39834 - DNA, 1827 bp, Cannabis sativa
aaattaaaactagacggtctttacattgaagatccaaaggtaagccttagccatagtttcctttatgttttgtaagttttagctaggttcaaacatgcataatagagaaatagttgttgtttatgttaattgagttttgctttagttttctgagttaaattgatgatgtattaagcttatttgaagttatttggctggttgtttgttgagttgagcaagtttgagttcaagagttcaaacttgactcaacaatggtgattttagaatttctacatattttgaggttttgttccttggaactagtctattgtgatgttattagttgatttggagcttgtgttgaagttcagggtcgaattggggttgatttgaggctttgttgttttctacaactgaaaatagccagcaatttttgtggaaatgatatatcctttttactggcagggaacctagaaaaatggcttgccattttactaaaatggcctaccgttaatctggcagttttcccgttatgttattttttcatgttttctcaatatttagggtattgccatgctaattaactatagagaaatttttagtttcaagtttaggtcctcgaaaaggtcttagaaagttacttacccgtttttcgtaattgtggcatagggcctctgttcagcgcgcaatttaccatttaggtcaatcgacacacttaaattcaaaaacgagataagattagcatagaatatatatatgtatatgtgtatgtgtattatatgcatgatgtttatatgattcctatgctaccaatactagtacggtagcggtttcgagtgcattggtacagtatatgaggttcaaagagtacgatatggtgttaccaacactagaacagttaaagtacgttgtgcatgtgcacaacactcaatagtattgagagtacaattcaaccctacaaacactactatagtagcgatacttagtgcatatggtacaaaggtcgtacttctgttaagagtgttcttgatcatttgttaagccttgtggatacgtgtatggacacctaaatataagttggtgacatattatgtgatatgcttttctaattgatctgtcgactcatagttattatttgcatgtgtaggtaaaggaaaggctaaggcggagcagtagtgagttcagaactcggggatgactgtatatgtctacatggtttgacctgaagagtttcgtcttaggacgagttgggtttcattttgtagtagctgtgcgatatttttgtaaagtgtattttaaatatatttatcaatttttaaagtgggatcccaactttttattttgatatatatgtatagttataaaagttaaaagtataaataaaagtttaatttgacacgttttttgagaaacactttgattagcaaaggtgaacaccgtaattaaaaagtcacttagtgttcctagacaatagggatttacttcaatggtggtgttttctaaactaatctttatgttatttgtgttaatctttatttttaattattcttttgaattaatcttgttgtttataaaaagaacatcgttaatgttcttattctattattgatttgactcctttattgttattcccattgttgttgatcattatatgtattcatactctattaattttgtgctagaatcacaagaatccttctaaattcccaaaagttacatattttatatttcaaacctatttacttagtatgccaggagcaaataagaaagggaaatttgacaatatatgcttaaaaataaatggtacactaaaaatatgctagcatattttacatcatgcaaaatata

SEQ ID NO: 39835 - DNA, 1696 bp, Cannabis sativa
  modified_base (1177)..(1195): a, c, t, g, unknown or other
gtctgacattttcaaggacattttctaagagaaaatgtgacaaccgatatgctttcctagacaactgcttcttcttcttcaacaaatcctaattattttgatgttggactatatctgataaaaggagcagtaaagagaaaggtggagcaagaaagggaggcagaggaagatagagactaaggacttatttattagttagctagcaattctattgcaactagtgaactcacttttaggaacaatatgtgatatctttgtttttaatttcggctgaaattttcttacttaatatataatacaaagtttctccacctttcaaacacctttcaaacactacttagcaacttctatatgaggcatattttctccatagactctgaaattcctaggttttgacaagtgatctaaaagttaatcacttcctatctttgaactccaggtgcaactcatagacaacttcacaaacaagaaaggaatgacaagtcactgttacaggatagcataccgctccatggagcgttcgctgaccgatgaggaaattaataagcttcaggtattccatgagctactgtttgtgaaaatattccaatagacgtcctcggcttattttcaaaagtggctaaagtaaatgtttacttctatttgtctgtgcagtgggatgtaagagaacgagcagtgagcaagttgaatgttatcctcagatgagatttgaaagagaggcagattaggcagcctaaatgaagttggctctatgaggactgagttttatgctgccaagttcttttttggcttgtggcaacatgcgcttccattcatacaaggtgatgtagatataacttaaaataagaagaattgattgttttgtcattatttttattcagccataactcaaaactgttttgtattttcccgatgactgtagcatgtcaagtcgtaccatttttattcacttgcctttgacacacaatgaaaaaacaaaaaagattatgatatggggatatggtttttttttttttttctaataaataaaggttttgttttgttaaatcataattataactctgtaatttgttttttaaaatggtatataataatatgggattatttcacaaatacgcaaaaataataataataaaaaattacaaaaatacggttttatggaattttaaatattttnnnnnnnnnnnnnnnnnnnaatacggtctttttatgttgtacccttgttaatttgttgttgattttttgttatttgtatgttattatctattgttgttttgatgttattttcatgttatttttatgtagatttcttgttattttctatgaaaaactgtaaaaatatatataaaaaaaaattgtaaacgtaaaaatgtaatttttttttataaaaaatagtgctttatgtaattattgctaataatatcgtgagtcaattttagttttttttttttaatgaaataatgtaattaacatggtattagaaatcaacttaaagctaatttctaaataccaaaaaagtaactaacctggtattactatgttttattgtgttccattttgaaagttaaaggattcgaattgtcagctaacaaaatatagatctaattgataaatttgattaattaagatttttttcttccgaactttgacatgtactaaattatgtcccgtgaacttttttttgccgttaaaaatt

SEQ ID NO: 39836 - DNA, 2794 bp, Cannabis sativa
agaggtaaaatgtggtagatttgacgttgtggtgcagcacaaatttcagtttttggcatgcatgtattttgtgttttgttgtatttgatctaatataatcgtattatgaggtatgaaacggtttgggctgggtgggttgattggtttttgtaaacaccagagtgggactatatttgaaattaacaatatatgaaaaggtttcttgtataatagtttaatttgaaacatattttaccgtaaaaagagtactatttttttttttatcattattgttcaacttggaagtggctggttaaactcttatatatgataggaagagcaatctatgatgtttttttttctcattattgttcaactttttcatagagtactatttttctaaagcttcctcatagattgctcttccactgatttgatggtcctcagttatataatgttttggcccaactaactgtaagtgttgatatatatggatttgtgttattgttaagtggtagtgtgttttttttaactcagtttgattatgttgatgtaatatggtaaattgtagatgttgtgtgaagaaactgagaactttttttggttcttgtgaagaaattgtgaagcattatgtgtttatgtgttaatctttagttagaaaaagaaaatatataattgtgggaagtattagaaacccacatataatatgtatgagtctttgaatttctaaatatattatctctaaatcttaaaaattaattatctgggtttggcgtgaaactttaatcatcccttgccttgagaacaaacaaactattccattttaagttttatgtgcttagtttcaataggacaacaaaaacattaataatagtatttatattttcacctaatcaattttggtggtctcactgagttgttcccttacagaatggtttggttcttaaaggtgagccattttcagcttttgggtcttgttatgattccagtttttacttcatcttcactgttctaattctctttcagatgatggagtgtaaactgtctcaaagattttgagaactgttctctagtttcttttttgtttaaaaatgggagtgaagataactcttttgctgatggaaatatgcttagtagccaatgccttacattttcgtggatctgaaggtaatcttttttgtttactatattttaaatgagtaaatagtgtaatttaaattgggtttatgatattttatgacttaactgatgatcacgtgttaattatgagctttaaattcagattaaatttaaggatatgggttaatgcttttatgatctataacacagactggacttgccagttcaagatttcaatccaaattcagggcaatttatttgattgcatgatagtcatttgtgattttatttttttatttgacaatagacacaccaccattgagaagatggttattagaaccatcactgatccaccatatcagtccaagttcgcaatcttccaaagtaccaggttagttagtaaattctatagctgactaaatttttttaatcaagctgagtttatgctctgataataccatttgaaaatttcaaatgtacaagtaaatcctttcagaatgagggatgttttgagtctataatgaagaaaaacgaaaaaagttacgcaacaatgtttatttattcttaaagttggttggtgaactgagtagtaagacttaaatatttgcttagtgttgcaacagatcatgcttctcctacatcttcactcagctttggctagaagcgacatgcaaagatggtagcaccgccttcaaagaaagcatttcaccgcaaatggttaccagctaaagaaaatgaatcagctaaaatgtcaaagtttgaatatttttgctgagaataatcaaataccaatgttcatatttctaattttattgttggagctgccgatccagatgatgctacaaggtcttcaagtattgtaattctaccttctatgtcatcttctagagcccctgcaaagaattgggctcaaggtccagtatcttccccttcagttatatataataatcaccatcacaaaagaagaaaattcaacaattcagttacaaaaccaactcatcccacttacaccaaacaagtacgaatctcttgaccacaatggcttttgattattgattgagtacaaagttaccactttttgttatgatacatgtaatataagttttatgattattggtatgaatttttcgcattatgtaattagtttatagttagtttatatgatacatgtgaatgcataagttttaggattgtttctaataacaattttggtattatgtaattagttaattaatagttagttttatcattattgatcatggaattgattactgcttataaaaattttatataagctttataatcgttattttaattttttttttcgtattatgtatttagtgttacataaaatgattcttaaatttgaaaatggaggtagggtaaattggagggaaatttatatttttcccttacctgcacttatgcttcattttataaccgacgcaataggtgcaaaaaaatatttgtagcaagttatgcatcatttaagaactgacagtataagttttttgtgtcagttttgaaatggcacaactctttttgcgtcacttttaaaccgacgcataatgttataaagaacattttatattttacgtcggtttataaatgacgaaaattgttttttgcgtctcttttgaaacgacgcaaataaaaaactatttgcgtctacggcttatacgtcggttttatagac

SEQ ID NO: 39837 - DNA, 1743 bp, Cannabis sativa
  modified_base (1680)..(1696): a, c, t, g, unknown or other
acatttttctcttgttgcataactatgtataggagagaaattttgagtctttgtctgttggaagcatttcataataacatatatgtgaagatattgttggaaagaagtgccaatttgaaaaatctgcttagatagtacataaaaggtttgtacttctcttattcaagatcatttattttttcactcgacttaaataaaatttacaaaaatatttttatcttctgtttttaaaattgaaaaacaaaatagttatagaacatatttttgtttttcaaaaacaaaaatattactaatgccacctcaactaaatatatttttttaactaacttttacaacaactattctaactaataactaacaaaataaaatttagttattcagtctaacatccccctcaaacgaaaaggggatggtgacatttgaagtttggatttgaggtaactaaatttgtcagtagacaaaggtttagttaagatatttgcaacatgatctaaagagggaacataacgaattaagagctgcttttcaatgatttgatcacgaacaaaatgaaggtcgatctcgatatgttagcttcaggcatgaaaatagggttgtaagctaatgcaattgcaccttgagtattaacccaaagtattgaaggttgaggaagcaccacttaaagctcagacaacaagaaagaaattcatctgatctcaacaacattagcaattgctcgaaactcattttcaatgttagaacgagcaacgacttgttactttttagcagaccaggagactaaattttgacctgaaaacatgagatagccacctattgaacatctttcattgatacaacttgcccaatcaatgtcattgtaccacagtagtatcaatgatgaagtaggtttaagccataaaccatctgaaatggaccctttgagataggggtgcacatcgggtgggttttaacgggttttagattttcgagtttttagtagattgaatcggcccgtttgtgtgcatgagttattgggtttcaggctcgggtgggttagggtgcgggtcggtctgtgtttgggtgggttggtgttgagttttgtgccccaattaaaactctatttcaatgtaatcttgaatatttatttatcaataaagaaacagatttatttcattacttgtttaatatcttatttggttcacatgtttatttcatgatcatttgtttgatttataaattcatcaaaattcttatcacattgatattcttgattactaatatcaacacagtggaaagtaatcaagattatgtgattgaatatagtcctacaatttatcagtacacaagattttactgatataataatcaacaatgtagtttacttgtaccttagataagtgttatgtccttttcagggcattggtaaagtaagattggattgaatgtattgttatacatcagattggactgatattaaacttggataatatatcataaacttatcgtactatctatctaagtcaatatcacctagtttattttagataaatgatctcaatcctaagatggttaggttctagttcaactgtattatttatgttctttgaattgttcgttaaagttgacgaattgagtgggagcgctaatcattgatacagaatttatagctcctataaatgcatagaagtgaaatgatgattnnnnnnnnnnnnnnnnnaatagagataaatggtggagtactcatttcagtaattatatcagttt

SEQ ID NO: 39838 - DNA, 1275 bp, Cannabis sativa
tgtggtgtaaatattatttttttaaaaaataaaacaatatcaatcaatactttataaatttaatttttaaaaataaataaataaaaataaaacaatacttcattaattttaaaataagtgagaattttaaaattaagtgtattgagacataaagttttatcactttttttggaagtgtatatttagtattatgaatatttattatgtataaattataacaaaaaaaatattattttaatataaaagaccttgtacaatgcacaagctacctaatacgtgggccaatcctcaccctatttactatatattaatctttgtctgatatttaattttcatactctaaattatcacatatatacaatcaaagcattactattagattccaaataaagaaaaacattacacactctcaattctcaaataatgcaagtgcaaaatattcttctcaaatgcatattgagttttgttttagtcaatatgccatgggaggtacattctttaattgttttcaataattttaagatttttccattccatgtgtctcttctcaaaccataccattagccatttatataagctacttgtataaagtttatcaacaaacctgtgaagcaagtcctgatacttgggagaacttttagattttttgtctgtcaatgatgtttccattaattacagctttaaagacaaggttgattttgaggaggggaggggatcgaagtcaaaagcccaacaacattagattcaaatgcaattaaacaagaaagagtcaaaacataacaaagattggacacctaagaaatcgaccccattaattctccaactgtgtaatttcataaaaatacatttcaaaaagtttccaaaagagtaaaacaattgtctttgaggagggcccaacagaaatgtaacttttttctttgctttaaatatataaatatgttaaaagaaagtgatgatgtctcaataatatgattttcagcatgattcaatttgggagaagatgcctgaggctgagacaatgatctaattgcatgactggcgtgatcgaagaaaaagcataattttttaatttcaatgaggattatcgtgaatgttaaggacattaatttgggagttttgtattcaatacattatgaaagtttcgaacaagaagaaagagtactgtgccaaaatgagatatgtataaataaatcagctaattaattagagacataatgtactacataagaagtacaattaataatcagtagcatttatatatgcacatatatatat

SEQ ID NO: 39839 - DNA, 2552 bp, Cannabis sativa
ttttcaatttcaagtctgaagaaattcaaagacgaaagagaaagaaaaaataaaagtaaacaaaaggtcatcaatctcgataacaatggcgaggttttggtcagtgggtatcatcgtgatctgcgccctaataatggtggtgagcttgtcggctactgttgaagccggcggaggaggcgaattcatcgggtgggttcgatcgaagggaggctgcgatgggtcaatagccgagtgcttagctgaggaagaggagtttgagttggactcggagagcaacaggcgcatcttagccaccaaaaagtacgtcagctacggtgcgctgcagaggaacactgtcccttgctctcgccgtggagcttcatactacaattgcaagcctggggcgcaatccaatccttacaaccgtcaatgctcctccatttcgaggtgcaggagttaattctctttctctttatttcaacaaaaaaaaaaattaataattatttttttctttttgggttatggaaatgggtttgattgttatactttaacaaacgaaaaaaagaaagaggagagtgttaatgggggagggggcattgttgttattgttcatgcaaatactcttatagttaatatttcgaattttctgtaaaagcttattgtgatttttttttttttctcgtatttattttattttgtttttcttggtgttatgagttaagatgtagaaatttcttcatgaaaaaaaagtatatttttttaggtttaggaggaaagatctgaggcttggttctatattagtacatgttacttcaaaaacacaataaaagaaaatcgtgagatcagatttcagtgttttgtttgggtatggtgaaaatgggattacctttcttttctttgggggaaataattcgtgttaggattgtatatggaaaagtgattacttctatacggtgaaattcaataaatctcatttttttttatgtttattgattttttgattttttttttttgccgtttttctctcatctggtgggtctttttttttttttttttctttcgtgtactttattgtgaagtttttttttcttggttcttttcaaaaatccttatgggagtaaaagcattgagtacgaaaaggaaaatataaagtgagatgggtaaatcggaaaaagaaaactggtcaaagttgtctgtggttggaattgggcaacaaaatagtcgtgaattcatataatgtaagaacgttggtgtacatatcaattgtgggcatcaaactccttgcttttttcacaagttttcattattatctttatttgtttttcatttttgttttttgcaaatctttttgtggtcttctgaaagtcatatgccaactgaatacaaattacaactatagatttatggtttttgatagcatgaaaagagcttgctaccttaaccaaatagaatagattatatatcatattcaccttttgacaaaatggtaagagcctattcaagttatgaaccatattttggatgagttagttagcttttattttattttatttttttcaaaaaagagtttttgttacctaacattacctggaatgccaaccaaggggaaggacaattatcatcttaaaatatcatttaagtcttcacgtgaactcttctcattcaatttattttatttttcaacaatttgaaattggccaataccaaagtaaggtttatttttttttttttttgcaaaatgaagactgtttattgtaagttgcaacacccatttcccaattttaggtagctagcaccattatgaggtagttttttattattggttgagggttcttattattgaattagaccgagattacatattagccgatataggtggtttttagtatttcttttaggtagccacgtctgtggttaataataggtcctttacatactgcccatacacaccaaaataatgttggtgatgtggtccccttttaccaaaccaaattatgcacatgagtttgtcaattgatatgagatcttctgattagactaagcttttctatttatcttcctttctccaactccaggcttttaaagatttatggttgaatattatcattgcaatttgccataaatattgtgtttttgaaatacaactggaaatttcagaaacaataagaaagacatcgtccatagttcgacacaaactgctcaagagcaattatgcatcccttgaaaattaaaagatgaccaatataagcataaaaaccgcgagtaatataaaaagggaaattataataaataatgccaaattataaaattttaatactatgtaagtaaatgttttcattttaaaacttgtagaaagggatgttcatctaattcattccgcactattttgcttatagtgcatctgatccgtactaagtgcggttttcatattttagatccaatctgcacaatagctcaaactcaattcaattcaatccgcaaaagtacagattggatcagttattttggattgattactttttaatattaaattatttaatatttatagaaatatatatattttttttcacata

SEQ ID NO: 39840 - DNA, 1067 bp, Cannabis sativa
cacagacgctgactgcctaaaagaatcgtagacgtctaccttggatacaaactcagatcgcccagcgacgattatgtttttcttgacacaggatcagatcttgtcccctgtgccagaacatacctcgcacaccatttttccagacgattattccaatcatttacttttcaaggttaaaccttttggaaacacgtgtccattacatacagtggtcccctattgtctagctgctttaacgcacgagcacaaatcctttcaagggcccaacagttagctcttttttgcatgtatattaccccattagtgggctttttgcagaaactataggtgggtcatgagcatgtccatactgccctttaacctataaatacccttctattttcatacgaaagggggatcacaacctagatagtcgaagctctgctggtattattctaaactttcctcttcttcaagaaaaacgcaaaatacaaggtgagggttgcataaatactgtaaaaacatcatatatgccttctaaggctaatagactgactcgtggactaaggttaattaacacctaaactacataaaaatctctatctttttttattactgctatttattatttcttagctcttattatattagtttttgaaaatttcggcaaatattttggtgctttcattaagagttgaagaaagacctaaacccatagtgttactgtaagcatgttgtttatccgaaaaataggtcccaaaaagacttctcaaggtagcctcaacactgtcattgaggatgtacatcctctctcgttagagcatgcccagccaagcgatgcgagaggaggagatgcatccaatgctaacaactgagggggtgacctgaacaactagcatgacgaccgagatgctgaaaatgaggaggaagaagattgtggagaatatgtcaaacacagatattataaagatggctatcactacaagcaggaccccaaagtggtttcagtgtctaaagagttgctcaagacaaacaaaagttagcccatcaagagaatttttcccataaaaagtagaaaatcatggctc

SEQ ID NO: 39841 - DNA, 2066 bp, Cannabis sativa
tgttgatataagtagtatcaatcaatccatttaattaagtcatttttaactttataatctcatacttacacaatcttaaaattatcacacttaatttttctcatgagatgatgagattctatagtttaccaagtattttcttgagactgctaaatgtcacgtatatgtagttttttctttaatataatattactaattaaaggagtgttatcttataatatactcttttgatattaattgactcattattttcagttcactcttttttgtgtacatttaacatgcaactaacagacaccacacgtgattattaaaaatatatatgaagacagtacaatgttaacaaaaaattaaagtacacactataatttatataaataaatttaattgaagaaaatataatataaagaagaagaaaaaatacaaactaaaatatacatatatatttaaaaattgaactaccacacacagctgtctaagataagggttggtaaaataatggacgacctaattgaactaattaaagatatgttgagtcactaattattgttatttatttaagcaagtttagaatttagttatagaaagtgaaagaaaatattggattacttaaattaaaattaatataaaatggtccactattaaattattatatagtatattactttttttaataaattaattatattacttaggaatgttaatttagagtttggtggcacttaaccataaatagaaagtaaaagaatttttttttaaaagaaagagaaaatattgtgtatagagaagttggttatttaatttgataatttgataaatattatgtttggtgtaatttatatgtaaaaaaaaattgaacatattataatcaaaattttgaagtccttaaaaacttttataaatatgttttaaatcaaagaaaaatatttaaataaagaaaaatccaaacacagttaaaaatgttttatcaaaatatatttacaataaaaatcgatgggaaaaatacaattttaagtttatgatttatcatctacaaagtattaaataatattagttaagaaataggttagttaagatcaagacaaatgatatgtgcatataaatgtatataaatatatttacatcaatgtagtaaaaaaaattaaccaataaaattgatttaaaatgaattcgactagattaataaaaattagttgaaagtttgttcattgttgaaaaaagaaaatagaaaaattttagtataaaaaatatatccacatacaaaaataattattataatttaataagagtatgaaatatttaggtagtcaaaacactagtgttcttagcttatactatattcaaaatttctataattataaataaagctataatataactaattattcttatagtttttttttttttttcaattttttcatttttacactttaaattattttttttttaatatttacagaaatctacataaaaatttacataacaatcaatggagcaccttaaattacaaccgaaatctacatagtaatccacataaaaatcaccgagcaaccaaaactgtaaattttaaaaaataaataaaaaatagtatataaaataattttttttattattattcttatacagtttttttaatacttatttattcttaccattattgttctattttaatgccatgtagaaagcatattattggagaagaaaatggagacaaaatgccttaatttcatacagaatggcagattgagaacatgagtgaagaaacatcactgaatttaatgatatattataatattatacacacaatatattaaatgctctcctctcactcttcttttgtagagagaatatattaatattttgagaaatactatcttcctaaagtgtaatattgatattaatgaaatttaacttattttattataaaaaatcacaaattatatagaaaagggaagaagtactagaaatcgtagtaagcttcatttttgttcttgggagcaagtttgcttacctaagcacttagacttggtttaaagattatatttggacaattttaactaattaaa

SEQ ID NO: 39842 - DNA, 1851 bp, Cannabis sativa
atctgccaatttccaaaccaagaaagaatcttaagggaccaaggtctttgagtttaaatttagagtcaagttttgctttaaacaattgagcatcattatcagcatttctagcaataacaatatcatacacataaatcaaaacgacaagaaacgcattgttctttgagcaaatgaaaaaaaatggtcagattatgattgggtgaaatcatcactaagtaaagtggagctaagtttggcatacttataacgaaatgcttgtttaagaccatataagctctgtccaacttacactcaacattcaaaggaagctccccctttggcgtgtatcctagaggaagagagatgtaaacttgtttgtataaatcgccatggagaaaaatattattaatgtctatttgctataattgccaatcattaatggaagcaagggcaagaagaacttttaaagtattgaacttagttacgggagaatttttttctaggtaatcgatacctagttgttgatggtagcctttggctactaaatgagctttataccattcaatctcaccattaaatttatggttaatcttataaacccacttgcagctaatgaagtgttggccacgaggaagagagataacaatccaagttttatttcctagaagtgcatcaatttcattgtccatagcctgtagccactcgggcatttttgaagtttggaggaaagttgtcggtttcaaactgaattagcacttaagatagcagctcaaaaatatggagaaaatttatcatatgggataaagagagaaataggataagcagcagagaactcacaaatatagtcctcaagaggagtaggacgaatgatagagcgactagactttgataagatgagtagaggaacactctccttagttgaatcaatgtttggcggcactagagagcgaacctgaagcaggtcacttgaagtagcattagaatgagaaaaaaaaaatatcaatatatgcactacaatgtgtgcatttaataggaaaaacatgctcataaaaagtaacatctcgagaatgaaaaattcgatgagtttcaagatcaagtaaagtgtaagttttcatatcaacagggtagccaatgaatgcacaagctaaggatcttgggctaaatttatgccttgaactatcaagtgtagaagcataagcaaggtagctaaatatttgtacatggtcataagatggtaacctattatgcaacaactcaagagatgacttaagattaagtaagggaaatggtgtgtggttcattaagtacacagttgtatgggcaaaataactccaattgttaagagataaatgagattagaaagcaagagcctgtgaaatatttaaattatgttgatgtttgcactcaacaatgaagttttggtgaggtctctcaacataaaaatgaaagggaacaatacactttagtagcaaaaaaagtgtgcaagttaagttcctttacattatcacatcgaatttccttaatggtgatagaaaattgatttagtacataagcataattttgtagaataatagtctgaacatcaaatttttatttaagcatatatactcaagtaaagcgggtgtggtcacaataagaaagtaacagtaatcttcaatggttattgtgtgaaaagaccccaaatatctatgggaactaagatatttatgatttcagaagttgattaagatttggctcaaccctcttgttcttgaacctttatctctatgcttctatgagaaattttacattattgaagtttattttgtagagttttaatgagtgtcagttacaaataagggtgtgcagaaagtcattcaatccaattacaac

SEQ ID NO: 39843 - DNA, 2226 bp, Cannabis sativa
taattttcgattcaacagaaaacgagcggactctccttcaaacagaccgatcatgacgatgggcgaagcttctagaatcatctcggcagtggaacggtctcggcctcgttattctggccctaccccggagcagttggctccgacttctgtcttggaagctcgtgagcgtgaagaggaggagaagagtgctgctggtgttgatcctggtattaatggtgatatggatgatatgggtgaagttaataaagttgatatggtgggtggtggtgttcattgtgttatgggtgaggttaataaagataataatgtggtgagagagagtgagttggccgagatgatggatggtgtggcatcacatagtgtaaatgagttgttgaaaggtaaggaggtgattaatggtgggtcacatgatgtgatagcttcctcgggtggagtgcaaatgcaatgtaatggtttgagtcaaacaatgggtccagtaaggtgccacttcaaccaattgataaaggaaaagcaattttgcatgatcctttgaatgaacatttatcttttagtcatgcttttcaacaaacgtttgaaccccttatcaaagcacaaaaagctaagacttggaagcgcgttaattcgtcaaagggtcgtggttctaaaggtatgcctaagtctaattcttttcctttgagcccgaaactttctcatgttattgtggctaatgttatgaataaattgagcccgcgaggtgggggtggtagtaaaagaaaaatggatgtggagtatagcaatgatagtgcgaagaaaggtcgaaaagatggtagttcggttagtccttctgaggtcacgaatactgttttggcgaagtctgcggagcagactcgccaagagccatgagtctgttatgttggaacgctcgggggttggggaaccccggtgcgttgactgccttgcgagctgtggttcgtaagttttccccaagtttagtttttttgtcggagactaaactttatggtggttgggtggaagggattaggcgacaaattaattttgctaatagttttcatgttgattgtattgggaagagtggtggtctgttattattatggaatgacgattgggaggttaatgttaagtcattcacttctggtcatattgatgctttggttaagtgtcctggtagggaggtgtggaggttcactgggttttatggcaacccaaaggcaagtttacgggcggagtcgtggagattgttattaggcttaaggatttatttgatcttccttgggtatgtggtggtgattttaatgagattctatcgataaatgagaagaagggtggtgctgatcgtagtgtggcggcaatgtctgaattccaacaagcactggataggtgttctttggcggatttggggtttgaagggcagtgttttacatggttgaacaaaaggcatggagatgcgcatgtacaggaacggcttgatcgttatttttgtaaccaaaggtggcatgatttgtttccttctgttaaggttcttaatggtgattttcttcactctgatcatagaccgattgtggccactttggagaatgtgactagaaggcggcattttgacaaaaagaggggttttcggtttgagactcattggttgaaggatcccgaatgtcaagaaataattaataaatcatggttatcaacgacgtctcctttagctcatcaagatagtcttattgatatttttggctcgtgtgctaatcagttgggggagtggaataaagggaagtatggatcaattcctaggttggttagagaaacacagaagcaattggatgatcttcttagtgtctcggcgcctttagtgcatatggaagaggtaaaacgtcttgagtttaaattgaatgaccttttgactcgtgaggaatgctattggaaattgagatcgcgagctgattggcttgctcttggggatagaaatactaagtatttccacaataaggccacgggtaggaaaaagaagaacgcaattgtggagattatgactgaggatgggcgtaagttgagttccgaagaagatatagtctgtgagattgagagatactttggtactatattctcgtctacttctccttctgtgcagcaggtagaagagggtatttgtaatattgaagccagggtctctcaggatgagcgggagttgcttcaggctcggtttattgatgctgatgtgtttgcggcggttcg

SEQ ID NO: 39844 - DNA, 2879 bp, Cannabis sativa
  modified_base (1313)..(1316): a, c, t, g, unknown or other
ctactgcaacacacaagttaccatgcaattagatagacctaccaatttagaaatgtgtatttatagagaaattaattatcggatcacttatattttgatgtaataatttttatgggatactatcactaagtaattgtaagtaacaaatttagaatatgttagaccactagtgctctataatagcaataatctaatatatatatatatatatatatgtaacaccactcaaagtgatgccttgtaaatagttaatcttgtgaataattaatgatattttataatattataaataatgtgggattcaatacttaattactccaataataatataacacactattaatatagtactagacaccactggttacctttagcatttctctaatgaattaatagctataggtatacaatttcaattttcaattttcctaatatatatgattattttgtatataggtaaatactattttagaccttgtgttttgtaaaagttataaattggatcttctattttgtcaaatgagaaaatttaccttttattttctaaaatggtacaaatatataggaccctcaatttattttttgtcaaaataaaacttaataataatccgacctagaggtgttatgacaagactggtaaaaatttctgtatctgttcgtgttaagaattgtcttcaagtttgttatattaaaaaaaattcgaaaattgagctcaaggtcctagttataccattttaacaaatatagggttttgtcatttaacaaaatagagaatctaatttataaattttacaaaatacagtgtccaaaatagtatttatcctagtattgaatcatcctcaattatgtggaaaattaaaaaaaaaattaaaaaacacattatttgtttacattatcctttggttacatttatatccttatgaatcttattaataaaatatgatccttgcatgcatcatatccaataatatatacttcatgagagtcatgcataatcaattaataataagtaattacgagtagcaggttttgaatcaataaatagatgagtaatttgcggtaaaatttcttcaactatcaatttacttgcaaaaaactatccaacctcatattttagtgggaaatccatccaaaatattattccgtttacatttttaaggtaccgtctgtccagcctcgttaagtcctaattttgcccacgtggtaatgacaggtcactaaaaaattatcctatgtggccatattttacaaaataaaaataaaaacattaagagtaatttgcggcaaaacccctccaactatcaatttacttnnnnaaaaccatccaaaaaactttaaggttagatgattttttgtaagtaaattgatagttgagggagttttgccgaaaattactcttaaattttttatttttattttgtaaaatatggccacatagaataattttttagtgaccttacaattttgtagtagtactttgctaagacattttgtctttttatttttaagtaagccttttgttttttttttttcttaattattgggtcactatattatcactctagtgctatcattatttttaaataattctactattttctgtgttgtgactctgttttaccatgtaaaaaaaaaattataatagggtaaatactattttggatcttgtattttacaaaagttattaattggaccctctattttattgaatgacaaaatggacattgtatttttcaaattgataaaaatactctaagcttaatttttgataattttttttgttattataaccaacttgaagataattactaatacgaacagattaaacaactttgttacaacgtctttagatcaaattattattaaattttattttgacaaaaaatcagtttagggtcctatttgtactattttaaaaaatagagggcccattttatcatttaacaaaatagaggaatataattgttaacttttgcaaaacatagagttcaaaataatatttattataatataatttaatatcagttcatacatattttaatatttactaactaattatcaattattcttaagactatctccaactataaatattgtggccaattaactaaaatatttaataaatacattaataatggataaaaaaagaaataaaaaatatgatatttattatagtataaaatttgatatgttccaagtttcacatccatttgacattaccattggaggcagagaaacacacttagtaaatatatgctaaagaatagtaatgcactacttagcatttcattagaaatgctctctaaggcatcacctcacaacactaaaagaaagaaatctttaatgacaattttttaatcacaatataatttttttaactaaatattgcttttttttttattgataaatttaatgacaaatataatatttatccaattaccaaaactttatcataaagttaagatatggtagctatgtgtaatataaatcacgcaaatcactcttacttgagcaattttggactaaacagaaatacataaggctcttttttcattttttttttatagatttaattacacatataacataatccaactaccaaaactctatcataaggttaggacttgaattaaaatatcctttgcactcacaaaaaaagttacttatcactaagttgttactaatttagtcttaatcacaacaaataatgactatgaacttattattctcaacatcactactactttgcctatttcttgtcttcaaattctgtcataaatgaatccccatgttatttattcttctttgaactctttgaaatcatatgactgtttcacctctgctaagcaaaaaaataaacctagtcgctttatgacaac

SEQ ID NO: 39845 - DNA, 2466 bp, Cannabis sativa
  modified_base (379)..(382): a, c, t, g, unknown or other
tattaatgattagttatggattctcaataactattaaaattaaaggttgttgtgaatcataattaatctaatacttgaggtgtaagtttgagaaaatatatgatctaatctagaaactaggttcctagatcgatcgctcacattgatcaagtcaattcttaatttcacagttttaatattgtgagatagataataaaatatgtaacctttaaaccttataacttttatgatgaaatgctcatttatggtatttggtcccagatcttatctttgacaattgtactttaactgtataacgggtatttctaaaatgtgtacatgtcataaagtcaatttccaaccttatcacaactcaaaaatatttgagaaacaactttgnnnnaacacgattcgatatgtacactcccattgaagaatatcaaccgacaaggatttaagaaaatttagaggatgctatgcagactccaccctatgtccaacaatttttagtttcttaaacctgtcacacactataatttggatgtaccaggcatatatattgggcgatgaacccatgcttttaaagaaactttgcaaatggactaggagtttatccatactcatactcacgaattttaatgtagtattctccattttatagttgatctcactatcttaatcgacatgtcgtttgcaataaacgatggctgccattaaacagggaaaatgacacgtcgtttgagtcttcatcaacctccaactgggtcaattttgacctgatttttccccaccgacggatccgacccaaaactcgaatggaaaagaaaattttaacgaccaaattgcgtgttttcaaatctaaaatgttctaaatataataataaagggattcatatagattttatgcaacaaaaacacgtaaaatgtaaattttaatatcacaaaaaaataatcgggttcgaacgatatttttctagaaaaagaaaaaattgtttttcaaaggtttttcacatgcttagatcgatctataatactatatgaacatagtgatgtatatagaattcaaaataaacaccgaaaaaaaaaacggagaaaacaaccaacggactgaaaattaaaatttttcatgtttatatatatacagcatataatttatatatcgcataaaaatattataaatatatgaaagagggtattttaaacattattatgcaatgaaattatgaaaactatgtaaaataaatataaatatatatatataaccgtacatataaatatatatgaaaatgaatgtgaacatgaatacatatatgtatatataaaaatagattgagtataaatatatatatagccgtgattataaaatatgaatgtatatatatataaaaaaaataattctaaaaaaaatatatatatataaaaaaaaatatacacataaaattcatgatgtatatatgtatgaaactcaaaataaatcaaggcagagattaaaactgttatgataccaactgttagaaattttatatgaataatataaaatatatgaatgtgtatataaaatgtggaataaacaaatatatacacgatataacttaatgatcgaaatacctccatccattgaatctttgacctttagtcccacacaagctttgatctgcaaaaaaaatcgattgatgtgggtaatcaggcttccaagctctctctactctctttagatggatttactgtgtttcacagaataagtagtgagctcggggacctaaaccttatgtttatataggtaagaccttccatcaaggtctctgccacaattaattatcagaatattttgacaattaattctaaaaattaaatcgggtaacttaaatattaagtaattaaatatgatcataattagagtacttcaattaattatatttttataaatcaaatcaaatattttatttgatttgttaccttgtaaaaaatattctaacaagattgactttcaatatgagctaaaatagctcaacttttaaattatagaaaaaagttacaaaattgagatttgaggtaaactttagctattttatttatttttttttaactcactaaatagtatttagctaaatgtagagataactatttattgagtttaatattattttatcaatttttctatatatctgtataaatatattaaaatataatatttaaatgatatagagaaaaaatagagaaattaatgtatgttgtaatataaaaatttgaggtaaaataaataagttataattttaatgatatattttaaataataaagtaaaaaagttgttggcaatgctcaggtttaactaaagagttttttgtggcaaaatcttcccaattgtcatttcacttgcatttagccttttaagctcaaattttagcagcaaaaccctccaaactactaaactagtagcaaatttaaggtgtcattcagttaatactgtcactatgagttgtttatgt

SEQ ID NO: 39846 - DNA, 2189 bp, Cannabis sativa
taaaatagccctaaaactagaaacaaagagtgaaaactaactgaaaatacgacccgaaacttagactaattttagcctaacacccatataaattaagaagaaaataaaaagaaaggttgtctcacattttcataagaaatatatttctctttgctttacttactttatattaattattatatctttattaattaaaaataaaaaagataaatatacccttcaaaaatatataaataaaaaataattacatgttctaaatgacaatttagtcaaattaagttatttcgattacatatcttgattatgtaaataaaataaaatgattctgatttcttttctggttagtttagtaaacaacaaaataaaatattgtttctgattattttatattttaatccaattgatttctcctattgattattctgattctaattactgtttagtaaacgtgtcataattgtagattttatagatttataattcagtccgtataataattcaaattagatttaatttattaaagtacaaattgaatggattattttggattgattattaacatcaaaataaattaaattattgttattttatgtcttcaacaataaattaaaataaataaaataaaataaacattcaacgtgtgaatagttgcaatccatgaacttacgatcggaagtaaattatcatagcacatttaaagaatggtaacaatcctagaactttgaggctaaattctcttgatctatgggtgcaaatttatgatttgcaatctggtttgatgtctatgaaagttgctagggatgctggtaattatgtgggtacttttcttgaatccgaccctaataatttcacgggtgtgtgacgtgaatatcttcgggtacggacaacattatctcttgattagctattgaaacgtaaaatgaagttttgtaagtgtgatattgactatttttatggtacatttagatatgagaatatcctgactttttgtttcctttgtggcattatgggccactcagaaaagtattgtccccgtctttttgatacaccagcacatctaatgatgaaaccttatggtttgagaatgaaagctacttcttgacgccaccataattttttcgattccccatatcttcgatcaggcaaagcccatgacagctcacaacctggtgtgaacaccattccaagagttaatctacaaagaccacatccacaacatttatggaatatctttccctgatatttctcactcacataacaagaataaagagatcgtggtttatgaaaatcaacaagatgatgaagagttgactcaaacagaattaaagataaaatgttttgctatagagaattctaatgggcctcctgcagaaaatatggttcaaaaaatgtgcatgtagtgggtttcggtgtctaggcccaccaatcattatgagtaccattagttagaattgtcatgggcttgggaacccacgagcctgtcaattttttgagaacattgttgttcaaaagaagcccaattttattttcttgtgtgaaaccttatgtaaaaatgatgttgttgaaagacttattagtttgggttttgaaggaggtttctgtgttgaggcccaatgtcgaaaaggtggtttgactcttttatggaggttcaaagaggaagcctgcctgctggggtattcccataatcacgtggccatcattgtttgacatgtggcatgaaggatgacatcgcggagttgagtagacccaagtcatagtagttgacttgggaggggaccctaaccctgtgcctaggttgactctaaaatatttgggatagaattttagacttcaataacttgaatccaacccactatcttttagtattttataccataaagacatggagcaacctaatccaagtcctgagaactaagattacatgaacctataactcgaaagccaacctgggcacctagcgtttcactcggcgcccaagttgacatcctcaactagggtttcaatttctggggctgtcttagtgcaaagtggctaaaatctgcactggaaaattaactagacataccatgaacatatttgaggcatcaaaatcaaatttagaggaagttaatttttgaacacccgggacccaagaacctggtgcccaggttgacaatctgtcaatctaaatgccttccaagtgtctgatc

SEQ ID NO: 39847 - DNA, 2339 bp, Cannabis sativa
atccttaagttatatagtgtatatatttgtttaattccgcattttatatacacatacatatatttcactttatacatataaattgtctaacatatgattcttaaagaaccatactgtgttattcattttatgacattattgttattcctatttttctcatggatgggcattcaatattagaatggaatattattaaaacaaggaatgaggaattgtccaaacctgtagaaagccaagacctagatcactttaggctactactactagtgaagattaagtgtaatgagcagtctagtttcttattatttatgtccccatacacatatgtatagctaaacatttgcaacattgttgttaattaatgtgaaccatattctgaagatttatggatggaactcaaaatcgataatttcacttttaatgtgcattaattattagttagaatgttatgacattgacatatcagagaattcaggaatttactaattctataatgcttttaagatcttttgattttttgacccaatatccattttttggaagagaaaagaggaaatggaggaaaaagcttggttgagtggcataagagcttgatcaatctcaaagaaagagttcatttaagtacataaaaaagttgttgatttttatttaaaaaaaaaaagttatggatttgtgttggtacatatttgtctcaactcatcagtgattttattttaatgattgtggttttgggtgataaggaaggaataatgaagaatcttgaagatttcaagactatgttaaaactactatgtttggataataataattctgttgtgattaagagtttggtatctgtgatccaattgacaaaacaatagtgtaaaagaataagtgtttgattttgtacaaagtagaatggattaatgatgatggggacatagaattcgagctgcttccaatgatactcaaagaaattttttgttgaagttgttttctattatcctgagatcaatgtggttttgagagatgatcaatacatatcataaggatctaatcttgatagatacttgtggacaggatgaattatttggatttgaagatgaatgagctaatagtgcaagcgttttcggtatctacttgatatcaagaaaacaaaaagaaattaaaaattcttgaagaaacattagatgggattcaaaacatatggaacaaacttgatcttaactcatcaacatcatcatcatcctaagaaactgttttgtatttgagtttgaagtattccagctcaagatgaagatgaaaattatccaaaggattggttttgtttttcttgtttaagtctttaaagtttctcattctctcaactcttgttttctctctttctgatcttggtcttaatttctagctcaaaaatagttgagagcctattcatagatattggctagaaaacaatggcataattgtcataacagaaagtttagtaatgacagtaagaaatctggctcttttgggaggatactgtatggactattaaacataaaagttgaagtttataacagaatttttaagaacactattacaatagaactcaacactatatataaggaattacataatgacagagaatgagcttttggactggacaatatcccaaaatgttaccaaactggtaagaataatagggcacgaatccaaattaagaataatagggcaaaaaagggtattggaatttgtttgatgagttgatcatgaacttgctttctctgctttcaaacaacattttggtggatgagttgggatcagcaaagttgattgattttccaatttccataccccaaatgaatctatgtttatgtcagctgttgcaggctcttatcatatggctatattaatactttttgtgttcattcattcattcattatagaaattaatttactactctatcagtttgacatacactgcatgtgcatttgaatttccattttcatgtctctgtgagatagaaaactagtcactgaaacaattgaagatatatctactttttccttagcaggaaattacattaattaaggtatgatcctcgtgaagtgagtgattgtaccttaattagtaaaatcttatttaacaaactatgaatgaatcaacacaaggacgaacaaggcccctctttagtcaagaagagattttcctctaacttccactctcagtctcagatcaattagtcattctttcttaaattacaacggtgctttttaaaaaagaaaattatgtacatgtgattgaaattacatatgatgtgcctgtctgtgatttatggtcaaaccaactaatgagaaaattcattaaggttgagtgg

SEQ ID NO: 39848 - DNA, 3077 bp, Cannabis sativa
  modified_base (311)..(314): a, c, t, g, unknown or other
  modified_base (2979)..(2979): a, c, t, g, unknown or other
attattcaatctgttcattactttttgtgcattagttcttgactggttttgtaccagtattgctgcaacaatgctacaacattgctgctgttagttgtgttaatctttgcttttgattcctagtgttcaatctcgattgcaaaggtgatcttcgatcacaacaagttagttactgttagttggctttcctatttttgggtaagctatatatactatactatacacatctaagaaagtaacttgtattcattcattgatagtaatcaatacaacagatactactattttttcccaactctctctctctctcnnnntctctctctctctctctctggtttaaaggtactatattcagttcgagtgtgcaatcatacatggtgtaatgcatctgtaagaatcgattgtttcccaacacaagctatgttttgagctattcaaacgcccccaatcctcctcatgccaagcaaataattagatggtaacctttgttttatttttttatttggtagctagctctttgaagtaaaaacttgttgatccatctagttttcttagaatttcttcattggggcaatatatgcccaccattattaatctttaacttataaaagtattgtaatctcaacaattaaacacatactctaccaaataaacaataagctgagtcacataatatatcatataaaatatatgattgaatagatagtcttaaaagccactgagactaggtctagttagggaatgataggaaaaagagaaaggacatatattcgaattcaaaaactctaaaatattagtaaattgttatactattacgctatacttacaaaaaaaatagtcttaatattctaaattcgaatctcaacttataataaataaataaataaatattatatacaaaattacaaaaaccacacgtatattataatggaaacatgctaaaaaaatttagaacaaaagtataacgagtgatagtgaaaacaacataataataaataagtaggaatgtttttttattattttttttttataataactatatcaattaaattgttcacatgcttaatttacagccatctcatgtttaagtggtctattaaattttctacattctctctctaataattaagtttgaaaaagaaaggtaattatttttaatataataaatgttactctcttgctctaagataatatttaataaatgtgtaacaaccaaagatttgtctatatcctacattttactaagaacctagataccattttcattgtaataattgtataacctttccttttatttccaagagtgtccactcctttttctttttgtcttctagctatatatgagaataataggttggattaaaattgtcatgaaaataggatgattggttagaaaaattaatatattattccaaaaaaaatattggtctctctaccaaacgaaaagtaatatagtgaggcacttaggtatcttttgagttatggcattattgtagtaatgcatacttgatgtatatatttatatgttattttgaaaagttatgtttctctgtcatttttttttttttttaaaaaaaaaaaaattaggttgggatgagtctaagttttgggtttagggtcacggcgagatttaggacaggtttggagatttgggactggggctgtaagcggggtgcgggtacgggtctataggttcgagtgtaggtttggggtttgggctgggtctggggtccaagtttaggtttagaacctgggacgggtacgggtctgtgtccagtcccagtccatttccgagtccaaaattggggttcgtatctgggatcgggttcgaagtccaagtcttgttcatataaagatctcatagtattaaagtgtttttcaaaaaaataaaaaataaaaataatttaagaaacattagccaaatgcaattgatattttgaaaacttcaataacgattttaattctcattttttaaaataaaaaacaaaaaatgataccaaaacatgcatttatatttttacgttgtctttgtcataatattatatattcttctctctctctaataattaagcaattatgtagtgaaagaaatagtatagataagaaggagatattattgtcttataaatagctatgaaatatcagttgatgagtacaactatatatccatatatattataaattttatgtatatcaccccaaagaagtgcctagcctcctctggtgggtataatattatttatatatataatataattaatatatagtattaataactagtttaattaacaaacatatatatatatatataaaaattatatatttgagttatgaacaatattcttgaagacaagggttcggaatactagctcattgcggtaagtatatattaattttcttcttcttcttcttctttttttatatatatatatatatatttatgtatatatacatataggaattctttacatatataaaaataaaatatatacaaattttttttctttttgatgaacaaatttcaaaattttttattgtgattatgtaaatgctatgatttctacttttaatggggtgtttatgattttggatctataaatttgaaatgaaatattatcacatgatgttgtgtttatgattttaattcatgttcttgcccaaataatgattttataatgattttattaagtagaagaagggaaagagactgtttttttatttttattttgatgtttttggataaatgtttttttatttggatttgtggtagtagaaatttagtatattgtacgagtatttaaaaaaatcattcataaacgatgaaaagtacaagagatatgaaagtattattaaatgacaagtaaaatataacctaatatttctcatgtttacaaaacttaaactcagaagtaccccacttatgggattttttttgggtggtcctacaaagaaaaaccctatatctttatatattaaaantgtctatctaacggcaattcttggtttaacaattttaacagactgttaacgttaaaagttaacaaataaataaaccagtaattaaacccaaaaaatta

SEQ ID NO: 39849 - DNA, 3936 bp, Cannabis sativa
  modified_base (1301)..(1303): a, c, t, g, unknown or other
taatcacatctaaagagcacacacacaaatgtagccgcaatagttaaaaaaaattctcaaagatcaaaattttaaatactatttcaaaaattaaaaaataaaaatatattgcctaattaaaaagattgaaaaacataactaattatacgtacattgcacgtaacatcaacttagtaaatatagatagatatataaattttatttttcttataaaaaatttattaaatatcattaaccaactcatatatctatctattatttattaataaattatattcatcttaaaaaatactaattaaattatataccactaattttttatatataattttttttgaatggaaatagaatttctattaagaagaaaaatcgtctatcaacatagacttaagcatagtagaaataacacttccattgaaaattcgatttctccaacaatactatgagccattctattagcagaacgatatatatatatatatataataaagaaactccgctcatacaattaatcaaatgtctatagtcataacagccaaaccaaaaagagagttcatcactaattgattgattgtgaatagcctctaccgccactaaacaatctatctcaagaaccattgttaactaatttttttcccttgatccaactgaaagcctcctaaatgcccgtaacttcaaccatctctaaaaccacatcaccacaaagcccaaataatcgcgagctaccaatccatatccaaactgatgaatagcaacaaacaatgcatcatcgacattttgatttgaatctcatgaggctttacccaataccttagcaccatcatgtgccacaccactctagaatggtgtataatcatcatttgttagagcattcttctattttttaagatacaattttgttgacgtaactacattattcacgctaggaattttttattccaaataaatttatttcaagctcgccaaataccccaacagatcaccactatctcgcctttcttctatactattactaattgcatgcacgcgttaattgtaacatccccgctttaaatttatattgggtccttattacatctacagaataatggctcttatacatgagtacgtcactctggctacttccaggaatatgattgaccctacaaaccaacacgagtattttcagtgtactttgtcctctcttgcacattttttgagaaaatttcccaaaaagtcatccatttttaaattacctgaggtcaagcacccttaactgtggagttctttcgtgatgggctaccagaaaataagatgcaccnnnttgatataggtagtacgaatcaatccatttaagtcctcttcaactatgtagtcccatacctacacagtctcagaatcatcgtacacttgaccatttctaaacgatgtgggattacacagctcccgatccttttccttcggatcacgaggctctgattgccacattaatcatgcatgcaattgaattataatatatggtgatgcaggtctgtctctagacataggcgggctaggcctgtgcctagaacccacctagtctaaagctcaaaaaaagtttatccttttttaaaaaattacatattttttattgatttttaaaaataccatatttttctttaaataaaggctcaaaaatatttttttttcttatgacccactaaattttaaaacgggccatgtgtgatgacatgactattagccaccttgccatcgaataatattgatctaaaataagtatttattacttaattatgttataaagtgtagcatttgaaatccaaacttctcttatatttgctagccatgagaaaagatactcttattacttgttgtgtagcattatacacatattatagatgtattaattatccttttctaattgagagttttaagttttcatggacagctttgtttatgctctttcattatttttttttgaaaggtttatagtagttggttctttaattttaggtgaaagatacattaaataataaattaacacctttaattttttttctttagttgaggtacggatcctaattaattaattaatgaaacttgtcttaattaagacttttcctcgtgattacaatgtattcatcatcaacatttattcaccaactttttctttttaaaattaatttacttttttttttgtttttttgttttgtacatgtgctcactaagaaaaaaaatcactataaaataggggaatagtgttattaaattataaataaaaattagaccaaaatcaataaaaaaaatagtggaataatttttattaatttttttttttttggcttttaaacatgacattattgtgtcatattttggtgcatctaccatttctcataaatctgattttagtgtaaaaaagattttgttgtccttttgtattgtactcttaattattccatcttttattgcttttttccttttgctttacaataagtttatattatagtacttattcttgattattatatagtttatattgttttgttagtttgttttcatatttttatttattgaaattttactctctacatcttataattttctactttttagtaaagagatgactagctatatatatatatgttgtttacattgtaaatgtcgtttgggaatggtggtttgtgatttttcaagttttgttgtggtttttgctgtttgatttatcttaggtggtttctctcttaaaatgattgaagttttagctttaaaaaatacaataattcaatgtcgcatgttggtttttcaaaatattccttttgaatctaattgtgtgaatgtgtctgaagtttaataaccatgttttttttggcttctttgggattagtttttattagataatattgtcccacatggatcaaataatgtaaaaatattgagccatatataagaacatgagctactctactcatcaccaattggttttgagatggaaccccatgattatcaacatggtatcagagccatatccctaacaatggtcgtctgtttgtgcgcgagggaggtcttagtcctttttccttccattgcttggctaggttcgctttgcaaggaagggaaggcatccgtgcaggtagttcaaggttgaggtcaagctatgggctttcgatccacacctatcaaagagttagccagccgcaagcgagcaaaatagtactcccaaccgcgaacaaaaataagcgagcaaatagaactcagagccgcaaaaaaaaaaaaaaaataataagtgagcaaatgacactacttatgataaggtgattcaagattggtgagaaaaaatagccactatcttgaggggaaatattagataatattgtctcacatagatcaaatgtaaaaatattgagccatatataagaacatgggctactccaccaattagttttgaaatggaacccgatgattatcaacatggtatcagagccatgtccctaatgagctttcgatccacacctatcaaagagttagctagccgcaagcgagcaaaatgatactcctagtcgtgaataagaataagcgagcaaatggaactcccagccgcaaaacaaaaaaaataagtgagcaaatgtcactacttatgataaggtgattcaagattggtgagtaaaaatagccaccatcttgagggggaataatggacaatattgtctcacatggatcaaatgtaaaaatattgagccatatataagaacatgggctacttcactcatcaccaattagttttgagatggaaccccatgattatcaacagtcttaacagactttaggaataactttcatgaattttattatgttagtattttttttgtcctagatctattaatgttgttacctattccttagctaaatatgccttgtcagaaattattaataaggtttagtggcctggttatctttctt

SEQ ID NO: 39850 - DNA, 1203 bp, Cannabis sativa
  modified_base (47)..(50): a, c, t, g, unknown or other
  modified_base (837)..(837): a, c, t, g, unknown or other
tatgtttaatgtataaattatgttaaatccaaaatatatagttattnnnnattatagtattgtctacatagtggaaaataatcatgattatatgtttcaaagttaagtcccacaatttgttaggtgtaatcatgattatatagttaatatattatctattaattacttatttttagggtataaattccaatattgttgcctagaatttctaccaaaatacgtggcagttaaggagtaagccatatggtagtaagatcaacgagtgtgagatacatcaccctgattactttttaggtagagtaatgacagataagtcatctctgagagtatctagatagaccacgagcatccctcgtctaactctctacgcgagtaagataaatctagaggatggtacgggaggaatagtgaaagatgatgtcactcaaggaccaagacaatgtatgcgcatttaatgcagcatgaggaagaatatcatacgccctacaccgactaacgtgtttaagagtttaaactcatcacttctagatttcacaagcccctaggcatcaatcaacggttgtataagtgagtcgtcaagtcatagataaggaataaatcacatcccaccaaatacctataaacaacctcaaacccatcataaaataggcaattatgcctaaagtcaggtttggaaaattatgccaagtatgatataattaaatacaacaatggtggaatattaccttcatcatgagcttataaataccccaatgataaacataaatggggatcaaccaagaaaatactctgtaataaatactctcataaatacagtgactcgtggactaaggttcnttaatgcctcaaccacgtaaaaaatctttccttctaactttcattaaacctttcatatagctctaatcattggttgtagaaaatctcagtcaacaattagcatggtctatacccttgacatgtcgtattttcccaatttgaaaacatgtctagataccattatatacgagactttacctgttatttaaatgaaaaaaccatatgacaacaattatttttgtgagatttttgtgatcttttgagttatacctaatttatagaactttcaatattaaaaaaaaaaaatagatttttcaatagttttaaatagtcaactaatgtattgtcgtcggtctctataactgtcgcctattcgactgtcacaaa

SEQ ID NO: 39851 - DNA, 3334 bp, Cannabis sativa
  modified_base (1080)..(1081): a, c, t, g, unknown or other
  modified_base (1717)..(1717): a, c, t, g, unknown or other
tccttaaaagatattttagtcaccaaaatttaaatttgttgtatactgcgttgtccgatattggcccccctaactatttagttctggctccgcccctggcgcctaccttgtcttagttaagacaaggattatcgaacatttgtgatacgaaccacaccaacagttgtgatgaaatccgaaaccaaatatggcagactctaagaattcttgaaatttgaaagtggaaccgcggcccaatgcttagttaagcatgaactttggtatgaaggaagatgccacaaacggtggtggaaatctggttgataagtcaggttgaacgctacaaggaatactccttgataagttcgaatagttctctcaagaactcaagaagaaaacctctcaaaattttattcaaaaataatttgattttccaaagtgtttacaaggctttatatagccaacttacaaccaagaaaaaataaaactaaaagaaagacaattttctaaataaaacaaagatagaataaaggaaacaaaattaaaaagaaaagctgttaaatgtctagaaaaacgtgatcagctcaatttggatctaaattgagtctactttgatgagaagcacaaatctttgttctccttttgtgttgaatgcggtctcctcttgttttaaaacaatattgactaagttgttgagttattctttgaatctcttggctcgcgccctcgtcaccgggccaactggaacttgacttgtttatttagccttagtattctcatcaatttgtgttgtaattttttttattatatttgttgaactaaaatttatatgttatatttttttctttgtatatatgtatatcaattttaatattttagggcttccaaaatggtgggacctaagcccaatcttgacaggcttgattaagtgtcacaaataatatagttaagtaatattgttgctagtattcttactatttaagttagttgaagatattttttataattttttaaaaaatcaatatataaaggagataaatgaggtggtgatataacactctaaaatctctctaaagttatttttctcttctctccttaatnntctcatttttaatattttattagatcataaatctacaaaataatattttactaatattttaataaatttttttataaaaatatctatcataaatcaattattatttttttaaaaaatactatatataatatcatatcacgttattattattaataataataattaatcaaccatcaatatatctatatatatatatttatatgaggtggtgacatgacgctctaaaattttatatttctattattattattattattattattaatatatctatacatctatatgaggttttttaatttttaattatatttataaatatttaaattatacacttatctatctatatatatataaagaaaaaatatgagacggtattattattattattattaatcatcaatatatctatatgagactttctaattttcaattatatttataaatatttaaatttatacatttatctatttatctatattaagaaaaaaatatgacataatactcgaaaaaattatttttctcttctctaatttattctctcaatttttttttaatttttaattatatttataaatatttaaatctatacacttatctatctatctatctatctatctataaatatatatatatatntatatataaaaaaaaaaatatgaggtggtgacataacactctatttttttttaattagtattatttgttttctccttaattctctcattttttaaattttttattagctttataaatattaattcatatcaaatataagggtttttttttttttttttatacttcaaaacaattttgtttgcatttttatagaattctatatagaaactcccatagtaactaacagaacaatataaatcgcaactaaaatttacatagcagccaacataaaaatcaccagagaaattaccggagcaacctagacagtaaatttgaaaaaaaagttaaaaaatggtacatggggtaatttccctaaaatatatatctctatttaatttttcctttattttttatttttttattttattttttaaaaaagtaataactccaattctatcaccactttttttttttttttgtaagccaaaatgatagcaagttagtgagatacggtaatgacaacagaacattggttaattttttttttttttataactcatgaaattatgtgttgttacatattgagttttacattggtgtatttgttttattttaattaggttttagattaaaaattatcatagaaatattttattttctccttataagattggtttcttttaccttaaataatttactgtgtattgtgttaagttttcactattgttctacggttgttttttagttgttccactgttatttttagttgttctgttttgtgttctactgttgttttataaaaacatagtatttttgaaaaaaaattcgtgtaacagtatttttataaaatttatccaaattccagtatatttgtaagtttctcctgtttttattcagagaattacaaattaattagattttaaataaatatttttattaaaattaatgtgatatattttatgttagaaatattttgtttggatttaattttgtttgtgttttattgagaagaatagtatttgtaaaagaaaaagaataaaaagttgtcaaaaatatggcccaaaaattataaaaattggtatttttgagatcaataacaacataaaagataaaagcccaaatgggcccaaaatcttctcccaggcgacataggtgccacgtggcacctccgactttgtgcgacaaaagacaacaggagcaactgctccttttcccccaagcccgatccacgcacgcgtgcagcgcacgacgccgtgtggtccgggcgtgtcacgcacgcgcctgaggcgcaactgggcttcgtctgcccgattcgtcttcagcccaaaaattccacttagctctcatttttcagctaatcaaaggatgacacgtggcaccacctcaatcaaaaaagactaatggtggtcatgtcagtttttcctttttaaaatttattaattttgtattacaaaaagtgaaccggttacaaatatatttcatcctatataaccctatattaatcacaaccctcaaatcaaataactaattcatctaatagtcagggtacattaacataagggaaatttcactttttggccttaataatacaagccatatcaaaatttgtaccctcccttaatttgtacaaatttagtc

SEQ ID NO: 39852 - DNA, 1215 bp, Cannabis sativa
tcatcataaactaattgtttaattctataatcataattgtaaaagagaattactaataagtattattggtgcttatcttaattgtaaggcatcgtttataaaatgtgtccaataacaatactcgttctaaaactagtttgtttttgttttagtgaaaaaaaacaaacatacaacaaagggtatatttgtcattataacaaggtaaaagacaaaagacaaattagtcagcttcaactcacaaacaaatgtatggtcataaacattccatgaaagaccaaaaaagaacttatgtagttcagccacgtgtcatatttgtatgatatgatatcatcatcaccattcattcattgttcactattcaccatacccattttccagtatggtggttcttctaagcttccaagcccttcactttcattcccctcagcttcccaaaaccaaaacccattacggcttgggagtggcgcggtgtgggatagccgagccgtcggggaagccggctccgttcggtgagaaaacgaaatacaaagatgggttgtttgagaagggtttcatgagtctgttcgctaggaaaatgggtaaattcgcggctaaggagaagaaaacagagagagaatcatcaaaagggttttgggattatgactatgattcttttgttgatgtttctaagagagtaatgcaaggaaggtctcgtcttcaacaacaagaagttgttcgtgaggttctcttgtctatgcttccacctggtgcacctgctcaggtctgttttaattaactcatcttatatttatcgataagagcattgttattaggtatcagtggttagaagacactagtaatgcgtaacaccgctcaatatctcttcggtgtgcaatcaaagtcattggctggaaactagaaagggacactatctttattggtacgagtcttttaaaaaggtgcctaagaataaaaccgtgagagtttatggtgtctgatatcctaacaatatcatttgcaatgcatcatagccatataatactaagagggattagcatatgaatgaagaagtgttatactcttattattgatgcaatttattattaggttttaaacattttggttaaataaatgatatgagaaagaacattgctattaggcactagcaccacctagaggcgatgcattggcgttgtgaaaattcaacacgcaagtgcatgtatcagtcaaaataac

SEQ ID NO: 39853 - DNA, 1699 bp, Cannabis sativa
atgttttacctcgttgttgatggccttgagagtgcacaagggaacattgaggttagctttgctgaacttctcctcaatattttccacatgaacgtgaactccctgatataagtcattaaactgttacatttctagtccagtcatatagatagttccgtatatatatatttatatatacctggacaattttgtcaataatttggttggagcgcttaagaacgttttcgacgatgacgaaaagggagtcttcatcgaaggaatcatcagcatggacatgagtgtcatagacaaggtcaatgattttcttgtcagacatggtgaagatgcccgagacctcgccctcaatgtggtggtgcacattagaaacgacactctccactttcgaaacgacaccttggactccgttcaacatggtgatgaagtataagaaagctttggagactgagagggagaaagagagagagagagacagacagactcgtcactgggtagcttatactgattttgcttattcgcagtgtggtttgagctcgagaatccttgctctatttatagctattattttgggccttggttgattgatttggacctacctcgtctatctactccaccacagttcacacaccaagattttatcttatttacctccacaataaaccacgtgaaacataatgtagaaaataaaagagagatggtaactgtaagaacattctggacaaaaaggaaaataaaatatatatcaaaccaaaagtttcctactaactttaatacaattagaaatatggcaaatcaataaatgagaatgcgcttcatgcatattagagttgttagctggctttaacccaactaccacttttgtacatatatcatcctttggttgtgacaaatttccacagaataaaagttttctatggagtatccattttcacatttgtaatttaatcataaaattttacgacaaagcaaaaaaaaaaaaaataattgctttctgaaggaaatttgatgcatatatacacatcagaaagttttaatttgatcaaaactcatttaaatatttccaaattcaaaatcatttataaattcataaaagcagcatatcttattactaatatcttatgagtggataaacctcctatttgctttactatttactttttttttctttgcttctagtgacaatactaatacatactctatttacttctaattatgtcctatttacctttctatcgttctttctttgcttctagtgacaatacaaataatatatactctatttgcttctagtatttttcttgctttgtcttttaatcaacgacaatacaaataatagatactctacaatatacatataataattttgattgattttcttttgaaaatttcatctttaatgtttaaaaaaataccctctaacaaaatttaaactcctaattaatttatacaattaaatgttattatttttaatttctacccaaaataccatccctttcattttccttctctctttgtctctttctcttcctctttctcgcaccaccgagacactcaaacccaggcaccgagaccaccaaccaccaccactgaacctctactcctccaccacccaacctcctcatctacccaaaacttaatccaacaacccccaacttacctacccaaatctttctctctccctcctcctcggcttctctcaacc

SEQ ID NO: 39854 - DNA, 1884 bp, Cannabis sativa
ctgcgtgtgcgggttgatttgaaaagatgtcaaaaactgcaccactcgcactgcgaacacccttatatataactacaaaggttatcacctagcgactactaaaataaagcctgctaccccgaagatcgaacactccaggtataattgtctcgatatgtacaatctttatctgcttgcactcactgctgctgaggcttagttttgcccttacctacacatgtaaacaataataatgagtcgacaaactcagtaaaaaagcataatcataacataaatataaacaaaattataactaggcgctcatacacccaatcataatcctatctcgcctcccatgagtactgaatctataacattgatatgacagtactattgatcataatatcagcctatactcgataagctatgataaaattattaattacctattttttttttaccatgaagtaacttaaaacttatgggtaatatggtccaaacccatactcctgaataatcttaatattctcaatgtctaactatattaccttgctaaaactaggatactttactctatttacgtgactctataggccaaacatcacattctactgttactaagcataaaaattttaaaaatatataaactatagctaatacacttagaatttaaatatatctccataattataaaaataatcataacaattctatttcttaaaataaaccctatctatctactaattcttaaaataaagctaagatatcattacagttttagttttggtattgtgttggacttgtttaatattccatacagtaattagaatacaagcatgtacgagttttggtattcataaaactagcttttattaaaaacaaatggattttaattatatataagtaattggtatcttaatttatttctttaataaagttacttttagtattatttcaactttaggttttttttttttttttcaaatgaaaaaaattagcttttgtagttactgcgtcgtgtaaatcaataatttcactgggtttctttacttgtatttttttagattattattttttattttagtgtttaaattttgaaaaaaaaattagttatgattttaaaggtttttatagtatttttccttacgtataataattttaagttttttttttttaaaaaaataccatattttaaaaaaataccatatttaaaaaaaataccatatttagtgtattaaatttgcatgtcatatattttcaaacttttctttttttccatatttttgtaagtagcttttttttttttttaattcaaaaggaaaatatttttaaactaaaaatcaaaagagagattaccttcttaaaagttttttttcttttgaaatggttaccttcttaaagtccaaaataccaaaatctacatcttatattagctcaaactgttaatacagtacttcaagaaatgtgaagaacatatttgaaagaaataataagtctatggaaatttgaaaaaaaaaaaaaaatacaatgtgaagtatattatgaagagagagataagctttaggtcccaatagcacaattattattctccttttctcataagtaatgaaatgaaaaagtaatctacatgcatccataatcaaatttattagaaaaagaaaacatgattcataaattttcacattaaaaataaaaagtaggatgaaaagtaataatattttgttaggcaatgaattttgtttatttttatatatagacaaaataaaatacatttcattatttattataaatttaatttgatatatatactttaatttcttataattaaagatcagggatatgattttgtcccgttattgtactttcacggattgtaattcgtgatgtacgacagccgtcagatga

SEQ ID NO: 39855 - DNA, 1183 bp, Cannabis sativa
ttatgttttgctacataatcgtatctattaataatgacatttcaattttccatctaagtgcctaagtttctggccgcagacactttaattattgatcgtaatggtaacctttttcttccgagtgaaagtatttcactgaacataatttattatttatttttacaaccttatgaaatttgacatattcaacattgagaatgagaccttctgtactgaaactcattccctttgctggctctgttgtgacttggagaaacggttaatgaaagtcactttttttcttaacctttttttaatggccactcatcctcaccctagtagttgttcaaaaaattaccaaggctgaactggaagaagacagtagtttttcctatctttctatgtaaatcttcttttatgcatctggctattaactaatttcccatttttatttactttatctttaataatttaagatctctctgttttgtttttgttatagttcaaaaaaaaaaaagatctctgtttgtgtttttatttacagattcttctttccatgctcttcttctcctttatattgttataagtatagagaagttaatgatgccttattatatggttaatttatatgagggctaaaacaagcactatttaagttaggactgtgaaattgaatatactttaggtcttgtcaatatttctagtgagtttaggaaaggttgatgtatttgacaaagggaatctaaagtttgaagaaatctccttgtatagtatacaactttctctagctactactctagggaaattttatctatttagtggttagtattatgttgattaatttaattctcattgttagttcttgttgttgctgctgctcctattttagtactactagttagtaatttgaaaattttagctatgtcgatgtgctcccattagcacaagtacccttcctttccaaaagtcaatccattaaattcttggtattatcttttaagaattatttgctgatacttaaggttcgtgctaatgtttttcaggaattctctcctggatccagtggacgaatgaccacaatgggtgcatatgtgcgtgatttgcttcttggacaagtatgttcccaacatatgcgtgcttaaattttttttcttggtgttagatgcctcatgcccatcttttgtctttttatgaattggaaagt

SEQ ID NO: 39856 - DNA, 1430 bp, Cannabis sativa
tatatccagcttcaatatcttttctcgagcattgtgtgccaagcaattcaaaccatcccaatccttcggccacctgcccaagatcgactctattggttccacactccacatggaacatacactgtaaaattggctaccatcatgcttatgacattcaccaccaaattgagccctcaccttccactacaactaactaagaaaagtggtggaagttgatctggaatatgaagatacctctgaaaatcaaatattttatatggcgagtttaccatgatgctcttcctactagtgtgaaccttttccaccgccaaatagtgagatccccaatgtgctgatgatgccacagtcacgaagaaaccttagcacatgctctgtttggtcgttcaactatccagaaggtttggaaattaactctctttcatgaagatattagtaaactaaaatccttaccttgtaatgatgctttatatatgtgtactgatataatgacaatcaaagactttcagttctttgtctgtctactctggaaaatttggcattacaggaatgaagtattacatcacaagccaaaataagacacctctatgaccatccaatggatggaagattatctgctccaatatcaacaacataatgtaacgaaaaacaccacacaagcttcaagacgctagaagttcctcatcccattggcaaccaccacctccaagccagcttaagcttaatgttgacactgcccaaaatatacaaacgaacaggatgggctttggcttgatcgttcaaaatcataccacagatgttgttgcagcgttagttattctttggaaaggtattcaccaaccacttataatgaagcgctttcccttctactcgctctcgaatgctgtcaagagaactcacttatgattcaacacatagaatctgattgtcaaattcttgtagatgttgtactcacaggtcacaccaataacattcatctccaggaattcattatcaaaattaatagcttattgtctttatttcctcaagctttgattacctatatccctcgagaggctaattctatcgctcatcgtctagctaagcaagctttaggcttagaacaggaggctattctctgattttgagcaactatttttctctttgttgtctcctctcttgcattctttaggtaaaataattaattattaagatacctttaaaaaaataattattaggatactattatcttaaaaaattaatagaataaagagattttttcatttttacactttaaatgagtttttttttttcttttgcatttttacaaaattctacatagaaacctctatagcaactaatggagtaacttaaatcgtaaccaaaattcgtatagcaacccatatagaaaccactggagaaactacctcagaaagtcaaaccgtaaatttaaa

SEQ ID NO: 39857 - DNA, 2011 bp, Cannabis sativa
tattggatcacatgaggtttctcactatattaaatatatctatgcaagctttctttttttattgtttttaatgattaataattgttctatatgaaatgttttattgcattttgcgtataacttttttttttcttttcctttcccgctcatttgttacttgtttgatttgcaggtattaaaaagagggatactagggacttcatctcagctttgttatttttcttccaaaggtacttgagctttattcatatgcattttattctgaatgttactacttttattttggtgaccctttgaatttgttatttttgagggaatgaacatacacaatatgtcaaggagcgaccttgtgctttttaagattttgagtcaaatgtatttttaattgacagaagtgaaaaacatttcgcatattatttttttttaactccttgggctcttcttagaatttaatttaatgtatcaaacaagttgcttactatcaaattcttactacttcagtgatggcaggaaatgttaaaatcttgataatgaatatcacaggacattgtaatttggctgtatgtatggcattttttgtattggtatgaatatggtaacaagtgatgatattacaaacatgttgtctttcaaatttttttatgaatgtagtagataactttgtctagtttgtcttggtcttgctgttgcagataataggttaagataataaaaacaaaattactgttttgatctgcttcagagtttaagcttacttggatattatgaaatttaaaattttgtctgtattaaggaagaaggaaatgcaagtccgatggaagtgactccggtgaagaaaatatgtcaaagaaagacatagccctaaagcaagctttggatcagattacgtcctcatttggaaagggatctataatgtggctaggacggtctgcatctcctaaagatgttccagttgtgtccacaggttcattttctttggatctggcactgggagttggtggacttccgaaggtattctcctatatagtaatcatcgtatattgttgcaaatgttggatttatttgacttcaaaaacttatttgtgacatcgttagcaataattttgaattgaagtattgtaacattatgttagctcacaaactttttttttgaaaaagaatgttagctcactaactttcttcattgtgacatatatgctggaactatgtaatgtatttgctgatgattatgaatctactgattttctggaagtaatattttcaaatatggattataagactgggtttttgaccttatgcagtcgccagaacatatgagctccttctcaggagttaaaaatttgtatgaggtttacacagtattgcaggaactttgctacatatgcaagtcctaacttctgatatgctatttttttttaattatttttagggacgggttgtggagatatatggtccggaggcttctggaaaaacaacgcttgctctacatgtgattgcagaggcacagaagcaaggaggttataatatttatgtttgaatgagaatctttcttgctgcataagtgatgataaattgataaatttcatggagtgtgctgtattgtatatattaatttatatgaatttgttggagtgatctttttgttgaattaattagctaggatatttgactttcaaatttagtattctgtttctcttcatgtttccttttcttttcttcatttaccaaatataaatagttctcttactgtgtaattcatagacagaaattaatataatgtagagcagtctgtcttacatctctccttaattttccatagaattaaagtttgtctaaattgtatactcattagtgggttgcccaagagtggtagctcaaatggtaaaacatagtttactcccacaagtgctcatggtttcgtgctcgtctaatattgtggagttagatgagaagcctggtttgaaaagatatactaattgattgtttgataattttttaccatgtatctggg

SEQ ID NO: 39858 - DNA, 996 bp, Cannabis sativa
agctttcctcagttctcaatgaaagcaccaaaatgtttcccgagttttctggcaactaaatattttagagcttaagaaagtgaaaataatataaatagcaaaataacaaatgcaagatatttacgtggttgaggcgttaactattcttagtccacgagtccattttattatgctctttggtaggtcattatttatacaagtagatatacaatggattggaactcttttcccctgtgttattcttgaagaagaagaagcttagtaggaatattttggagttttctaggtggaatattatacaaatgtgtttgtttttgggtcacaaagaccgagtcttctctccaaaagagggtcccctttgcttgtggttttttaggggtatttataggccaacttctttgcatgtacttccttagatggatcatcattggggaaaaatctgactgttggattggtagatggcatttctcccatatggcatttaagggcgtcagatcgcacaggctgggtctcatactcgtgttgtctcagggtttctcctttttggatttccaaaatcccttgatgttagatcatttggtcaggtacacaagaacacacatgctctgtatgatagcatgtcgtgggagacaacctatgacatcgtacctaaaaaagcttggccactaggtccgtagtttgacacgtataggcaaagcttttttaggctaaaggcgaagcccggtttaatgtgtctcaaaattccttggctcctctgagaaaatccatactcttcttgggagtcgatgactttagtcactggaacaagagggaaacttaggctcacggatacccttcgtgttgctagtagttagggaacatcttatcatgaaaactcttctcgcgaagttggtgcctttatcttcctggagtatcaattgaggaacttggtcagctaataactccttagcttttcttgattaaaatccacatgtcatgattacaaaaatgtagata

SEQ ID NO: 39859 - DNA, 2725 bp, Cannabis sativa
ttattataaataatataacattagttagtctatttttttaattatttaaaaaatagtcaataaaaaaatattatatattctatttaatcaaaatttgtccatgtattaaaactttgtcctaataaatatgcatggaaagtagaaaggaaagataattaacaagaataaaagtgcatgcttaaataaaaaaccgtataaataaaatgtacaataattattaacgtaaaactagaaaaatgaatatatataaataaactaacataataaatcacataaaaacaaaaaataaactaaaatataccgtgcatagggtgattttttttttcttttttttaatataccatataaaaataaattttattttttttcttgaaaaatacccatttagaataggaataattagataaaataatattttttgtaaaaaaaatttatttttacgttcaaagtttttattttttatttttacaatattttataaaaataaaaaaaaatcacatagaagtaacaaaaaaaaaaaatcaacaaaatatataacaaaaaataatatacaaataacaaaaaattaacaacaaaataataagagtacaataaaaatatacataaaagactgtaatttatgtaaataaaatctaaaaaactataaaaatattgaaaattccatactatatttttataatttttttgattgtttttgtgtgtgtgtgtgtttttttaaattatccctttagaatactaaggtgccgtttggtaacacctttgctttctaatcttttattcacaaaataaaagtaaaatttttattttcaaaaaacaaaaatacgttatgtaacaatttttaatttttaatttaaaaacataaaacaaaagtattttctgtaaaattcattttattttttatttttttagtttatttaagtgggtctaggtccggggtcgaattcaggttcagctcagaagacggattcaaccgtggggggatttaggtccgaatcatgttggagtccaaaatattgattaagaaaaaaattgtttaaaaaaatattaaaagtaacttttttttttttattttcaaaattttaatttttaattaaaaaattaaaaaataaaaataatgttatagaatatatttttaaaaaatatttttactttttaattttaaaacaaaaaattaattaaaaatatgttactaaacatcacctaaatgtttagaaaaaataaggacgaaagctttagtattgggctttcgttgtccatggaggattttcgacgtcggttgttacatattaaccgaagttaaaaggtcacttctacttctttctgccctaaccaaacccattctcttccactccaatctcctaagtttttttcacactctcatatggtactgatactccactttctttctcatacacattctcaacccttcaacccctaaactccctcacttcatcaatgttgttgcttatatatatatatgtatgtttctttaattaatttgtgttgttgttgtttttgctgttagtgattctgtggaaggaaaagtcgaagcttttgcaaaccaagagattcgtgaccttcagaactctctcaactcctccctcaataactgttgtttttctttttcttctcattgtgcattgttcaaatcaattatgaacttgtttatttgttttcattaagggttttttagtatgtaaaagaaaacattgatctctatctccattgcttccttggaatgttaggttttaatttatagaaaataccatttttaatgcctctattaatgaataataataagtgtacattttctgtgtttatgataattgagtcctggaattcactaaaaagatttgaatatagtaatgccttttttagactctgaggaaatcatgcttatttatcaagtgggttagatggcaaataattctgtagtgacttaagtttctctttatagtatatctttgttcttgtccaattatgtactgttaagattttgtgttttaagtgtctcgttatagaaatcaatttccaattttagtaaatgttgtattgttcatatgtttttatatgcatgacctttaacatttctctctccttgtttttgtggctatagggtgaaccaagtttccatctaatttgggttcataattgtgtagcagctacagctgaaagagcactctaatcggttcttcaaggaattttgctttattttaaagggtatggaattactgtcccttttactagtacttttattatatacatatataattgaattggagcttttgtggaggtttcttttaagagaatcatgtttctttgttttgcaatgttcaaattgggttctgaaatgaatgtcttttatatagggaaaagctaaatgcctcaattatgaaaattggttagttggttgggtactactagtactcgtttgggaatagtatgatctattaagttttaggatatgactcacaaagtaattttgtgttgttggaaagttaatatagtataaaagaaaaaaagctaaaagtataaaaatatatatttattgtgtgctaaatttgattcaaaattctatatttctgaccagatttaacacaatttttagtatgttaagattcaacacactattaggtagtgtttggttggaaggaataaaaacataaaaataaaaatgagaatgagaataaaaataagaatagaatggaatcaaacttaaaataca

SEQ ID NO: 39860 - DNA, 1837 bp, Cannabis sativa
gcaaaagctatgatccgaaatattatcccatttgaagatagcatctgtgtccataaaaacatccatccacaatttgttaacaaacatacgatcgagcttagagaaaataagatcaccaatctcatgtttattagaccacgtgaaataggaacccgaacacttgaattcctccacttggcccatggctagccaatcttgagcatcttcaatgtccttggcttggatttgtctacccccatttctatcttcataagagaacatagcattaaagtctcctagaattacccaaggcaaattcgggtgaccaatactacttaactttgtccatagagccttcctttcctcttttgagttactaccataaaccgccgtgacaagaaagatatccttataaccacaaactttgattttacaatggataagttgagcatcttcatgtattatttctatttgaacgaatttggactgccaaagaattaaaattctacccgagatgaggtggctagaataaaactcccaatttagaaagttattttctaccatctccttcactttgtcatgtttcacctttgtttcaaacaaggctcctaaccccactttattcatcctaaaaacatcgagaatcgctttttgcttttctctcttattcattcccctcacattccaacctaggatattacacacctccattaaaagtaatggaaataggcggatccaagttcccttcgatagtctcttgtaagacttcatatccatttttgaacttctctatagctcttgtctcaactacattagcaatcttcattccttttctttttggagtcatccattcactgtttgcagcaccaataacctgcattgacccctgtttctgtcctttttccacctgctcattctcaatggttgccatagtcctatcagtccttgctgtctcattcactattggttgggaaactcccccaattggttcatcaggttctttattagcagctgtactagtcttcttcttccaagtcaccttgttttctttgttgcagttcgccactgtatgtcctagcaaatcacaagcagtgcacttcgttggaagccattcatattctaccgattgttccattaactgttttctctcatttatgaacgaaatagtctttggggggttatcggagatcaccatatccacaagaacccgagcaaatttaaccatagatctttccatagtgactttgtccaccattatcggtttcccaattgtactcgcaagggcactgagattggttttaccccaatattgaagccccagcccattcagccgtatccacactggtaccgatttaatcattctggctgcatccatgtcggttgtccaaggtcggaggaccactggttttttgtcaaaatgaatagcaccagtctctaaaattagatcacgagtagcttcgtctctgaatttcactagagtaaaccccgaattcatcctggccactttctcaatcccaagtttcccccataccctgttaacgaacccctcaaaaaccttgaaagggggattggctcccaacacaatacaaacaatagcattcttccaataagatgcttcaatctcagcctcttcaatatcaattttagccacaatttgatcccccactttaatgggttcagtatattcaagtctagtggaaggagttaatacctggtctgttggaaatttgctccataaatctgccgcagtcgcctgaaagtcggccttctcaacttcctccgcccagtttcttggaatcgaaccattgctcttctcagtagtcggagcgatttcttcctcatatcccagatctgcaca

SEQ ID NO: 39861 - DNA, 1673 bp, Cannabis sativa
tattacctagtttatgtataaacaagaatatttagttacataatataatataacttagaatgatacgctataatttcccgttggttgtctatgtccaacatgaccaggcctaaaacgaaaggcccactcaatttcctggaaccctagttattgcatataaaataataaatataatctctcagaaaaaaaaaataataataaatatattatattataatattaataaatgtctcacgcggtctctttccttatacacatgcctatataaaccagaagccattaccaaaatgtttcatcaaaatatcctataatcacactccaaatataaattccctttaaagctaaaacgtttcaacaacaacaacaacatcgtccatgaatatgccgatcacagtcacaacagcaaaaacccctaacgtcttatcactccagcaaccaccattaccaccgcgatcttatgcttatccccatttaaatttggctcgccgggggctcaacacgtgtcatccaggtggcaaggccgtttgtgctgcatttgatcatcacggctacgacggcaagcttgtggaccaggacatgattgttctgagaaagcgaattcacgaggtgaagaacgaagtcgatgatgacgtagaagatgttggaaatgacgtggcgtcgtctgattggatggagtgggagaaggagtattatgcgatgaattacggtgcggatgtatgtcaagctgtgggaatgttgcaatctcagttaatgaatacaaggccgagcttgtctcttgtgatgtttggtgtcgtttcgctcagtgttcctatctctatgggtgtcgttttgttgcgtttgttggatgcggccaaggatatctttctcggcttctcttaattagctttttaaaaaacagccgacttctaattatgaattagtactgacattttctttttctttggaaatacatatagctgtatagtaatataggatactttgatattacggtattttacaatttattactaaataagaatcttttataaattaacttttttagactgattattaaaatatttataataaaatccattataatttaaaattattatatccataatcttaattaataaaaaataataagcataacctctaattaaatgtaattatgcagtcaattttattatcaatactgccaaataagtgtcagtccaaaattagttcaagtgatttaatttttgtttcaaaaaaaaaaaaaaaattaaaatctaataacaattataaaattaaagagaattttttttgtgcactcagcacatctgtacttcattccaccctctgtcatatagttcttctttctcagagaggaagtcactttatccttccttctggacaattctaaattaatatattgtatatgtatcaattgatcggagtagaatcataaaaaaaaaaaaattacaaaagtttaaaaattattaaccactactggttattgatcttgaatatatatcattgaaaggtttaaaagttactaactgttattgattattgatcttgaatacgtgttattgaaaagaattgaaagttagtaattgttattggttattgatcttgaatatctattattgaagatttaaaagctattaatttttattagttatggatcttgaacatgtgttcttgataaa

SEQ ID NO: 39862 - DNA, 2815 bp, Cannabis sativa
gtatcagaatttggaaatgaaataatcgtaaatgtgtttagagatctcatgtggtttctcttgattgataaagtgagcagctccttcaacaattacaacttggtccaatgcaggcacatctttcttcagaccctcttcactgtgtatgtactctttcataccagtaaaatgataagtaaggtcaaggtctcctaatataaacttggttggcactttcacccttccttctgtccatgctgctgtcaaactccacgttctgtaataatatatatatctacaaattaataataaaattcccaatttaatttaagtaattaattatagatcatataagagtactacttacaagtttaaagctctgtagtagttcaatccaccagtaaatccagtttggttgaatttagtggcgtagtggttaatgtcttgttgggacaaccaagaaggcaaactgggtgggtctttgtatatacctctgaaaccaatttctttagggatcaatggaggttttggatcacgatttgcaaggattctcgtaaatactttcactgtatcccacgaaaaatcttcctctgcttctccagatatctattaattaattaattaaatttatctcacaataatatcttttacaccaaaaaaacttaaatattattactttattagtgtttggtcttaccaaaccattaataatagccatataaattatttttaattaactcaattatatacctttgacaaaaaataaggccccaattattgtttaataataattacacctcaattattatttcacttagcacgcccattatgaccaatactactgattttatttatttaaaatgaaaaaaataattatatcagcatttctttttgctttttggcaaatcacacttttttctcttcactttttcatttttgtaacacataaagttgtgaaattttttaaaatattaaataactttccacacaaaactaatatatattattaaacttgtattcaaaaatatataaatgcccttttaacatatatataaatgtcccatcaatacaagagattttatacagatttatgtaaaaagttttttgtactaattatacaattatttatgatattttatgacaaatttacttataaaaataaaaaattatttaattaattattacagaaagcaatcttattcttaattgttgaaattcatctttaaaacaagtttaaatattgaaaaaaaaatcgttgagaatcgtatttatataaattaaaataagaattaattaaattgcaattctttactctaattttaaagttgagatccatatataaacaaataaatcacctgaaacctgcacatgtagaaatcatcaccaagtgcagccctgaatttttcgacgaagttaatagtagggtctcttcgaaagaagggaacactgagattcaccaaagctttaatcctatcgggcctaaacaagcagaagtaccaggcgattatagctccccagtcatggcccactaagaacacctggtccaggcccatatggtccaataggcccactaaatcacccacgatgtggagcgccgagtacgaatctggcgacggtggcgcgtcagtgtcaccgtaacctcggaggtccggagcgatggcacgaaatccgagagaggataaggagagcatctggtggcgccaggagtaccagagctcgggaaacccatgcaagaagaggatcgccggaccactcccgatggacgccacgtgcatgtttatgccgtttgtacgaaccatggtgtgttctatcttctccatttctagctctaatggattatggttagtgttattagttactgtgtagaatataatcgaagaaagagagatgtataatgtgtttgagagttttatttgacaagtctcttataggcaccaggtccaactttagctacaccattattattaaattttaaaataataatatttgatagtaacaattaattagataacacaattccacccctaaaatggatatattaatacatttttatctgtattagcacttaaaataattttttagtaaattttttttttcatactcatgtacgttatagttatttaagacattcggcaaaattttaagaaatttaaaaaaatttaacacgtcgaaaactacattcaaaccgtgtattgcatgcgtgactattttattttatacgcgtgtaaaatagacggtttgaacattgttttttatattgtaaattattcagaatttctcaaaattttcaagttatcttaaatagctataatatgaaaaaaaaaaattagattaaaaaattcttctggatgctaaaattagtaaaagtgtatcagtacatccctgagtccattgtagaatcaccttatatttttttaataatttattaatttaaattttaaattttaaaaattgagtacaaataaaataataatttaaaaagattaaccgctaaaatttctatacaaaatttctattataaaaatttggagaagcaaccccacatcacatgccctcttcccccggtttctgcaacattaataaataaataaatttaggataaagatcaagaaaagagacgacatagcaatagtgctcttctgtgaataaaaccaaaacacatttaaaaagaaaaggaaaaataatagctgtgttattttatttatttatttattttttatacaataacaagtaaggaaacgggaaatatttataattataatattttaaaaaaattatttataatcatattaatacttagaaatatcaaaagtaatatttatattttatattttat

SEQ ID NO: 39863 - DNA, 2093 bp, Cannabis sativa
taaaataatttccaacataaaaatccccaaaaccttcgtggacgcggtagaggtcgcggtcgtgctcgtaggggtggtcaagagaatccatctcagacgtcgtttgactgggagcaaaggtttactgagatgaaagccagaattactcaacaagatgaagagattcgaaggttcagacaacgggatgctcctgttgagcctcccctgcaagtgcctgctgctgcagttcccgcggtgctagcagaatagtatgttgctggcaaccgtatggggcccttatatgagaggttcaggaagatagcaccccaagtgttcttgggtggtcttgatgtacttaaagtagaacaatggttaactgtgattgagaggatattaaatttcatggagttactaggaatgaccgagtggcatgtgccacgtttcaattccaggaagatgacttggtatggtgggagatggtatccctcactaaggatgttgccagaattacctgggaggaatttcgggacttatttaatgctaaatattataatgaggctattcggagtacaaagcggaaagagttcgttgagttagtacagggcgagaacatgacagtgactgagtatacgaccaaggttgatcacttggccaaattagccttagggattgtacccacaaattttagtaaaaaggataagtacttggcagggttgaatgccaagattaagcatgatttggttatcactacaaatgatactacaacctatgctgaaatggttgacaaggctcttcgagctaaaggagcagtcaagtttctacaagaaacctgagaggttcctagtgctggtagaaccactactctccctattttttgacctggcaaagagagtggtgattccactatcgagtacaaaaagagaactttcccatctatagggagttcaaggcaaaacaagaggttttgtggaaaccaaagtaaagggggacgtcagacctactcctatcctgagtgcccgcgctgcaagaaacatgaccccgggacttgtaatcagagtgcttgtttttagtgtggatcagtggggcacctcaagaaagattgtccccaattgaagaaagaggaacccaagccagaagccaaacttgcaccagcgcgtgtattttccatcacttaggcagatgcggccgccagtccatcagtagtcacaggtcaagttcttatcaacggtattacttttactattttatttgattcgggtgctacacgttcatatgtagcatcaaaagtacttaatcagcttggtaggcctagtgatgtttttgaggtggggtttggaaccctattacctaatggggaattgattatatcgagaaagtgggttagatctatactaatcaaaattgagggcagagaactaagtgctggtcttatggagttactgttcgctgagtttgatcttatactcggaatggactttttgtcgaaatactctgctagtatttactgcaaatgaaaaatggtgattttccaatcggagaatgaggaaccatttgtttttgttggttcagtttaaggttctcgtgttcaagaatctcagcattgaaaactagggatttactacgcagtggatgtgtaggattcctagcggttgtagttgattccagtaaacctgtgttatttggactcgaggaagtcaaagtggttaaggaattcctggatgtatttcttgaggaattaccagggttaccacctcagccagagatagacgttattattgatttgatacccggagcagaacttgtttcaaaagcaccttaccacatggcacctgcagaattgaaagaaatgaagatacaacttcaaaggatgctggatctagggttcacccgacctagtgtgtcgccttggggagctccggttttgtttgtaaagaagaaggatgggactcttcgaatgtgtattgactactgagagataaacaagtaaactattaaaacaaatatcctttgcctaaaattgacgattttttcgatcaacttcaaggcaagacagtattctctaagattgattttagatctggttatcatcaattgagaatccgagaagaagatat

SEQ ID NO: 39864 - DNA, 1437 bp, Cannabis sativa
acaataaaaatgtaaccattgaaacctcttccatataattatatatactaaaaattgttgtgatcaatgatcatatactcttttgtctaattagttgagtactctcaattagtctcaaataagtaattgtgggataaattgtgtaagtccaatttattataatttatttaaaagcccaagaggcaattagaaagatccattttgaaagagttataagaactacatctaaatggaatgacttacacattatgtcattactaaaaaaaaaatagtttatctcttcaattttttaaaatagaaaaaataaaatgcaaagccaaatatatagagaaaagaaaaaaaaaattaatagtcttcggtcccatatgtcttaaattaataactgtgtctacgccttaaatagtctttggttctagttgtacggatgggatgacttactgcattttggatgagatgagttaaatatctcgaacgtgatgacacatcttgcatgagaagacttacacatccaagacaagacttacatatatgaaatagaagaactaaatgaaaaaaccctctcttaattagctaggatgaccatatcctaattaagaaggttgttaatgtaagatcaaacatcctagatcgatataggagttacgaggatgagcacatgagaagattatcctatattgagcacctaacagagaataaaagacacatgtcaaaatatgtaagaatgattaagatatctcataaagaataatggacacatgtcaagtcaaagtaggaaattacaattgacaccttagataaatagaggaaggagaaagagagaaaggagagggccttttgcttgagaggaagacaagaatgaatagcaataaaaatttcatgtactatttttttacgtggagtaaaaataaataataccagaatttataaaggtttagccctacgtggataatatagcctaatccttttgatttttcttttttttactattaatctcaggttgctagtcaagaattgcacaaagagtttcttgaatgcaagaagttttattttcagagtgtctgcttattgggtctaatcctagtttagtttgaaattatctcaagtactatttccttaattttcagaattagttgaaatctgattcttcaggagagaatcttgttattatcgtacatagtatggaggatggagcctgagttacgtacaagcataatgatgctatggtgtagcttggtcttaagatccgctggtcttgttgatgtgctatgtctttgatgaagctttccatgtacttgtcgtctttaagtacgtatagttgagttgagccttggaatacattgccttaaggacgagagggtactaggcatgggtggagatattagatatggtactagcaatgatcatgcaacatgatcttgggccttcatgcatgccgca

SEQ ID NO: 39865 - DNA, 1600 bp, Cannabis sativa
ctcgcggccgcggccccaacctgctaggccttgccacggcgagccaagccgtggccgcagcgacgggccctggaaccccaaaaatgtcaaattttcatacattcgattttcaaccaatttcatacccaaaacttaaccaaacccaatcttaaattcaaaaccacatcatacctatccaataatcacaacaaattttaagcttaaaacaagctcaagacaataccaaaacatatctaaagcatgttacacaaccacaccttgcacaaaaatctcataagctttgaaacttcaaacattcaaagcacaactcaaatattcaaagcaaatacctagaaatttaagtatttttctagaatttgaacatcaaaattccactccaaactcccacaaaacattcaagatgcatcaagtataacactaaagcataaacaaactaaaagcaccatttatttacttaattttcataaacatgcatccataataattaacaacctcaagaacaccatgaacaacaactaacaagctttgaaaatcagaattagaaactaataaaataggtcaaaacaagttactcaaagtcctctagtaccaagcaagagctctttcctccaaattcaacaaagttatcacaaaatgggaaggaaggaagagagaggcggtttggggttgctaaaacctaaaagatgaatctaatttttgctgaaaagctattttgttaaaaattaactaattggtcaaaagaccaaaatgcccctaaggcccatatattgccatatacatataaaaaggataattttgacatttagctcaaacatacatatcacatttatcacattttctcacttatcatataaatgccataaataaatctcaaaaatgtattttgggccccgaacccggttcggcccaaaatacctaattgtgactataccctgtcgacttgtctgaaaacacttgcagaaagacagaataaacatactatataataatatagtccataagcacaatataccataaaattataattttacccttctctagtcaaaattacaaaaaatgcccctgacacactaacgggatcttaaaatgcaataaatcataataatttcacattataaatcatgtaataatataatttctcattaataaataattattaagctagttagggatgctgctaataatctagttattaaaccttagggtattacactgatgcttaccacgtgtacacaataagaacaggaaagtaaagagacacaatagttttgtagagactcaacctccttagttagcggttaatgacctactcccctttctgttgtattaataccggagataataccacttagatcacaaaggttgtggaatctaaagtagcactcttaggattacaatatgagaatcaagtaagaaaatctcgagtgagggagacgccttgggcatgtataacatagggagagagagagttagggttttggacttagagcttgaaagcttttggagagctagagacatagaaaaattagggttaggctaatgctctttatataggagagcttacatgaagataataacctatttgttgggttttatgccc

SEQ ID NO: 39866 - DNA, 1115 bp, Cannabis sativa
taaaataatttccaacatgagcttccaaaaggacttagactcagaaatctatgggatctttgcctgatacggagcaatcacctattaggaaaacaagctatgagcgagctctgaaaggacttaaactcgagattgtaggcctacaggtccaatacacgcagctgatggacccaaccacaattatgtttgtagtaatttgaacaatgcaagaaaccaatctcctccatgggattcttttcacaagtctcatgactctagaccacctcgtgaccctacagagggaaagggacctgtagtcagacttaggggaagatcccgaaagctctaccacgaaaataaagagtatgagatttagagggtgaaggtcaatgaactaatccacactcgaaaatacttccatgatgaataaggtgcttgacataggtacttagcctgaggtgcatggagacatgttgaacttgagcaatcggtctaactccctccacacatctcattctgaggaagactattttgaagggaatagtaagtataatactgcgagcagctgctcatgaagaaaacactaaggagataactctatcgtcatacaagagaaatccttgcatttaccagcaaggccacacgaccaggcaaaaaccacaagacccaagttgatcaatgcctttgatcgacttggaagacaagagagcctgtataacgacatcatcaagaagcagccagctgatacacacatcaccacagtgtgtagggccgaatttgaaacccttgttgctctggttaagggtatcactactccaaaatcaatagagtacggattagataaatagtgttgttctcctctctcagatcaaatcaaggctttaaagatccctttaaagtttagaaatcaagtgtggcatccatacactggaaaagaaaaccctctctctatctctcatatccacaacttcaaagtacaaactgacctacaaggcattcaagatgattctcattgtcaagtctttccagccacactatcagaagcagcacaatagtaatatctcaagctttctctgggatctctcgattcttgggagatgctcaagaaagcattctatgaccagttctctccatca

SEQ ID NO: 39867 - DNA, 1873 bp, Cannabis sativa
caagacttcaaaattcgactttagtgctgccccgagacaatgtatgttgcttcttacattgccaagcaataagattagagccaaaatattttgcaaaaccagaagtagattgcttatcatcaagatttgtggcccaatctgcatcacaaaatgtagtgagctcatagtcttctggttttctaagatatatctcagaattctcttaacaacttgccagtgagactccatggtattagccatgaattgacagacgttatttacattgaagaatatctcaggtcttgtgattaccaagtattgtaaagctcccaactatggatcgatattgttgagggaatgtcaactagaaggctaccataagatgatagcttcaaactacttaccattggtgtgttagatggcttcgctttatccatataagctttatggagaagatctctaacatacttggcttgagacaagtgcgaacctattgatgtagtggtaacctcaatgccaagaaagtaatggagattttctagatccttaagagagaatttggcattcagtgcagctgtgtagtgagaaataagctcgggatcactgaatgtgatgataatatcatcaacatacaccaagatatcttccatggagagaggagtgtggcttatgaaaagactatgataagattttgaagaaacaaatcccaatgacagaagacaatgatgtaatttctcaaaccaatcacgaggagcttgtttaaggccatacaaagccttgtgcaacttgcatacaagctctggagaatcaggttgttcaaaattaggaggttgcaccatgtatacctcttcctgcaagtcatcatttaaaaagacattgttgacatcaagttgctttatgtcctagcctttagagagagtaagagtaagaacaactctgatagtgacataattgagaaaagggataaaggtctttttgtaatagaagtcaagttgttgatggaaaccttttgcaactaatctggatttgaacttaagaacacttccattagaattttctttaattctatacacccatttgcatccaattacagtcctactatgtggaagtttgacaagaatgtatgttttgttcctttttaaagcaagaatctcttctaccatggctttgttccattgcaactgctgaagagcttgctttattgatgttggaatttaagtaacaagataagctttaggcaatctaattccacttttgcctcgagtttgcatatggtgtgtgttaccagtagtggatatgttaggtacagatgctttaaatggtagctgagaatgtgttttaaatgacacatttgatgttgttgtagcagcactggtgctgctggaactacacttggagatattggctcaagcataggatcagcagatgatacaaggtcagaggcaaaagatgatacatgcatttaattttcctgtggagcattagatatagttggagctaggatccttagagagtcaacagaacttgaaccatgtaatatctgatcttcaccactttcataaacacaatgatcattagaaacagaaacaattgaatgagtagaaaactgttggttttatggtactaaatcaggtacgcagtggaagaattcgtattatttgattatcattataccatagcccaatggatctccagatgtgtatacaagaaaagaatatatacctcttgatgactatcagggtatccttaaaacttctcgtatgttgtatccttttagttgattagaaactctcactatagtcttccaaatcaatccaccacacacaagaaatagtgtgggctattagaataaagtgtataatgtgttctcgtttaattctcaacacatgagcaa

SEQ ID NO: 39868 - DNA, 1372 bp, Cannabis sativa
agggcaaggtcgccctaatgatccgcgaggcagagttgtgcggaacgatagactcgatgctcaaatacaaatgcctacaatttggggatgaaaaaaccgccttactaattctattaactagactgaaggagtataattgattgaagacacatcttatcacataccaaaagacacaaccctataaccaaagcatgtattcactattttctccgcatattattagttttatgtttacaaactagtttctccacaacccatataattattctcaattctctcaaccttttttttttttttaattatttttatatgtttacaaactagattattctatattgataatgtgccctataaagtattgtattagtttgattaaaataaccttattcataatatcataaaggtaaaatatgtaaacaaccactccatacataacaatcactgaaaaatgccaaatcaataaaactacaagacttccatacattatgcattactattgtttaataaattattattattatttcaaaactcacttactcagcatcaccaagcaacaataataagaaattttatttgattagttactagagccatcacaataacccaaacaattccaattaagtagtcattagagttacataaaaaaattaaaaaaaaccttttttttttttttaaaccaacaagctaggtgcttcttctagagaaactaacttaaatcaatcaacaatattcatagtcctttaataaaaaaaatactattttataatcctaattaaaatgctagagattgatacatataatatgaatatgataaacatggcaatcacaacacacttaacaaacactactacaaaaatagtttttctcgacgtttttaaatagtcgtttaaagtattctcatcgatttctataaccgtcacctatacgaccgtcgtaaaacagacaaaataggcgacggttaaaaaccgtcactaatatagactttccgacagtttaaaatcatcgagaatgtaaaaaacaaaaagaaaaaaatacaaatttttctgccattttttttttctgtattttctcctatttttttcttgtattagtttataattttacttgagttaaaataaaacaattaattaattttattacaataacaactaattttaaaatatattaaatttatacaataacaaaataaatatatataataaataaaagtatataaataaataaataaatatatttacaccgaaatcggagactacaacaatttctctatttaattacattagataataacgttctagaaaaatcgttaccacctaaaatgaaaaaagcatttaccgacctaaattagaaacaaaactcattgaacagtata

SEQ ID NO: 39869 - DNA, 1570 bp, Cannabis sativa
tgctttcttcattatatttgggtgatttataagctcagctagagcccattccaaagtaattgatgatgtgtttgttccagctacaaatacatcctgaaaattaatacacaagatttgatttcactgatagaaaaatgaaattcatcacactatgatacatctattcaagaaacgtagtaatgtatagggcattataattttggccttgttggtttaagttctttaccaagtttaatcttggaatttttaagaaagacaaaaataatgttatcaaatattttcatatcaaatacaaatattaaaaaaaaagagtaatttgtagcataaataactaagtttaactcttgtaaataaatacctaattctaatttttggaggtaataatacataagttataattttgaaacttctgtaggtactgattaaataaattgccatgttgcaatccctgataagtcaaagtcattaaatttttattatttaaaaaaaatagttcaaatataccaattaaaaaaatgacacgtggatataatgacttaacatttaacggttagctacctatagaatactagaaatataacttaggtatgataactgccaaaaattaaacttaggtatttatttgcaactgagagttaaacttaggtatttatgccacaaattactctatcaaaaaatatatattttttggtttttggattcatttaatttaaatttatattttataaaacaatttatcagttttttattattccaaaatattagaaatataataatgcttaaaaattttgattttaatttgagatttgatttttatttttgaaaaagtctagtcaattttataaattctgagcaatttttttcttgttaaaaaatagtttaagtattttggtcttcttaaagtttagggtaattcttaactattttaggaaagatttaaactttatacatagatttgaattgagtggtcaagtagtaattattaatttcttaatatattttacttggttgacatttcatcattttgactaattaaatatatttatttatatatataaataaatatacatacatatatatacacatataatatgtgagaagaaaaatatttgaaaacagaccagaaatgttaacaaataataatataaaattaagaaacacagttattaatcaatttatgtttgttttaatataataaagtttttccaaaagtatgtcacagcatttggagatgtaaattgatgatttattgctaatatatatatatatgtcatttggtaaaaattgatcgaaatttaaattaatatgacacgatgcaaagtttataccattatcacctattacttttatcttagtttataaatattttattattaaattttattattgtattaaattagaaatttttatatttatttttttaattgttttaactaataataaaattattaaattttaaatttttaataaaatattaaattttaaacataattgcataaattaatgaaaatatgtcataaagcaaaatataatacaagtttaagagtaaactaaatatatatatatatat

SEQ ID NO: 39870 - DNA, 3303 bp, Cannabis sativa
tttattactaattagttttaaaatgaaattttatattttttatacataattttattctttgtgctttaaattttttatttttcgttttatttgttttagtttgttgttgagatgtaaaacaacaataatttattttattttgttgttaataatgtgaaatacatatttttttttaataaatgttaaataatttaatattaaaaagtaatcaatctaaaataattaattcaatccgcacttttgaagattaggttagattagattagaggggatatgcggattggattagatccaaaatatgaaattcgcacttaattagtgcggatcagatgcactatgagcaaaattatgtgaatcggaccggatggacacccttactttttaatagagaaaatattcttttattatctgaaaaataaaaattaattaatgttacgataaaagtgactttatataaggggagatatccaaccttagaacactcaccaaactcaactaggaatatctcaatctctataccccaagcattaaacataattatttaatacctaatatgtcccctcaagatgaagtgtacaaatttgtgatattcatcttagaaaataaatccttgaaatgggatagaaaaagaagcttggtacggagatcggtaaggttgtgtttggtgttgacgtgaaggagcttcaactgaccgctttgcacccgttcacgaacgatatgacaatcaatgtcgatatgtttggtccgttaaaaaaaactgagttttaagaaatatgaatggcaactttgtggtcacaatacataaggactgggtgtgaatgattgaccctaaagtctttcagtatggcaagtaaccatagcaattcacaagttgtgttggccataacacggtattctgcttttacagaagaccaaaagacagtgttttgcttcttggacttccaagaaattaaggagtaatagtaacttgcgaaaaagcgtcgagtatcatggcatgtacaccagtcggcattaaaaaagactttaaattgtacctcattgacggacagattactctcagtgtaggccttgagttgggtagaagaagtggagtgaaagatcagtccttggcctagagagcccttcaggtattgacttaacctgttaacaacataagaaatatcaagtctattatggttaagtaattaatgatctttccaatcaaacttctatagcttgggtcagaaagtaactcccatgtgtccttgcttaggtgagtgttgggttccattgcagtggaagcgggtttggcaccaatataacctatgttagttaaaagttgtaaaataaagagtctttcagagaccgaaatagcatcggtggacctaccaacttctagtccaaagaagagcctcaaaggaccaagatctttgagtttaaatttggagtcaagttgtcttttaaacaattcaacatcattagagttattgttagcaattaacatgtcatcaacataacctaaaacaggaaggaaaatgttattagaagatcgaataaacaaggagtgatccgaagaggattgtttgaacccttcagttaccaaggtagaacttagttaagcataccactattgggatgcatgtttaaggccatagatgttcttatgtagtttacatacagcattagaagggagttttccttgatgtttgtagcctaggggaagcaccatgtaaccttcctcagtgagatctccatggaagaaagcattgttaatgtccatttgatataatggccaattgctaatggcagcaagtgcaagaagaatttttagggtattaagctttgctaccggagtaaaagtttctaggtgatctatcctaagttgttgggagtaccctttagcaactaagaaaactttatatctttcaattttaccttgggcattatattttattttaaatatccatttgcaaccaatgaaatggtggccaccgagaagagagacaacagtccatgttttattggttgtaactgtaagtgcaatagtttcagtatctatagcttttatccacacgagaaatttagaagcttagaaataactggttggctttgaaaccaaataaacacttaaataaatggcaacagaaaaactaggagaaaacttgtcataagagatgaaatttgagatgagatgtgaagtaaaaaaactcataaagacggtgttggagatgaggcggacaaataaacatattttttgtgacattggggccactcgaaggggctgatccagccgctagtggtggcagtactattgtatttaaaatggctggaatgaccacttgtttgggcagcaatgaagggtggacagtggttggaataagcactattgtgggcaccggtgccactgcttgggaaggaacctgtgatgtatcattagttgagacgttagtttgagaaaaaaaaatcattaaaacatgtatttttaagaggaaaaatatgttcataaaaaatgacatctcttgagtgaaatttttggtgagtttcaagatcaagtaaagtataagctttcataccaatcgggtatccaatgaacacacaagcccgagatctcagagaaaatttgtaccttgagttgttcaaggtggaagcataggcaagataaccaaagatacagagatgatcaaaagaaggtaacatgttgtacaacaactcaaggaagatttaaattgaagtaaaatagatggtgtgtggttcattaaatacacagcaacattaataaaataactctaatatccaagagataagcgagattgaaaagtaagagaacgagtgacattcaatattgatgcttttcttacacagagttttgttgaggtctttcaatacatgagtgataaggaaatacctttggttgtaaagaaagagggcaagtttagttcttttgcattgtcacatcttatccctttgatggaggtagaaaactgatttagtacataagcataaaactgaggtatgatagtgttgactaagatttatttttaagcaagtaaacccaaataaatctagtatgatcatcaacaattgtgagaaaatatcgataacattctatgtttatcgtgcgaaaaggtccccaaatatcgaaatgaagtaagtcaaaagcagtagaagccatgttattagccgaattaaaaggtaatctcttttgtttagcaccaaactgttaacttaaaattttgttaacaataaatgaagtcttgtaaataaagaattaatacttataacttataaaaaaataaagaacacaaagttttttacgtggttttg

SEQ ID NO: 39871 - DNA, 1112 bp, Cannabis sativa
ctatttgagcgaaatctctacgtcatcttaggtattaggacatccgagaacataagcgagcttctgaactcgcagaccaaagacactccctaatgatgcttccatataggatagagcctcttggattcgactatatggaataaccattccagtagggataactagccaactagaattccatcctggagtgagactagttatccaaaggaatggacccggaatagacatgatagtcatccgagaactcccttccaaactcgactatcattccacaagattcttttcggaattggcaaccataagtaaataactttttcaaaaataacatttgcaaagacttttttatttggagaaactatacccacatcagttttttaaaaaatctaacattttgaccaatggaaatgtcatttcttgtaatagtaaatgttagattaattaatcatttagatatagtaataaccaatgttttggtaagcggaatgagacttttatgtattcatgacatgagaagagaaaatggtgtctaaatgtagtgggttcattataattgcaaatgaagaaaatgtaatttactttttcccataaccgcaacccaaaggaaatatacaatgggatatgattttgattttttacatcattacaatttaatatattacaatttaatacataacaatactacaagagaaattaatgctgaaggttatcatggtactagccgcaccataagataagatattattattttatattaatgtaattaaaatatctcgaattttacatattttaatttaatataaatattataaatagagtattgctattgggcactagtggtgtctagcacctttaagacatgtcgtctaacgattggctagcgatactctctaaaagttattatataaaactatatgggacccgatactaaattagaccaataacaatattaacacgaaagtgcttagtagtaactggtaccactcgtaacttttagcatttctcttataaatattattaatcaatcacaaacatcttgctagtattaattactatattggtgtctaatacctttgtattaggggtgttcactaagtatccgatccaatccaatc

SEQ ID NO: 39872 - DNA, 2527 bp, Cannabis sativa
cacatcatcatctactacactaacaatggtctatgtaaattatatagtcatcacaggaggtgattccaagatcattgccaacattgtcaacactttgaacttggattcacttcctctaaataagacaagtcactgttttttctacacacatcatcatctactacactaatattggtctatgtaaatgatatagtcatcacaagaagtgattccaagatcattgcaaacattgtcaacactttgaattttcaattttctctgaaggatcttggggatttaagatattttcttggcattgaagttcaatctactccacaagggcttcactctctgaatcaaagtatataagggatctggtcataaaagctcatatggaggatgctaaatctcttccaactcccatggtgagtggtttgaagttgtctacccatggccatgaaccatttagcaatccttagctaaggtcaattgtgggagccttacaatatctattaattagtcatcttgagctagtcttcactgttaacaaggtgtgtcagttcatgaaaactcctatacaaccccattggcaagctgttaaaaggattctcaggtaccttagtggcacaaaagagtatggcttacatattcacaaatctacatcgaatgatcttgttgctttttgtgatgctgattgcaccatcaaatctcgatgataggtgatccacttcgggtttttctatcttcttaggtggaaacttaatcacatagcaacgtaaaaaagcaacaaatcattattcgatcgagtacaaaagcagaatattgaggcttagctaatgtggtatctgaactcacttggtttcactccctattcaatgaactttagattcctcagtctaagcctccagttgtttggtgtgataactttggcacagttcttcttactgttaatcccatcttacatgctcgaacaaaacatattgaacttgacctttatttcgttcgagaaaaggttttttgccaataagttcaagtcaaacatgtccctgccacgaatcagttagcaaacagtctcaccaaatctatcccatgccatagttttcctacttttagatccaaactcacaattgcaagtccttccaattatgagtttatggggaggtattacggtctccttgttaaagttagttgagttagttaaaagtttgttgtaagttagttagtgtgtaactcacttactgttatttgtttttagctcactcctctatttttggttgatatataaagacctcctcttatactctatataatgtaatacacacaataatacattgatctctcttacaactttttctgttctttctctcatcttcttcctcctttcaatctttcattcttatctttgaagctcttgcagctatgagtcgaaggattaacaatcctaatagtatcaaacattttcttactaataagttatttatttgcattcagatgttctgagtctgttttgagagaatgatgaaagtgatctcgatgatgatgttctaagatgtatgttatattcttatctatattttaaacttatttatttcttacaaatctatatttagtgacattttaaatctattttcaggtccaaccaatgataaacttgttttagaagaagtggaagcccaatattctaatagaatgaaaaagtagggtgttgtttctttcaatatttatttggtctttgaaaataacaacaaaatttgtttatgttgtgttttggtgttaagggactaattatatgagccatttggaaattctagggaagaaaacactagtgcaagctttgctagatgtcaatatgccttcagagctaaaatgctccatttggaatttgttttttaagaaagcaatgataatctcttgttgctagcatagttttgttcacaaatataagtgtatatctatattaagctaatctcaatcaatctttttgtcttaaattgcacaattttagtcttcaaatcatctttgtacccagctccaaatgtcgccatatgtatggctgatggcactaatgctgaccatgcgacaataaaaacatcacagcattaagacgaggacaaggatatggaaagaagatattataatatcgattcgagactttagtaatctcgttttatagttgtagtttgaacaatatatagatttattaatattattgttgcatgcacgatgaaagactaatatagtttgttataatttaataaatttaaatattttaatttttcttataaattttaattttaatatcatattaattaattaaaaattaaaagtttttttttacaaaaatttattgtatactattaggggtgacattttttgtccttaatgcttagtattaggggcaacaagttgctactaaaaaagtataagtggtccctaaagtcccttaaatctcatatatggatttcaataatgggcaatttttatatttttagggatgatttttgtcgtctctaacgctcacttgtaggtaggggtgttcacaaagtat

SEQ ID NO: 39873 - DNA, 1915 bp, Cannabis sativa
gaaaaaatttccgtgtgacagtatttttgtaaaagttaactcaaattctagtatttttgtaagtttcccaaaataaatgcggagtaaactaagtgaaatagagacaaagtttaatgaggttcatcacccttttttatggtgactaatccccgagaagaactgtccttttggctaagcttcattcgatcttcaataatggaggaatacaaaggagaatacacatcaactcactatttagtgtgatcaaacacacatcctctttaagaacccttctcactcattacaaatataatctaaattcctctctagatcgtcacctaaagaaatagaactcaaagtcttatatatgcagcttaataaaagggatgtccaagttagtaaactaaaataactaatttgggagctgactggacaaacctgcaacatctagttagtcaccagatgagattaacagtatgagtatactaagttactaaaatctcccacaaatccacttattttagtcacttggtaaaagatatgcatgcatccctttaaagttttgactgttccacctattgtgcttctgaaaataaagaacttttagtgctcttcaatgttcagcaagtttagccaatgcctaaaattttctcttgttacactcttggtgaacatatcagtcgagttctcattggtgtgaatcttcttgagtgaaatttttttactaccaatgatatctcttataaaatatagcttgatatctatgtgcttttagtgttcatgaaatatgggattcttcataaggtgaataccactttgattttctcaagtgacatgttttcctcttgaatgatattcagccatttatctttacccgtgctatgcaaagaaaaattcatggtttggaagatattggtattcaattgttatgacagcaaatacatgtgtgatttcaaaaaataataattatcattaagttaattttgtttaacttattctatgaagtttaataactttgaaatattaaataaaacataatttataatttttgaaatttgttttgtatattaatattttttttttgtaagcttgatatattaaattttatttctagtttagatcatcttttccagtaatggtaaaaaaaaatgattataaatgaaagattgaggcattattaattactctttattaattgataacaggaagtagaaagatatacaatctatgatcgaagaccttctacaacacaaactgaaaacacccttaaacacaagtagctagcactacactagcctaccatatatttttgtcacatattggacaattattgaaagcaaagaaaacaacactccttagaggactctacgtacccttcatgttgacatgttatatctcagtttcaagtgcagtaatagaacccttagagcagaaaacagaacatgccttggtacatttttcaacagctctattcacaacttcacttgcatctagtcacaaaacaagttgcataattagaatgggaatctcttgttaatctataataatagtaaaaaagtaaaattaatagtgagcttagggacttgggaatgggatcgagtttgcgctttaccagagttttggagagtagttatggcaccgcacacggaggatgtgcaacctaatttgcagtattcattcacagcatgatcaccttcactcaaattacatgaaacttgcatcaacataaatttctttaactaattaaagattttgcacaatagaacaaatgagtatattagagcatgttcggtattgttttttgttttttgttttaaagagaacaaaaaatagttttaatttgaagatttcaaaacacaagttgcgtttggttagtgttttctaaaaacaatatattttgttgttttcaaaattcttgttttttgtaactttgttt

SEQ ID NO: 39874 - DNA, 2021 bp, Cannabis sativa
acactgatagcatgattcaacatagcaaaatataggtacaacaattctcccacaactagttttgacaagaccatagccttacccaaatgctcctttaacttttggaaggcatcttcgcactcagtagtccgttgttgttaattccatgtaacacattaaatgaagaccgcacttatcaatgtattttgaaatgaatttgcttaggtctgcggtccttctagtaagactctggacgtgtttatgtttcctcggggaaggcatgtaaagaagagctttaatcttttctagattagcttcaattcctcgaaaattgacaatgaaacccaagaatttccctaaagaatcttcaaaaagtgaattctttaggatttgccttcattccataattctaaataacagagaaagcttcttctaggtcactattatgttcctcgaaagttttggacttcaccaacatgtcatccacgtaaacttccatgttttctttaaacatcttgttcaatagacattgatatgttgctctgacgttcttgagcctaaagggtataaccaccgaaaaatactcccctttgtccatctggaaattggtttgttatagggctgctacatgcatcttaatctaattgtaattagagtacgcatttataaggcttaaaagttcataccttgatatggcatccaccacttgatcgatctagggaagtggtaagaaatctttcgaaaaatccttatttaagtctgtgaagtcgatgcacattctccatgtcccatttagtattggaactaacattgggtttgccaaccagaccagatataaaactacctaaagaaactctatagaggttaatttctcaacttctattttcactacatcagcctttactgaatttaatggtcttctattctaaaagattgggtctgtgtctttgtcaatgttaacatggaaaagtatattggaaataattctagtcttgtttgaatggctccacgctagtacatcatgattgtttttcactgtgggaacgatatgttatttcaccatcagaggcaaatttcgtccgaccttgatgaatttcgtaggatctgcctcattaatgcatattttttcaacttcctccagtggtttgatcatattttccattcctagttggggatctaactcatcctctttctggattaccccctgtgtctgatgggcagatattttggaaccatcttctctgaccataaaaaatgtcttggcagagacattatagtaatttttggtgcttctctggttgccttttattatgccaatacttccattgtcgcatgagaacttcatgcataaatgtcaaatggatgttactactccgaagttgactagaaccgggtgtcctagaatgtcattataggtggtgggatagtccactactacatacgtggagtacttgaatgtgaaggttgtgttgcttctagctattccctcgttcagtataatcgggaactaaatcttccccataagtaataaggaatctccattaaagtcgtgtagttggatagagcatgacatcatattagcttcaacgaaaccaatttcttggaaggcgcccttgaacggaatattgaccaagcttccattgtccaccaatactttggacactctcttgatggaaatttggtcttcaatcaccaatggaacattatgtgagaaatgtatatgcttagcgtcctcttctgtgaaggtgattggtaggttcatcattcgcaaactttgagttggagtttgcacaaggtcacatatctccctctcttagtctagctcattgatgtacctcttcagggcatttctcgtgcttctagcgatatacgagccctcataaatggttataacatgaccattcataggagggggagcaagtcctgatggatattgatttcctggcttaggagacgaagtagtatttggtacttaggcgttaggcatcccatgaggggcctatatggctgaattttgtgtactcaaggcttgtattcccaga

SEQ ID NO: 39875 - DNA, 1186 bp, Cannabis sativa
atatgattggaattttgtagataaggttatccctttgttatgatcttttatggtattggtagctatagccttaccttatcatggaaatacagaacaaagaaaccttattttcttatttaatatttttgatgagaagggttggaatggaagaagtaggttgtggtaggtgggagaggaaggaagtgaagatgaaagtctcatcatctaagtggcactgtgtcaacctcaccagtcagctctcattggcctcttttttgtttttgttttggagtttttcaatctttacactttttggtaatttaattttatctcacctcatataattttgggttaagaaggtaggaagtatccaccacaattcatatcacattaaattaaagcatgttgcattactcctttatttatatgatatcttctagcaataaatgcacatccacaatttattaaaaaggtcaggtagatatctcatatttatagtgatatatatatattttttttgaatatttcttatcttttattattattattagatatttgaatttgagaccctatcaaagaattcccttcgtgtttcatattctctataatgaattaaatttttcttattttaataagacttcattgttaaaatacggatttttttaaatagggatttcatcttttaaaggttaatgaggatttttcttcttgaattttggcatgtactaaatcatgtctcttgaacttttaaggtcgttaaaaatgctctttaaactattgagatggttggatttaagaatttttttttaattttagtaaaaaaaatctaatatagatgaaagtccagggagaatggtttagtatataaacaatcactaaaatagtaaaattgaatgaaattagagaaaagtctttaaatccaacaatctcaatagttcatgaggcatttttaacgaccttaaaatttcaaggggtgtgatttggtacatgtgaaagtttagggggcaaaaattctaattagcctctaatagaattaaccatgacaaaagaaaaacattacatttacacctaaaattgacataagctatcctaaaaataaaattgaaaaagcttaaagtacttttattttattttttttacgttctttagttataattttaatttaaaaattatatattttattattatttttattcaaataataata

SEQ ID NO: 39876 - DNA, 2905 bp, Cannabis sativa
aggttcgggtccgggtgttggggtctatgtcatgggttcggatttgggtccgggtccaggtctaggtccaggtacaaatttgggtacgagtttgggtcaggtctcgagtctaggtctggtcatgagtcccgggtctaggctagaggtccggacctaggtcccgagttttggatatgagcccaagtcctgaatttatggtccaagcccgtgtcccgggtctaggtctgagtctcaggttcgggtttggatcttagtccagtcccgggtctgatctcgggtccgggtctcgggtccggtcctgtgtcctaggttcgggtccaagtttgaatttgggtctcaggcgggttcaagtccaggtttgggtcccggacgagtccagtccaagcctaggtctgggtcccagacctaggtctgggtcccgggtgggtcccagacctaggtgtgggtcccgggtcaagtccaggtccgagtcttgagttcgggtctgggtctaggtccgggtctcgggtctgggtccaggttcagatcccgatccaagtttaggtccggatccgggtctgaatccaagtccgagtcttgaattaagtttttttttttaatatattaaaattgaatcgaatcagattcgatttgaaaaaaaattaggtggagcagaacgaatttgctttgacatctaataaatatctaaatgtttcggatgagaagtgattcatcagatcggatctttccgaccaaatctaactaaatagatatttttgacatgttgaacaataacaatgctggtaaaattaaggagaagaccagagtacttatattacgtaggtacatatagtagatgctgtgataaattttcttaccctatatctgaaattatatacttgtacaaacatataaatataaatttatttgaattcctttatgacttgagtagtgaacatcaacaactttatctcaggatatatttaatgaataggatgaattaattcattaaaaataaaataaaactgacaaggtgggtgtggagtcagattaaaatgtaaaaaagtaaaataataataagagctagcttatcgatttataataataattaagctactaacaataatagacaagatcttcatcgaaattaaataatagagaagaccgatagaaactatttaaggaaacatgaaacagttactagaaaccaataatgacctttttttgtggtaattattttttatagtaaaatttaagcattgcaccattacatactttctagtatatacataaattttcattaataatactttatttaaaattttaagaaaataataaaataatttaacattattaaatcatacgttaattttttttatttctttttctctatattatttaaatattagattttttgatttattttattaaataatagtattaaatattggagtaattttatttttttatcatttatttttacagatttaaaataaaagaaaatttaaaaatatcaaaagaataagatggaaaaaatataaaaagatctcacaaaaagatgatccataaaatagagaaaattgtgttagaaaataaagttgacatttcaagcctaaattagactatgttgtgatcggattttagaaaaagttaaaacataaaagttctaaatctctcttttatcttttcgggacatcttgaatcgtctaagttcaagcaatatcgagagagttatggtcaaaatactatcagtcgatgcagtaaaaaactcactgtccaaataaagggggtcatgccacagccacggtgcatgatgagcataccgcggcccgtcctttctaatgccaagcagaataggttttttttttttttcagcattttgcattttttttttaatcattttttggctataaaagaagtggacttcaatagttttcaagaagcaatcaaggaggacgaaaattagagataaaaatcaatgcagaggctttttcaacggggttttcagcattcttttcttctatattttcttctcttttctataattaatatgtgtgaatttgctacaatgaacatgagtagctaaacagtttattagggtttagatggatattgttttgacattgatttttagttttaatatgatttaatttttcctcaatttctatgtattttatttcattcgtacttaattactttaattgcttgatcaccaaataaatgtctatgattatgacgtagatctgagaagtgtgtgtcgattatgctatggtgaaatagaactgaatttcgatatatgatgagagtgcctatggtttaaatagcttatagggtttctgtgtttaatgtctgttacatgtttaatttatcacgagagtgaaaattttgcatctaattgagatttatatatctgagaatactataaattaccttaataaacctgctgttgcataaaaattggtaataagaagataatcatattaagtcataattaatatatacaattgaaatcaaaagtcctaacttttattcattgttaatttgccattaatttacttgtttccttagttttattattcttattattttctagtttaattttatctcaaattttatttagccaaatagaagtaaaagtttaattttaacgtacttaactacaattctcgtgggatcgacctcactctttgtgagtaatacttgttcaaacgatacgtatacatgcgtgttacaattaccacgacacctgcatatataaaactcaaatttattcatacctcattttttcattctcatattatcccttttgcttactcgcatctagcgattctgatcgagccaccaccttaattagcgacaaagaaacctacaccaccacctccttccactcgtcggccctcaactctctccaccgcaccacctattc

SEQ ID NO: 39877 - DNA, 2315 bp, Cannabis sativa
atatatatgagagaggtatctcacgacatggctaaaataagattttgtcaccagctatgaattgttgattccttgtccaacctatactacttcaccaaccacataagtacctctttcactgcctcatcacacttaacttttcattttatcagttatataaatacacaacagattaaatgcgtacatactaataccatgaattttcttaatacaccaaaaatggaattagtaacatttccattactaataacatttgtaaaaagtgtgatgataataatttttagtaacatttggctaaaattatcactttaaaaagaatacttaacatttttattggtatcttttagtgacatttgataaaaaaaatatcactatttttttttttcatattttactttattaacacataaaaaatgttactaaaatatatgaatagtcacgtttataaaaatggcacaaaagactaaatttaataacattttataattagtatttacatattaataaatgaattacgttttagtaaaaagagaaaatagtttttttttaacaaaaaaataaattgaaaaaaaatagttaaccacaaccgttatctttttattttttttttaaaaaatcaaatacgatatgttcaatcccaataaacaaaccctattccttcaaaaaaaaaaaaaaaaaaactaacaaaccctaattctcagttgggttcagcattaattggggttcttttttatttcattttctttaccctaagtttttgtgcaatcttaatatatttctattttccgttgtcgcaagtgttgcgaaggcaggtgggtgaacaggttagcagtctggctgctcacgacaaggttcagaccgtaggcatacaaatgtgtatatcaactagtatttcattgaatagtacatatgttgtgagattgtgattctaagccctataatttggaagggttttgaaagggaaaagttgaattgtggtgaacgcatggttacatttggttgttgcttcttcttttctcttggttgcaacggtttggacaaaagaatgtgatgcgtaagttttagaatactactcgtgttttggggttattttgtgagcttggaatttgaatgtatatattgattatctgttgcattttattgcttctgtatttaatcttattttattttttggtatgacagacacaaagtatgttttacttctatattgatgtaaataattttagtttattcagccattctcatctttctgttttgagaggtacatgctatccattgataataactaagcaagacatatggatacagagtattctcatcaatgtatatagatagttttattctactttattttcaagtttcactacaagaattaatagtatcactaacggcaagaagtcctcactaaaagtgagaatatcactaacgatatttaactgtcatcgataattttttttttttgtaaaattataaattaatgacgattttatatattaatgacgtcattgtcgtcagtaatggtttcattttttacaaaaaaaaaaaaaaaaaagaatgttgaaaaaagcgggagttttccctctaaaagcttcattaaagctcaccctttcatatttcagcttttcatatttaaaccattctcaacttttcttcagtgctcccaaactcgttccacttctccggtgattccgatctcggccgctcattttcgcaacatcctccgttgtcaccggacatatacaagtttgtatctggttgtgctttttttttttttttttgccgtattagttttcatctgtaaaatctgtttcttatttttcctatctcttaatcttataactacccatttgctctctttggttcttcaaagggtttccttatttgttcacagaggtaccgagaatttttttcaaatctattattttttgttttgattcttgttttaagtttagactttcatatggatttttctgctatttcattttaggctaagaaaaataagattgtgaattagatatattgctcatcaataacgtttttaaattgctttttcatcaaaaaaaaaaatcatcaaaaaaaaaaaaactttttaaattgctttattttttttggcagatgagagcttcgcgcatctatctactaacatattaaatttcatttctatttttgtatataattgcttcgaaggtgaagagattttattttaagacaataatatgcatcattaatatgccaccacccaccccactttctaggttgtcaacatagagcatggttttgataattgtccaactatgaaaattaataatattact

SEQ ID NO: 39878 - DNA, 1313 bp, Cannabis sativa
gagtttctagttgtcatcgagcaaaactattatggtattattttggatggttttatattcaactttttagttatcatttctatattgattatattttttttactattatagtgtttaggaaaaaaaatcaaattttcatcttataagcttcttatttttttgatttatatgtcaaaaattattttatctaactttaatttaaattttaaaaatagttttttcgttagttttttataatcttagaaaaaaaatacttttgaagcaagaactaatgggaaaattatgacttaaatagcaagataagttatccatttaggaacatgttagaattttaatagaaattaagtccaatttgtagctttttatattttgttattatactatttattagtttttcagtgattgactttattttgtcagagtctttttgttagatagaggttagaatttagttttgttcatatatttggctttgaaaggagaacaatatcattctaatgataagtacaaaaaaaaaaattgtaatgatatcatgagaacaattcggttaactaaagtagatgcagtagaacttatgtttgaatttttggatatgtttaggtttaagttaagttctcactatgaaatgcataaagaaataagtatataatatatatatttttttttttaatttgaaatacaaatttgaaaacaatgtgaggatttaaacaagaatctggtgtctatgattttttgttattctaaagcttataatttctattttagatttcagtgaacctaggaaacaaaacatagaagtgaatggaaagagtgtgtttagtcagtcctaaatttattgatccatcactaattaagtaactaaaaatattactaaataacttattatgagttattgttttcttaaaaagaaattctaaagaaaccaatatttcgatatttgtcttacttctgttatctatcaattgtaaatgaaactaaattgttgttgtgctatctaagcaaaagaaaaggaatgttgttgttgtgttgtcttttgtttctttttaggcttcaatactgctttattcttgcatgatcgtttgttgtgtccgttttgattgcaatttcaacatctaatttgtaattgcaactcaagtatatttttgtatctgtctttcttagaacggccagcatgtctcttatgctttggtggcaatacaattctttccttaatttcattcggtgtatcccaacttattggatcacctaatggtaatattgtttcactactacaaaaacaccctttagaggcggtttttaagccctttcagcgt

SEQ ID NO: 39879 - DNA, 882 bp, Cannabis sativa
agcaggtctcataattaggagtcttaccctattcctaatgataatagtgccattagtcacctaagtggtgagtgcactaaccagaaagctcaatcttctgagcacaacaatgacgttccacctcgaaatggtcaaacacgttctgacccaaggcctagagattctatgtttactagaatgagccttcatgtcagggtagatctttagactagtttgaactgaagaaaaaaatgctcaagacgaatacatctctcccttgaacactacatggcagaacaaaccaaaccagacagcccaacagggggctagccgaccaacttccagtccacccactagccagctggccgggcaagggctggcaggataaaacttggttgggcaaacgcaagttgaagttgatcatttagtacaagcacaattggattaactcaagaaaatgatacaaggcctttctggcctaaagttttccgacttagagttgtacaggacccgagggccacctttctctactcgcatcaatgtgctgtcattgccaaccaagttcaagatgcgtacttggaggatgtacacaaggaaaaaggatccctcggcttacatcatatagtttgaaatctagatggatttgtaaaatgtagaggctgataccctttgccgaatcttcccagaaaccttgtttgaaactgcacaacagtggtttttcaaacttgtggctgaaaggttcgattcgtagaactctttaacaagagaattctacacacaatttttgtcttccagaaaaatgctttataggctaaaagacttattggaggtcaaacagaggccaggggaacctctgaaagactatctccaaagattcacgactgaagctaccaaggtcaagaa

SEQ ID NO: 39880 - DNA, 1732 bp, Cannabis sativa
aacaaaactatacatgttattaaataaaacacattcaaaatacaataaaattcaaactaatatatacaagatatgtttatagtagggatattagttttgttactagagtaaagaagtttttatagccataataaataataaatctaagagtgataaatagagaagtgtatagtattgattaatatttaggttactgactccagaggcagtgtttgggattaggtaacttttatttggaacttgaggaccaaaggggtagatacagatttgttgttcctttatgtttcgatcgttgtggatactattttggagaacccaaaatgataaagtgcacaattactcttcgagtaacattaaaattgtcattgactctatctctaattatttacagattatgctacttgcttgcttacccgactgtggatatggtgtctcctgcttggtctccccctctagaagattggatcaaaatgaattgcgatgttaaggttagttgtgagtccatgtgcatagcggccttggctacagattactcagggacagttttgtggggtgcagccaagattctcaatttcacagatcctttgattggcgaggcggcgacgtgtcaacttgctttggaaactgctgcttcctggaagcatgattttatcctagttgagagtgattcagaaaaggttattaaagtgattaaatgagtccattccatttggaacattgatgattatatttgtgtttgtaatcaactctctaagaactttttatcttgtaatttttcgtttatcctcaaatgttgtaactttgcggctcacaatattgctagatgggcttttgctcagaatatttcgagtatagtggatccctcctctatacctaacactatcttttgtaatgcaaccgtgagatctaattttctagtatcaatgaacgttttaaatttttttaaaaaaacatatttaggttacattagattatttcttattttagattttttgaaataaatattccttttgaaaattaattatatattatattatgatctcaatcttctttacattcttcttattttggattttttttaagtttctgggtaattttttcaaacagattttagtttatttatttttatttaaaaattttaaaaaatctctccctctctctctctctctatatatatatatatatagtcttcatcattttctctcttacaccatttctttattttctctaggacatatcatcaactaaaattgcccagtaggagtgggtgatataagatgatcatgtaactgttatggtgatttttttttattatttaagattttgcatcaactaaaattgtacaataggagtgggccaacacttattaaattaaagactaattaagatttttctccttgaactttgacatataataaattatgtcatttgaagtttgaatttaacatgtcatcaaaaatttccactgaactattaaaattattagttttaaggatttttgtctaatttcagttaatgtaacaattgtccatatattaaattttgcctctaaactttgatgtctacttaatcatgcattctgaactttaacatgttctaaattgttctctcaaaatttttattcacgttaaactttctttagtaaaattagataaaagttcttaaatccaacaatctcaataattcgagggaaatttttaatgacctgaaaaattcaaaaacataatttagt

SEQ ID NO: 39881 - DNA, 1069 bp, Cannabis sativa
aaagtaactattttttgtagtgtgaatcgaataaggatatactatgggtcaaataggtgaatacagtgtacataaggaaggagaattggagggtctgtgaggtgcctcctaccagtagctggtattagaaacaagtggttcgattcgagtcaaaaataagttgatggaactaaatgcctttccaaaagattcaaaaggtacatatttgattaatgatacttatagatgtctttgccctgagtttttaactatttactggcaagacaaaatgtggaatcgaatgtctataccaaagtatagaatcatattttggcttgtgattttagataagctgagattgagatctagattgttcagatataatatatgtgaagaagaagaatgtcgaatatgtgggctgaacaaagaaataggggagcatttattttttaaatgttacttgagtaatcaggtattggctagcatcaaggcttggataaggtggactactggtgccaatagtgttcaaggtgtgatgagatggatctcaaatgcttaaacaaacaggttcaagcaccaagtattcatagctacattggtggcaaccatatatcatatttggttggacaaataattaagctctatggatcatgaagatatcaataaattttattgtaaaaaaaattaaacttgatgtaaaaagaagagtaaagagtattatatatgcttgataaagtagcaaaaaaaaaaaaatacagaatggtttaaaaatttgtgaagaaattggcaggcctactataattggtgatgctagtgttgtaaaaacttattgtggaatcaatacacttataattggtatacacatacgacaatagtacaatcagatttatatgtctcactttgattaattttttgagtaatatgaaatataaatacttaaatttaattctcgattataaataaataattaagtttaatttttaacagtaataatatctaagttataattctaaatttctttatgtacctaagttaaatatattttttttttactttcgttccgatgaaattaatatatatttttttaata

SEQ ID NO: 39882 - DNA, 1102 bp, Cannabis sativa
taaaagcaatcaaactaaatttaatattaaaattaatagcaaacacctagattaaaattgttcagtttggaaatgttgttagtggctgaaattttcatacaaatatttcattatttacttattgttaaagaaatttgtaatatagtataaaagaagtttaaaagaacttggagaacgattaaaacaagtgaaatcttaaatgattaataatattcattcaaaacataagaaaacaatacacatctaattgatagaatacaagagcagtaattaaaactagcaaattttgagtaacatgccttccttaaccatgtggtacctggtcagaaaattgtgttcctaaacccaaatgatacatgagtaaccaagtaaaactcaaaagctccccgcctttactaggctgctgcgcatgtgtggccgggctgcaattaatggccgcataagacatcaactcaacccacacttgagccatcaactcccactgctgctcctccagatttcgaagctctttcgagagaatgcaggcgtcaaacaacagagatttgctcttggttcccttcacaacagccgctctgtatggcgtttttactaacctcaacttttcacaagcttccttatgatttgaaatcgagtgtttcttaaaaaactttcttgtctctgcctgagtgtcttgtagtactatggagaaatttcccatttcttgggatagcaaagtaggttggacaacaagttgataaaacatgtaatttgaaagaagctgagaaataccaacatactcatttctcttctgctcctcttcactaagattatgatagcaaagctcagtagctaagtgccatagaagaaggctctccaaatattggaattctctaatactccattcaagtttagaatagcttctactatgcggcaaaagggccaaaaggcctctttgtgaacaagcttctttagcaacttttaaatcctttacttttgaagataacatcttaagcttgttgaaaatgaagtcttccttttctttggtgacagtcactaaggaggaagacatcattgctctcattttttcaacggatcctgttaatgtcaacaaaaatctagaaac

SEQ ID NO: 39883 - DNA, 3052 bp, Cannabis sativa
ttatgaccatcaacactttttataagtaactattttctatttattttatgaccatcaacactttttatatgtaaccttatgattaaggatatttttaaatgttactttttaagttatataagattaaatatataattataccaatagcgatatgataacaaagaaagtgttaagtactactgatgttttttagtatttttattattttatttttgttgtttaaaaggtatttgtaacgctctaacaattaggcatgctatgacaaccagcaatacaacctaattcggctaaaccggaatgactagaaagtaagagcggaaaaatttaaactttgattacaatgaaataaaaactagcttgtaatgatttaaactttacaaacatcaaaaaatacaacatgtttcgggatcccataaaacttttcgcaaaatattataagttattttatacgccggcctaagcggcaaattcgagaatacaaaatatatccatagggacccaactcgcttagtctagtctggctcgaacatgtacaatccatcgccaagctcccgcactcatggctgattactaacagatttaccatttcctgcatagtagagcactcgtgaaccaagcccaacaaaacagtaaaatatcaatatacacgataaaacatataacaaatatatcaatgatactgtacttcttgtctatttagcataaaccttcatgttacgctcacacacatatttatgtctgtgtggcatagacatagacccacgtgttactctcacacgtctatttacaataaggtcttagaatagtttatctcggttctgattaccgagtctaacctgattatgcattgcacgcataattcttcatttcaatatatataacatggcatagtgttcaaaatcatctaatcactagagtaataatcctaggccatataactactcactatagggtaataaccctaagtcatataaccgctcactttagggtaataaccataatctcggttctcatttaatcacaatcataatatcaaacatgagcgccaacgcgcttaactttacatgctaactactgtcttacctgatgttacaagtacgtggagattctaaatctgcgggtgctcctgaacaagtgccggtaatcatagtcacagtttttgagattcacaaatagggttaatccctaaatctattttcacataatcatataattggcattcaaatacaaataaacatatagagctcggaacgagctttccaacgatatatggaacatcctgaacggagttcgggttgaaaagttatgaacaaccaaagtttaacaagcaatctgcccaaaaaatatccaggcgggctgcgacactcaccaagcacgtcgcggcttctaggtagaaaaacccagaattcacacgagcgggccatggtgcctgggttaaaaacccagaaatgccaatgcagcaactcgaatttcaagcccaaaacacaccaaactcttaccaaagcatgctcaactcaaataaacatttcaataattccaacccacaatatgagagaactaaaagcaaaaaatcaaactttaacaacatcaatatatacaattcaaccaacaagttgttctcaaaatccatggtatagaactcaaaaatcaagctctaaaaattcataacccaaacctatagcttcaaataaaaattccagaaattaaatcacaacttcactcttaaaaaatcctagatagtctatatgcaaaacacaagtatctacaaactcaatcaaccaagaaatcattattttactccaattcacaccaacatgcatctacatcacaaatgaacatcaaaacacatataacatttcaatatattcagcccttaaactttgaattaaaacattggaataactaggtaagaagcttaccacaatttccaagcttctaagaccaactcacacaaaaccaactctaattcaagctaaattccaagattgataaaattgaagaaagatgagtaaagagaaagagagagaatccgttatggggctgaagaaacgagaaaatacatatcaattctaataaaatctacttttgttgaaaatatggtaaaatggtcaaatgaccatagtgccctccaaggccaaaataagcttacacatgcatcaagggtataattgtcataaattatatacacacacacacaatatttttagattattcctttatcaaataaatgccaaaataaaatcccaaaaatatatttcgggccccgaacccagttcggcctaaaatactttattgtgactctacagcgtcgacttgtcaaataatacctgtagatggacagaacaaatatactatataataatatagtccataagcatgatataacattaaaattacagttttacccttatctggtcataaatacggtattatccctgactcaccaatggggtcttaaaatgtcaccaatcaatataattccatatattaaattatataataatataattatatattaatacacatttaactagttagggtttgctaatccgatttcttaaccttaaggtattacaatattagtcaaggattaatttgggttgttgacctcacttttagtcaatgacagttagtcaagttaaaacgattagataaagtaaataatagaaagcaaaaaacaataagtaaatagaataccagaatttctagaggttcggcccgtgataatggtaatatcctactctcttttagttgtattgacttgagtgataaagaatgaaagattctctctcaaactaaaactcattattttttttttaaataatcctaaacaccactttcgtaaggcccaaaacttagaggaaattacattgtatacccattatactttacttattttaatttttatcttaatttttatatttttttagatatacccacttttatggataatgtccccagtagacctcttaggttatgtaaattataagctatacttaagtagagagtgagggtatattaagcaatccactaaaaaaagtgggtatatttt

SEQ ID NO: 39884 - DNA, 2187 bp, Cannabis sativa
ctggtgcccaatagcaatgctcttctctacattttgggagctacaaaagcattagaccaaaacatgaacgcacttttaatttaagaatgtaaatagggcaaatcagtcctaatcctgaaaagactcgccaaccccataaaaggtatagagggggtagtaaggcctaagcctaacacggacgaaccaggtccggccaaataacttatggtgctaaaaatcaagttcaaaataagtagtcactcacgtataaaaacaaaaacagacacatgaaattgatagtttaaatcctgtttggaaactataaatgattcaaaaaaattgaaaataagcaaaataattgtggtaactaaatgtatgctgtcatatatcaaaagtcagattgccgcccccaaacctctgcttaaactcagcaatgatcagtaccactgaacaagctcttccgagtcaaactgtggccttggccgagcacccacgttgtcctcccacttcaacgactttctccattgttgctaacactaaaagcataaactgagaaagaatgaagcaaagcaaagagtgtcatttcccgttaaggctagtgagatagtactcctgctactacttctactccaacccatcttaacagtttttttttttgcaccattttcttcagcattaacagacctgccagaatattggtccttgtttgacttcttcaaatcttgttggctgtcttttttctttttcattaacatcaaaaagcattgaaggaaaagaccaagataaatctttttcattaactgtttgaaagagagaagaagaggaagaaagattccaggttatcctgtttagattatagaaaaaggttgggttgggccggtccaaggaaaaaaaggggattccagcacgcccccgctcaaacgttttttttttttttttgctataactaactttcatttcttgtgcttctgttcacataatccaggtattcctgcaaaaataataacatgcttattaaatcattgactagaatattctaaagacttagaaactcactgaaattacacatgaaaatagtagaatctcatagaactatgtaagaaaaaaacaaagaatacctgtagaatgttaactgcagcgaacttatcaacaaatatctttgaatgaacaggatgcaaattcaaaggctttagcagcatttccacagtctgtaagcaaaaggttaccaagttaagaaatgggagtgcgatctaatgagtggtttagccaaaaacaaatccaaaaacagttgtttcaaacctttgaggtaaggtgctcatcccagtatgtatatttgataccggtaagtttgtttgtattacatagttcatctatgaagagcttcactagcacagactaaggttatgaaaaagatgcagttagtataaaagagataaacattataattaatgtaattaacgctatgaaaacacacctcagtagtactctttcgtctatctaaaggaaaacccacaacaaatccttccaaagaaagttcagatatctaatgtcacaatataaaaaccacttttttaacattctcaaacaaacaaagactacattggcagtaaaataaagaatttatatatatatatatatataaatataaataaaaatattgcaagtatgaaagactaaccagacacttcaaatcatcagccattaactcaatattggactttttcctgagtagaacactgcaacaataagtaatgagcaaaacccacatccttaaaccatgtgaaaatttcaaaaagccaggaacttgaagcagttagtcccttctaataataaaaacttccaggttaccttaaaggtgaagcaatcttattgttaatgtcagaaacagccaagccaatgtacttactaccaacatctaaaccgagcaagcgcccacgttcaagtccattagtcttaagcaagtcttggaataagctcaagggtttcacgtacctcatctatggggcttcttaagattaaagataaacaaaaaaatgggtctgtatgccttaaagcaaaggtgaatatgtagtatgagcatgtaaaattgaaactagtctgtacgcctacaaagcaaatctgaaaaagcaaccccatcacatggttaagcaaatgtcatagattaaaactagcaacaagcaacaatgtcttaaaatgatgtcaaaaagc

SEQ ID NO: 39885 - DNA, 2504 bp, Cannabis sativa
aaactaaaaatggtttcttttttaatttttcttttttaattttttaaaattatttttttaaaattattaatttaaaattattaataataataataataataaactaaaactcgcatactaatcaaaatatagttaaaagcatattctactgaatacatctttataatttacttttcttagagaagaaaatctaaataattttctctaattatgaactgaaaaagagtgaaagaacatattttctttctagtcttttattttctctgaattttttttttctaattaataataatcaaaaaatgatgtaacaatcgtaataatagcaatattattattattaagaccgctcacgcgcggttatattctctactatatatataaccaatatttggtgactcttaatttttttgagatacatagactaaagaggaaaacaaatacgagaatgtcattgatgattgacgctgtagtcatttagatttgacgatttgatgtaggaaaaggagaaagaaagaaagtgtctctattagtctattggattccactaatatagtgcggtcaaatcattaattcctataatattaccatatatatatacatatcaagatttgattgttgaaatccaatccaattatcctcttaattgtccaccatccaccattggaggaagaggtttctccacctttatggcaatgactgttgtctaaatccaacgataaagaaagaagcacccatttgatcgaaggctcagctctgatcaccgaatcccaaggaacgtgttctcgttctcggtggaaatgggttctcgatttcaatatctgttcttgtagggggatgataaatgtccaaaggtggtgttgggcggaaaagaatatctgctcttgtgtgaatgcttgtacaattataaaaaggtttaataatatgacaaaagttttagatgaagaataatatgacaaaagttgtgaccctccaacacaaattcccactattttattattatttttattaataaatatttatacaaaagcatacatgttttgtcttttcctttcttttgggtttacaattacatcaacattaatgttctcatccttcaccattgcttttctctgactccataggtacgctctttcatttcttttcctaattgacttcttttcttcagaatccatttacgattgttcaaaatttcctggtctcgattttctctaatttatcatgggtaaaactaattgtgtagatgatttttcgggcttgagtttgattctgtcatatgtttgggttttagaatgttttgtattgtagtgcctattgtacctgaatttgctccagtgtattaccaacttagattcttgggggttgcttttgtcatgtattttattttcactctggttgaattaggattggttgatatgattggataatcatgtgcttttggttttagaggtcaacctttcataacttaatgtataggtgagacaatatgagaaaaatgtacaattgggagtggattaaagtttggagatgattgctagtgagttaggataagtttggattgagattactaactactcaggtgggtttagtttattttgttatggtgtcaactctgctttcttttgtttcagttgaactataaatatggaagcagaggaggaagtttctattttaagtgcagatgatccccgacaggaaattgagctgacaatagcctctgaaaagatcaatcttcttcctacaccagctcagctctcttgcacctgtgtttgtgccttctccaaacaagagcataagagcttggattcagaagaaagaacaaaatcagcaactaaactttgtggactcatattattctatctgttagttatgatagtagagattgttggaggtttgaaagccaatagcctagcagtaattacagatgcaggccacttgctcactgatatagttggattctccatttctctattctcagtttgggcttcaggttggaaaccaacaccgcagcagtcatttggttatcaccgtctcgaaattcttggtgctcttgtctctgtgcagctcatatggttgatctcaggtttcttaatatatgaagctgttagcaggattctccacaaaattaacagtgtcaatggaattctcatgttcggcgtagcagcatttggattcgtggttaattttgttatggtcatttggcttggtggtcaccaccacaatcatagtcatcattcatgtcctcactctcaccatgatcatgagcactctcatgaaaaggaggaaatatgtgctagtacagcagagaagaccagaacaatgaacataaatgttcaaggtgcttacttgcatgtcatggtggatatgattcagtctgttggggtgatgattgctggtgccataatttgggctaaaccagattggttagtggtagacttgatctgcacattcattttctctattatttctctaagcactaccatatccatgctcagaaatatttatgg

SEQ ID NO: 39886 - DNA, 1649 bp, Cannabis sativa
acccttttgatacctataacataattggtcacttaattttgtatcacactttataatagcatatatattatacatatgtgcccacgatataatttttaatccaacacagtattgctccccctagaccatcacgtgggacatcaagtcgagtactaaaatttaaagcttgacgaaaatgagaaataacatcagaactaagtttagtttcaataataaatagtacatgaggagatcgctcattgacaagcaaacgaaggtgttggaatgcgctaggattccccaagcctcgcgcattctaactaataattttcatggcgagttgcagggcttgaaaccagcctccacatctttgtcataagagccagattaatccacttctgtattggaaacgaaatggttctgttcatcttcaatagacaaaggagaagagaacaaatgtggttgtagcgccctgcatcttttgagggtctttcttaaagaaatttcttcattgagtcttttgttgtagcgattaggtgacttgttctctttatcttcattcagacagtagtagtatgcatgattgaatcagtggaaacaacaatgggttgatcggtaggcctattcacaaaactagtttccattgggtgcatatagggtggattgggtaggaatgttgtaatgatacttggcaaggaaccaagatctagtatgtaaatattggataaatcagattttttttgtctagtggttgtggtggttgatgagggagattgtcttgattttggtgtctcaattcccatggtttttggagcaaaattagtcaatttgctggtgcaaaaataaccttaatagattgtgcaggtactgaaatggaagtagagatttcttgagcaatttgacatatcttattggtagattgatgagaaattgtgcctccatttctaataacattactatgtgtatgttgatctatagagcattggggttgttgtgaagattctccttgtaaaagatactgtggaaatggtgttcttctattcagaagttgtgcaatcgctacagttaatgaacttcaggccatacgtgtgaggagtggccaagcattttctttggaaaaatcgattatgtatctgtcatagccattcataggaagggccgagcctttcaattttgaccaaaaggcaattctggttcaattctgttattaatttttttccatccactccaaacatttttgaaatggatgactaagatgcccacatttcatacaccattcgggtagcctttcataatgaaactcaacccgaaattcttccctaactttcaaaagttcgatcatacgaccccttaacaaaggcttcgtcacacccaatttaactttgattctcagaaaagggccccaaccttcttcaagtgaatcttcatgcatttcaagaaattcacctatgatatctccaagtgctttagccaaagcattagacttactaaaaaaaacaaagcctataacattggactcaaaaaagggactaaatgagatctgcagttgagacattctgcagagcacgtggcatgtataacacaatatgatgattttgaaaatgaaaaggctccctaaggagcactctgttgggttttatgccctaaataaaactttttacaatctgatt

SEQ ID NO: 39887 - DNA, 5687 bp, Cannabis sativa
  modified_base (160)..(165): a, c, t, g, unknown or other
  modified_base (5611)..(5614): a, c, t, g, unknown or other
atagtcctccctcgcgtgaacgcaaaccgtgatagactgtcgaatgtttgtgctcttcgcacgtcaaaacctctccgtgcctaagattagagctgatcacttaaacctttaatgcctcaacttttgtattttatatatttttacagtatatatatacttnnnnnncttttcacaaattaataaaaagtaaaaaatttggataatttttaaataaataaattgatttgttagctaatcactctcactttgttgtatttatttttattaaataatataaattagtcgtgataggcttcatgattttttttacctttctaaacatttttggaacttctttttaagaagggaattttatataaccgaactgttttagtttatgaggaaggtaatattttcttttctatttgtgatttttttaataatttttaacttaatatatggaaggattttgataagattaactaaatagattcaagaatttaacatagttggaccatagcagagcaagtactattttcaatgcatgcgcactgtttattcatttgtggactttcaaggatgagtaaaactttagttgaaacaaaacttggttaaaagcttagctattggaagtaatgccattagaaatgcctaatgttgactagatttttagccaaccgatgtggagtcgtaataaatgactacttcatccatatccccaaaacggggatcaaggccttcgaccctgttttgggcgagtcctcattgttgagagctactcgttgtagctttgagggatttggatgctttctccctagttatggataggttgtaacactcgcatgctactagttgattacccttctggtagccaatgccacccttggtagggaatttgacgaggaggtgaatgatggaagtgatcgccttaagatcatacaaagttggacaactaattaaggcgttgtagggtgatactatatccaataccacgaataatgccatgacactgacactcttaggggttgttcctatcgtcaatggtagcttaatgagcccaactagtgccataccatttcctatgaatccgtatatgagatgttcacagggttctaaatcctttgcccccaaacccatcctctccaatgaagacttaaagatgatagtggctgacaacccataatcgatcattgttcttgctacaatcaaattggcgatttgtacttctaccactaaggggtcattgtgtgggtatcgaacgtgtttggtgttatcctcagagaatgtgattgactcatgctcatatcgaggttgtttgggagctcgctcctggactgctaacacatcgtcacccggctcgtgcctcagagactaagcatatttctcttaggatttctcggagtcccgggtaaatgaggtcctccagatataacgtctaagcggccgtcaatggggggaggtaacagtttttggtcatccccagctatctgttgttgctgtcgtggggttcggtcgttgtcacgacgtacatatcttttcaaatgggggttgttttttctaatgaggaactctatcacatccttcagattgtactcgtcagtgtcatgaccataatcattgtggcatcgcaaaacttgttcatgtcccatttgctaatatcctttctcatatgataaggcttatgatatggcaccactgagtgagttgcattgtagatgttttctctagtgtctaggaggatgatgtaggtagtgaaatttggggttggatcttgtctggctagctcaggggtattctctggtcgcttgttgtcgttgttgtaaccgccattaccgttattccccctcttgccattgttggagccattcttactattaactccttgagagctttgactattcgagctgattccgttctttttattcttagcgtggttaaagccttgagcatttcgctcggcttcttccaatttaatgaactcatcagccctgtcaaggaaatatctcatagtatgagttggtttctaccttgtatctttccacatctgacttcccacaagaatgcccccatgatagcggcctgtttaccatcatcacttagatttttcactttggttgcttcctgcataaagcattaaatgtagtctttcagcggctcatcgagcttcttcttgatggagactatgtcacccaactctgttggaaaatcgtcaggctgaagagaattgggtatagaataacccttcaaactcatcccaagaagtgatcctccctaggggtagtttggtaaaccattattgtgccgtgtccgtgagggttgcgagaaggattcgacatctcaggtcatccctgatcccttgaaggtccatttagatcttaaagttcttaacacgagttagggggtctttactacctgtgtacttgcaagtaggcattttgaattttgctggaatgaggaggtcattgatcatttgagagaaagaagaccctctcctcatttctagttctaagtcagtgagtttcggtgcagtaaggtctttgaccaatcgggttaacttatccaaacaagcctggatcaccaaatttgtggccgcatggggttgaaccactttaacgtcagcattcgcttggtttctttgaacaagaccaggtggatttactatgtttaaattgcggttgtccctattcctgttgagggcatcccgaaggtctccaccccctggtgggcctacacgttcaaagattgacacggtatttggccttcctcctgcattgtgactatcagcccttccatcgaccatgggtggtacttggccatctctacccctttaaggcggattgttaggttgacgttacctattaagggcatacaaccatctggcttggtaaccctccagctcaggatttggttggttgttgcctcgacttttagcttcatcatcgccatgaccattggggtagtttggacgataatcattattgactttggggtcttcccttctcccccgaggcctactatttctcaggcgatcgttgccttctcgtggttggtcacggggtttccactccctatgttagggtgtccttccaccgtttctactgcggtcaccttgttgtttatggagtttccttctccgctctgccttagacggacattatgggagtcatcacgtcctatataataattgggtaggacttgttcacctgtagggagcggtcgattattgttgcaggggactttattgaaggggtgacttctagccctctcttggttccttggacgctcttcaggtccatagaccaccctctcccgttggtttctcgaggtagggacttcctatggataggttcggtggtcttgaggtatctattggttgtgggcgtcaatacccaacccttgagtgttttggtcaaaggaagttcgaattaagttggccgcctcttgggtgtgacagtcttggtcatcttggccctccttatttcacgagcatgatctactaggcaagattagaattctcttctttggttagcaagactttcggtcaaggctgcttgagcttgagtttattcttggtgcacagtttgaactggccttgcattcggcctatcacatctcgtaactgatgcatctcagggtcaattccttcaatatccacttggagttcactccgcggcctaaagacgacagggcctggaccagttttagctgggcccgtgccatcagtaggtgggagaagatttccagtattaccccttccagtggcactgtcagtagcgccgcctcctgcggttgtggcgttcgtggtacacccatcaagtttttgcccagcggcaataatttggccagttgtcccatgaccagcagcagtctgagcagtggtgtgggtgatggctacaccactgttcccctaacgcgggggtcattctccattatttttgacgggattgcttgctgatggaacttgctgggcattatctatcacctcatcaggtcgttcttgagagcttcgggttaacaccgattttggttaaaactattaatgaaagcaccaaaatattgactaaattttttgccaaccgacgcagagtcgtaataaatgagatttagaccaaaattgtaacaaaaaatgtaccgaaagataccagaatttaaagaggtttgatcccagatatcagtaatagcctactctcctcgtattttattgatcaaggttgcaaaagtcaagaacatgctcttgattgcaaagaataaaaaaagtgtttgttttttttaagtgctcaaaatcgcgaattcctttcccaggtcgcgggtgaccccttatataggagaaagggtcgttgcttctcgcttcaagagagaccaatgtggagcttcctcaaccattccttgatttttggaggtagttgaagtttgatttctatgataatatcccactattttcgtgagttgataactgtttttgagcttttcgtgggatttgaacatttgaaatagtcaatgacgacgagggcctcctaagggtgtgacacgatcattgaccaccttcgaggatcaaagcccatacttaggggcgacacccccgagacccagcttgtggagggtgaccattgtcatcttggggtgaccccccaagatcccttgtactttgttagtactcatagtattatgtagatgttttcatctacctttgaaagtatccttacgtctatggtggaggtagtgtcatctaccccttagactaacttagcatgtaggtgtgtggtgattgttcattctgtttacgaaggtgttagtctatcgtttttctttcttggagacgcccaccttactcaagctaggggtaagggtgaccgtctgactttcattctgacagtcatgaccacccagcagtgataaaaaaaagagataatggtcaaagaaaaaaagagaagatggaaaatatattattttattaatttattaaattattatttatgtctaacattttaaatatttattattacattcaattatttattatcgttaaatctattatcaatagttataaagacattctaatcataaagacaaaataataatttttaccatagacatattttatatatatgccggtatttagtagtttgtttatacatattcaaataattaattaactaatgcatgttctctagtatacaaaatgcttcggggagttgaaaataagcagagatatggagattctcgaataggttaaccttttgaactgcggctgaatccatggggaggcaagagacaacctggccatctagtagccagaggaaaagaaagcaaaagtgattcccgtagtagtggcgagcgaaatgggagcaacctaaaccgcaaaaatgggattgtgggagagcaatacaagcgtcgtgcatgctgctaggcgaagtggtgaagtgctgcacactagatgacaagagtccagtagccgaaagtatcactagcttatgttctgacccgagtagcatgggacacgtggaatgccgtatgaataaccaaggaccaccttgcaaggctaaatacttctaggtgaccgatagtgaagtagtaccgtgagggaaggttgaaaagaacccccatcaaggagtgaaatagaacatgaaaccgnnnnctcccaagcagtgggaggagcccaaggctctgaccgcgttgttgaagaatgagctggcgactcataggcagtg

SEQ ID NO: 39888 - DNA, 2979 bp, Cannabis sativa
  modified_base (27)..(32): a, c, t, g, unknown or other
  modified_base (2871)..(2882): a, c, t, g, unknown or other
aaaatagattacattgaaatggagttnnnnnnagggcataaaacctaacaaaagctgagatacatgtccataaggatgtatccaattgggcccgacccattttacctttatggaggatcccactaatgggtcttgggtgctgacatgggatccacgtgtcaaatgtatgaaacgcagataacatttatcccctaagcttcaagaatgctatgtatggtgggagcttgcattacacttccaatttgtacatgtgaaaaataaaatcatgacattttgaatgctactcaaccggggaaggtggcttccatctgtgatgatgatatgtccacgtgttagtcacatgcgagtagcagggcacaaccattgaggagtcatcttctagaaatagctaaatttttgacaaatgttcatttttggctcgaaaatcaaaaaagagcattttcatcattgatctacgtggttgttctggggaacattaattacgaggatacacaaagattgttggactcgccgaccattggatgaagacttgtgattctggaagtaggatcgtggaccatccgtctctttttcacgtggatgaatttttgggtataaatacccttgaaacttccagttaccacttttccccacttttcaaatatacaacccttcaaagcttttaactctctctaccctttccaaaaccaagaactaaactcaaaataaagttctcttcttcaatctagaaaatattatggattttttccttcatctgctgcaaaggattaggacacagaagttcccacatcatccaccccccgtgatttagaattttacagtaggagaaattgtgagcctaaatttcaatacagaaattgattcgttgatcgcttcagcatctcgtctttgcaaagggtgcgataaacttccccaaacagacctagcaacgataagcttaacatcttctctatcaatatcaggtatgttgtttcttcatctatgattgtgttttctgatttcgtcgatacgaattttattttcatgttcagttctgagatgcaattagggctttttatttgtgcgattgccatcttaagtggatttgagcaccacgagtagtttattttttgaatttcctttttagaaatttgtggaatttgttgatttgcagcagaattgttggcaaaattttcctttcgcccaaaatccttctagttttggggatttccattaatttctatagtcttgtttctaggtagtcaatctagttgggacctctctaagcagtttatgggggaagacccttagctccctttctatgctaggtagtcagggtggctaactaattgagttttcttgttttgtacagaaactatgtccatgtagaatcattgaaaggaatctaatttagaggaggaggtaatggagcaagaaaatactccaaatttaatcctgaatgacagtccatgggaaatgtattaggacgtcaacaagttcgggaattacaacaacctaaggaaatacttgacccttcgagggcttgaaagtgttctagggctattctggaatagactcttcgttcttagggagaggcctagcaagtgcgcagaaggaggcttcagtgtctggagctgggctcatatatctgcctttgaggtgcttttttttctaacttctacatcttggctaggatagcacattttcaactcattccccaggcataccgcttgttgttagggtggtacgtcttttgtgttcaacacgacaagtatatgccaatgctggaggggatcttatacttttacaagatcaagtctcagcccatgagaggccacaaggagaaggtgggcttctataggccgctataccaggagtattccttgccctaccagctctatgaagtacacgcacgactttagagactattacttttacacctctggcttcccactaaaaagtgttcctacccttagtttagagttcaacattacgagtaagtattgttcttttctctagactttagaattctacttttcttcatgcttgatgtatattgatgcctttgttcacatctactagactgccttccccaattgcctttaactccagagttggaagagagggtaactttttacaaatccttctcatccaaagagttgcaaatagagaggatagttaccaccaagaacctcaaggaggtaggcctcattgttccacacatggacgtgagaataatttcgcactccaaatagagttttcgaaaaagaaccctaaactcaaacaatctttttttatgaaccctaatttcgaatttcgaatcacaattctaagtatggctctgataccatgtagagaatagtgaatcgaattatgtattttatttcatagaatattatgtttatatacaatgctaggagactaaatgagaaactactaaatacaagttaccctaatttctttacaactaatattctaacaaagttataatattgtcattaactttttaagttataacattcttgttagttctttttttttttgaaatatttttattattggcgtgataatttttttatgagtttgtacttaaaaatgttattatacactatatattagagtaatttctaaaaagttgtactaaaaaaatcctaagaacttgtacaaatttaaactaattacttactatgtacataattatatatattattatttattataaaataaataatatataagtaaaatctttaattttttttttaaaaaaaatagtgactacgagaagaatcgaaccttgtatctcattattaataggctaatttggatttttgtcccctaaactttgacatgtgaggtcgttaaaaatgactcttgaactattgagattgttannnnnnnnnnnntttgtccaattttagtaaaaaagtctaacattgatgaaagttcagcgggcatgatttagtaaatatcaaaattcgagaggcatgatttggtagacat

SEQ ID NO: 39889 - DNA, 1886 bp, Cannabis sativa
cccttccactacgacaaggtaccgtgacttttgtctaagaatactaaatgcattctaaatggtgtgcatcatatattttggaggttccccacctttcaccatccaatacataccctgcaactcagggattgggccaattgtatcctctcattgccaacctcaagatggaatatttgcaagttggcaacgagagagaacttcattatgtatggcctctacccttccacgggcaaacctcaaggttcaattgataagatttctctaaagaagaaatcaaaaatcaaaaggaaagaaccagagattgaagctccccttgagtgaggcccttattctaattaggcctcaagagtcagagtctaacaggactgtccgcctagcagttgttgatggcaagggtaaggcatttttaatgaggaaagtgaagattcttcttcagatgatgattgtattacgtagagccctccctagaatgatacttatgggcaggccaagggtaaaacttctttactttctaccttttgaagttagtgtctgaactctggcctggggtattttccttcttgatcttagttagaggaaggttatcgcattcctgtgtaattgtttggtttcatgtgatacatcccactcaactttttgttgggaacttcacgcacaaatgaaatattgatgtaacaacttttaggtcatatagagacggtcggcctaacatgacattgaaagctgaagggacatcaataatcggaattgggccattacagtttcgctcctcggagcttctccaacagtaaacaataggcagattagtccaaggggtgcaatactttggccaaagaaaccatatacgagttgagtgcaagggattaagtcttgaacttggagtcccatcttctcataagttgttttaaacagaatgttcaaggaagctctattgtctataatagttcgtgccaccatcttgtttgcaatttgcaattccaaggccaggaggtcgttgtgtgggaagatgatgtggttggcatctactttagtgaatattattgttggctcccttacacgtggtagtttaggtttcctttcttccacaaccaagattgcttcattttgttcatactgcaaggcttaggtataattttctctagctttgcctgagtctctagcaagatacagacccccaatgattacctgtaaatgctcgtccactagtgggggcatcaattggttctggtattgtttgcttgggcggccattagattttggtcaaccttgacatacttctataaatgtgggatatttttgctaattaaaaactaaatttctcgctttatattattacattcgtttgtgtcgtggcggtaatctacatgaaagcggcaaaactttgttgtatctcttttgcttacatcctttttcatgggagatgggctcttgtacgacaccatagactgagttgctgcatagattgtctctatgttctttattatgacaacgaaagcagtacatttagaggcattttctcaagggtgttgcttggcattgccgttgaattttcctttctttccattacccttcctgttgttgttgttagacctcttcccatttaaattcaaactgttgggatattacggattccgtaaggacatccatgcggtcgtggtgcgttgttgatttttcttttgcccaacaatatccacgtgtcaaatagcttcttcgagctcaatgaacccatctactcgatctagaaattcagccattgatcccacaattagccttttaatatatttcaacaactctctgagaggctcaatggcccatagtattgcaactagtcttccttcttcaatcagccccttaacctttgtggcttcgatcataaacctgctaat

SEQ ID NO: 39890 - DNA, 2085 bp, Cannabis sativa
  modified_base (1790)..(1792): a, c, t, g, unknown or other
  modified_base (2047)..(2059): a, c, t, g, unknown or other
cagttagtggatgccaacttactaggacagtatgtcattcatggatgcatattcaggatataatcagattaaaatgcatgtcattgatcaagagtttacaagcttcataaccaaaatgggactttattgttataaagtcatgccttttggtttgaagaacgttggggcaacgtatcaacgactagaaaatgaaatgttttcaaaacagataggaagaaacatggaggtctacgctgatgatatgttggtaaagttgataaaaagtggagaccacacaaaagacctcgcagagtgctttgagatactaagaaagtacaatatgaaacttaacctaaaaaaatgttcctttgaagtctcctcaagaaactttttgggatttatagtcaacgcgaggggcattgaagcaaaccctgaaaaaatcaaggctttgatagaaatgtcaccaccaacaaagccgaaggaagttcaggccttaacaggaagaatggaagcccttaacagattcacctcgaaatcaactaataagtgcctgcctttcttcaatatactgcaaggcaacaaaaagtttgaatgaacagtcgagtgcgaggaagccttcacacacattaagaaacatctgtcaacccctctagtcttggctaaaccaatagctggggagactttacttatttacttagctatctcgaagaatgcgataagtgcagcattagtgcgagaagaggggaagcaccagcaaccggtttactatgttagtaaaaggttattgggggaacaattgagatatccacctcttgaaaaactttccctatgcctaattcatgcatctcgaaaattaaggccctacttccaagcacatccgataaaggtgttaactgatcaacccctgagaaaagttttgtcaataccagatgcttctggaagattgataaaatggtcaattgaactgggcgagtttgacataacttatcacccaagaacatccatcaagggccaagctttggcaaatttcctgatagaagggataacttcagatgaaaatccacttgtttggagagatgcgaatacttggaagttgtacgtagacgaagcatccaatgaacatggctcgagtgcaggggtgatactaatttttccagaaggctttaagtttcactatgccttaagatttcaattcgacacttcaaataacgaggctgagtatgaagccttgatcgctggtttaaagatagccgaactgttaaaggtcaaaaattttatatgccatagtgattcgcaattaattgtaaatcaagttttaggcaaatacaaggcaaatggcttgaaaatggaaaaatagaaagttcggaagaacttggaaaagttagattatttcaaaattgaacaaattccaagagaaaaaaaactctaatgctcacgccttagcaaaattggcctcgcagaacgaacttaatgaattgaacttggtacccgtggaagtgttaaacgcgccaagtatatgtgaaaaggaagaagttaagatgatagacagctcgcccacttggatgtcacccatagtcaattatcttctcaacgggcaacttccagctgacaaaaatgaggcacaaaaacacttgtattcaacgcctcgctacatgatagtagaaggcaaattgtatcgaaggggctattaagtgcctttcttacaatttgttctccccacagaagcaaacgagattatcaaagaaatccatgaaggattttgtggagaccgtgtaggttggcaaagcttgtcaaagaaaataattcgacannnatactattggccaactataaataaggatacacacaaatttgtcaaaaattgcaataagtgtcaaaggttttcacatatacctcgcgtaccaccaacagaactaagaatgatgacctcagcgtacccatttgtaatacggggaatcgatttgattggggcactccccacagggcaaggaagagcaaagtacgtagttgtggctatcgatttcttcacaaagtagacagaggctgtgttggaaatattttaccaggnnnnnnnnnnnnnaccaagtatgtttgattaacatccta

SEQ ID NO: 39891 - DNA, 4177 bp, Cannabis sativa
taagaggaaggtgtcctctccgtctgtggctgaactggaagcttttcattggggctgctgcagaattttgcagtcggagtggaggaatgtctctattttctttgactgccagtcggtggtgaagggcttggctgctggtttctcgccggagtggaaagctcggggactgtttgatgccacccgtaacctcctcaatctgcttccgaggtgtcatttccataggatcccccgtcggttgaattccggagtgcataaccttgctgcttgggctgcttctaatagcagttacaagctgttttcttcaagggaagtggcaccctttgttgccactatgaaccttggctgttaggcctttgttttttaataaagctttgtttttcatcaaaaaaaaaaaaaaaagccaaattctttcgttgagaaaagtaaaagtatttgaataatatataatcacaattactttccacagtgatgacattactgtaattgtgaataacaatatgttttagatttataaaaaaatgtatattaaaccataatcattaaaatcacatgttaacttaaatgacttttaatcttctattgataacaaataaaatcatattaaaatgagttttatttagagcataaaatcccaataagtttaccattcgtatacaacataaaaaggcgagaaagagatagagaaggaaaccgagaaagaaagaaagaaagagattgtttgaaaataaatgagaaaggtatttgggtatagtgggaaccaatagcattatttgataatgaatttaagtttggaaatttttttgttttgtggtagcttcttaagcatgcaaagtcaaatttctcttttaaaaaggcttaatttaaaattttcaaaagtgtaggggtggatctgcaaagtcaattagttaataagcacttatcattctgtcccttgaatggttatttattaattcacaatcttttacacccaactattttcattttgaccatggttattcattttccttttttactctatccactatacaaaatatttactaacccaaaccgaattaaaatcagaataattacttttaatctaaaaattaacttattgcatttcaataaaaaatttgactagctttattggattattatttattacttcaaccataataataataataataataatattaatatgagtaatttaaattctcatctcctttttttgaaagagtaaagaagagtgtcttcctattgtcaccgtcccgttccgaccgttcaaaccatcctcgattagccgacaaagctcacagaaccaaaagaagaacattcaattataatattatctatttaatttaattatttaattatttatttccaaaattaaattattatttaaacccctaaatattctccctttcatatatttaattaattaaataaaaattaaattaaaataaaataaatccttcaaagaccattacactcctctctctctctctctttctactaatctctatacagagtatcagagccgttaccgtacacttcactgtttttctacggttctttcttctcttcttcagcttcattttcttcttctcttttttgttaaaaaaatatatttttgggttatttatcgctcagatttgggtttgggagctttgtggagttctgtgtagtgttctctgagggttagggtttccgcattatgatgtgaaaccctagccggggtgggggtttggttgggttagggtttttgtaagatctggagtaaggggaaagaagggggagggcaatggggaattgttgcagatctccggcggccgttgccagagaagatgtgaaatcgagtttttccggtcaagatcatggacggagggactcgaatgctgtgaagaaggcgcctgttactgtgttgactggggttccgaaggagaatattgaggagaagtatttggtggatcgggagcttggtcgtggtgagtttggggttacttatctctgtattgaacgacagacgagggagttacttgcttgtaagagtatttcgaagcggaagttgaggactgcggtggacattgacgatgtgaggagggaagttgctataatgaagcatttgccgaagaattctagtattgtgaccttgaaggaggcttgtgaagacgataatgcggttcatttggttatggagttgtgtgagggtggtgagcttttcgatcggattgtcgctaggggccattatacggagcgagcggctgcggcggtgacaaggacgattgtggaggttgttcagctctgtcataaacatggggtgatccatagggacttgaagccagagaactttttgttcgcgaacaagaaggagaattctcctttgaaggctattgattttgggttgtccatatttttcaaaccaggtaataaaacacttctttttctattattattctgaaaaatatgaactttgatctcaatgtttatgcttagttgtcgtactttactaatttcggtaactagtaactacatatgagtattgaaataagtttcaagtgttgctaaatttagaaaattgagagaagggacaagagggatttatttgaggttgagcttaatgcttatggcctacttttaatcgttttattatggtttgttgtatgctttaatatctctgtatgttcattaactgtaatccagttgccactaatgtttctagttgcatttcttaaactcttgttagcatacataaatgtaatacagtctcattgatcagttgtttaaactgcgtcaacatatgattttccacatctttggcctctgcattttttgtttaatttctttgttcagtggcttcagatcagatttatattcattaaattgaaacaagctatttggttccatattttgtgaaataaatatgtgattaaaattaatgttgtcattatttgttagtgaaacaatgcatgtcccatttcttagtaaaagagtttaggttttctttacctgctagggggaaagtcgttgttgtataatttattgttttgatacgcagtactctatacaggtgcttgtttcattcatttcttatcaacttctctcatcatcttagaatcttgtttcatttttccctgtcatgaatattcagatcataattgtataacttgatatcctcactggtcatgttctgtattttgacttcttctattccctgctaatttaatttccctttggaacatgcataatggaaatgaataattccatgtgacttagtttatctacacacttcaattttttttttggaataccagcttcatctttatctttcctttctcctttcgcttatcttatgtttgaatcttttcaactttaagtgacaaaaaaaaaaaaatcagttcacaagggagtgctgtttaaatgacctttggtgtgaaatcatttagtgaattacttttcctcaaaactattgctttattgtgctttttgtgacttgttttgcgatgctcttttattgtaattcttaagggtaaggcactaactttttcaagtttctaggtgagaagttctctgagattgttggcagtccatattatatggctccagaggtgctgaagcggaattatggaccagaaattgatatatggagtgcaggagttatcctctatattttgttatgtggtgttcctcctttttgggctggtaaatttatccccccagttagtttttaatcttggttgtttgtctgtttgaaaactttagcatttgttagcttgatatcttaattttactcagtatgttttcttagtccaaatttattttattttttttctgttactgtagatgggtgtttccatgacttaattgtgctcctaatgcagagtctgaacaaggtgttgcacaggcaattcttcgtggcctaatagattttaaacgtgatccgtggcccaatatctcagaaagtgccaagagtttagtcaggcagatgttggagccagaccctaaggcaagactaactgcaaaacaagttcttggtattgtctctcttatctcatgatcatctgccttactgtgttaaacaatctcttatgaaataggctgttattatttattctgtatcattatcatatatttgataggggcaggggaatgtgtcttatactggcttataggccatattttgttaaaatgttttttt

SEQ ID NO: 39892 - DNA, 1128 bp, Cannabis sativa
taaaatttaaaatgtataaaaaaagttgattaaaaaattattaaaatttttcttatattattttataatgatctttttttaaatttcaaaataaaatagtcattgtaccaaaatagtagaaaagacattctattaaaatgacattttgatactttaaaatacaaccaaacaaaacaatagaataaaaattattttctctcaattccatctcattacctccaattaagcgccacctaaatttaaaattgaacaaaaaacttttaatataagagaaatttaatttttcatcattatagggtaaaattgataattaaacccatgtacaatgtcatacatgtaggctagtttttacaattaatatcaattcttttctcttctctctattttctcaccatctcctcccccaacctctcattcattctttttactaaatatcactaaaatcttgcttaaaagtgaagattattgttgcaccaagcacatattggaggtggaacgaggtacacagtaagttgaggggaaccaccgaaagcatcaataggaatcaatgagtaattggttttttttttttttttggttattatatttgttttagaatgttgtttagatatttgatttgtgggttattggtgttttttactgatttttctatagaactgttattctcttattttttttgcgattttatggtttatggtttttttcttccttttcattaagcccaatggtgctcgatatagggacgatagaggtccaatagttccttcagttcataggttagggtgatgtcctgatggtgatataggtacgatgtagggtgcgataattttatcagtttagtatttaagagctatgtccgatagtgcctaatataggtacgatatatggggtctgataatttgttcaatttattgtttaggagctatgtttgatggtgctcgatataagtactataatgtgtctgttatgtgcatttttgctagcatgacacgtgaaaattaattaagaaaaagtcaagaaatcgttaaggctaccctagtgcctccctccgtgctccgggaaggtacgatccctaatatcgcgaagcaaattcccgcacgagaagctttcccagatgcgagccccatg

SEQ ID NO: 39893 - DNA, 2144 bp, Cannabis sativa
gatgctctgctttaaatctcattccatcaaaattcttataaaattaaaattttctatttcaataatagttatgtgaatcttctaagtacataaatcaaatttttcaatttattctgtcaagattctgaaatctaaaaaaatataagcaactctcaatgttgtgtagaacagaactagagagtaaccaagaggaagaaaaaaaaaagaaacaatcaaaggaggtattctatatagaacatccagaataaataataatagagtatcaattttaagcaatggagagagaccgatgaagactctaaggaaaccattcttgttgattttagttgaagaattcagatgaaattttgaccaacatgaaactcttgtggaacaacaaaaaaatggaggtcagtcaaagtcagctaaagagagagagagagagagagagagagagagagagcaatagaaaatagtcctttaaaatagatttgataggagatggacttttaagctaagcttcaatcatcctaaaattcctataaattgttggaaaaataaaccttttttttgctggaaaaataaaacttttttttttctgctacaatgaatgaatgtgatttaaaaatagaaagaaacaatgtataagaattttttaataaatattttatattatgtcagaagtttttataatttcaaaatcttaactttcccaaatttataatctactacacacaagtacatattatattatttgtacattcaaaagtcatgtacatgaagagtgaaaaatatgtctgtatcttatgaggacaaaataagtgtacctaccacagaatttttctataattatattaaaaatgataaaataattttactctccatccttccacatatactcctaacaccaaacaatacaaaaaagaacaaatactctccatccattctactctctcaccttcctaccaaacatagtgatttttcaacattgcaaagatgctttgattttgaattaccttcaaggagtattttttcttttttttcttattacttttgaaaagtaatttccacacttgaagaattctcctcctataactattctcctcctataatttttacttaggaatgaatagacattaaattgttgataataacttgcacctcatgaatttgagtattttctcataaatgaatagtatatgctttcaagtttcaacatataagttcatctcattacaaccttcacaaccccataattatcagtctatattgaattcaaatatacataagatcttcaatgtaatcaagataaattaataaagaggaaattagatttatgatcaatccttacatttctatagtacctacccacaaatactacttgttgaatttctctatacattataatcttcattcatacgactgtataatctttatatggatttctattatgttggcctggcttagatatatcatatgtattgtattgtcataaaaataaactaaacatttcagcctaaataaatagagaaaggaacataaatttcctttcttgaagtccaatctccatgccctttggtttttgaggcaacttcagcctggatttcctttcacaaagcaacaaagagatgaacgactgccaaaatgagctctgggtcgccacacagcattggctggggcgagtttcatcgaggacttggtgggattcgaacctgacgaggaaaagcatccctaccaatacactatccaagcaaatgtttattatttcttcttttcaataaccatccaaacaacatttactaccaaagtaaatgttaacataaatttcaataagccaaagtgtaaaaatacaatacaatgcttttatcaaactcactagctatacttttaaacgacaatagtcatataaagaaacaaagcaaaagacaaaggaatcacaagcttggtttcatcatatatactatttgcccggcctatttctgaaattaaggaattagtatacgaaatcgtactcaattaaacattagatgacatcacataagtaacataataagaccatatttcacacttcttaattataaaaaaaactgttctgaaataatcttcaaactctatatgggtttcttattcatttcctgcaaaaatgaaaaattcttctgaaaaca

SEQ ID NO: 39894 - DNA, 1938 bp, Cannabis sativa
atttgcggtgctggaaaagtcaccggagtagcctctaacgtcagaaaagtcgttacaattggcattgtcaacggaaaaattaccaagaaagtggtttcttggtattttttcagtaattttccagcgacaatactaatgccgacgaattttctggcaccgacagcaactccgacgacttttccggcatagactgctactcccgcgacttttccgataccagccactactccgacgactttttcgacacctgcagcaaactccggtgactattccggcatcagtgacaaatataacttcttaaacaaataaaaacattgggatttgaaaacctaattacatatatatgacatatcaaataccataaaaagacctaaaaacaaaaaaataccatataaattggtcaaatttaaatgtgccatatttatcataagaacctttaaaatcccatagtaagtgtaatttcctcttttttctttaatgtccaatagtttttttctaagaacctaacttttgaaggggctaacaatttattattagtcacttccatcccaatttctaaagcacatttttaattctattaatgcttttaagcaaaaataaataaaactttattactgttatttattattttttaaaattttttttatattttttttattatttttttgttctattagaatcaataataatttttttacaaatagttagagttttttagtattttataaaatatataactaaaataaatttaaaaatattatttataattttttttttttaggagtctaaattttaaattaaaactggatctccaaaatatttaagaggaccttcatgtaatagttgtaactatagtaccaaaactaaacattacataagttggtgtattgttatattaatgtataaagtttaaatattttaatttaataagtaatttcctaaaagatgtaaatagtatattatatttaataacatatttgacataatttttataattatacgcaataattataaagtttatataaaaacaaatcagccgataattttatttaattttgttaaaaatatatggagaaaggacaatttatttttattactatagacataaagattaaaaatctaaatttacatttaataccaacactaaaaataataagaagataataaaaaagactcctcttcaaaaaatatatataaattaaagtaaaaataaataattaattcaaatatacatatgatatgatgctttatgttaaaaatgatacaattttttcacatgtataaataccatcttaaaaatacaccaccatatattaaaaatattcaaatggccatattgataatactcaatattatcttacccaacacataaatataatatttggtaagaagattggtttgtgatttctcaagtctcaaagtttaatttattaatgtatttatttatttatttttaagagaaatttttattaatttatatgagaggatatctcaaagtacatttttgagagatctctcaaatatttgatccacattcccataatatattgtgtttgctgtcattttagccttggcacacctcaattgacccttcccaatacattttaattaattaacaatatatataccaccaaactttaatttataacaaactcaaaaaaaaactgaatatatataattgatcatgtggatgtgtgcattttattacaatttaaataaagctaaacaaatatatatatatatatatattttgtttctcaaattaatacatatatatttcaatttgcaaaggtatcttccacgtcttgatctgatcccataatatatcatctactactactataaatacaacccccatatctctttcatttttcatcatcactactactacataattaatccctatatatataaaaattattaattaattaaagagag

SEQ ID NO: 39895 - DNA, 2520 bp, Cannabis sativa
gcaattaaagggcagacaaggctcgagagaaaagtgtcaattcgattttctaaaagatctacattatctaaaatttttaagagaatttcagagacaaattttcaacaactaccgcctgtattattatattattctagtcccttttattgaaatgcctctggaaaagtcttattcttgtaattacaaagaaaaatttaaacatccgcataattattaatatttataaaaaatttatctctatttgatttttctttaaatgaatgttgtcctataggaatttttgtttaagaaaaaaaataataataacatatacttcataactttttggttgaaatatatcttcataattatttgcagttttcagttactttctatttattcgtatttaagatacattatttctattttaaattcataaaccaatgaaaagtaaaatgaattaaaatgaatatattaaataaaaataaatgatgtgttaaatttttatcggatggacatggtttgggataccattatttgactgaagatgttcattgcccctgtaaatgggacgagtattctaaatatagaggaaaaaaaaagaagaacaaatatatggttgtaacaaagcaacaaactcacttattattataacttattattgaagtacgtactatatatgataagctgtatataggcaagctaacatacagtacgtacatatcatacatgattgtacatatatgactagtactcaaataatgtctattcatcagcagacattttgaggacgccataattgaaaggactttgattgtaacagtccaaattgtccccagtgcttactcctagtataaggcagtacctttcatagaagccaatcctatctatgacccggtcatcaacaccgtggccgcactccacacctccgttgattatgttagtgatcacaccatagccgggaagtcgattagcagccacatcaatcgctgttggtttccactcgcccacaattacggcatgggaggatggtttgttgtactgtggagtcatccaaaaccatatagctgtctcgaatgaaacaactgtgtcattttcaactagctttgggtatcttaataggtccaatccgagtgctttaccagctggtccgtaattgtagttgctgattttgtcgtcacaaaagtacgtcgtacgtactaaaaagtattaaaacatatataaagcacatagtacaactccataaatgacacgcatgcatggtatatatacatatatatatatatatacttatgtatgtattatgtaaaacttgatgacttactaactgatctggatgggtccacgaccatagtagaattcgccaggaacacagggccattctaggctgtcgacgcaatgcggagattgatcatcttgttctatgatatagcaatatccccaggcatatggtcctccctgatcagcagatgaccatcctcctgtgattcacaaacataatcaacaaatctttataggaaaattatattatctgtatggattaattctctgttttttaagtggaaaaattatatatcagctatatctataatctgatgctacagttagactaaaattagtctgttatattacttaaatcacatcacatgtcatggataaattaaccaatatatatacctgtggtttcgtgagaagtttggccaaagaacgcagctagttctcttgtacgagtttcaagagagccagtagtaccaaatccaggaaattttctagcagcagttatgaaggcgtcgtaagtgtagaagcctttacttttgcatcgaggatcatttcgatttttgagcatcttctcgaaaagcgaggaagtaatgatgtgactaacatcatcgggagaaaccggaggtggtggcgtgaagggcggaggtggtggtggtgggggagatggggttcgacattggctttggcagttttcaggggcacaatactcatctgtctgaccacagtatccagcgttactacaacaatagccgtcatcacagagagcatattcatgttgttttccacactctccacctggaggattggacctaattcctactaccaacaatgctgtaatggtagtgaacagccacaaataataagagtatttcatttttcttttccttttctttatatcagtttgaatgaggttgaatgaggttgtgattgtatttataacaatctgtggcttatgaaattcttcctaataactagtgcactagaactcctatctaccaaaatttaatcacttatcacgtttttcttaaagccagtaataaataaataaattttcaatcacattacctaaaaattaattcacacgtacgtcaccatcaaattatacatatatatatatatatatactagaagaaagctgcacgtatacttgttaaatgttttataatataattgagaataattcaataaataattatataatttaatttattatttagagaaattggtgaagagtgaaatacaccaacttggaaatttcttaag

SEQ ID NO: 39896 - DNA, 2159 bp, Cannabis sativa
aaaatagtatatgaaataattctttcaaaaatgagtaaaatattctttcaaaaaattagtagaatataaaattataaatgagtaatgtgtataatttctaattctatgcaacaaaaaacaaatataatttaataaattccttaatagtatataattaaaaataataataataaattcaaatattgaaaaaataaaccctctaaatattttaatataatattttattattcaaatatatatctaaattcagatatatatagatcttagaaaaacaaatacatccaaaacctttaagtttgcataacgaaattaataaattaattaagaaaatttcctaacaatccttttattatttacttttactttttaaaaaaatatatatatgtatataaataaaatagcggatgagaggtattctaatttgggattgtttagtcgtgataaagttttatatatttatatgtgagactacctttgaattttacaaaataatatatttactaaaaattaaataattaaaaaaaaaaaaaaaagtgacaagatagaaagtatatatggaactgtcaatagttgttcaattcacaattaatgatacaaaattagtgtcattgttaaaaaaatgatacaaaaatactaaacaaacagaataataaaaaattgaaaatagcatggcacaagttcaatgaatatgttttaatgatgatttattattatttagtactgacgagagagactattcaaagtggtgccaacaaccttcgtactaatcatattaattattaaatagagaatatcaaagaatatgcacaaaattcttcgtcaaatcaatgaatatatttaatcgacactaatgtaatggtcgttataagaaagttactatataaactgacaagtttagattttcaaattagttatatcatcaggtttatagaattgtagaagtcttttcttctttcctattttttaagagaaagtcctatttgcgtgctcatataatgagcatattgtaacttgtcaaaattaccacttttccttactaagatcactaaaagtcctattatgctcactctataataaatatgtacacttttaaaaacttttcctactaaaacatgacaaaactatacaactttttttcaattacctggctaatattaatatttacaagctgcatgcaccttaatatagcattgctattaagtactagtgatgcttagcacattcacgacatgtcgcgttgcgattggctagcgatactcctaaaaactattatattaatttatgtgggacccaaaaattagttgaatcaataatgatattgacacataggagggtactaggaagcaccactggtgccctttaatatttctccctattagtaatatattagggatattgtaaattttctcaacattttaaatttatactattatagaatttttacaatttatatatttctatataattttttttactattttttatttattaaagtttcaaaaaaaaattatattttttttaggctgtttaccgactttttttccttttttttctgtcttctttatgtacttctcttttttattttattttttccaattatctctctctctttctcatcaaattaattttttttatctttatatatatctttacaataaatgtatatttttatatctccttttctttaatatttttacactctcacaaattttattaaattatttaaaaaaaaataaaataaaatacaaacacttattttatttttctttttcattttcttactattctctctttaactatttcaaaatattttttcagttaatcacattttatagaaaaaaaaatcttaattaatttctttgcacttataactaaaatatgattattttacttttatcatttttcttatatttttaacactctttctctctcttataaaaacataattaagagcacttctcttatgattttaacatgattgatgtgttgttatttttctattaatttataactgtcttttattttataattatttttatgttattttaaaagtattttatatagttatctttctattgtttttgtattttcttaccgttgttatttagtttatgtgtatttttaatcgtgtatactttcagtttgttccagacaatatt

SEQ ID NO: 39897 - DNA, 1504 bp, Cannabis sativa
attatttaaaaagatataatcttattggaaggcaatcattgatcttatgcgatctgatagtaaatagtaaattgtactggacttctgaatacacagtaaagacttctttcggctacacgatttcatgtcttatggattctaaccatactagatgagatctcacctggacaagttgctcattcttagtccgaaaggactcatgatttatggatccgacctagtgatctcaattaggtccattgttgggccttaggtatttaagctgtaattattatggaaattttacatgtttcaaaccaatctatatctatacttgttgctttcttagttaaatattcctctaatgtccttctcaatgttcctaacaatgattgaaactctttagtcttcaagattcaaatatgcttcatttcgacatttccaaatataatttctatttcagaatagaagggagtgagtgggccgaagtcctccatcctaaccaactcttaatttcctccaaacattgtacactcaaatgacatttaaacaacaaatgatcccttgtctctctattattcccacatagtaagcaatcatcaccaagacagataggaaatctaaatatttcaattgtataacctgtccataactgcaaaccaaacaataaatctctgttttactattgataatctatattctatacttggtgaatcataagtatgctcttaaattgatctttaactcgaaccacctacctcatatacgcatgttgctttcagcttcataagtccatcaatctttattacctaaataaaccgcatgcgcccatttcacccataggttatcttgttttgtagcctagcccaaatatttaccaattgctacttcattccatatctgaggattctgaaagcctataccaccttccctctttgatttacacatgtctttctaagctacatagccagcacaatttgcttcagcaattcctttccaaagaaagttcttgcaaattacatccaccttttttaacacttttttgggcaaaatcataatttgagctcaatatgaatgaactgtctgcagtaccgaattgattatatattgttgttcttccaccatcagataaattctttgtgctccaaattctaatcctttgagtcatttaattttcaatcaatccatcacattcgacagttgaaagacactctaaacaaatcgagatgcctaaataccaaaagggtagaacttaatatcttactaatatttaatcatactaataacaatatgacacacatatttatttatgatgcagaacactaataatcttagctttatttaataataactactaatcagaaccgacattaggcataagctagttaaacatgtatctagcacccacttagattaagggctcaatataaaaatttccctccttattttaaaaaaattatttttcttatgtcccactatattttagggttggacctagtagtattcatcatgatcagtgatgatc

SEQ ID NO: 39898 - DNA, 2907 bp, Cannabis sativa
agttgagtcatcgtactcgtacacttttgatgtgatgggggggaggcacaacacaagaatggcctatatacttttgatcaatcccagatctcatacatgcctgaagcttcacaagtaccttctgcaaacactcaacaccccacagaaacattcaagcactttgttcaatgtaattctgtaatgtaatcggtgtaataaagcacaatttactgattttgatctttggcacaatagtttaggccatccttctgaaagaacagttacaaaagtcttgtcatcatgtaatctaataaaactccatctttctattctgcttgttgtcttggcaaaatacacaaatttcccattcccaaattatcacaaattgtgtatattgaaccacttcagcttgttgtggctcacctctggggagcctcacataccctatcctatagtggctatagctactacattagctttgtggatgcacattctcgttttacttggatttacatgcttaaggctaaatctaatgctttaaaaatgttcctgcaattcaaagctgaagccgagttgtaattgtccaaaaaccttaaagttcttcaaactgattggggtggggaattttgatccttcacaagccatttgcaacaaataggggtaacccatcgacatccttgcccaacaactcaccaacaaaatggcctcattgaaagaaaacataggcatattgttgaacatggcctcaccctacttgctcaagcttcaatgcccttgaaattttgggatgaagcttttagaacaacagtatatctttataacagacttccttctcctattctccatgacagatcacccatagaagtcctgtttaacaccaaacctattacacaagcctaagaacctttggatgcacttgttacccaaacattaggccatacaacaagcataaattccaatttaaatcctccccttgtaccttcttaggctatagttttaaccataagggttacaaatatcttgaccccacaggtagagtgtacatatctcgtgatgttatttttgatgaaaactcttttccttactttaaagtggctgcttcacctcccatttcttctccatttgtttcattacccactgccactatccctactattacacatcacaatgcactcatacctgagattgatcaacataatgcaatagataatcctttgccaactattcacatcaacacagaggctactaacaactctggccaagtttgttctatgcttgatacaggtacaccccatgaacatgtagatcaggatgttgctagttcaactcaaataagctcaatggccaccactccagctgttgagcctgctattccatctattgatgctcctataacttcaacagggcccacatcagctattccagctacaacaagcccaattatttctggtgctactcaggttgtccctattgctgcacatctgcctgcagcaaccaacagctccaatactcacccaatgagaaccaggtctaaagcagggattcataaacctaaacccttactcttatcaagactccctgccactgttaaagaagctttgctcaacccacaatggaatagtgcaatgacagatgagatccttgccttgataaggaataagacttacacacttgttcttctccctcctggaaggacagctataggctgcaagtggatctacaaaattaaagagaatgatgatggtagtgtgaacaagttaaaagccaggctaatggctaagggatttcatcaacaaccagggttcgatttctctgagactttcagtccagtggtcaaacctgtcacaatacgaattgtcctcactcttgctctttctcatggctagactattagacaacttgatgcatttttgaatggggagttgcaagaggaggtttacatgctgcaacctcctagttttgaggttccagggtctgctcaccttgtttgcaggttgcacaaggctctttatggcctgaaacaagctcctagggcttggtttgacaagttacagcacagtcttcaagctcttggttttctctttagcaaggaaaatcactctctttttattgaacatacaccatcatctactctacttgttttggtttatgtcgatgatattattgtcactagtagtgaccctgctgctgtttcttacttaattagctgcttgcacactcagttttctctcaaagaccttggccctctctcttacttcttgggaatagaagtcactcactcctccataggtatgcacttctctcaagataaatatgccagagacctccttgctcgagctgctatggatggtgccaaattagcctcaactctaatgactagtggattgaagttgtcggcttatgggggaaactagttgacaatgtccaacattataggtctattgtaggagcattgcaatacctgaccataacaagacccgagttgtcctatagtgttaacaaagtctgtcaatacatgcaaaatcccttaaacactcattggaatgttgtaaaaaggattctcagatacataaagggtactcagaacttcggattacatctgcagtaatcttcttcccttgatattgtgggattctatgatgttgactgggcatcgaaccctgatgatagaagatctacatcagggcatactgtgttctttggagacaatcttatggcatggtcttgcaaaaagcagcatactgtttcgaggtcaagcacaaagggagagtatagaagcttggctaacattactgctgaaatatcatggatgcattcactgttttcagaacttaaagttcatttgacaaggccccctgttatttggtctgacaaccttagcacgattctactcaccttggacctcgtgctacatgctagaaccaaaca

SEQ ID NO: 39899 - DNA, 1520 bp, Cannabis sativa
  modified_base (32)..(35): a, c, t, g, unknown or other
atttatcaaaaaatcaattatttatttatttnnnnaaatagaaaatcatttccttaattagaaaataatttccataataaaaatattctaatatgtttttcttttttttgttgacaataccacaataatctttattgaagtcttctaaatgatttgatatgttattttcaaaatgtactttctttatcctttatgttttttttctctctttaattcatgttctcattctaaattctcattcgtgtaaaaaaaaattgatacagttaaatttttaagcccttctttcaaattatactcattcaacttgagcttgtaaacaaaatctttcccacgaagccttttgaatttctataggaacataattttttggagataacttgttaactaatttatttgttgatgtgcccagtaatatttcagctatttcatcaaataaaatcaaagttgttttagcagttttgtcattgactttgatatgtattttgaacctatatattaaggtaaaaaagtagagaaaaaaaaatatgaaacaaaaattagaaaaaatacaaataacataacaaattagtattttaagaaaactaaatataaatttcttacttcacaataggatattaaggttttttttttttctacaagggccacaccaataaatatcatttttaggtacaacttttaaaattataggtattaaaacttttaaataatattaataataataccaaaaaaaaaaaaacattcacttgaatatcactctaattaacctctaataatttttgaatacatatcctgttgagaaacatatcttcttcaagagttgtcttctaaatattataactcttaataaccttcacactcttggagttggtggaattttttcggataaaggtgctacatgatctatttgaagattaatgtagaatttagttacacttgtagaagagaagttaattttatctattgaaagaaaatataaatcagtatacatatatattattgaaaattaaaatattgaatagtagaatctaaataaataattacctcaaaatttcttaacgatagtagaaattactcccacaataaatggactaccctttttcttatataaatttggatcgaatattcaaaatttttgaattttgcaaactgtacaaagaatcttcactcaatagctttttaaatttagaaattaaattttttcttattgttccatgcattagattttcttgaaggataaatagtacatattctcatcaataaaaatcatatcaagacttatcggttttccattaattcattttagtagtaagagactcctacattctacaaactctaatatgttaagtaattgtgatgatatcttttttgaatttattatatataaattttagagtttaagtggtgataacttaatttaaagaaataatatatatatatatatagaacattttttaatgagtattacccatgaattgttactaaacaaatttaactacaaatattaattttaaaaatatcaa

SEQ ID NO: 39900 - DNA, 1087 bp, Cannabis sativa
tcgaccgccgatgagtaaagttacatctccgatcaaggggtacaacgggcaaggcagaggaaaaggacaggccatggaggacatcccaagacagttgcaaagagccaatgagaatggcaaactcaaaaggaaggtcatcagagtgcaggagaaaacgccaggggctgtttatgggaaaaatttgaaagtggtggataataacctaagaagaccagcaggtattaagattcatgatctgggtaaaggaagagatactgagaatctaaagggggaaagaagaacaagatcagtctcgcctcgagctatgggacaacactccaaaggaaacttaatcgcaaaagaaacagatcttgatattttgaagaagtactcttcgagaccaccaccaacagaaagggatgaaagggttatagcaacaataatgggccacatgggccctacttacgagcagatgatagataaacaacacaaggatctttgtaagtcaagaaatccacataagcatccagagcccacacatttcccttggcccgtttacgcagaagaaattgggcttgctgaagaactaatgggcccggccccaatagacaaatttgagcctacacccacactcttccatgatccaatagatgtatccaacttaatacacgaatgcacacaacagaggaaaagaaaggcaggcctaacactggtcccttatgttcaaagaacagaagaaaatacgatggaattttcccaggaaattccaaagatgcctgagtttgctccagggccgatagagactcctttcaaaatgggctctggggcttcaacctcatcaacctctagaggtgttaccaaaagaaggagaggagcagggtcgaaatcaactccaagaacaagatcaaagaatcattcgaagaaggagaggagtcttaacgaggagactacaaagaatcttgaagaaactctgaatttgattgaagtacaagtacaaagtgaagaaaacatagtgatgggcgaggaggcggcccttatcaagcccccaacagccccatgaagtgcctttcgtggaattgtcggggcctcgcgagagacccgacacccc

SEQ ID NO: 39901 - DNA, 2406 bp, Cannabis sativa
  modified_base (44)..(56): a, c, t, g, unknown or other
caatgtaacaagaaaaaaaaattaatgatttttttatcaatttnnnnnnnnnnnnntaaattttattccattccatttctatatcctattcccaatctcattcctattcctatattttcattcctcccaaccaaacgcctgaaagattatcattactgactccaaatatccaattacaacttaacaacatctccaatgagacttgaaaaataatctatacaacttttcaaaccatattctattcttggcactaattttcttagaccatacattacaatactattaaattgcagtaattattatgaatcaatctggcacgtaggtaaatctaattattatagtgttctatattatatacaagattattaattttttctaacagtaccatcatataaaaaattgagaatacgtattcagttataaaaaaaataatagagtgcatcgggacatttatttatgggacaaattttttattttatttttaatttacctttacaatataattgaagagagaacattagcataataattaattgtggagtaaaatttgaattaataaagttgaatattgaaatatttgaattaataaaattcagaaaaggaaaacaaacctagtacagtattaaaaagaaaatctcattatatttattactaagtttacatacaaaaataaaaatttgtaaggacgccatttctctgcattagtattgctaaactacatactcatccttaaatatgtcctccttcacaatattctttagtgttttagaacacctctccaatgagttgtccttaattagggcactgatcttgactttcatactcttttccttgaccttcaatgggtccttgccaattggagtggtccttttagtcctctgcaaattaataaaatcaacacaataatcatgatcatgattactttttaagatacataaaattttaagataagagaggtaggtataagtaggtacctcttgtggaagaggtgggttccaagctccattatcccattccctatgaagtcttaaattgcggtgtagacatacaattgcaattgatcgagttgaatcgtgcaacctaacagtgtacctcaacttctcctcattcatactcacaaccacaccacgaaaccatctgttccgaaagaaaaactccacatcatcgcctgcgtcgaaaacgacctgctcggcccgcaacaatggcctaacattgtcggcattgactatttccctaaggggattctccactggatgaggagatccgtactcaacgtagaggatggtaacattggccttcatcttgaccggagaacggataacggtggccggaaagtaagggccgctcgatgcatggccgggttggtgaacctctactcgatctcccagtttaaaggaacgtgaggaaggcgccattaatatttgaaggtatttgttttgaaatggaaataacaaaattaatgaatgtgaagtctcaagtttatgacttatttataggttgtatagttctaattgtagtagaaatagttcaatattaaaacgccgtacgtgtatagttgtattagtaattcacaaatatttaattgaaattcataataaatataaaaatactgcttacaattaaacatgtctaatttaattcaaatattagatgagtcggtcaatcctagttctaatagtaataggacaagaattacagatataatgatatatatatatttctctctctctctctttttttttttttttttcctgaaatagaaatatttatttttaaattgtaaatgtgtaatatttcaaaaatataaattcacttctatattctatatttgaaatggtacatgcatgcaattttagttgatattttttttacaatataccattttaacattattattgagtgttatattaatattagatatttacgaaaagaattacaaaaattaataattttttcttttttaaaatataattattttaaaattcaaaaaagtaaatataatactcaaaattaaaaattcacttagggctaaaaaaaatgacgtcgcagcttcatttccatattatgtgaaatagaattttctaaattttaaagtgctgttctcctaactaacgtatatatcatcataaaaatatagactaaaaaataattctcttcaatgccgaaacaaaaagatctgtatttgaaacaaatgatgtgattgcatctttgatgtgataaattagtgatgtattgctaattataagggtaactccaatgggaaagctaaatttaacactaaaataatactatttcaatgctaaattttttttcaatttcaatcacaacactaaaaattacactaaaatatatattatctattattatattactttattaaattatctgttgagaatcatggggttc

SEQ ID NO: 39902 - DNA, 1875 bp, Cannabis sativa
agtaattttataagaaaataatatattttttttagttaatatttaaaacggaaagttcatagtaattacacttaattctcacgggatcatgagaattagagagtgtaattagaactccttaattatctctaatatatcaaatcgtgtaattacttctaaacacacacaaattacagagtgacttttcaaatgctctttaaataaaacaaaaagttgaaaaccctaaacaagtgtaataaaataaaatttgcctgtatgacttcctatattgaagtctatacatgatcatactatttttttttaaataagtgtattccataatcaacttttgtacatcaattattatgtcaaatagctcttgtttgccaatcttacaacaatttcaaaatgattggtaaagccagtgtctatctttctctcctattttcttcatctttaaagagtaaatttgagtacttacaacttgtttaacaaaactatcaaaactatttatagttagaacctcatgatcccataaagccttttttcaagctctttaggctctccaaatcatatacacacaagcaagaataagaatgtaaatgtttttcctcagtttactttgtttgcattttctaatccactttacaaatctttcaaaacgatgttgattagaatcgattcctacccaattcagcagctgattaaaacattgttagctaaatgtacattaaaataaatagatgctcatgtgtttcttgttcacatccgcagaagaagcataagattggctcttggacctattgtttacaaccaaccaaccaagcccgcaattcaatgtttaaggatacatctcccccaaacatagtttgtgaaccatacttgtccatttacctttagaaatatgctatgttaactataattgtatcaaattattaaattatatattcacatttttatgttcattttagattgaaataagttttttttttgaaggtgaataaaatttttattcataggtaaatcgaatatagtctattacatgcagacatcgctaatatgctaaccaaagcgtttacaataattaggaaaataaccctaatttcgtcttgaaataaaccaccatgactcataaattaccagttgtaaagcataaggaagatgaagaatactaaattttcacaagtgaacatatgtgacaaatcacacttattaggtgtgtttgaaagtaattgtgtaattatgaggtatcgtaattactaggcttgtaattacacagtttagtaattatactatattttaaaatacaatgtgtgtttggatgtgaggtggtaattacatatgaattcctaatatcttgtttggcaaaatagtttagttacatgggaaaataatatttttaagtagttaatgcttaatatagaaagtttttagtaattacatagtgtaattactaggggtgcacacgggtcgggttttcgggtttttggggtttcgggttcgggtattcgggtttcgggtatgggaaatgtacaaccgaacccggtgttcgggtgtacgggtatagtcgtcgggtcggttatgttcgggttggtgtgatcgggttcgggtcctattgggctgagcccgaatatttaatatatgggccgaaatacaatttaatttttaaaaataccaatttttttttatttatttttaacattggttggaccttatatttataattgtaaaataatatagttgttgttgctgtaattattttatataatatataataataacatatatatataataatatcagtaaatttagttccacctcgctcgacgctcgcctcgccagtcgcctcgccacagtcgccactcgccagtcgcgcgccactcgccaccgtcactg

SEQ ID NO: 39903 - DNA, 1891 bp, Cannabis sativa
ggtatcatcctcaaggtcatgaacaacagcttctctatcagtgaggtttaggacttcaaaaatattaagagctagggaatccatgagaaaacacgaagagacacgagaaaaaaaggctacaggtgaaaatctatgaactagcaggtgaaccaatagagaacgccacaggaaccaaaaccttaaatagagaaggttaaaataatacctggagagtcgaagcttgcagaggaaggttgtgtgaagatgctctaacagtccttttagtatccctatagcatctccatagccggtaggagcaatgatcgcctccatccttgggttgctcaaaacgacgacaggcattaaataagaacaaaagacaaaccaaattaaggaacaaaagacaattaaactctctgaaaagagatctaaaagatatctaaactccagagcaataaatggtgattaggtgaaaagaaatacaattaatgaacaccagagaagagaagtcaaacccaaagcaattaagacaggagaaagagaaaaacggactcaagattaaaccactaacacgacatcacggtgatgagaaaacacaggattggatccagaaagattttgagaaacaggaaaacccagaagaaatgggatgcagcccgctagaaggttccagagctcttttttaatgatattctctttttgcagatatagcttacgaaaagatagaaggttcaagattaaaacacttgttgttagtgtttttggactaaacatgtgttaccaccatataaattctcaagaaaagataagtccatctcgagaattaaggaattcagtcactccatcatgggcttaaataattttgcatttggtcgcttttttcacatattggctctcgaacaattttaggtcgagatgttgagaccaatcaccatctcctagaggtgactttagctcctaagcaagacactatctcctagatacgcattttctatagcacgcaaaggaaagacattttagcttgtcccatttgtacaacagacaaacgagttctcaataaggtcattagcaatgcaagctatgtgtttagttgctaagatggacccaatttttatctttaatttattttacttaatagctaaaaaatagagatggcaacgcagccctacaaatttttaatttatgttgaaaaattatcatttttatatatacagggacttactatctaacaagcagtggaaagagcaacagcactaaaaatgacctaaaacacaataaatatcaaaattcgcataacacacatacctaagttaatacagaccattgcacacatattttattgtaaaaggatttgatttttatttttttgttaagaaagtaaagcaatattaatctcaaaacaattgttattgttgcagcacaagcttaactctaatatagtgattataggctgggattataaatatgaggaaattacaaaatttataattttttatgtattttgtgtaaaaaaatatagttgtttttttttttcaaaaaggttattttatgagaaaataaataaaaaagttaaaaaaaacatgaaaaaattaagtaagggtaactatgtaattttatggtaactagagggataatcaattaccataaataagtaaaagtaccttatactgttttttcacattttttttaatttttttttaaatttttccatgatttttttttttttgagaaaaagttatatttttataaatttatactttaaaaaacataggaattattacatagaaaatataaataaacactttatttatacaaatacctccattaggtaaagacaatatttataccttttatgtgattttaattaccaaaataccacttacaccattacttacacaatcagacgatggtt

SEQ ID NO: 39904 - DNA, 1311 bp, Cannabis sativa
tattttaattaaggtaaatttcttgaattttattaatatgatttatttttgtattaattagatcacctaaatggtacaatctttctagattcaatattaacatgagtaatagcttcaaatttattatactattaataagaatatgagctaacaaaaaattaattcaatcctactaaaactgaaattgtggtcctatgtcatatcgattttcacttaatataattttggctttttactattgtgtattaaatagtcacactttatttcaatacaaatatttgaaatgtgcataaagtgctttgtatagtttaagatcatttattttgcctcattattaaacatgtttcttaggcattaaacatattacataaaccacataaatgggattatgggaatgtaaaacaaaacaaaagataaatataagaatatatgattgtttattagttttgtgccgttgtccacacaccccaaagaaaaaggacagtttttgaaaaatcaggagaaataataaaaagaaggaagtgggtttgagtggggacaacaatgtaattttagtgtttatgtcagagaaatcattactacatgaaaatatgtagtgagagcagtaagtagtacactttttcgagggttcagttcagtttttttgtaatggagggtattttagtaaatctaactcggattttgaagattcaaattgaaaggaggataactataaagcgggatcaagtattataattatacgtaggattaactcctaatacacactacacctttcacggtttccaattgccataacgtatgaccatcatttgagtgagtacacttaaacacactaatttagtaaaataaaatcttaaaaaaaattaattaattgaagtagtcaaaattcaaatttgaaggattcatgctacaattttttattatatatttaactaaacacacatatagatctttataggctgcatgagttgaggggtgatctagacttgaaggttgttgatatttgataactaagaatgttttacttggcaaaatgtctgatattttggatggagatgttcctccaatccaactaactaattttactttgtagtactagtagatatgtctttccctatttattttgaaggatagatatctttttgtataataaaataaaggttaattagtaacttttttctccgaattttgacatataccaaagcatgctctctgagctttttttgccgttaaaaattccccctgaactattgagatgttagatttaagaacttttgtctaatttcattcaattttactgtttcagtgatt

SEQ ID NO: 39905 - DNA, 1075 bp, Cannabis sativa
tggcttgcctgttactattcaaccaaggaaaactactactacaaatggagttgtggccaattaataagcttaattaataattgggactcatgtattatgctttattatataattatatatttatatatggtcagttatataattaactgatcacatatatctatatatatgagagagagtatatgttttctatatttgggatgattaattatactatcttttatttttgtaatcatttggattgtaatggaaatgttatattatatgtaaaataaataaattttattatgatgaaataaagaaaagttatgtttattatttataatttatgttaatttaattaatgagttattttgtttgcagaatgatggaatgatgactagataataaataaataccatttatattaaaccaaatagagaaggaaatatcaaaatttaattttctcaattcacaatgatcaattccaaatttaatgttaagaattttgaacagaatttgtcaagtcattctttattattttagtttgaataatttaggtgtttttatttaattttaattagaagatttttagttgattgttattgataagtgtgactcacaatacatacattttttaaaatatttacctaaatgaccttcaataatttaatactgccactaccgaaacctttttaataaaattggtacgcttttacctagacaaaaagttgagactcccttcttgttttttttttttaaattttatttcttaagcttttttcattcaaacatcaacctcactttattaattattttgttactttttcttttaatgacataacatctaaatatctctcttattttattttatttatattttttaaaaacttttaaaataaatttccaacttcatatacttattctctaaaaaaaaaacttcatatactcatttctctctcttttttcttttacaaattttaaaaaatttattttttactacacaaataattattttggttttaagagttatactattgcaatcaatttttttaagatgatcattttaatatgactcaatacttttacatttaat

SEQ ID NO: 39906 - DNA, 3725 bp, Cannabis sativa
aaccataaaattgaataaaaatcaaatctgcaaaccaatatatatctatatacataaaaatcttaattacataaactaatatacatatacataaaaatgagatttacaaacaattaaaataaaagtgaaaaagattacaaatctctgaaactccatagccactgagcgcgagcaacaaaactcatatccccgaatgtggttaacgatcgtgtcccacccttagaagaccctcctcgttaatgactagttcaaatgttcaaatcccacaacaagctcaaagacagttataatcccacaaaaatacatattatcataaaaatcagacttcaactgcctccaaaaatcaagaaacagttgagatagctttgcgttggtcgcgtctcctgaagcgagaagcaccgaccttttcccctatataaggggtcacccatggcctggaaaagggatccgcgattttgagcacttaaagaaaaaacactcttttattctttgcattcaagagtgtgttcttgacttttgtaactctgattgataaaacacaaggggagtaatctattaccgacatctagggccgaacctctttaaattttgatatcttcctttagatttattacaattttcggtaccatcaattacatttattgttacgattttggtttaaatttcatttattacgactttgcatcgattggctaaaaaatcaaattatcattgtggtgctttcattaagagctttaaccaaaaatcttgaagtttttaccagaaaaaatagtgttaacccgaagatctcaagaacaacctgatgaggaggtgtataatacccaacaagtttgatcagcgagcaatcttgccagaaataatggtgagcgacccccgcatcctggtaagggtggtgcaactaccactaatgatgctgcccaaactactgctggtcgtaggaccattggccaaatgtccctacgggatagacaacggttgggcgtaccacaaatgtctctaccgatggggccaccagaaggagaaataccaaaatgttgtcccacctaatgatggcacgggccaaactcaaactaattgagaccttagcgtcgttagaccacggaatgaaacccatgtggatatcaaaagaattgacccagagatggatcagttgcgggacgcgataggctgaatgcaaggtcagtttcaaactgtacattaggagcaaacttaaactcgagcggccctaactaaaagtctcgctaaccaaaggagagagttccaatcttggttggaagatcatgctcgagaattaggtggcgccaagatgaccaacatcgtcacactcaagaagctatcgatttatttcgaagctattccaaccaaaacattcaagggttgggtattgacgcccacaccaaccaaatatctcaagaccaccaaacctatccacaagaagtccataccttgagaaaccaatgggagagggtggtctatagacctgaagaacgcccgaggaaccaagagagggctaggagtcacccctccaacagggttccccacaacaacaattgaccgatccctgccgatgaacaagtcctacctcagtcactatatggttcgtcttttcaggtgcattcgttgtcggaggggcttgtacgtcgggaggcatcttcgtcaacgttatcacagcctccattctggtcatgttgccaagaaaaatctcattgaactgatcttgttgagataatctcctttcggtcaattgtaattatcgcgccataatgaccacagggttcaattcatcaagctagctttttactccaacattattctcagcggctacgtcctaagggtcgttttcctgcatatcttctagtgtaccatcatcgtttacctcgacatcctgagaactactttcttctgcatcttccacgatgggagcaacttgatcccgatcttcattacgacgaccctgctggcgactggttacctcttggggatcacaagtatctcctactctagtattagggccagtgtaacgaaggccaaattgcgttctggtgagggtcatgattacgtgaatgcaattaaaagatggtcttcactgctttcttcagctctcgatgaaagcaccaaaatatttcttgagattttcagaaatcgaataaaaataataagatctgaagaaacaataattaacagaaaaagtataataagagacaaaaaaaattttacgtggttggggcgttaactaaccttagtccatgagtcaattttatttaacgatttgtttacctgtaaatactttaagagatacacaggatgtatattcatatgtttgcctgagcaaagtttgtaaatgcattcaacccctaatccatgagattagtcgagtatttatagtagttagagaattacattaggattttcccttttccctctacgtactggggagtttacaactaaacaatctctttgggctttctcatgaagtccaacccatgaagaatatgatctactgactaggctaattagattagactgatcgaatcaaaaccgtgtccgttaatggtggaagattattctgaaataactacatcacgcttgttatggaagttccccctttaatcgtaatatgatattatggcgtgatctgagaactgacatttccttatttatatgcaggattaaataggaaaactaaaagggtcttctgggctcaagacaccagaggcgtcttttgggctcggtctgccgagggtggagagctttgcgagcatattaaagtagattgacccgcattatccttgatgagggtcctactgatggatcttgaatgctgacttggaattcacttgtccaatgttaaaaacgcgaataacgctttgtatgtcacttaaaaatcgaagcataagccctttttgtaatagtgtaatgcacatataatcataaatattaatttactcactaataatctactaatttgtatgtctaaatatgtggtcattacaggagaaaaaataaggagaagatatctgacaagcaaagagaaatcttgttggactttcgtgtgggcagtggatgaccagagcttgcttggcattttgaaagctcatcactcgggtatttggggttggaggtggctttcgtatggacaggggatgactggagtagaccagtcaatttgaggaaggtggtcgctcatagaaagttaggagagagattgagtgggattgaaagaaaataaagagggttaacgaaagagagtgaaattttagagagagggagagggtttcagaaagagaagacgaaatggaaaagattttagagttttcatttattcagcctcaacatcagtgataactttatcgtcactgatggacagataaattacgacctgccaatctatcagtaatgactttttcttcactaatgttattagaaggaaaattactttcaatgctctcactaaaagggtatgtcttcactgatagttaaatttatataaaaaaaaatagaaaataaaaaattgatttttatcaatgacgatttatcaatgtcgtcgctgatttctcacctttagtgataattttttgtgtgttgtgactaaaaactataattcttatagtatttattgaagtttcttcaatttcgagtgatgttatttgtaatatcatttagtttaactatatgtatattggttatataattaattagacgtttgtttaaaaaaaaaaaaaaaa

SEQ ID NO: 39907 - DNA, 1639 bp, Cannabis sativa
aaacgacgtcgttcgatcacatgaatatgatgaatactactacacttatggctgtcgtcgttttactttcatggccagtgctgatcgacaacaacatagtcgaggccagaagagattttccggccacaatgacggcagcagtggcctccgttactggaaaagaaaagaacaattttcgtaacattagagaaagacttgagactagcggaggtctagtggagtgctggacggctctgctggagctgaagtcgtgctcgaatgagattgtgctcttttttctcaatggccagaccaatatcggacacgactgctgcagatctgtcgtcttcatcgctcgcaactgctggccagccatgcttacctccttagggtttactgtccaggaaggtgacattctccaaggctactgtgatgcaatagcagctgcaccgccgccacctgccgctgttccttcaccatcaccagctccttctgtcgttccgcctcttgctaaaaccaccttgttcgattagaatttgataatctttcttctataagcattgtatgcatgtgtacatgttcgtgtccttttcttctccacgtactgtttaaatatttagtaaactatatatatatatttatatatatatatatgtctatgagagagtggtagtcctcgatcgtcctctttgtgttatgttcttttggagtttggattttctattgtaagtttcttttttgttttcatcttgggttaatttttgtgtgctttttccgcttctatatttcttaatatgggagttgattaaatattaatggtagcttttgatgtttgttgatttgcgaatcgtgatatatacttaagtttactttcatagaaaaatgtagtgatgagttgcgttatttgtactttgtgtttttatcttttaagaagtaggttttctaatatatattaagaaaacctaccggagtaataagataaaaaaatctttaattatgttactaaacctaatgtgactctttggtatataagttacttgatacctccatgctatagcttcaataaaagtatacattgggtaagattttccttacaactaaacaaaatcatatttacaatgcagccccaaattccctatcccttatccatgtcccaatgccaatatatatcccaaccaattgtattaagaatgctcatttaatttgccacatataagcactattactttaccgaaaaaaaaaaattctgtccccaattacctattacattcttgtcccttcaataaatagttgtcatgtgtctttctctttgcctacttaaccgattcaattttcaagattaactatgttagttccatctcttcttctctctcctcataactaattattttctaattaatgagtatattcaaaacaaatacatattctatgacattttaatatattcctcagaaaaattatgatatattcgtataaataaagtttctatggtatatgcaaatgcagttttaataaaatttatttaaaatatttcatagcctatattcttcaatctctcttatatctacatatatacaatcctactagctgcattaaactatcataaaaagatagttttctttctttcatttatctgtcatgagtttgaccttaccactat

SEQ ID NO: 39908 - DNA, 2267 bp, Cannabis sativa
cgcacccctgccaccaccaagtctctagcttcaaagatactgcgccagacgaaactcggattagaaccaatctctgctgtaagaaaagaaccagtaggaaagtatcgagcctttaaaatacgtgtagccagcgacgaaggatgagtgaataaacgccaaccttgtttaccaaggagtgccaaattaaaatcacaaaggcttcaaaaccccaatcctccttcattcttgtgtttacacaatcttttccaactcacccccttttgttgaggcttattgaattccaccaaaacttagacgtaattttttgcaactctttacaagtttcaatggaaagcaaaaacacactcatagcataatttggaagagattgagcaaccgttttaagaagaacctctttccccgcttgagagagaaggcgtccctcccaactctgaattctctttctcaacttatcttttaaaaacccagaattgcagtcttctttcttcccatggtattcggcaaacccaagtaagtggtgtgtgatcatcagcttcaaaaatgccgtcaaaccacagatgtagtccctcatatgctcctctgtattagaactaaaaaacacagaagatttatcaaaattaatcttttgacccgaagcattttcaaacacttgcagcaacaaaagcacattagatacctcacgatcattagctttgcagtaaacatagctatcatcggcgaaaagcatgtacgacactcttggagctcctctagcaacactacaaccatgaatcaaaccaaccgtctcataatgccgaataagagcaaataagccttctcaacacaagataaacaagtagagggataatggatccccctgtctaaccccacgactcggaacaataggtcccaactcacccacctcccatcaaaacccatacgcaacaaaattgcctaacgatacccccactcaagcctgtcataagctttactcatgtccaacttgagagccatgaaaccatctttaccttttgtctttcgtttaagataatgcataatctcaaacaaaacaaggatattatatgagatcaatcttccaggaaggaacgcgctctgagtatccgagatgacaataggaagaaccaccttaagacgattagccaaaaccttagaaacaaccttataaataacattacacatcgaaatgggacggagatcacccataacagctggttgtttctttttaggaattagaacaatattagtgtggttgatactcaaaggaagggagcccgtaagagaaaaatcctgcacttgacggacaatatcattcttagcaacattccaacattttttaaagaagcatgaagtcatcccgttaggatcgggagacttgtccgggtgcatttggaagagagcagccttcacttcctcctctgtaactgggcgtaacaactcaacattctgaggagcagtaatattggggtggatacagttgataacatcaagagaatttgtaccagaggcagtaaacaaatccttaaagtagttaaccataactcgatccaatccatcatcccaactagtccatacaccattggagtcctgaagcttaataataagattactgcatcttcgagccgatgcagaagcatgaaagaacttactgttattatccccaacctgtagccataattgtttcgacctttgcctccaaaagacttcacgttgagtgaggatttcttcaaatttaccttcggctgcccaaaaattattggaaaaaatagtatctctaccatgcttccagagatttatttcggctttgcactccttcaacctttttttgaaatcacccgaataagcttcaccccaatcaagcaaaatctcaccacaatatttaatcttttgctgaacattgaactcagaattaaaatttcaacaatctttaatcacttgatgacaaagaagttctcttagccaacaattctcaaaacgaaacttcttcctcataacaaaagaattattaaccactaaatcaagaaaaatggggcaatgatcggaagtggaaagctctaaatatacagtttagcaaaagaaaaaagagctaaccaattttgagtacatagagcccgatccagtctaacctctatccaatgatcagtacctcttcctttttcccaaataaaaggatgcccaataagcttgatatcctgtagctcacaatcactaactgcttgttgaaatctccgtaataaccaatccgagtaattattaccacctctcttatc

SEQ ID NO: 39909 - DNA, 1816 bp, Cannabis sativa
catctagactgctattagcctattgctactcagaagtgatttatcatctttcttgtagtagtgaatcataaatgtctcatgttctggcatgttgggtctatattttgctcattctctgtgtggatgatattcttttatactcaatcctgtagaaagctaaactttcagtcattagagtaatttgttgtttgaagtgttttaactcttgaatcttggatgctctgtatgaacagattgtaaaagaagatgaagaaccagcagaatttctcgcaatgttgagtctgttgtagcgcatgcagtaatgcaggagtttcaaccaagttcttattcctttagttggctcttttcgaccctcgacttactttcagacatcaacattggtttatagatagccaaaaccagcaaggtaattaactatgaattcaaattgttggatatttgctacttcccttttgggttttgtggtcaaagaaatacacgctaaccaaagtagaaagttgcacttgcattggacactgcctactattgtattgttcttgaaaaaagcttgtagatttgatatattttatattttccttgtgtgtttgtgttcttatagcctatttttcttctggacatgttccatgcagggggtagctaaccatgtagctctaatcaactggctctacaatgctgtagcctgtgtaacacacctctttcttaacttaaaaatcattgtcttctggaccaactttgtatattcactcattctagaagtaaatcttgaaagtttcctttttgtttttttattagtagaatttttggggctaaattctcttaactatcactctacttgcacttaaccctctaagttgaaattttaatggtaaaacccttcaaactactgaactggtagcaaatttaaggtgctattcattttgcaaaatataaaaattttaaatttataatattttttatttttataattttatttaattttgaaaattatttttaaacaataatattaagtgtaccaatataaacgtatcatttgtataagagtgcatacataagcagtctatagtgatacttaatcagatgatactttcaatttactatcagttcaaccgtttggaggattttactttgagtttgagtttagaggattaaatgtaagtgaaatggcaattggaaaaatttagtccctaaaaactcattattattttttttttttttcaaaacacaaattctcgaaggctaaggtaccaaaggattaaaggaaaactttcagctacatcacaactttcagaaaatgcaaacttgaaaagttttaggaatgctgaaaccaacttcagttttggtgggctgggacttcggctaataccagcccaattgccaaatcatatcttactatacactaagtccatctacaatgcatgatatataaaatttttatagcaaatttaactcaaaaaaatgacttaatattagaataaatagtacttttgtccaacactacctgatcttgtttcataattatacttaggttttatttttttactatcagaaattagtatttttactttatgaattttgaccaatataaaattttacatgcttttattaaaaaaaattaaaaattataatattctattaattttgaaaattttcaaaaattgataaaaatattaagtttacttaaaaaaacttatagtattctcaagaaaaatatttttcaaattttatcttatttataaacacgtatcttaaaaaaaacaataccaaaatgattaaaaatctaatatatatttagacaaattaagattttttgaagaaa

SEQ ID NO: 39910 - DNA, 6977 bp, Cannabis sativa
tctaggtgactttataggccaaacaatgcaatcctctgttaatgggcataagaatatataacataaatttcacatatatcatatttaatacacctaaaatttgaatatatctacctaattgcataaataataatcaaaagtctaattctaaaattaagccctaattatattataatttacataatcaagctaagcggtcattataattattcccccgttaaaaggatgttatcctcgaaatctaacctgaacaattctggatattgagcccccatttcagactccaactgccaagtagcttccttcaccttactgtttccccaagttaccttgactaacgctatagttttattccaaagggttttcttttttctatcaaggatctacactgtttgctcctcaaatgacaaatctggttggagctctaagttttattaactcaacacatgagtgggtttgagatgtattttcagaacatagaaataggaaatatattttgaactgctgacaatgcttaaggcaaggctagacgatatgcaattaatccaactttttcaagaatctcaaaaggccttatacgtctagggcataacttgccatttgtcctgaaatgtttaatccttttcattggagatactcgtaggaatacatgatctcctacctgaaactctaaagttttgtatttcggatctggataactcttttgcctactttgagaggtgagcttcatggcattgatcttctctattgccttattggtccactaaactgattttggacccaaagacttttgttctccagtttcatcacagtaaattggagatctacattttctacaacacaaaatttcttatggagccatcccaacggtactttgataactattgttgtataaaaattctatctatggtaaatacttattcgaagggccttcaaaatccacgcagaagctcgtaacaaatcttctaatatttagattatcctctcagactaacgatttgtttagagatgaaaggttgtactgaacttcagttttgtacccatggctctctggagtctttctcaaaacatggaagtaaacttcagatcctgcttcatacaatagactttggagccccatacaatcttactatttcctttacatatagttctacatactaatctactatgtacattattttcactggtagaaagtatactaacctaataaatctgtccacaactacccatatggaattgaacatacttgtggttctaagaaatccttgtggttctaagaaatccaaccatgaaattcatggtcacatcctcccacttccacttaggaagagtcaaaggctgcaacaattctacaggtctctggtgttgaactttactctattgacaagtcaagcttcaagatatgtattctaccacatgctttttcataccgcactactaataaaagggttttaagtcctgatatattttggtagtgccagggtgtaatgaatagggagtggtatgtgcttcattgagaattttctttttaagttccacactatttgaaacacaaacttgagctttataaagtaggattccattacttaacactgtgaaatccttagcttgaccagctagaacttcttctcgaactttaactaattatggatccactaattgagcagctttaactctatctagaaaatccaattacagtgtcaaattatttagttttcccacaacaaactcaatacccgatctgactatgtaatctctcaactgaggcaaaataataatcatgttttttacctgcctggcggctttcctacttaaagcatctgccactacattggccattctaggatggtagagaatttcacaatcataatctttaaccaactccaactaccacctctgtctcatattgaaatctttttagtaaagaaatatttgaggctcttatgatcggtgtaaatttcatacttttctccatagagatagtgtcgctatatcttcaatgcaaacatcactatagcaagctctagctcacgagttgggtatcactaatcatacttcttcaactgacgtaaaacataagtgatgaccttattagcttgcattaaaatacacaacagaccttgtttggacacgtcacaataaaccataaacttctcctaatgtaacgataatgcaagtaccgaagatgtgatcaaacgttgcttcagctcttagaaacttccttcacacttgtctatccatataaatcgttcattcttttagttaactctgttaagggcattgacattctggaaaattcctcaacaaaacgttgataataacaagtttaatgcaaaaaaacgtctgactttagtgactgtattcggccttggccaatccctaatagaatcaatctttctcagatcaaccataattccatccatactaacaatgtgtcctaagatgacacttaggatagccagaattcacatttcttaaacttggcataaagcttgtgttctcattttctctgtaaaaccatctgtagatgctactcatgctctgcttttgagtgagagtacataaggatatcatcgataaatactaaaacatatatattgggaacaaccttgaataccctattcagaagatcaataaaagttgatggagaattggctagtccaaaatacataactaagaattcatagtggccgtacctagtacaaaaggcagtctttggaatgtcttcttctcagttttatcaactgatgatagcccgagcagagatcgattctagagaagactatctttttttgaagctgatcgagaaaatcatcgatcctagacacagggcacttatttttgattgtcaagttgtttaattctctgtagtcaatacacatgcaaagtgatccatcctctttcttaataaacaacaccggagctccccagggtgacacagtgggccacaaaaactctaaatcaagcacccctgaagttgcatctttaattacttcattttggtagaagccattctatatggtaccttagaaactagtgtcgttctgggtgctaagtcaattacaaaacctatttctcgttgcggtggcagtccaagaagttcttctagaaacacatcttaaaattcttaaaccactttgatgtcttcaagccaaactaaataaggttgagtggtatcaaacaccactgccagaaaccatagacacccctcctgtaacaagtctttggctttcaacattgagatcactagaatttgggaatccagaactaatcccataaaaacaaatagttcctcaccctcgaattaaaagattctcgtcttctgcttacaatcaatacgaatagtatacttggacaagaaattcattccaagtataatattaaaatctactaaagccaattccactagatcagcactaaactctctatcctcaatcctaatcgacatagacctaactcaccttttagagataactaattctccaccaagcagtaagattccaaactctttatcatatggcctactaaatttactaattactctggctgtcacataagaatgagtggccccaaagttaaacaaatgagagtaataagagtttttgaccgagagctaacctataataagtgaagggctagcttcagcattagccttagtaagagcaaacacccttgttagagcggacttcacctctgtcttctgctcttctttctttacctatgggcagtctgttttataatgtctaattatacaacactagaaacattctcaacctctacactcgctcaaatgatgcttcttatagttggggcattctcggtaagtgtatgggctttcaaacccacctaatggtttccacgatcttggttccctcaaaacctcacggatgaaacttttctcttctttttagtggttaagtcactaccacctctacaataactagaggcaataggaacagtgttaaccaacaatctgagtccctcgggactcttcgatacactcaattgcaccctcagctcacagtggattcctactatatctacataagaagtggtatcatttgttgtaattatcaggtcgggtttaatcttgagattcaacccatcctgatacttctctttcttactaaagtcagttggcacaattcccaaagccaacctagctaatctattaaactatgtggtatacttcgtgactgttatattgtctttctaagtcaactatgtgaactcttttctcttggcactacggactgcctcattatagtactttgcattgaataactcttgaaattcctctcaggttattctagtgacatcttaggtgagggataccatgtcccaccagactagagcatcttcatggaattagaacgttgcacaagccaccctattgttgccagtgactcctataaaatttagaatcctcgtaataatagttagccattgctcgactttcataatattcggacctctcagaaagactagaagtgcttgcttacagaacctttcataaagtggttccattcagttagcaacgataactggccccacttgcatagtaagggcaggagcaaccttcacctcaagagtaggcattacaggagcaacttgctgtcttatacgctagatttcatcatcttgttcattgatcctggcaagcattttaacaaacctattttcccaatcctacgtagcctgtggtgggttagcatcaccccgaccacgtgccctacctcttgggcctctgcctcaaccacaaatacttaggggaaactgaactccctaatcgccactagatctaaccaaattacactggcttctcatgttctgcctggcgtcgattctattagaacagcctgggaaacaatgagctagccttgtcagattataatcaatattaaattcaaattaccccttatatgataaaataataaatgtacatattaagttattaggctactaacatgtaacttactaacaaaacaaactactaaagcgtaaaaaggcttactgaactgtgagtcaagcttatctttgatggtgattatacatatcgtgatgatctacaaaagacaacctaactcataccaaatcgtaacaccctactagattaggcatgttatcgtgatttcttaatgctatgcatttctttgctaattaaagggtttatggaaaaatatggatagttaaaaccttcttgattaacctttaaaattaaataaacaaaagctttatataatttaggatcccgtctttaaaatttacaactgtaatacaaaatatgtaactataaaaattgtcacctaacgactactaaataaagcctgctacttcaaagatcgaacactccaggtctaaccaccctaatatgtacaatcttcatctgctcgtactaactattgttcagtgtttgctttgcctttacctacatatataaacaataactgtgagtcgacacttagtaagaaaagcataatcatagcataaatataaactggattataactaggcgcccatacacccaattataactctatcccgtgtcccacgcgtattgagtctagaacgttcatgcaataatattattgagcataatatcagcatatgcttggtaccttagtttcaccaatgtgatagcattagtcagtacttttccaaacatatattcatcggtatttagcgcaagtctatgtacactaataccgccattactggtatgttctctaacagtcattcataaatacgcacactaaacatgtaatcatatatgtaattattatattaatcttaccttgattctgaattctggtgtgctggtcaacttgagtggaaattgctactcgacgatttacatgcctctaagtcacaacattcgtaaaactgataagtgatactctaaatcaattcttggggacttaaaattaaaactaaaagtatcgctatagatagatatcgtggcaataccctaacattgcaaaaacataaagtttcctacaattgttataaccagtaaatcagattcccaaaatggaaaatcagttcctagggttctacctagggaaatggttaatcggttctacaggactgccaaaattggttaatcggttctctataagaaaatcctaaaaacttcaccatcaaataaattttaccccaaatcaaaccaaactctccagactacctaattaagccataataagcataaaccagctgaaaaaatcaacaacaagaatctataacaaaatccaccatggaaggtctaagctttagttcaataactcaactctagcttaaactcacccataaccaaacgaaaacctacttaaaaaacctttaataacctcaaaacaaccttaaaaaacaattccatgcaacccaaacatacaaaagctaaactcataaaaaccatgaaaacctaactattttaatatgaattacaaagaaaaaaggaaggagatgcttaccttaatttaatcatgtgctaactacttaaatccatgctgccaacactcaagattttggtgtaaaaatttagtttcccctttaacgttctttaggtccaaatgtgaagagagaacagagagaattagttttctctttgatttttagataagagataatagtgaaatacttattttttatttaacttaatctaaactaattaatcttaagatttactataaaatcaactatctaataaaaaacaaactatgataaaattactaatttctattttccttcactaagaagtaacctagaatgtaggggcaatatggtccaaactcataacccgagatactcctgacattccaagtatttaaaaatattgccccactaaaataaggatactaaaccttgtctgagtgactctataggcaaaatgccgcactccactgttatcgggcataaaaatataaaaaatataaaattttacatttatcatatttaataaatctagaattcaaatatatctc

SEQ ID NO: 39911 - DNA, 2365 bp, Cannabis sativa
  modified_base (2338)..(2339): a, c, t, g, unknown or other
ataatacattttggtgttgcgaaattcactcgacaacataccctaaacatatactatttttatcttacttagacaactaaaataaaataaatggacaacaatgctactttattcaaatcaaactaaacatctcgtgtcaacccaaaataagcttaaaaacaatacacacaaacaacctcgaaaaataatttaattgcattcttttttcaatatttgagttaacaacaagtaacaacgtgagaagtagttagaaaacaggggagtcatggaatgtagtacgttttctatatttaatttgaaaattaattaattatatataattaatattgaaatcaatattaatagattaattaatatttcaataattaattttaaactttgtttttaattataaaactatttatgctgtgatttttttttcgcatagatatttatttgcacaaaacttagcgcaattatctcataataataaaatactttattaaaaataaataaaaaaaattgttctaggacaaacaataaaataatgaaatagtatattcctttacaaaaatggtatataccttaataataattctattataaattaatatataaatataatcaacttacactgaaaaagacaaaatccgcatataaagatgaaatgttcacttaaagaaatatagaataaagacaaaagaaaatgaaagttcttaaaagtagaaattaaaaatataatctttaaacaaaaaaaacaaaggaaagttaaattttcttttttctatagccacttttacatttctttcaaatttaaaatgtttgaaattattggttgtctttagttttaataatttaattggggaacatattcacatgtgatcaagtgctaactattcttcttagtatataagaatgtctaccacctgtgtataaaatatagcataaatcccttaagtcaatttccttggctgttaatgtaggaatgattgctccaaatacatgacagtggaaagcggaaacttgcagaaatttccatcttttatgctgctgctagctgctacaagtccatataaaatagaaatcaaattaaatatttaataagtttattttgtttcacattactaccaaaaaaatggtaaatactattttggaccctgtattttacaaaaattattgattagatcttctgttttattaaatgacaaaatgaaacatatattttccaaaatagtaaaaatgagatcttaagcttaattttcgacaatttttttttcatataaccagcttgaagataattcctaacacgaacaaatacaaaaaatataaacagttttgtcataacaccttttagattagattattattaattttttttttttgataaatcagcaagtttattattgatccgcaaactattacattctattacaatgagagagtatcttttaacaaaaaagacctcaaagctatttttgtacaacttttacaacttttgaaaccaatctctatcttcttgactaatcttttttggccaaactaattctactcgatgcttgacactattcttaattctttgtacaattacatctttgttttttatgtgtttgttccacagattgtcatttcttacaaacaaaatcgagtataccaagtgggcaatggcagcagccaataccctctttttaaacttgctaattttgcttttgtgaatccacttgaggagctgatgtagatcataagcttgtgttctccatgacagccactctttaatttcctccacacaataccgggcataagagcatctgaatagtaggtgttcgattgactcatcatgctgcagacagagattacaaatagcatctaaagtaatttggaatttctgaagccgatttttagtcttgagcctattttgtatagctagccacaatatgaagttgtgttgggggatattgaatctcccccaaacttcatcacaccactataccctgttttgaatttgacaaagcaaattatagcctttatagatacggtacctgctttgtgtgaactgttgtgtatcagtaagagttttgattgtgtcttttgctgccacgatttgcttccaataccaacttccatgattcagaacttggtatccccaccattcttcttctttgagatacacgttatgtatccatttaacccagagattgtcttctttgtttgccaatgcctatacgtatttaaatagagctgctgagttccattatgctagcttcttgaaacccgatcctccttctgattttgattgacaaacattagtccaagctattaaactagctccttgcatcacgtgtttgttgggttttatgccctnnataaaactctttacaatctgattagt

SEQ ID NO: 39912 - DNA, 2077 bp, Cannabis sativa
atttgagatacttttcaaagtgatgtttttataataatattgaattatatgattttattctctatattttaatatgtacaaatcatgttcttaaatttttcgactctaaaaaattctcctcgatcgtttcaaattgttgaatttaaaaaaaattgtctatatatgtaccaatgtaataattaagcatctaatcaaacatgtcatcaatgcataataattctaataaataaataatgcatatatttatgccattcttgtaaagtttgttctactaattaacagtcaaaagaaacaattaaggaataattagtaatgtctctactttagttccttacgttaattattagataccaatcttcctaggctaaacttcatctttcccctttaattattcatgtttagccatatatatgtataaccatataataagaattaaattaataaacaaaaatcatcaaaatagagagagaaaaacacatatcaagatgagtaaaagccatgaacattcaatttccatgaatgaaaaaatggatgatcatgttgatgatccaaatttcattgcaactaatctcatgtctaatcacaacattgctccactctacaagaaattactcgaaaagttggaagacgaagatgatgaaattatttcgtgtcaagatcttgatcatcaagaatcgaaaatggttaaccctaagattcaaagggttccaacaattctccgaaaaaacaaacatttagagaagtatttcgagccaaggtggatttcaataggcccaattcatcaccaaaagccacatctacaacaccaaactcaatacaagcttgcattggccgcgaaattcatcaaaagcagtggttcaaaaaccgaggttttgtacaacaaaatcgagaagaaattcgaggaactaaagaaatgtttcgatgaaaattatgtcaagtgttacgatgatgacactctttgttggatgctattttttgatgggtgttcaatgcttcaactcataaatagttacaacaatgatgagttaagggttttgaagattaaaactgaccaaatagctcttgctcaacaagatttgttcatgttggagaatcaaataccattttcgatactcaaaattttgatggaatcttgtagtgaagagaaatgtgaagatttgaaagtgtcaattaaggaatttattcgttacaatgtcatggcaccacaaaagtacaagaaatctttacaaatcgaaattgatggtaatccagagccagttcatcttctcgagcttcttcgatcggtgattcttcaacatcccaaaaaaaatcacaggagttgttccggttgtctaggtaagaaagaatttttgttcaatatagctaatacaatatttaattgttcttacatttataaataaatataggtataatatatttactgcaaaatattatttattaggtatttttgtcatgaaagatttaatttataataattaacacacatttatatatatggtacaatattatgtagtttagattaattacatatatattattgtgtgcaatatttttatgcaattttgagtgtgtcacaactcacaatcattaaagttatgtatggaattttgttatcaaattttttacatggtaggaatttaatttaaccaaaattgtatttgtgaaattatagttcttatagtttttttaacatttaattatttatttgagagtttcatttgttattttttttttagttttcaaattattgcttttgaatatattattaaattttaaattttgattttttatatatatttttgaaaggaaaaggcctcaccaagtcatctaaaatattattttttttgtaactttaatttgagaaatttgataacatgacagagtcatatttttatacataagtgttaagtgaatatattgtaattatagatatatatatatattgaatagtaaaagatatggttcatattaaaaataagtgatgaataaaatataaatagtattaaattttcacacataattaatgtgaaattctttaacaacacttgtgctcgctaattttgtaggtttcaggaaa

SEQ ID NO: 39913 - DNA, 1897 bp, Cannabis sativa
ttaatattattttatttaagttattttaaatttatctttatgatataaattatataaaactaatattttaattcaatttcattatacataactaaatagatatattttggagttccttgctctttaataaatttattatttaattttaattaattcaaataatatttttattttttcaattcagttaaataatgtttttgagctaatattattaaaacaaatttagtcaaaagtttgaaattttatactattaaaagatggattggtttgtgacacaaataataataagtacaaaatgatgttaatattttatcatatatagtagccttaatatactttgacacatgtaaattgtgatgcgacttttatttgaacttatgtattcataacattatttaattattgtcacatttaaaaaaaatatacaacctattataaaacttgtctttcacaaaatattatctagtaaatatataaaggagaaccataaagaggatgtcatgtggcatcttctccttctaataatttatgctttttaatttgtagatatttttatttttttttcattttattttctcatttttaataactttatacttttaaatattttaaaaaagtctcatatattttagaaactaaagtctcacacataatttagaaaccatagtgagtttatacttctaagttatatatagatttctattatttcactttagtttgtctcaaaattaacatttcatattctgtatttttttaacttatgaataataaaaaataatcctttaaattttttttatataaaaaaattattttcttatatattaatatggtttttatattataagttataaaaaaaatgacgatttcttttatactattttgtgagaaaattagtgttacattattctttttgggtgattaaaatattatagtgctttaaataagaataatacttttcataatagctaaaataatctatctatctatatctatataaatctataaaagagaatcataaggaggtcatgtgacattcttcccttctaataatctatgttttttaatttgtaaatttttctaattttttcatttcattttctattttcttaaaaaaatttaaacttttagttcttttaaaaaaatctcacatggtttggaaatcatagtgaatttataattttaggttatatataaatttttattatttgtctttagtttgtctcaaaattagtattatttattatttatatttataattgataaatttaatatcgtccaattagttatatttttctttaaagaatatatctctatttattaatatatttatataaatatataaaaaataatcccttaattattttttatatatttttttttccttaaatattaatataatttttatattataggctgtttcttctatttcttctactataggttacattattctttttgtgggtaattaaaactatattaacttattaatataaaatttctattagaataataatactccttaaggatatttttgtatataaacttttaattatatgaaactgttgtgaatattaaaatgtataagttatatatttttcactattgtttctctcttgtattatatatttttatatgtgggtttaatattatttatttactatgtgtgattgacaaaattagtctttaatacaatacatatttgtatattattcaatttttatcaaatatgtaaaatgaaaaaaaatcttttaaattttttaacaaataaaaaatatggtttatattttttatttaaagtattactttaagttgaatatatataatattattatgtttataaaattaaaaaaaaaaatgttaattaggatttttttctccgaactttcacatgtaccaa

SEQ ID NO: 39914 - DNA, 2625 bp, Cannabis sativa
aaagaaattgctatggtggcctggcccatggaggccataacttatgtgaggccaatggggagcacaatattactattacttgaagtattaaattatataataataatgaaaaatcaaagataatttgtacactataaaaattaaaaaaataaaaaagaatgactatggccatggccatggccaaatttcaacattcaggtttcccacggtgtaaattagtataaactataaaaactacaccaggaacatgtcagagtgttttcacctcctcagtatcgagattaattaaaactaggcttaattatataaattaataattaatcaaacattactaattaataaataactttttattgattaattaatgttacagtgtattctcaatagtactgctgaatatatatgttgttagttgttaattgtatttgctcttacctaacaagtaatttattttaaaatggatataattgttgtaaagttttacagttgataaaatcaatgctagtgtactgtattattctagtgaaatatagttgtccatgaagtaaattactcaataatctttttttttttgattagtggttaaattggaaccacacccccaaacaaaagcagaacaaacaacaaacaggaagaggaaactacagggcgtgagaggccatacaaccaagcttaaaaaaattgtctaaaatagaaagttaaaaactaaagagaactaagctaaaaaactaaagagaactaagctaaaccatgaccatccgcattagccagctgcgggaaatcattaaaattggccaaatcgataaacccaaacttgttgttgcgatttgcccattgagccacataatgggccacaccattgcaggttcttggagtccacgtgatctcccaaagattgaacttacctgcaattgtacaaaacttgtgaaccttgtcttggatattaaaatgcaacttatgtatgtcggatgaactgcttttcaaagctgcaatagcgtttaaagaatcacactggaatacaatatttctgtatccaagatcaactgctactgctgcaccttcgcacacagcagacacctttccaggcaatgggtcacagtggttcagccgaaaggaatggattctcaggatggttccagtgtggtctcggaacacagccgcccccgttgattgattatgtcctatagcaatatcggaattgcaagccatccagccttcaggaggaggcttccattccaattgaagagagtcggacgagttataaggaggagagagttcttgaattctgttgttgatgaagttgattgtgattgcaattggggtggattttttgtcatgtagccgcccatttcgttccctccaaatgctttcaaaaactatggcagcccccccaataattgattgaagtcgagattagggggtctgttaatagcattcaaaaaccaagcaagccaactatcccaatttgatacagaagtgacatcgactcttaggctccaacaacatccaaaccagattgctcttacatagttgcactcccaaaatagatgaaagatgttttcaacggaggttgagcagaaggcacatattgtatcatgaataggtatagtagagctaagtttttcttctgtggggaggcaattagcaaggattttccaccaaagcattttcaaccgattgtggatctttgccccccagatggtattccacttcctatccccttccacacttggattactattctttagcattctgtatgctgacttgattgagtactctctactaggattcggcagccacaaccaagaatcatgtaaggttcctccaggcaataagatgttaaggattcatttggcatcatcatgcctaaaccatctcctaatcaaatcttcattccattgatggttgttgatgaaattacttaccaaactaatccccaccgcatcgtctacacgagggattggttctcgattatcccccgaaacccacggatcaaaccaaattgaggtggaattgccatctccaatcttccgacaaatacctttttggagatcactccgcatacggagtattactttccataaaattgagtcagacggcttagcttccaaatcaaggaagttctggttcttgatgtacttatcagtcattactcggcgccacaaacaatcttcacttgttaaaatcttccaagcccacttcatgaggaacgctttgttcataatctctgtggcacggaatcccaaccctccatcacttttcggtttacagaggcgatcccaggctaccaaatgaagctttcgttttagctcagtatccccccaccagaaatcactcaaaagtttatcaatcttgttagccgtcgtggtggggattacatatgaggaagcaacataatttgctaggcttgaactgactgccttgatcaggcaagtttttccagtgcttgacagaagccttactttccaaccctgtattctctttaacaccttgtcaattatatgctttgtgtcctctgttcgcttgacagatctaaaaagagggagacccaggtatgttgctttcctattcatctgtctcatgccatgaatctgagcaataacttgagcctttctacctgccact

SEQ ID NO: 39915 - DNA, 2317 bp, Cannabis sativa
  modified_base (2243)..(2281): a, c, t, g, unknown or other
tggaatttgggataccaactgtcacacctatgagctatgcgatctacgcaattccagatataaaatttatactggctatccttaaacctaactaacgaggtacgatcggctctaaacacagtaggagaccatccgtaattattacctcgggatgcttcttctttagcttctcgaggggatactttcttcaagtagtggatgtgagccacataatctttgtgttcctcgtcaacagggagtgaaacctgttgccaattggaatattttggatttttaatgtcacaagtagattgcttgttgccaaggagattacatgtcttccggttggcctcgttcagtaaaaaattagttgatcgtaatctgaacagaaaacctaagagacaaaaatgttgagacctcaggagttgggataggtcttttcaaaatcgttgtcaataccataagcaaatgtctagagttactaaattgaaaactcaaaaccaagtgttgagacagaaatacttacatatgatgcaaaatgtggttatattaattgggacgaggccagacgtccagaagaaatcatctttgaactcagttttgttggtcaacctctctatgatcgtatgatcattcgtgtgggtctcaagataataaaatccatcggctcctcgcttccttgcggggtaggcctttattgagtagaagtataaaatttcaagtggagttgggcactcccaccgcaaaatgtggtataagaccttcagacaggccagaattctataggaggttggaattaattggacaggggcaattccaaggtgattgtagaattcctagtaatctttgagaggaagtactgctctagcctttatatgctctaggctccaagcgcctatactagatggttcgctggtgctacacccttcttctcgaattatcctttcagggggaaaacaaataaattaccctttagcgacggacctaactcggcatcctcgttcatattggatgccacgagattttagtacctcccccacgtaagctcctattgacctaactttggattcaataagttctgcctcaaaggtgactgtgggattttgaggggtctttgattttcgaacttgtgagtcatgatttcaaaatctaagccacctggtgaaaaagtaatagtgactcgaggtaaaaacaagggtctcgctaaaggaatagaagattaattttggagttcaggccaagctacatctcgtagaaaatgacatttaccctcaattatttcctataaaaatcgcctttagcgacttgaagtctcatcctgattggtttttattagatgatccctagtttttgcatcgtttatctcaagaatggttttaggtacataagttttagattcgagtagaagggcaaaaattttaggacaatcaatttctaagaagtctggggttgtaatttctggaataaattgggtcatacttttgaacaagtgtaatcccaattttcgaaatattaaatacaacctaacccagaaatctatgaatctaataacctaaaaaaattccttaaccctaaaattgttcaaacaaataaaataaaaattacctaaaaaataaccaaacaaagcagataaaggaaacaatcaatcacaaagataaaactacaaatacataaaagggaaataatgggaaggagggattgagaaacttactgtcttgatgaagatttctaggcaatcaaggacttcgcgattgagattttgatgattgaaatgatgggttctgaaagtctttgaggttaaaaatgtaatctgatgaaatacgcaagaaataagtcaatgacattgaggacatgcaagttgaaaggggagataatggcaatttgcagaagaaatttgaaggtctgaagtgaacaaaatggcaaaatgaactgatacttttaatttttataccctgttattgatcaccgttagatcaaaagaaatctaatctaatagatggaaacattgcaaaagagaacaggcagagcatttaatgctaatgatgtgcctcgaagttccaaaccactaaaaacccaaaacatgcaacttttaaaagatgggttaagacgaaaatacccttataatcttttaaaaagttctttttattttaaaaaaaaagtactttttaaggggcaattgaaattcagatatgctttaaaagttgactgttgggttttgtgccctaaataaaacccattccaaaataatcagatttacttattannnnnnnnnnnnnnnnnnnnnnnnnnnnnnnnnnnnnnnatgatttatttcatgattatctttaatgtataaatt

SEQ ID NO: 39916 - DNA, 1524 bp, Cannabis sativa
gaccttccccaggcgatgtgggattgcacaacttatccggtatttccccttacggatcacgggactactgactctcacacgatctatctgaaggggcaggatatttggatttttctcttgaaagcagattcgagttggtattttaagaagttaatgaagattagagattttactagcatgaccacattgaatcaagctgtgaaaggaggcaagtttaaggtgaataggttctataatacgttgataggggcagttagagctctttattctgctattgtttggcacaagctgcttgtccctaaacatcaatttatttactggcagattatcaatgatcaactcctaaccagagaccacttgagcaggttcttttcaatcccatcgaacttgtgtgcggtttgtgagaatgcccaggaatctcacaaccatttgtttatggaattcacctttaccaagaagctgattgaaagtatagaaagctgggttggtaatctgaattggccgagcaacatccaggaccttcagcgaaggaattggcaacaaaaacctaatctgtctactgccattttgaatgtagtaactgctgctaccttgcattatatttggattaatagaaacagctgcatttatgatgctctttgttaaactgtgttgtctattagtaaggatattaaagctatagctaaggctagagttttagggagacactacactaatgttaagaaaaaagacagttaagttttgcaactagttagcacgtggtagctgtttggtttgtggctagttgtggttccaaccttctttgttttgtattgttcggtccttttgaataaaatttcctttttgttaaaaaaaaaaaaaattgaacatactgtccaatattaaaaataacaataaaaaaataataatgttacgaataatatattaatacttttatatattttaaattaatttaaaattagtataagttcaattaacctaaaaaaataatattaatatttatatatatattaaaatcaatctaaaattaataaataatattaatatttttgtaaaactaaacttactaacaccattaaatttaacgaaatattcttatatttttaaaatatttattaaaccaacaaaaaccgttaaataactataaaatatatatatatattatacttatagcatgcactttattattttaaaaaattatgaataattatttgtgttgaaaataaagttcaaaggtgtaactagtttttaaatttatttgtagatatgtgcaattaattatttgaaattcaattttcaatgctataaattattatacattttttttgaaaaaataattgatagaactataactataatatatatacatggtattacgtacatatataaagaaatctatcaatagaaacaaaaatactcctaacttaaaattttggttgatatattttatgtatatatgacaatggcaaactaaaatagtgacatttaattgtgatagcaaatatatattacatgtctatatat

SEQ ID NO: 39917 - DNA, 1336 bp, Cannabis sativa
atttacatttgaataattatttttgctagaagaatatagcctacgaatttaaaaagttaaaatattaaaaaaagtctattatcactactattataaccattacatgaataaataaattaaaatagaaaaatttaaaaataagaagaaacgaatgaccaaaaaaaaagtagaaacgaattggttagtatacactacaagacaacaagaaagaaaagatatgaatgaaaaattttcaaaaggttagacgaattttttgttgtaaaaggtatatacgctcttagtatattgtataatatatattaaatatattattccaaccatttcaaatatatatattattccacctatgctctacgtcaatatttatcaatacatacacgtttatatgtttatatgaaaagtatatcttcttatatttaaacaaacaatattggttcacggtttatatatctagattacatctatatttttctcttcatatataaaatgtaaaatgttactatttaacaatttttattagtttaataatatattttaaaaatattaaaatatttcgttaaatttaattgtgttaatagactaattaattttatatatatataaatataaatattatttattttaaactattttaaatatatataaatattaatattatttattttaagttaattgaacttataccaatttcaatttcaaattaatttaaaatatatacaacttttattatattatttataatattattattttttattgttattttttaatattaggaatattttaattttaatatttttaaattttataatactttccttaaatttttaaatattattattttaaaaaaaattaaaaaattaataaaaaaattcttttaatttataagatttttaaaatacatacaataaaaataaaaataaatatacattcaatacacgtaacatagtatttaaattgttttaggccgaccaatatgaaacattctctgtggagaatgtatatataaatatgtttgactgctattatatatacctattctcaacttatatataataataagccacggtattgtattcatttttgtatgctaatttaaaaccaattcaataatgaataattagagcgtgtaatcgtgtatgttaaggttggtgatgataatatagtataatatataggacgcatgcatatataatttttttacgggaaatttcattatttgccctaaataatataatctatatcaaaatttatacccttttataatttgtacaaattgattcctctaattttaaaagatttctaaaatacccctaaattaaactttccctctctc

SEQ ID NO: 39918 - DNA, 2327 bp, Cannabis sativa
ttatatagggataagaacaaactctatgaaagaaaaaaaaattccaataaataaaataaatttaaaaataactataaaatatttgtacaccaactcaaaaatatatattctcataaaaaactaaaaatatacttatttttttcttagttaaacaagttaataacaacgaataaacaacacgataacaatctcattttaatataaaaattaattggacatcaatacattgtgttaacattaataactaaacatatacttatttttctcttgattaaacaactaaataacaatgagaaaataatgagacaataaccccatataatatataaaaaaattattaggcatcaacaaatatttgtgttaacttaaaaaaaagacgtatacacaaaaataatcttaaaaaaaataaaataaacttaaaaataactataaatcacctgaacatcaactcaaaaataaataaatgtatacgattatttagtataatttagtttaatatataaatttggttatattttaagattatttcataaagagtagtgctaataacaacattttcttgcaacctctttagtcaacctctacgtctaaaattgtatatcgaaatatttttttacgaatctatatagttttgttaacaaaaatacgaaaggttgtttttttctttatttccaaaatatattttttctcatttctattatgggaagtaatgtgaaagaaatagtttttttttttaaaaaaaaagaaaaaaacctaattaaaataaaaaatagaatcaataaaaaaatatctaattttaatactttatataaattttctctatattttttattcattattaattgataaagaaaatagtaataaattagttgaaagttgtgttaggtgtttaaaaatacatatttgtatatgtaaaaatcctttataaaattaattttatctaatatttttttttttcagattaatgtaatatattttatcttaaatattttgtagaaaaaataacatttgtgacacaatatgaaaaaagaaaagaataaaaggagcaaaacaaagacgaaaaaaatatttttcttgaaagtaaattatatttctttttaaataaattaaaatgttagtacaatattaaagtgagaataatatttgtggttatttaatttattcaatcataattgttctaaaaaaaacaataataatgatcaaatatttactttagttgtttttattgtttaatgaatttttttcatcagctcattttatatttattttctcaattttctaaacggaaaatcttacctaacacgccaaatggcgtgtcctcctccctcaaatatacatatctaattaaaaagtaaataaggaagctttttagtcaatcttgtaaatttcctaacaaaatatataaatacgctataataataatataaacagacaaaggttgttaaaaaaaagacatattatatggccggcaaaagtgctctttgtatagaactttgtaaaaaaaaaattctacgggaggatcatactaaagtatccaataaccacttttatgcgtgattcagctgaaaaaaaaaaatccattttatgagtgttttttttttttttggcccattttttccttaacgagattttttttgaacgaacattgaatttttaactattcaatacacatgaaaaaataatataacttttttttaataaaaaattcgggtatgtatttagtgtccaaagaacattacttaattgatatggtgaacaatgcactttctatgtgctaccaaattgatgtttacttaattgatatggtgaacgttaggtgtcattttgatatggtgaacgttattaaattggatgtttgccccttaaattaggcatcattttgagaacacaagaaaaatgatgtgtggtaaaactagtgcgaaattaggaatgaaaagtaataataacgtgtcccaagaaaataaaaaaaaacaatcgtcattttggacgcacaaaatttgaagtataaaaataataataatataatgtcccattaaaataataatataatgtcctaaaggcagaatgatgagcactacttttaacttacgagaatacgaaacataatcattaaagtcacttctaattaaccaaacattaaaggaacatcatcaaaataacatataaaagctactataggagcaatatcaaaagaccatataaaaactactataggagcagtataaaaagatcatataaaaactttcaagtatcaaatttaagcctactataaagagaaccataataacaaattaaatgccaaacaacattattatcatgaaacttaa

SEQ ID NO: 39919 - DNA, 1198 bp, Cannabis sativa
  modified_base (1160)..(1161): a, c, t, g, unknown or other
gaagttgtagtgcccagaaaaaattccaccatgaagaagccgatgtagagcttgaggaattttcggtgtcatcaagatatatggccaaatgatagcccgattgtacagtgtaaatgccggtgtgttggtgatgccatatgagcctgtcatcggagctaaagaagctaagtagcactgttaaaattcgttccacatcaaggggagaaaaaaactattgcagcagagggatatctcattgacgttctggtgtgattaaatttgcaacaatgccatttggaggccccgtatattgaaaaggcaggaaagaactatgtcctgggagccacagatcaataccactttgaataaatctaccttcacctatcttccaacgcagtccggatttaagaaggtctttacccatgtgaattccttgccatgttaaggaaggggaatgactgatatgagcctctaaaaaagaattatgcgggaagtacttgctttttagaagctgtccgagcaaggagtctgatttttcaataaggcgccaagcttgttttgcaagaagagcttggttgaagtggacaaaagatcggaaacccataccaccataacactttttttttgcatagcgaattccaattgcaccaatgtatttttgcaccattctcattcatgccctaccaaaagtttgccatcattgtgtcaagttgtttacgaaaaaaaaccggtaaatgaaagcaactcatagcgtaagtaggaatagattgaactaccgctttgagaagcacttcccgacctcctgttgaaaaaatctttttgttccaattgtgcattagtttccaaatcttttccttaatgtggctgaaaagttccttcttatccttccccgaataagatggcaaaccgagatatttttcatgacattcactaatgggcatgttgagatgccgatgaaaaaatatttgggcagccaaagtagtgttgggggagaaagacattacagatttgtccgagttgagaacttgtcttgaagctcgatgataaagatcaagaactcgtttaatggcaaggcacgaactttcattagcatggaaaaaaaagcagtctatcattagcatgaaaatcttgctctttcacacttggtctagggacaaaatttgctctcagaattagatganntggaagtgtaattggcagtagtgaatatgccttgaac

SEQ ID NO: 39920 - DNA, 1394 bp, Cannabis sativa
attaattgtagtaaaattaaaaatttacgtacgtacctaaaagttggatttccattattgggccataaagtagaagtgaaaatctcaacatttttaggaatatgggaatcgtagattgggatgctttcatacaaaggcacaagtggtagttggcccacatagccatgaaacagtttatttgaaacgtttcgttgtttggtttgtaaaggaagatcgaaaacctcttctattgcatcaaataataaggcctttccaatgtctattggtattttatcgaactttgcttcgaaacaaccaaattcttccagtgcttcgcggacttgggtccttacggtgttccactcgggtgtacctggtttcagcccctgatcttcaactgaaaaatcaataataggaagcctaagaatgccttcgggcgccattgattaagtatattaattagtattaattaatttctttatatataattgttttggtacgtttgaggtttttggtcaaattctttagacccgtatttataagcttttaaaaaatatataataatagagaaatgcatgcatgccttactcatggtgattaacttattattattatattatatgtactcaattattattcattataaagtattgtatttgtaatcagataagatatcaagttatttttacatattatattctccattatcctcaataaatataatatatgagattttttttgagttatagatttacaatccaaaatgaattagtatatgattacaaattaatgacgtttcctccctccttttcttgcatattataggtatatatatttgaatatatattcaaataaaagaatcagaaatttcaaaactacaataataataataatttcgctcacatgatcttaattttcgattataaacgaaacatattaagcacctaaaatttaaaatttaaaattttccaccatttatattttaccgttctaaatttaatcctaaatctatcaaatttcatcttatttaagatgattcttctcatttcaattcataagatgtatttgatgaataaaatttgaaacaaaaaataaaataagcgtaatttttcaatcttcacaaaataaatataatcaactaaaataaacttctaaaacgcaatataaaattcaccccattatttctagcctatcaagaattgaggaaccctaattatatcctcactttttgccgatgaagttcaactgcgccgataattccttttttaaaactttaattaattaaacgaaacgcacagtttaaattagtttgtttgtttttttttttttttaacttttgccactgataattctttctggcataactttcccaccaaaattttcacccatattttcttcacgcaggaaatttctca

SEQ ID NO: 39921 - DNA, 3012 bp, Cannabis sativa
tggttttaaaggatttagattctttagaagaatgaaaaatatactcatgtgagaggtcaaatggagaactacaatgttattgagagaagagggggatttgaagtttcttttcttgtgctccataagactgataagaagaagtaagaaacaaacatacttttagttttgtttgaattttgcatttatgtaatctttttataaatattttcaattatcaagtttttaaaataattgaagcatctagtaaagccttggcttttacttggggactttaatacgttttttaactttgatgaaagagcaggtgggaatacgatcaccctgaacgacttagcagactcaactcattggcttacacaagctcatgttgagcttctcaagtacactatctcaaagtttatttggtctattaaccaagatggtttgagtagcatttattctaaaataaccatgcttttgttaatgaagagtgaaatgatattttccctaactcgacttctcatttcagctgggaaattgtctcggatcactgtacctgtgtcgtctcctccaaagcagtgactaagattggtatcaagtcgtttcgtttcttgaatttctggattgaccacccagagttcaagaatcttgttatgtctagttggcagaagactatatcagctgtgggaatgaaaggtatctacctcaagttcatgagattgaagcacaaccttaaaaaagtttaattttgagaagattggtgatgttgggaaaatgtatcaaaaggctaaggatgattttttagaagctaagctgcaagctcaatcccatttgagggacattctttatcaagatcaagaaaaagctgctgctagtaactttaatggcattgagaaaatgtacaataagttccttaggcagcgtagcaagattatctggcttcaaaatggggatgacaacactgcagttttcatgcttctcttaagaagagaaggatggacaacatgataacctcatttgtcacagatcaaggagctatcaatgataacttcactgacattgttgatcactttctcaatcatttcagaggtagtatgggcactaagaacacaagttcaaacatactctactctgaatgtcaggactccactctaaatttagaacagcagttgactcttctgaagccattcactcacaaagaaataaggaaagccttattcagcatcacagacaccaaatccctgaggcctgatggtttctgatctggtttctttaagactatgtggcctgaaattgatgctgatatttgcaaggcagtcactgatttctttatttcaggttaaatgccttctgaattacactccactttgatctctcttatccctaaaattgaccacccaactagagatgttgattttagactgattgcctgttgttcaactctatacaaatgcaagaaccatcttcacaaaaccagcaacctgatcaacctattatttcaaatgtgtctgataagccctttcttattcctcaatctagttggatcatagacactggagccacacatcatgtgtgctccaatccatctttatttttctctatccagaagcacaataaaattacttcattaaaattgccaaatggaagtaataccaaggttgcttttgtttgaaatgttaggatttatgacattttgctcacaaatgtgttgtatgtccctgatttccaacataaccttatttatgtatgtgctttatctgattcagctaactattcctttcttttccttcctcacaaatgcattgttcaagatatcactaagaatcaagttattaggatgggtgacaaaattggcaatctttactatatgtctgaacaaaaatttcctttaacttgttctgtcattgattttaaagtcaataataaaaatttgtggcattacaggcttggacatgtctcttgtaaaaagaatcatcctttgaataaaaaattgcagtttcaatgctcttattgttttgactttctttgttctatatgccattttgctaaacaaagaaaattacctattgttaatagtcacaatttgtcaaaaaattgctttgatcttatacatgttgacatttatggaccctacaatactcgaattgttgaaggctttaggtatttcataaccattattaataattgttctagatatacatggatacaccttatcgagaacaaatctaatgctcagttagttataccagcttttatacagttgataaaaactcaatataatgctcaaattaattaggggtgttaagtctgataatgcaaaggagctacaatttcctgatctattctcatctttaggacttgtgcattatcattcttgtgtgcaaaggccacaacagaattctattgtggaaaggaaacatcaacatttgttgaatgttgctagggccattttatttcagtcacacattcccttaccctattggggagaatgcatcaacactactgcatatatcatcaatagaacccctactccaaatgtaaaacattagtctccttttgaaatcttacattctaaggttcctaattatgaacatttgagagcctttggatgtttggcctatgcttccactctgagtgcaggaagatcaaaattttcacctagagtcgtcccttgtgttttcttagggtatctagctggtatgaaagcttacaagcttcttgatcttcatactaataaagtgttttgctctttgtttttcatgagcatatttttccctttgttgtggatgggcctatgtcctctgagttttctgatttttttcatgctaatgcttccataaatgttcatgaaaattatcctacaccatagtctgaatctccaattcccatccatcatgaaaacttctccccaatgcagtctaatgttctcacacagtctgctcctataaaataacctgcacctcccacttatatgaaaaaccctgatgttgttgaggttcctgaatcatctacatctcacagacctgtaagaca

SEQ ID NO: 39922 - DNA, 1593 bp, Cannabis sativa
ttctctaggaagcttgtctctcccgtatctcctctaacctttccatcaaatcttttttatcaccaccgcacattttgttcttgtatgtggtttattttttggatgatttattggtgaacacttgctgaggatctaatgactttatttcaccaaaattcctcttctacgggtcctctaaaaaataacccaatacaaatataaattctattgttcttgtggtgattgtttttgttttgctgaaaaatcaaacttcaattaaaaggaagaaataagagagatgaagcttgagttttggttttattttgattgttcttccaaaaataaataaataaataagatttggcaaaatatctgtacagaaacttatgaagcaaacaaatcaatatatattattttgacacaaattaatatataaaaggaatataaaataattaaaggaatataaaaaatataacaaggtgacaaaataatattgtatcatcctaaaataaatatatttatgtgcggacatttttttgattgcatataagcatcatcctaaaataaattcatacatgctaattaaacatactaaataaatttcaatataaatattgtatctatataattatgttaatattacaaaataatatgcatttgtaggatactaatataattatgatcattaacaaaatattatattatattttagtgtaattagtattatttagatggggtttgtttgtttataccttttaaagtatttttttcatttatacgataaactgttattgattacaaatatacaatgttttactataaatgctctaatcgcaacccacacaatgctagacaccgcaacacgtgaaaacgtaattatattattattgtaaaaataattatactaagacttgaatactttttactagaccacaatacatcaaacacttatacacatattttaatactagacacctttacaacatttttgtatataactcacacttttgggacactctttgaaatacttaaattacacttacttatgcactagaattatcactcaactcacctcacaccaccaaaggaccaactcctctatttataccactcagaggatagtgcattattatgctagaatgttctagcaaattgtcattttattatagcttaaaattttcttaaaacttcttatgactattaactctctatgattctagatgattcaataatattaccaaaataatagaaaattctaaatacttgtaaaggaggtgttgatcttgcagcactccccctcaacaccgactcatcatactgagttgttctctgagtttttgaaatcttgtaatgttgagtcattttgttgtttgctacttggtcttcgctctttatttggtgcatcactagctcttgtcggagtactttctctttaagaaagtgataatgtacctctacatgctttgttcgtgcatgaaagactggattttcagctagacaaatagcagactgattattacaataaagaggcactgcataatctataggctggtgtggatccttcatcaactgtatcaaccacacactttcttgaactgccattgttgctgctct

SEQ ID NO: 39923 - DNA, 1516 bp, Cannabis sativa
aatcatcttcttggtttgtgattcctgtatgtaaaatttatcagcatagaacttaataaaatgattgtcatcttcggttaacctgctgactgaaatgatattaaatttaaaggaagggacatacagaacatcacgaagtaccatatgtttaccaatacaaacattgccacatttatttaccatcaggtgttcattattaggcaagagcagtttaattggtttaataacatgaacactttgaaaagattttatatcagcacatatatgtctattcgcaccagaatcaatgatccatgaattaacttcaggaaaatgagaataatttgtcaagactatacctaacttacctgtcgacggccctggatcagtgggctgctgattacaagtttgggcagtaagaagactcagcagttgctgatattgaactggagttaactggggcaatactgcattattttcactgttgctggtactggtttcattcggagtgtggaattgatttgcaacagcatcttttgacttcccagttttcttgtctccaggcggatagccgtgtattttgtagcatttttctatggtatgaccaagcatattgcagtgtgtgcaaaatggcctgtctcgttttggtgcttgattttttgaaccatctgattttcctgcattcttttctccttgaaaagcaaatgccatattaccatttggatccaaggacacactttgtccacccctttgattttcttcctgagaaaccaaatgaaaaactctattaatttcaggtaaagggtccatgacaaggatattacctctgacttgagagtaaaaatcagatagccccatgagaaacgacatgatgtactccatgttgtaatgttcttgcaatttcttgactccaccacatgagcacccattgcaagtacagctaggcctgaaattagtcaattgttcccaaatggttttgagtctagtgaagtacatgctcacggtttggcttttttgcttcaagttcatcaagtcttttctgaggttgtagacatgagcaccatttctttgttggaatctcactttgagatcgttccaaatagccgaggccgattcatcatacaaaatactagatgaaatttctttagaaaccgagttaatgatccaagaaatcacaatgttgttatttcgaatccaagcgttgtaaagaatatggttagatatatggggcttaggaatagaaccgtttaggaagccaagcttgttcttgacagaaatggctaattccatcacacgactccaagcaacatagttgtcttgaccggtcagcagctgagacaccaagatatttcctggattatcaccatggtgcagaaaatacggatccgaggggtcttcaatctgacttctcgatctggttagttgagcgttacctcctatatctgccaactgactttgattttcgccattgttggactggattgaagctccatcatcaattctggtttcttggttattattcgacattgaaggagaa

SEQ ID NO: 39924 - DNA, 2098 bp, Cannabis sativa
aaccatattaaacacataccagccgaaattaataggaaataataaaatatttttgtcaattaaatatgctaaaaatggaattaacacaagatacaagaaaaatacctaacagatttttaagaaactaaaattaactactaactaacataaccgtttaactagctaattaattaataggtttatatacgtattgaaagtgttttcttatcaaatatcatgtaactgtttgagcggtttctgttactttttattttttgattattaggacatatataggtaggttttgtagcttataggcttttaagaacatcactagtgaaagttgccctcgaaaggaagaaagaataaatttgactattatttttttggtgaatataaatttgactattattgatctaagaagttatgatgggtcggcagcaatatcctaagagttaagaaaatacaaacttccaatcatttggattttttgcatcatctgccagaaagagacaaaaacccaaattgcagccctttgttataaaacaaaaaatggacgccgtattatgaacccctgcttaaacacgtatgaaggtctagagatagccacattatgatcatgcaacaagcttatcaaagctcttctcctaccgccacgtgtcctttgacatgaaattatgccatctcaaatttttcaattactatttatccaccataaaagcactgccaaaacatagggtggctctccaattaagtccaacaactctttcattttcttgttcttttgtttttaattaaccctaaaatcacaaatgtgagactagaaaattaaaccacataattattgccaaaatcttttcttttggttataacaggaaaaaaaaaacagaagtgtgaggatctcctttttctctctccatatagtggaggaaaaaatagattgacactactacaaggttggcttttagaaattgttttttcacccacatttataaaaagagaagctaaaggtgtgaaaatacccgctttgttcgaaataaacatttagatactgttttttgataaaaaccgtaagtataaaaattaattacacttatgccgtcagttggaggttgagtattttcaaccttatttaacatgcgtcggttattatggaaataaccgacgccatgggtgggtacgtgtcaatagactgtgaacctatggcgtcggttattatgaaaataaccgacgcaataggtgggcacgtgtcaatagactgtgaacctatggcgtcggttatttcctaataaccgacgccgaaggtgttatataaacatcaccaggggcttcgtcttcctcattcactcagcagcaacacagaacccagaaaacccatctcaaaccctcgccaaccaccgtgaaaacccactctatctccctcatttcttcaccatttcatcccatttttgtcttaaaattttatattttcaatatctaatcccatacactaaaaaagttttattttttcacccattttcactgtacccgagctatttttgaaaaaggttgtggtataactccggccaccgattttagcagagaaaacattgaatctcaacatccattaaggtataaatatgctttaattcattttatttatgtacattagtattatttcgtttttgtaaatttttttaggattttttcattttattaatattatattgtgtgtgtgctataggtagtcgggtttttatcgtaatttatcgccaaattgcatttataaggtagatatttattaacttgatatataatatatatgtatatattttgtgttttattattgaatatgtgtttatgtatattgtgtatttactatctgtgtattttgtataattattttgtgtatatatttgttgtgaatgagaatgaggtagtagggatttaattagttttgaattaaattttttaaaattatgttagtgtgatatataattcattatatatgtatatgtgtatacctttttttaaaaaattaactatagaatttagtaactagtaacttgttacatttttaataactagtaagtaatttaataattaaaattctaattttagttatatattgcattatatt

SEQ ID NO: 39925 - DNA, 3385 bp, Cannabis sativa
acaacaagtattgtgactaaaaatacatttagtcacaacaaattatcagtctttttagtatcattattggtgccttctttagcaacatatgcattttttgcatcatcatcatcctttgcttttttgcatcatcatcatcctttgcaccaacttcaacaacaacactcgcctcatcatttctcacatttccataacctggctcaccctgcccaagaccatttctagcatcatcaacttcatcatcatcctgactaccatccctatattcctcatcaacattgtcaattcttttctcatcctcattttccttagaactcgattcttcatcacccacatcttcttcattatcgacaccaacatccacatcatcatcatcttttgaagtgtggagcacatcatcagattgtgtcctaatttgtgtaagagcaacatgcaagcacttgaaataaatgaattaaattttgagtataaacctaaacaatatctaaaacaactacataaaaaaaccaaaaaaaaaaaagttacctcaataagaatgtctaattttttgttcaattcaacaacagcagtcataagagtctgttgcttgctaataacaacagaaatatcttttttcaagtcctcgtactcaatacgagtgacatggtcatgcgtctttgatgatgatagaccaataaatatagcttccatagaagacttggggacaaacttagaatcttgatcacgattgtctttacctttaaccttaataaaggacagagtcgtgtcacctgagaaataatcagccaagttcaaacttactctctccaccgatattggagaaatatttttcagttgtaactacaacaaaaaaaaaaaataaaaaagttataaacaaagggcataaattgaattaactgacaatgaaaacaaataaaagtaacaactataaaataataataaaacaaacgtaaaaaaacaaacaagtatctccttcaacagccggttaaagatgaggttgttgacattatccatctttaactgtgtaactagctttggcattatcaacttggatagaattctttgtaatttttttattggcctttaaacagtgtttaacaagcatattttcatcctacttgtactggaaaatatcagagtaaatatggcaatctatacccataattaacaaaaatttctcgacactaatccttagcaatttgccttgcacagaaattcaaaattccaactcatttggttgttcaacctccctcaacagcagaccatgtactcaggaatacggagaaaatgagcaaagctagttttggaaaatatttcttgttgggttggggtgagaatagttttaatatcttttataattgaataatacccacaagttattgctcttaaatgatagtattccaaatgagtgtacttgcaagtccagtcctagaaaaacagaataaaaaaactacttaaacaatacaataacaaaagaaaaacaaatgaagcataaataaccactaatagaaaaataaaaaagcacacacctcaacaatcctttttctagtgacctcatcaaacacatcatcagattcaacattcttaactcgatttatccttcccctacgagtaaacaaaaaaaacaataaataatactaaaacaattggtaatcaacgaatactacattcaaacaaaacaaacacacaaacacaaaaaaaaaaataacaaattagacatatgacagagaaaattaagaaatcccagacaaagatatctgtaagaaaaagaaattgaaacaaaacccttaaagcaacataaaaacaaccaaaaattatctcatcaactttgggcgtctgtaaaaattcaagctcaactcaaaatcagagtctgaatcttccaaaatgggacgaggatgtttggatatcctcttctttgaagtttcaccaactaattttcattaggtaggaactggagaggtagggctaggggatgttctttgaaattcctctttcccatattgagaatcgaggtaagtttttctgaagtttttttgggggattttttacgtacaactagggaagaagagattgatcgggtaacattcatagataatgaacatgcaaagtatttataggagaacaaataaagggggaaaatatagaggaaaacttgtgatttaaaactaaaaaataacggaataaatttcaaatatgaccaactaatactgcccctaacacaataaccctatgaattttaaaacaaaaataaatataaaaaaatattctcacgaaaaagatgatgaacaaggagagagaataatggggaagtaggactaaaccgaaaaagaacatgtagtgaatatcaagggtatggtatttttcatcatcaaatttaattaaaagaaaatataaaaagagagaactgtcactaaagtgacgacactaggttaaatcaaaattttataaaacttaaaatataatataaaaagatatgagtaaaccctgagatgtcacgtgtgataaaaatgggacaaaatttttttcctaaaaaacatagtataaaaaaatattaaaaaagtaataattgtcctgtaacagtaaaaatgaaataaaatggaaaaaaaaaatgtataagttgtaaattccccatataaatatacgatccttacaaatatattggagcatgagtgaaaatataagtacatgtttggtatcataactaaaaaattattttttatttttaaaaatagaaaattatttttttaaaaaacacttaggcgtgtttggcattgtttttcgaaaactgttttcagaaaataaaattacaaaaatttaagaattttgagaaaaacaaaatattattttctgttttaaaaaataattcaattttagtcaatattttttctcctctttatctcacatcattatactcatgattttttatactattttctctctcattgctttcttactcatcattttctctctcatagctttctctcccgtcattttctcacactttctctttcattagtttctcacattattttctctctcatcactttcttacattattctttctcacattattttctctctcttcatttcctcatattattttcacacattattttctctctcctcatttttagtctgggtttgtgtccaggtcggggtctaagtctgggtctgggtctgagttcgggttcgggtctagggccggggccagggctggggttcggttctgggtctgattccaggtctggggcctgggcaaaggtcatgggctgggttgggttggggtttggggttggctggggttcaggcccgggacggggtttggggtttggccgaggttcggggttgggccggggttcggggctaggtcagggtccggggccag

SEQ ID NO: 39926 - DNA, 2214 bp, Cannabis sativa
  modified_base (2181)..(2188): a, c, t, g, unknown or other
ggcataaaacccaacaccatggactagtaccattcgaatgaatagtgatactacatataattttcttgcgtgaatctttaaattctgcattatttatttctgcaatcgtttcttgctacaagtactgtttatgtgtgaacaagtaatcaacttattactgtaaatcttttcaattataatttattgaacctctttgccatgataacagtcaataagtaaaacagggagaatgaaatagatcgagaaagagaaagaaagccatggaaagaatgaacagaaagaatttttgattcattacattaggagtaagagtttatatacaagatggttacaaccaatcaataacagaacaatataacaaagtaactaactagctgatatcactaactaactaaagcctagagactaacatatttaactgtcttccaacacctcccgtcgaactcataattaaaaagtcttcaattttgagtttgcgtctgaagtccaaaaatctttgacttgaaatggctttggttaatccatcacctagttgatcatagattgtgacatgtttgatctgcaccattttatccatcacctttttccttacaaagtgcaagtcaagctctatgtgttttgttcgagcatgtaaaaataagattttgagtgagcaaaacagtgctcaggttgtcacaccaaatgattgaaggttgaggcaatccaactccaagctactaaaataaataatgtagccaagttaattcattagtaacattgacaacacttctgtattcatgcttctgtgctagaccgagatatggtaggctgtttcctactcctccaggctatcaaattcgagccaaagaatatagcaaagctagtggtacttcttttgtcatctggatctgatgcccaatcagcgtcacactaagcaactaagtcatatgacactggatttgtgagatgaatacccaattctagagtacaacttatatacctcaggattcatttgatagccatccaatgagtagataaaggtttttacataaactggaaaacttcgttcacactgaaggacaactttgttcagtgtgagctaaattgactctgttcactgttcgatcttcattggtgaagaacccagctggaggagcctctttaatacatttgagcaatcgatttcccttgataacaaccagtacctgctgcttccatagaaggaagttatgatcattcaatcagattgaaatattgtgattgaagaaaatagggtcttgaaaagtttgattagcttgtagtctgtttgtggcctgaggtccatgcatagttggatctgcagtgttgtttctaagagtcgattgccatgtttgctacaagagaagggaactactttgatactatgttgaacctctttgccatgataacagtcaagaagtaaaacagagagattgaaagagaaagagaaactagagaaagagaaagaaatacatgaaaagaatgaacaaaaagaattgttgatttattacaggagcaagagtttcaatcaatcaatataacataatattgtaatagagtaactaactagcttgcatcactaactaactaaattctagagactaacaaacttagctatctcttccaacacgatttagtaactattatttgtagaaataaattatttttttttgcaaaacatcaattttcatgtgacatattcccttacatactaatgaccattagaaaaataggacttggacaaaattattgaaacttattaatcaagtgctcattacagggccgatccttatgatgtgcaagtagggctactgcacagagcccaaaaataaaaataaaaataaaaaggtccaatatatttttttttcgattctttaatgccttttagtttttctttatttttttatttttatttttatgaacctaacttttcagagggctaacaacttgttattggtcacttccatttctattttcaattctattaagcctaaaaaaaaaatctataactactatttattatttttcataatatttaaaaatattatttataaattacattttaattttaaggacttaatttttaaaattaaaagaggactagctactaaaatatttaagactgtcctggctcattatatatattaatgtttaattaattattaatatatctttatatattannnnnnnntatctaacggcatttcttggtttaac

SEQ ID NO: 39927 - DNA, 1545 bp, Cannabis sativa
ctttcataaaatttagacaaagcttcattatcacatcttaagatcatcaaatttagtttgtaacataataaagtgaacgtttaacattcccagtttcttcaaattgagtttgaagaattatccaaacatacttaacaaaaacacaagtagaaactagtttaatgaaattttctctaacaccattaaaaattgagtaaagagctttattattaatagagctagaaattcgtcttctctatattccaaaaaattcagattttaccttcgtgttttcatcttcacattttttaataggaggtgaccatccagacaagttcgctctccatgctttctcatcttgagcattaataaaagctctcatcctaactttctaatattgatagtttgagttatttagaagtagatgacgatatacagaattacgttctgcaaaagaaaacatctcacacaaaataaattaaagggtaaatattattttggactccgtgttttacaaaagttatcaattggactatctgttttgttaaatgaaaaaatggactttgtactctgtattttctaaaaattgtacaaataggaccctgaactgatattttgtcaaaataaaacttaataataatctcatctagagatgttatgataaaactggttatattttctatatgtgtttgtgttagaaattgtcttaaagttaattatattaaaaaataaaattataaaaaattgagcctagggtcctacttttaccattttagaaaatataggatcctttttgtcatttaatcaaacagaaggtctaattggtaacttttacaaaatatagggttcaaaatagtatttaccctaaattaaatagaaaataagcacagaatctcactaagattttagtaaattgctctgataccaattaaaattctatttttataattaccaaattaattatttaaattaaataattaattactaccgagatgtttaaacaaacacaaaaattatttgaacagaacaaagagatgtttaaatagataaccaatagaaagtaaaaacgaacataacgtaaagagcacacaaaattatacgtggtatcagtaatctttttagattgctattagtccacggggccacgcccagaaaataaaatttattagaagaatcttaaagtgattatagaatcgaatcgacttatacaaataaagaatctctctttaaattcatcgcaactattgtaatctatactcctaataaaatttttgaaatgtcaaaattttgaagtcccttcaaatcgtagcacttgcactctttctcctaaaaagtctatcacttgcactttttctcccaaaaagtatctcatgaacaagtcttctcctaaagcttgatgaatgatatccaagtatattcaaactgtacaaatttcataaagaaacatacaaaaataacacaataataaaatactaaaaatttgttagactcaaattcttcacacaataaagaaactctctctaaacttgaaagtgatttaaaaaatgatataccaagagatgtgat

SEQ ID NO: 39928 - DNA, 2681 bp, Cannabis sativa
ttttgtataatatttataagtttgtatattacttcgcaataaatgtttgtataacttaagatattcaaaatatttattagtttaatttgttgattgatatgagcactaaatatacatgtatatgtctatacatcttctttacatgcatgttgtgaaaattgtaaagagagagggagaaaagtcattgtatgtgttcttcttatatggttaggagagactatatacagtaacgtaattgatgtgtggctatagcctctactaacaaaaatattaccttttaaaaaataaaatgtaattttttttttaatttgataattatagactaaaatagtagaaaagtccctccacaaaattaaataaatttagtaagagtgattataatataggtataaatatattttagtgataaataagctctcacaaattaaaaattctgagtctgtcagtgactatatataaacatgatcatgaaacaataattaggataactcttaatataatatatatgtgaagagaatagagataaaagtaatattttgacctgagatttttcttatatttatttagcaaataataatctagtaacatgacataattattttaagttgtagatcttatctaaatccgatatgtataattatctaaagaatactatttgagtaatatttgtgcacatattattactaatttagcaaaatatcaatatttatcattggtgttgtgtaatgttgatttagaatttagatcatctccctttagcatttggacaatatgattaatgatcaaattaatttgatttttggctaagataatatataggaaaatatatcaaggaaatatataatgaggggtttgtcacatgcatttcttttttttttttttttgaaatggttcatttttcattttagcaataggacaaaataaaacaatttaataatggtaggtagacattattggattggacaatattttgtctcgatgcttaaatgattgtcatgtattcttccaatcatagcatgccatgcatgcacttatatgtttcctacccaggtagtgagatattatattatatggaaattaataatttttttttattttattttttttttttaattttgggcaatatgtaaatattattatcaataaaataagtattaattatgctatagtgaaatagatataaattttaatataggacgagagtacctatacgatttatgtaacatttagaatttttatgcttaatgacttctatatatttaaatttatcatggaatcatgaaaaatttacatataggttgaaatttatgaatataagtttctttagtaaatctgctatcacatgaaaattagaatttataattaaattatagtaaaccatagaaagtagattcaatcgaaattaatcaccgtaagctttgatcattgttaattgtataatgtatttaattatttattttctttttcagtagaatttaaacattctttttttatttttgttttcaccaaatatattttagaaatttaattgtttggtaattaactacaatcctcgtaagaacgatactttatttatcattatattacttgattcgactatgtatactttcgtactagaattctcaataaatttttggcacaattgttggggaatgtttttagttactattaaaataattaaattttattctaatttagtttttttttttttttttcaccttttgctaactttatttgggtaaatatttctctttttcatgagcaattagtttatgcaacatcaagaaacaactgcaagagtgcttgttgatcctaatagaaaagacttgtaaaaagaatagaaaaaaatgagaggttagaaagagttgcttctggaggggttaggttagaagaagtcatgactcataatgggaataatgagggtgcagtagaccaggataatgcccataatctacctggtagaagcttgaagaattatgtgttacccacaatgataggggtccagtcttatataagaccacccgttgttgatacaaacaattttgaaatcaagtcagctattcttcagatggttcaatcaataatccagtttgggggctaccttcggaagactcaaatgtatttatccaatttcatgaaattttgtcaggcatttaagatgaatggagttaatgacgatttcattcgcttgagatttgtaatatctcaaaaatctaattacgaataattatggtttattatatattatgtattaattaggtagtgataagtgtgattatgatcttgctaacctaatttagcataaattataaattttgctaataaataaataagtgtaatttattaattacggatatttatttgaaatatgtggatataatgtaaattatttgtgaaataaaaatattttcaagttcgacgacctgaagacttgattggagaccaaaaatattacagtggttttagttctaaaaatcaattttagacccgattgtctgattacccacactaattagtcttttttttacaaataaaaattcgtgtaagattgaagctcaaataatcaataactaaggtatttcaatcctatagttaaattgtgtgtatattcatttaattcagcattttatacatgattatatatgcttcctattataataaatgtctaacatatagcccct

SEQ ID NO: 39929 - DNA, 1488 bp, Cannabis sativa
  modified_base (1123)..(1124): a, c, t, g, unknown or other
  modified_base (1171)..(1172): a, c, t, g, unknown or other
ttcttctttgttcttcaatgactcgccatcaaatcgttgttagtggtcgggaataaaaagttctttgtgactgaagaggttgttagtagtgcagttacgtaacttacacaatagttaaatgctcaataagctacgagattgaatgaacctgttgcaatagtttcttctgttctgtcttctgagtagtggatgaaattgaataaatgtgttcaaaggttaattgtgatgttgcaatattttttatttgattttatttaaatttttttgtcaaacaatttgagaattaggcggttgattatttggctcgtttttctaattctatttcttatcgtgtctccagcaggatgatgtcccaattgggttgcgaattattattattgtttattgcattaataaaatttcattatttgttcaaaaaatattaaaattattgaatttaactaaaaaataaatattataatatgaatatatatacatcaatttacttgcaataaaattagagaaatactaagaagtattagtagtttcaactaccacaccacttaaggtgttatattgctattattacaactaaatatcaaatttacatgatattagagaaatattaaaaaatattagtggtttctagtaccatccaaggagttatattgctactgatacaattaagtatcgtgctcgcgatgatattagagaaatacttaaaaatattagtggtatctaataataccatcaaagaagtattgttattggtataattaagtattaagtcccacataatatactataatattttttatagaatataactaatcattcttaacgctaactaattattaggtgccacatcgatagagtgttagtcaccttaattaaagtaccaaatatcaatgctctatataaaaagatagtattttatgtgttcaaacttaaaaaaaaataataaaatatatataacaaattaaaattaattgattaagaaaattaagaaaaaacaaaaaaaaaaaaaaagaagcaaaagatgataaaatattatcaacatatcacacttatacaatatatatacatatatatatatatgacacatttcttaatgggtattacttattggtgggtaataaaaaanntacttattggtgggtaataaaaaagtttaactataaatattaatttnnaaaatattaaaccattaaattttagtccgatagcgactaacaaaagagaaatttgaaaatttatgcttaatttagctacttaattaaagaagatatcaaaaaataccactttttacactatatcaaaaatatatttatatgaaaaatatttaagtcaaactccactttgttttatcatttttttgccgaaaaacttttttttttattattatttttcagttgatgaaacaatcccaactcatataatgtaaaaatgagaaaattttctaattaaataaaaaattaatcataaaaactcaaatttttctaatattac

SEQ ID NO: 39930 - DNA, 1149 bp, Cannabis sativa
tatatatatatatataccaatttaacccatcaattaagaactccaaattttaaactataaaaaacacaataattctcaaaatgatgatcaagctagtgctaagtagtgttacaacaagcctaatatggctcctccttacagccacattagccacggctcagactcccatcctcgacaccagagggcagccactccgccgtggcgtggagtactacatcaagccagccatcaccaacaacggcggcgggctcacgcttatcgaccgcaacaactcctgtccatggtacgctggacaagaaaatgacatgaaatctagaggaatcccagtgacattttcgcctttcttgaaggctgaaaacgttgtgatggagtcgatgagcttcgaggttgctttcgcaaaggaaggcacgtccaagtgtccgaatactacgacgaactggaaggtgtctacgatggagactagtagtagcggtagccaaccccgattcatcgaaacgggtggtaacggcaccgttttgcattatttccaggtttatttaggatctgaagtagtgatgaagaatggttcgtatggattgaggtggtgtcctgctgaagtgtgcccctattgtagggttgattgtgggtttgttgaagttgtcgttgaaaatgggaacaggttattggctttgaattcaacttctgcgttccctgttgttttcgagagagctgcttaatcatcatcatcattattatctttgattattatagataataaaattggttgtgtttattgttttttattattattattcatatagtgaaaataaaactaaagctagctatatattatatatatagctcttgttcaatatctcgttatgattattagctatatattattattcttagttatatatatttataagaattatatgtaaatcaggataattgtatattacatactctaaaaatggttgttctaaaaatcacagtatttagagtttttgtaatgtaattttttttttttttgtaaatttataaaattttaaatagttcatactttatagtatacatataaaatataaacattttatgtcaaaaaaatataaatatattatgcactatatatttattttttttcttataggaaatatatatatatatata

SEQ ID NO: 39931 - DNA, 2372 bp, Cannabis sativa
ttatccaatccattatgccattttgtgcttaacaaacccactcactgattttcggtctactataccagaactcaatgcttccttttcccacaaacccctactccattctctctggaaattcactatggaactgagaaactgttgttaatctctgtacccttttctctcacttgaacacacatcaatggctgcttcattatcactaacaaaatctccattgccatcaaaatcctatcttggaaagatccttttgagattttcacccattcaaaaccgtcccaccattatccatgctagaaaacccttacccaactcaaatggactcttaaagttccattcttttggccgtttcagaccccttcttgcaaattctcattctccaagagtttcttcagaagggtttcttgatacagcagaggagaatgagaatatgccgtcgtttgaggaacggccactgaaatttgctttctgggtattgttttgggcttctttgtccttagtttggtttgcaacttctaaggatgcaaatgctgcagctgattcaattaaagcctcgagttttggcctgaaaattgctaataagcttagaagctcgggttggccagatgaggctgtggttttttcacttgcaactcttcctcttcttgagcttcgtggggctattcctgttggttactggttgcagcttcagcctgtggtgttaaccatattagcagttcttgggtgagtatgtgtgtaatgtattataagcattagtactattaggcacattaaagtgtcaacactataccaattgacatgttgtgaatggttatattatttattaaatcgaaatgtgtgtgatccgaaattgaattacagttatgtcacctcttgagtccttaaggtgcctgtactaatatgcttcttttcaagagcccattaataattttccccaagggatagtctagaaatctggttttatacattatttgatcattgccttttgtaattgcaaatgtatctttttgaagagagttttgtgcttataatttctgcataggagttagaacaatgctcataatctacattgtcttatatattgggacctttttcaatgaggcctttactgaaaggactaattgaaattttgttatgtccaaggctattttgtttagattatgatgtttgtggtgttggttttagcctctcaagccttaacctttgctggtgtgacatacacatactagctttaagatagtttagttaacattcttgtgaactagctgttagttaaaagattctgatagaagttagttatccttctcagccgagttctataaatactcaatctcattttatgtcaatgcattgattttgtaattcagaaaaacaatgagagtttgatcatgatttctctggtttgttttcatttgatttcttatctctgttcttgagagtgttatattatatgcactacaatgttgatgtttttcatttgtttattacattgtacattgacaaatgagttatctgatgagataaaacttaacaaatttgttgctgtaactgtaggaacatggtgcctgttcccttcattatgctttacctaaagaagttggcttcttttgctgcttcaagaaataagaccgtggctcgatttgtcaacattcttttcgagaatgctaaagcaaaggctggccctgtagaggagtttcaatggcttggacttatgctctttgtagctgtgccttttcctggaacaggagcttggactggagccttcatagcctctatccttgacatgccattctggtcagctctatctgcaaattttgttggtgttgtttttgctgggcttttggtaaatttgttggtgaatcttggtcttaaatatgcaattattactggtatcattctcttcttagtttccacattcatgtggactatccttagaagcattagaaagtccttaagttcttcaaattgacattgaattagcattgttatattagtgtagctcaacttctgaaacttgaattttgattatttcttatcttatttcagtgcagtgttttggtagaaccctagttttttagtatattttttttcatgattgtatacgttataataactatttaagaccacatgtaaatttttagaaaatttcgaataatttataatgccgaaaataagatttacttattttactgtacaccttactatttttttatacgtgtagtaagtaatcgtttaaacttattttagggactgtaaactattcggaattttttaaaaatgtacaagtggtcttaaatagctacaatatatgttatcatgaaaaaaaaaaaattagacttaaaagctcgcttagataccgaaacagatataaa

SEQ ID NO: 39932 - DNA, 2027 bp, Cannabis sativa
aaatggtattagtgatattatgtgtttacacgtactgtcctgtcaaaacagatgcccaagataactttgaatggtcattttgaaactataaaacttagaaagttttctttgtcatttggctattttgttttatttaatacaatacatttatggattactctttttgttttcgtttttttcaactttcctttaagaaatcatataatgactattctacaatttgagggatatgttttaatgcaaaattagggaaatcaatgcaaaattatgatgtgcataattgattgaaaaaattcaatttgtcccaaaactaagaagaggactcgaaccctccacactcttttatatatactattataaattttcctaggaataaaccttggtttctaatcaaacagtaataaacctaataatcttttctttttgaaaataattaagagaaatgctaaatggctggtgcctagcaccctttaatatggctattggtcctattaagggtttaggttattataaaaacaactttaatagggtatcaaatataaaatattcaataatgtattaaccaatcacaaaggatggcttgagagccacggttaagaagcctatatatacttgattacactccagtagtttcccacaattcaatctctagtgtcttgctctctacgccattccattcatcactgctacaagtcatggagttttgcactcaaattgcagcacaattaattcttgacgagatgaaaaagaatgagagtagtgctaaaaacgttgtaatgtctcctctctcaataaacttgatgctgaatatggtggctgctggcgctgaaggtaacacattagagcagttcttgaaatttctgggttcacaaggaatcgaggatttgaaccaaaaatcttctgttatgatgtctcttctccgctactcctctggctctaaggcctccaccccttcccatgtccccacaattcaccaaaaaaaacgtcagaagagacaaaaacaaaaacaacctcttttttcagttgcaaacgccttatgggttcataatcaattccagttaattccatctttcagaaaaatcacgaaaacaatctataaggcaaaagtgaaaaatgttgaccttatgcgcgaggtatgaacaatttcgtcttttatatctttaattgttttactttgttcattttattctttttcatttcaattgtaaattttgaaatgtagggtgataaagtcagggaagatgtgaacctacgggtggaaaaggagacaagaggtctcattaaacaacttttgtcgaagagtgtaaatttggcacctccactttctcttgctaatgcaatatatttcaaggaatcatgggaagatccttttatggtctctaagactcgagataaagagtttcacatttttaacagagaaacaatccaagtaccttccatgaatagtcataatgtttctcacgactatgcatcccttgatgatttcaaggttctcaaactcccatatgaaagcgtaattggtgaatgtgggaaacaaatacaattgtctatgtacttgcttcttcctcatgatccgtatggattacaagatatggtggaaaagttcaatttggatacgaaattgttggcgcctgagagtcttaatgatcatctaaggaaggttaaactttctcgtgtgttgattcccaagatgaaattctcatataatgtggatgctaaggagttagttaagaaaaagggattaactttggctttcaatgaggttgatgcagatttctcaaaaatggtttactctcagtctcctggttctaatgattttatacaggctatgcttcaaaagtgttgtatcgaagtgaatgaagatgggacagaggctgctgctgccacctttttttgtccgaggagcaagcctcctcggaacaagcctcctcaaattattacctttgttgctgaccatccattcattgttagacatttatatgtataaactaaaatatatatgtttatgtataaaatgcgaaattaaa

SEQ ID NO: 39933 - DNA, 2540 bp, Cannabis sativa
  modified_base (2336)..(2347): a, c, t, g, unknown or other
tacacccctagttggtagtatactaatcacataacacaacatgcaatttacatacacacatacacatatacatatacatatacatatacatattttatactaatcttacctagtttctaaattcaagtatgtcggtcaatctaaatggaaatgtcacttgttgaacggatgccctatgtcacatttacgtaaaactagtaagtgtctaatctagaacactttctaatgcccatatataaaatttagggttttttaccaaactacgtggtgaagacaccctaaaataaaatacacaatttagctctgatttatatacaatattgtagagctcatcacaagctttaaaatgtatgttatacatctaaaacgaacaccctgagtaaaaaattatgaccaaaatacaaaaacttagcctttcccgatactgtccaaccagaattctagttggtacaaccctgaaccaaccaaaattccaattgttcgggcaaaaattgctcaaaaattctcaaacttaaagcccccaaaacctactcaaatcttcctcaatcaccaccaaattccaaaacatctaaatggaccataaagaacatattttaacaattaaacacatcaaaaatcacatgaatcaaaacccaccatcgttgagccaagtttgagttcttaaacccaaacttgcttaacacatgctacagccaacataagccaaccaaaccagctccaacaatcaaaaaattaacttctagtaagtttctaaatctctcaaacttggacaaaatagaatcataaatttcacatataaaaactaaactaaaagcttcacaacttaaagagaaaagaataccaaacttaccttgtaaccttttaattctcctccaaaccttgaaaaatttactgaaagaagttgaggaaaacctctaatgtgctacggtttctgttggggtatcaacccaagtcctacatggaagaatagataagagttgccttagatataagtgtttcacctacttcattagtatgagactttttgggaaggtgcccaaaaataaaatcgtgagggcttaggtccaaagtaaataatatcatactaatatgggcgttaaggtaaggtggtggcccgacaaggtggaatagtgggactcaacagttccttagggccaagctaggcaagagagaagccaagagatgggttttgttttttaagtctatcttcaaacttaatgaaataaggataaagctaatttgttttattccactaaagaattcagaataagatggattattctacaaaaatccactaaaatcctataaaatcctttaggcaaaataccatttttgccccttatttcacccttaagcaaccttaaggggtaaaaatggtccaaataccataatcccacctaaccccaatattttaaagatcacttatgattgccccactatataaaaggttctgaaccaatcccatgtgactctaatggccaaactgttgtattttctatcgttaccgagcaaaaattataaaaataatatttttcacatataccatatataatacacttagagtttgataaaatcagaaattataactctaattcctattccttaaaaatagggctcacaatataagatattcacatataatcataaaatataaataattaaagcttattgcctcactaatccatgttctaagtacgcagtcattacaattatccctccattaaaaatacttcatcctcgaaatataacctgaaaaactctggaaattgagctttcacactggattctaactcctaagtggcttcttctaccttaatgttcctccagagtatcttgaccaacgctatggtcttgttctgaagaacatttttcttcctatcgaggacttgaactggttggtcctcgtaggataaatctgattgtagctctagggcttcgtaactcaagacatgagtcaggtctgacacatattttttcaacatcgaaatatgaaatatgttatgtacaactagtaatgcttgtggtaaggctagtcgatacgtgttggtattatggtacaaaatcaggtgagcagtgaagagtttcatattatctgattatcattgtaccaatatcctaaaggatctccagatatttgtacattaaatcaaaataataaaatacaagtttagaatatacctcttgaagactatcaaagtatcctcgaaacttctcgtatattgtattccttaatccagatgatgagtatgatgcaattagactcacactagtgtttttcaaatcgttccagcacacaagaaatattgtgggctattaggataaagtgtataactttnnnnnnnnnnnnttctcaacacatgagcaagaacagatgagagaaaaaacaatttcttttttctctctataattttgaaaattacagtgttttgggaagtgagaagtgtgttctgatttttcaaattaaacttctatttatagtagttaaattccattaattatgtcatattaattgtttaaacaaataaatgtctataaccaaa

SEQ ID NO: 39934 - DNA, 2612 bp, Cannabis sativa
  modified_base (561)..(561): a, c, t, g, unknown or other
  modified_base (2415)..(2416): a, c, t, g, unknown or other
aatggaatgtggtgaggtcatgttacgaaattgtttagcaagaaatatcattgggatgggaactcggaattttgaagggttaccaaggttgaaaaatgttatgcttattgagggactaaggttataccgccaatttcgacaatgatcattgttttgttcttaacagtgataaacaatgcattttacaagggtttacatctgttgataatttctcacatatgttcttacttatcattctacatgtgaaaatactagtgctataaatactttcaaaaatctcattcaacattccgtacaaaacatattgatataagacatcattttattatagaacttgctgacaaccaaccattgtagttggaattggctggtattttcactaaggccccagattcaagtcagtttgactcccacagaaaatctttggggattcgcattgtataactcttttatttttgttctctattttgcacaaaatttttttgagtagttcttatcttgcatccatccttctttcattcttagtcagcaaaacttgtttatgcttttgggtgataattngcttagtgtcttgtactcttcatacttttaagattgcgttaaaagatttaagttacttgcatatgtgtgatcaagataaattaaagtattaatgtacagagttgagcaatttttgtttcagtttcttgtcaggccccttgatggaatagagctacccatactggggtgtgaaatacatcttttgagtaagctggaactttgtaattaagagttatgaagaggatgcagtaccatagaaaaaggctaccttcagtatggtgtgatagcatccaattgtgagatcaaattgaaaaaggtgaaaaataaaaatcttgccaaggacaatgatcctgttttcactgcacacactaatgtctgataagtgtatgataagtgtatacaagtttgtaagtctcctgtctaaaataaaaaaaaatcatggttcacattttatgtcactcgtctattttttctcaacatctggtatgttggtttgtatttgagacactaaattcttatcatctataaaaccataacatggttcactactacaaattaggcttttagtgacattatatagtgacacgcatgaaagtgggggtcactaaaaaattaggagtaggttttagtgacacacaccatcaaactctaaatattcggtgtttatcaccataaatgtgggtcactaaaaatatggagtgtcactaaatactaaaacccaaaatttataattttgtaaaagtaaaaagaccatggcctatagagacgtgctacgcgtgtgagcaaatctttttgccaacgcattatgcgtttcactaaagcacgtaatcacatggctttagcgacatgcataatgcgttagtaaatagattttctcacacacgtagcgtgtcaccatacaccttttattttttaaaaaaataattgatagtaaacctaattattaaaaaattataaaaaactaaaaggtggcacagtttcctataatttcaactttctttttccatcaaaactgaccaaaaatataaaacatttattaataaaaaagaaataaattagggtctgaacccctctttctctttcataaaaaatgctaataatattctgcctcttctcctctctcttcttctcgcctcttctttctttctcttggcagatattattgctgcccagtttcctctcacctgcgtggattcaataacgagatgggttcttgtcaagtgcgattggaattgtgcgatgatcaatggtgctcaatcgagcgagatgggttctggtcaacttcctctcgccttcgtggatcactagacgagacccaagttgtgctcttcttcccccaacgtccgtcttgctctgccatgcatcactagatgagtcaccattcatggagatcctagctccaccaacaacgagatcaattttttcttatttttttgtatattttttttaggtttttacatgtctaaaaacttgtacagccataaattatttgtggagatactcaagttttagtttttatgttcatgaaacattgttctcgttttcaggaacaatggtggcctcagttgtactcgagtatacagatttattgtgtacatattcgtatcattgtaaactttggtgattttggcaaaatgattaatagaaaatattgttaacttaattaaaattattattgttatttagttgtatttgtatataattaatataagttaataattataatacataaaattttatttaaaataattaaatattatttttttgtagaaaaatatttaatatagtggcactttttgtgtctcactatatctccaaaaatattaatagataataaaaatagaaaaaagaaaaaaaaatgatatagtgacactnnatgtgtgtggctgttaccttttcagtctgaaaaaacctgactctatacgcctatagtgacgcgcaaaaaatgaatgtaaaaggatttagggacacgtgtgaagtgcactaaaatctgtctttccagttaccctcattagtaacacgcgttgaggtgtcaatatatagttttggagttactcaatgtgtatcactaa

SEQ ID NO: 39935 - DNA, 2311 bp, Cannabis sativa
tattggagtgcaccaacaattgaccgatacaactgaacatcttccaatggctccccctggtatgcagataatcgaataccactggtcatggatgttggtgagggtttggcattgctcatttgagctttaagaagaagatccttagcatattttgcctgtgacaagtgaataccagctgctgtttggatcacttcgatcccaagaaaatatgcaagaggaccaagttctttaagtgcaaactggctgttaagtgctgcaacaattgactcaatagcagcattgtcactccctgaaatcaagatatcatctacatacactagaataagtgtaactgaagtagatgtatgttaaataaagagggaattatcagatttggatgatgtgaagccaagagacaaaaggcaatgctgaagcttttcaaaccaagctcgaggagcttgtttaaggccatagatggccttgtgtaatttgcacaccaaatctatttttccaggcacttcaaaccctgaaggttgtaacatgtacaccccctcttgtaagtctccattaaggaaggcattattaacatccaactgtcgaatatgccaaccatttgacaaagccaaggtcaaaacagcccgaatggtaacaggtttaacaacaggactaaaggtctcagtgaaatcaaatccatattcttgaaagccctttgcaacaagtcttgccttgtgtttaagaacagatccatcagggttttccttcttcttgtagacccacttgcagccaatagctttccttcctggtggtagtctcacaagagtatatgttttatttctgaccaatgcaagaacttcatcactcattgccttgttccacactaattgactgagagcttcttgaaaagatgtgggttcccttgtagccaagaaggctttcggtttatgaatgcctgatttggatcttgttctcatgggatgaacattttgagaaccagcagattgatcacagccaactgcagatggtgcaggagcagtagcactgctaaaaattggtgttgcagcaactggagtaggtacaccagtagaaatcgagatgtcacttctgtttagatcagtaggaggatctagtgcaggcagacagtgttcaatagaagtgataactggtggagaatctggtaaattatgttctgtagaaggctgccctgcattgaaaccagaaggttgacttggaagccaactattagtaggaaaaatcagtggagatgagtcaaaatgtgcaattttatgtgggtcattctcaatattggaatgcatgaggtcagccattgtgtaagtacaaggagtatgggaacatgtaggtatgatggaagacacaatattagagagagggactttggtggctgatgttggactcactttggcaaaggggaaagcaaattcttcaaaaatgacatccctagaaatgtaaacccattcgaatcaagacacttataccctttatgattgaggctatatcccaaaaaggtgcaaggtgtagacctatattccagcttatgtttattataaggcctaatgttgggaaaacacctacaaccaaaagttctaaaggtggtgtaatcgggtttgatattgaacagaacttcaataggagatttgtgatgtagaagtggggttgggagtctattgtggatatagacagcagtcctaaaggcttcatcccagaacttaagtggtaaggatgcttgagcaagcaaagcaaggccattttcaacaatgtgcctatgttttctttcagctaggccattttgttggtgggttgttgggcaagggtgtctatgttggatgccatgatctgtaaggtacttagtaaaagacctatactcacccacccaatcagtttgaaggcactttaatttttttcctagttgcaattcagcttcagttgaaatttaggaagactttaagagcaacagacttgtttttcagtaaatacaaccatgtaaatctagaaaacacacatcaacaaaatgtatgtaatacttgtagttgtttaaagatggaatgtaggatggcccccacaaatcagacacaacaagttgcaagggttcagcaataacagtattagaggcttttggaaagggaaacttatgaatcttgccaagacaacaagcttaacaaatagagaaatgagaaattttattgcttataggaatgttacatgaatgtaatacagtttgtacaactttttcagatggatgccctagtctattgtgccaaagagtaaaatcattttgcacttctgaattacattgaatgcatttagacacagccac

SEQ ID NO: 39936 - DNA, 2204 bp, Cannabis sativa
  modified_base (721)..(723): a, c, t, g, unknown or other
  modified_base (1213)..(1216): a, c, t, g, unknown or other
gagagagagagagagaaattataacccttatgcctatttcttaaaaataggacccacaacataagatattaacatataaccacaaaatcaatactaattaccctactcatctatatcttaagtatgcggttattacaaagttctttgattcactcgttaaattttctcaaagaagatgattcttacaacttctattttgggagcttaataacatgagtggcttgaaacatgttatacaatagtagaatctaaactttcctaattgatcgaatgttagttcccttatagtgttaattttggaagtgctaacagttggatctaaatctataataagttatagattaattgttcacattgaattaatagtacataaggaatcaagagataattagagggtaaactaatatttttaccaactctaattatgaactaataattggaggacgagctacatatattaattatatcaatggactataagtaagaattttgtaaatataatcctatattatcaaagagtgcaattctatatttacggtggagtaataatgaaattaataaaccagattattctattgacgagattgataattgtcttggatttattggagctttaaaatataggtccatggtccccgagtcacctctatacaacactgtacaaagaaaagttttatttgatgaatatattttgagtgagaattaatttctatgagaaatnnnttcttaagggcaaaatagtaatttgtggcattatttttattattattaattatgataattgtgaattgtataattaatattatttaactatttagttttattggataaaactatattaattagttaaatataatattatactaaatattatgaaagagaaaatatattattttagagaaaataatatttatttcaatccttgtgaagtaagagattaatgagaattaatcaattattatttattgtggcccattctacacgtgtagggtgacatataaatgcccacgattaatttagtttaattattttattagttaaaataatttaatttaaattaagctaattatcttttaattattaattaaatacattatttgataattatttaattgaaaagataattattaaagtaaaaaatctactgatatttgatattcgactattagatatttatatttgaatttaaattttaaattcaaatcaaattagnnnnttatcttttattttaaataaaagattaaaaactttatttataacattgtatataggatatatagtatcataaattagcagaataattaagagatagaaaaaaaaactaaaagtagagagatctaatagcccactgtaaataacctactttatttctgaatgttgaggctggcttgaaagatcaaggtgtggattcttcaattaagctcttggattagatgttcgattgttatacggaaagaaacaggaataccctaaaaggcatcaagaggtaattgagtttctttcagtagttaaatttaatctatatacattatgtggagatcattgggtttatggttcatattagataaaaattattttatcaaaattctgcttccgcttttataactctaatatggaccataaaaactaataataaaaagttctcaccaggattgtgtttctaggtcaattgaatcaacaattccctatttgtgatagctgagaagcaagcattctaaatacttttcgacaatgggaaaattattgaattgaatacctagggagagtgaagtaccattctaaggattggccttggtcgcatggaactccttattctcttaaagtgtagggcctatgactctatgaagagttatggtcgcatgccatttccaatttacacaaattatgcgaccagtgccgctaggaagatccatggttgcatgtgagctttgatttttctttaatatgcgaccactggcgacatgttggttcttggtcgcatatttgacttatttctcttcatttgctacacaagaattggccaaaggtattgccctacttgcacaacaatccatttccatatggctttgcgaccactgacacttgggagtgctttggtcgcatatcacatttctcttctagccttgatgatgccatcttgtcttttgtactctattattccaaataagttaagtctttagtgtcactactacaaaaaccccctt

SEQ ID NO: 39937 - DNA, 1500 bp, Cannabis sativa
  modified_base (859)..(873): a, c, t, g, unknown or other
ttttttttttttttgaaattgaaatatattggtaggtatactatatgaagagttggtatgacttttgatataaatgattgagaagaagaacacttccacacgtggctgaaagtcttttgcaatgaactaataaaagtcatacatattatcttctcttgcatgtgtttttcttttctttcttaaatgaattatttttctctttgttgaatatataccatgtagttgtagtactagtactatgttatatatacatgtaattaatagtaataataataatattgcaaaacacgtctctcatcctaatcaacatctacaatatgtatagacgtgttttaataaaggagtactactactatactatataaatttaataaaattctagtatcaatcttgttcctttcattagaacaaaacagagaaaaaaaaaccaaaatatatgagagtgtaaattacctatgcaaattgtcatgatcaatgaacaatttggttacaaaaacacacaaactatccaatatatatttgaatagtatatattaaatcaaataattaatggtcacaagaagattagagttagagacatgcatgcatgtttatgtcatgatctcatcattgtacatgtctcatatgatcatttgttgtgaagtgatttaacaatttgactttttaagtgacatcatttcatttttagtaattaacaattgctaacttttatagattttggtggaatagttatgattatgaaaaaaaatgctaaaagatagagcattcttattaggcatcagtagtgcatagcaccttctcgatatgtcgcgttgcgattggctagcaatactctttaaaaactattatattaaattannnnnnnnnnnnnnnttagttggaccaataacgatattgacacataggagggtgttagggaccactggtaccctttagcatttctctaaaagatattagtgatgtttaaatatcaaattattattagtgtaattaaatatcaaattttatatagagagctatttttaaaaagtggtgagcattattaatacccaataccgatactcttatgagaatagcgtttatatatatgtatatagaaaagaactatattggtataatcttaggtatacatggtcgtcattggaactttaattagtgtaattaattaattaactataatgtgtcctcttctaactcattggttaacccacatatgtatataattaagactattttttttaattttttatgaataagactaaagttaagggctcacacaacacaagctcccacatcgttctgtatatagaaatatacatataaatttaaaaaaagaaattgatgcaataacatcaaagataatgactaatataaaagttaaaataggtgaagagaaattactagtgacaagcaaaaccagttaaggattttgatgatttcaatgagattgtattgtacatcatgcctttttgttctctcaaaagattacttaacagagag

SEQ ID NO: 39938 - DNA, 1651 bp, Cannabis sativa
  modified_base (103)..(103): a, c, t, g, unknown or other
gagttttgttgtaattatttcaatattttaaattaaaaaaataattactaaaagatctttacttattaataaatcgcataaaattaattaataattattagtnatttaattttaaatataattaattccaagtaagtttttacgaagaaataaaatatgaaattacaagttatttattatttttttaatttttaaattagtctcagttacttaatagtcaaaaataaatatgtactcaaaaaaaataattaaaaataaatataactattatatatgtgatacaactattaaaaattttcttttcatatatatatatatatatcaatatccctcttatcatatcatatatggacctacgtatatatatggaaaaaatctcgttctactaagtcatttttgtcaccgcagcctaagcttttattaattagtattggttgagagattcagtcaaaaatttgatctaagaaaaaaggactcaaaacaagaagaatagtcatgtgtaatcttatcatatatatatatatagtttttgttttttcttcctttcttcaatgtaataataataataatattaataataaaggtttgctcaattattggtgtagtgcagtcatgaaagctcaatggttgcacgtgtaatagctatagttactagctagtttcaaataaaagctgatcttttgattcaacacccttatttggtagacatgtgttttttccgcaatttttctggttttttccgcaacttcaaaatctaaaaagtcaacattttcataatattttgcctacaattaaactatggaaatgaacagagaaaacataagaatttcaaatacatggtcaaaattaattaatgtacaccatgttccattgcttatgtatgtacaagtttcctcatgataaatgatatacataagaaaaatttgttgcatcttattttttttttttatagagatgttgcatcttaatttatttaattatatataattaaaaagataaggtttcaaaattgaggtagcatatgtcatatgtcaatatatttaggctaaatattattttgggtcttgtgttttacaaaaattatcaattgaactttctgttttgttaaatgacaaaatagactttatattttctaaaattatacaaataggatcctgaactgatttttttatcaaaataaaacttaataataatccgatctagagatatgataaaactagttatattttctgtacctgttcgtgttagaaattgtcttaaagtttattatattagaaaaataaaatcattaaaaattgagctcagagtcgtatttttacgattttaaaaaatatagggtctattttgtcatttaataaaatagaaagttcaattgataacttttgcaaaatacaagatctaaaatggtatttgcctataaatctataatagttaagtattgttattagacatcaagtgtgtaatatcatacactatattgatatggtatgttgtaaattattagtatttcttatattttttattaaattaaaatgtatggaatctaatattttttttttgacaaagtgattagaatcactcatgaatttacgacgcccacgtccgccaccgacgctggaacctcctcgatccaggatagctcatcgtctaa

SEQ ID NO: 39939 - DNA, 2532 bp, Cannabis sativa
tccaatttattaaggcggtcgttacagttttgaaataaaatcttatacatttgatcacatacacaacttattctacatcgtcaactatacactttcacaaattatgaaaatataccatttatatgcctcaggtctaatggaagttgaatactctcaaatgtagttcgataagtcatttttgtttttatctggttgtgcaaatgagtttttttttttaattattttttgagatcaaatctattttcgatataaagaaatgctaaaaggtacagtgatgtctagtattatctaatttatcatattaatttggtataattaaatagtaaatcctacataatttaatgtaataatttttataaaatatccctaatcattcttaagatgtcactattagtacttaataacaatgatcattgatatacttgtaagagaataaggaaagaaattcaattttgtatttttatgttttattttaaaacattgttataaagaactagtagtgcttaatactatatattatggggtggtgttttacaaatgatgatcgatattctacaatagcttattaaattagaatatatagaactcaatacttaattcaatagtgatattagattgtcgagagaggatgatagcatttctctttagatgaatactaccgtcaacctcttagtcaatcttcgtgctcgaaaatatatgtcagaatatttttttttattttttcttcatttgttatagttacaacatcacccctgtaaattttttaaaattttcaaatagtgtactgtgtcaaaaatagatttgaagtttttcgaacacgcatggtaaactgaaatataaggaactctgttattaatttcgtaaactattcagaatcttttgaaaatttacactaatgatattataactataacaaacactgttataaaaaaaaattgaaaaaagtatttccacatgtaattttgaacgcaaaaattaactaagaggttataattagtactcgtcttctctatgcaattgtcaatcatggagcaaattataaggagcattgctattagatactaatattagtgtcaattataggtggcactctatgattggttaacgatattctctaaaaactatgtttttaagttatataagattcgacacttaattaagtactaatggtacctcctagcatttctcaatagagaattactaaaaagcaccactgatacttagcatcatcttcggtgtcatactgctattagtgtaattaagtatcaagtctcgttaagaatatcgttaactaatcgtgaagtcccaactataaaaagtgttggataccaatgagtatcctataataatacatttctcaataataagaggcaatgaaaatgagcaagtggtgaaagcatgatgaaacggcggtgcgtaggtcccacatccacactctcaaaactcattatagagacaatacttcttaaactacgcaactcatttaaaacgacaaaattaaattaaattaaataaacataatactttgatgggaacacaagaagagcataaccttttttgtttttatttatttctttattatcaatcccacttctctttttgccaaattaatcatattataatttaattatatataattgtgtacattctaattatacttaaagtaatcacttttttattttaatagatataaattgattggtattaaattaaaagaaattaacaaaagtctaaaaaaattgaaagagcaagaaaattatataaaaatcttatagaaaccgccatctcatcaaacctaaaaaaaaattatatagatatatagatagattatattatataccatatataatatcatatattattttactctatgtactaagtatagtttccaaaatattataattgtatataaacttattatacttatttatattaataaattctttaattaatattaataaaattaaaaaactacactattcatatctggatataagttaataattatttataaattttaatattttttttgacaaaataactagtaattacagaaaaaaataataatttttagtacttaatatttaaaataaaaagttttagaaattacatagtataattacactcaattttcataggagtgtaatcaggggcggagctatgtacaagctcacaggggcagtggcccccgtcatttttttaaaatttatatgtattatatatgtttagtaaattgtgtttagtagaagacttttacataaataatattaacttattgatcaaatttatatttatatttatatatagagagtaattttaaaaattaaaataaattattaaatgtagaattattatattatctttatttgtagtatttatttaatatataagttagtttaatatattttaatttattattaagagttcaaaaatattcataaattaatactagtggatatatatacatagaatattttttaatgggtattatatctatatttagtttagttattaattaaaaaaaatatcaaa

SEQ ID NO: 39940 - DNA, 2145 bp, Cannabis sativa
gttccaaatgactaagatgtatagccttataattgttctatgaaactctggacactactgtcataacagacagttagttaattagataagttagttgccataatatttggccaatacacagcaattatcaactttgaccatatattataatcagagccttgtagagttgtgactaacctagattcagtattctcagctagtgagaatattaagcaagttcagacaatatttgaacttgacttgagtgacataatttgccaacatatcagctggattctcttttgttctaatcttctggacatagatttcctttctttctatgacttctctattaaaatgtagcttaatgtctatgtattttaacctttcatgaaacatggggttcgtcattaaatggagtgcactttgattatcacaatatactgtgatatctcttaatttaaagccaatctcctctgtgaaggccctgagcaaaaaatttcttccttaatgacttatgtggcaaccatatacgtggtagataaagctaccactttttataaatttgactttcaacttatgcatccaccaaatgttgtgaatgcatacccttttatagacctctagtgtctatagtccctacataatcagagtcaacataccctgcaatttatgcgtcaaacactgcattattcttgtcaatcaatcccgcacttgcagttccttttaggtacctaagtatccacataactgcattccagtgttctttgcctggatcagagatgagccttcataccatactcaatgcataagccaagtctcgtcttgtacacaccatgcaatacttcaagcttcctacacatgaggcataaggcactgtgtccatatagatcttatcctcttctttctttagtgcttgatcttgtgacaacttgaaatgtgaggctaattgtgtggaaaccatcttagcttcactcatacggaatttattaataattttttgtatgtaccccttctttggtagaaacgctttctctagtctttctatcttgatttcaattcctagtattttcttagccactcacatttttttcatttcggattctgaactaagataatctttcaacatgtcaatggtctttctttccttcccaatgattgccatctacatacagtagtagcccacatggtgtactattgtagtagacacatgagtcatattcactcctggtataactagtttgcatcatgaattcatggaacctcaagttccattatcctggaatttattgaagtccatagagggacttttagagaaagcacacttagtctagtttcttgcttttgtgtccacctggtttcgccatatagatcttttcttcaagttttctatgcaaaaaagcagtcttcacatccattttatccattccagaccaaacatggacacttttgcaatcgttatcttgattgaagtttgctttaccacttttgaaaaatgtcattataatcaatgcctttctctggttgaaccccttttctaccaacctagctttgaacctaatctcttcttctggaagaccttctttgtgcatgaaaatctatttgcagcctattacccttttggtaaagggacaacaatccatgttgtattctttctaagtgagcacatctcataattatggctttgatccatttcttttatgtgcttaccagtaatgacttctctataattactaggttattggcaaccattgtttataatgatgatttggtcaccagtaataacttaaaataacatagaaaaattatgaagtttcaatcattgttataaactttcatggggacaataataaatggttattagcaaaaaaatatcaaattgcatcaccttaactttaaaagaaacacataacgcattaacatagctgacaaaaaaagaaaaaaaaaatattaaaaccagttttataaaaacataactcatactctaatttataagttgtctaagttgtttgatttgatttttagttagcacttagggcctgtttggcacagcttttggaaaagctaaaagctgctttctgaaaaaaaatgtgatgaaaatgtgtttggtaagcagtcaaaaaacaactttttgaagaatttttggagaagctacagctaaaagct

SEQ ID NO: 39941 - DNA, 1016 bp, Cannabis sativa
cctcagatatatgatgaataggagctgatgccaagttaagatgactgcctgggacattttgggcagtatgcagaggagcattgttggacacagctggtgcaagtggaattgcagagggctcagcagtggcatgcataacaggttgagaatggtgattagtagttggaaaagaaaacacagcagtaagagggatagtggaattagatgatacctgattgtgtttggccgaggagtgagcagggaagcaagtttcatcaaacaccacatgtctagcaataaaaagccttccatctttattttcacacataagtagcccttatggttgttggagtatcccaacaagaggcactgttgagatttgtactccattttatgatgattgtagggacgcaagtagggaaaacaggcacaaccaaatggcttcaagagtgtgtaatcaggtacattgccaaacaaacattcaatcagagagatatgaccaagaacaggtgtaggcaacctgttaatagtatgtacaacacactgaaatgcaaaccaccagtaagtaaagtccaatcccgattgtgcaagaatggttaaacctgtttctgtgatatgcctgtgttttctctaagcacggccattctattcatgtgtatgaggacatgaatgagtgaaaagaatcccttgatcactcaagaaacgagcaaaaatcctatactctccaccccaatctgcttgaacattctttataggcaagttaaattgcttctcaaccatgcttttgaacttaataaaagtgtcaaaggcatggtttttctgaaccaaaggaaagatccatgtgtacctgctatagtgatctaggaaatggacataatatcgatagccatccttggctgtaatgtgagaaggcccccaaagatcagtgtgaatgatctctagtggcttagaggctcggctaagagataaaggaaatggttgtttatgatttttttcctagttgacatgctgtacaaaattgcagctggtttagagtt

SEQ ID NO: 39942 - DNA, 1432 bp, Cannabis sativa
tttttcaacttaccccaaaaaattttgtgtacattaaaacttcaattcttttctatttttttttttcattttaagatacgttcttaaacttacagttataaatttttcatttatgtatttataatgaaaaaaaaaaaaaagaaaaaaagtaagccttttctttcaaaaaaaaaaaagaaaaaaaaaataggctttataaaataaaagtcttgtgcaatagtccaaactgcttggttaggctaaccttcttcgttattaaacatgaagattgtgctttctcctaagaaattaaaattcctatagtaataatgattagcattcctagtctatggacaaaatcaaatcttatgttggattgaaaaacaaaacagtggtttataaaaggaagattgagactcattagtgacaattgagataagctaggtttcgcatactttttttaccctaggcgtcctcaagtgggattgtgattaaagatattatcaatgttagtaatgatttctttgatgttaaatttagttatttgtcgaagagaaaataatacgcatgcttttggccaatttgttataaatgttattctttccctttattcacggatcaaagatttattacaattattttcttatatcgcacgttggtatttggtaggctgtaaatacggacaaagctttttcacatgacacgagcataatctgacacgaaaaaatataaatttgatggacacgacatgacacgatacttcaaagtagcacggcacaatatgacaaaatagatttaagcacgacacgataagctcgaagacacgacacataaacacaaatagactagcctaaaagcataatacgttaaaatctcttatataataataatacatatgtatttactaataaatattcaaattctaatcttattgttgaaaaattatataaaagaaattgacactataaaaaatacaatataatttggtgattaactcattaattgtaaaagaaacagtgaaaaagtaaagctcgaattcgagttcgaagaagaaaataaactgtcccatttattaaaatcaggtcagctcaaataaggcacaacacgactccgagcacgacataaaaatataagcttaccctttaaaatattaacacggcacaacacgacccacatatttatatgggccaacatgacacgacatattattccagacttttcgaaatatgggattgggcgggcacgaacgtatttacaactatgatactttgtatcatagttgaagtttgaacatcatggattataacctttgaacaaataaaaaattaagggctcgtttggaacgccgtattaagtcgtattgtatcgcattatattgaatataattttatgtaatatgtttatgtaaaactacatgtattattaatttttgtggatacctaaatatataata

SEQ ID NO: 39943 - DNA, 3686 bp, Cannabis sativa
ttggcgagggttttgtggattttcaggggtctggtgtggctgctggttatcgtggggaagatgaagtggggaagatgaagacaatataagtgttgtttatataaatactctgccgtcggttcctagcaaagaaccaacggcataggtgcacactttcaataaagtgtgcacctatgtcgttggttctttgctaggaaccgacggaatagggtttaacaaaaactcttaaaatttctcaattttcaactgacggcatagggtttattaatatatacacctataatttttaccaaacactgcatctaaatgtcaatttcgaattaagtgagtgttttcacaccctttagcttccctttttataaaatgcgttgaaaaaagaaaagctaaaggcccatattgtagtagtgaaaataaattaaatttcacaaaaaaaatcaaaatagacatagcttatattttcaaaaatataaaaaatacctaactttatcaaactaaaattctaatacttagcacatttaattaatctaacaaatatacctctattgaaataaaaatattcacaaatatataaactttaaatttgaaagaaaaaaatgtgtatacatttttatcccaatctcacttttcctctaatatttatgcatttttagtgaaatttataataattctatcaaaattaatttgacaatatagcaattgtaataggacgttcttgaaaattttaaacatgcaaaaaatgagaaacaaaacgtacataaaacaatacaaatttaagaaacaaaataatatgaacaatacaaaaaaatatccatccattcggccgtagtacgtgtattcacagaacctacttcactaaagataaaaatttaagatattcaaactcatctaacatgcatattccacccatccgacaacagtataattaatcgcagaaccaacttcactacggatgaatatctaagatattcaaactccactaaataaagaattttaaagtttttgtaatcatatatttctctaataaagctagctactattgccctcttcaatcaacacaaagaactcatacttaaaaaataaatttaaaatatgcatcaattgttaattgacatgtttaattgagactaatcaattcacacaaattttgtatcatattacataaactaatctaattaaataataagataccgagtatgagatcactcggagaaccactgacaaaaaaggaggagtttattggacgatcgagaaaatcaattaactccttaaaaattaaacattactaattaattaaaataaataataataataataatagaactttcaaaaatattacatacatataataaataaaaatatgcaaaatagattacactactatactgaacattctttacatataacattaatacattaacttaaattaaatcacataatataaatttttcacctaaactgtaaaaaaatacacttataaaactaattattcttttcataaataaattaaacaaatcatttctttacctaattctaaaaataaaatatacatatttatatatatatatacttaaatttctacaaatatacaatagacttaaaaaaattatttataaattaatttaaaaaatttttattctcaaattaatttgtatattaatttatcaatacatattctttaaattctaaatatttaaataaataaattcattcaaaaaaattaaataatctaaaataataaataaataaataaatgtaactaaaaatatataaatactactacaaaaaagggctttaatcctgattgttatgggcattttatcccgattttcgttaaaataaaaattgggatatatgcgaatgggataaaaagtttatataaaaattgggataaaatattcacctttaatctcctttttttaaaaaaaaattaaggataaaaaggtaccttttatccctttttttttttaaaaaaaaaaccaaaataaaagggtacgtattatcccaattattatataaaagccgagataaaaaagtggtcccttttcatttattttttactttttattgtcaatgtgttttttatctcagttgttaaaagaaacttggggtaaaatgagataaaatgtgttcttaatctccagtctattataagaatcagaatcaaacccaaaaatattgaagaaaaaaatttatatttaagattatatcataaattgttttatcaaattaaaacttttcagatttttgaaattaaattacacaaaaggttataagaatttagacatctaatagcagctggtttattgaagatataacattagataaaagatctggtcgaccaaaaaatgttatacaacaactcaaaaatatcctaaaatagcagaggctccatgaaccaagtcgaagctcactccaggatgcaccacgaacccaacagaagcttcgtccattcacgacattgactacaaactacgaaaaactgtgaagctctgtccaccatgaacctagaagtttcttccattgcgaacctgcgttcccctgagaaaagagagaaggagagagatgagcatttcagaaaagaaaaagaaaaagagaccacagagagagatgagcattttagatctggactccattgattgttcgttgtcgaaaatgggttgatcactagtgtgaatgggctgctgcacgaagatggaagagaaagggatgttggcgggagagagagatggtttgagagaaaatatataaccctaaaacctaaacgatttctttatatattctaatagcacttgaaaaaaaacagaagaaaaatatatattgataaaaaggcttaaaaggtcttagttatacccttttatcctagtttttagcaaaaaaaatgaggaaaaaaagggtataactaagatccatttggctcctgcaatatttttatcccacttttaagggaaaaaatcagtttttaactaaacaaccaaacaagtctcttgatatacataagtcatttaaggcatgtttggctgacgaataaaaatttaatcttgaactcatttttttgctttcgaattttttttaaatgttcaaccaaacagggcccttgtctaaatgacatttagatgatatcaaagaggtacaaaatctaaaaatggggtaagaagcttttttcccactttttatttttgcactactacaaaaatgggtattttcgtcagttactaattgacataaagattttgtgtcatgtctctaaaactgacgtataagccatagacacaaatagtgtattatttgtgtcagttataaaatgacggagcaaactatatgcgtcagttataacattttgcacctgtttggaagtgacgcaaacagagttatgccatttcaaaactgacacaaaaaacttgtgccgtcagttcttaaatgacatgtaactttctataaatatttttttcttttacgcatcggttataaatataatttataatatatattagcttatagaattatttgtagtcacacaaaaataaaataagaaaacaactaaaataataaaaataaattattttttattatcttgataaaattacaatgttttgctaatttagccaatttaatatatattacgtacaaagagtccaaaggaacataaatattcttctatttgtttcaaaaattacactcattatacc

SEQ ID NO: 39944 - DNA, 1064 bp, Cannabis sativa
aaaaaaaaaaaaaaaaccctctttaaagcccatttttaacaagaaaatgaggagttttcaattatatgtctttaaactctataatttgcataaataaggggattttactttttccaaatcttaatatagacaaattaacaaccaaaacattaaaaataataataataataactaaaacaaaattttgtaccaaaacaaaaaaatacttatcacctaaaattttagataaagccatctaatttgaaatttgaaattttctcataaaaaattcttgctctcgccacaaaattctagttatttgcaaaattgtgagaaataccgaagaagtaaagtacacttcgaaatttattatatgatcacaaaatgttccaaaaattacttaaattatatttgaactttttaaatgtgctattttttctttctttcttaaagtttgtatacatatttccatatttttgtttgtttccctgtaaatgtgcgaaaataaaaccttggatggaattgggctgccttttcctttagtcgatcgattgagcccactacaaattaaagagaacatatgctataatttatagaaaaatttacatggtatattaatttttaccaaatttttacaaaaatactgtgaggcgttattttttacttttttactttttttttttataagtttcatactgcaatatgctgtgttaagttttcactggtgttctactagtgttttactggtgttctaatgttgttttgagttattttgctttatgttttactggtattttataaaaatacagtatttttgaaaagatttccgtgtgacagtatttttgtaagaattaacccaaattccagtattttttgtaagtttccctaatttatattattttgagctaattagttaaggtactatttttttttttttgataaaaaaattacatttttatgtttaatttttttttatatatatatttttacatttttctatagaaacaacatgaatattacataaaagtgacatgaaaataacatctaaataatatcaaaataacatacagataataaaaaattaa

SEQ ID NO: 39945 - DNA, 1281 bp, Cannabis sativa
tatgtaataataaataataacattattattatttaaataaaatgatttgactatataagtttggatatgaaataagtcaagtgtgaatgacctaacttatttgatataaaatttaccaaaaatataaaatagtagaattggtaagaattgacaaagaagtactctcaactccaaataaagtttttttttttttttaattctcttctttccaatctgtctcagttgcctctgttatatatatatataaatatatatatagatatgtatatttttatataactctttgcccaagaaaactaccaatattatatatatgggtgactgtatatagttactattgcccatactcttcttaattagattatatacaatttcttcacattcccatgtgtgcctcacttactaatttattgctatgtttctactcttcctcttattccttttctttttttcaattaaaaatcaaattcatttatttatgtatacatatttttagaccattgctattaagcagtagtggtgcctatcacttctcgacatgtcgctttgtaattggctagcaatactctctaaaaattattatactaaattatatgggacccgatacttaattggaccaatagtgatattgacatataagaagatacttttagcatttctcatatttttattccgaggtgttataaattaataacttacatgaatatacgaaaaatatgaaaacacacttttaaggtactaaacttttaaggtactttagtactaatattaaatcccacgtatattttaatttaataaataatattaataattataattaactattggggcaccataacaatgttttgaagatatatatatttatataattagttttatgacttgaagaccaagacatttggtcattggacatatacataaattcaatcaaatacagtgtccttattatatatatttatatataatttaataaataaaactaacatatattcaagatttttacaagaaaaaaaaattaaattaaatcttcaccagtgtttattttattataagaaatatattatatcaataatatatattacactactctagctaggttaggcatgagaagaggaataataatctaaaaaaaataaagtgaaaatttgtattcttattttcacactgttcatattcaaaaaaaaaaaaaaaggttaattattgaatccactttctacagaggaataattattgaaagtaccttaattaatttctctctctctcccgtatatatatatatat

SEQ ID NO: 39946 - DNA, 1965 bp, Cannabis sativa
  modified_base (33)..(50): a, c, t, g, unknown or other
attggcaatgggaggagtagcccattcatcttnnnnnnnnnnnnnnnnnnccacacattagcaatgtgggacaaactctaatagcaaacaaggacactcttgagttgtattgaccttagaaaaaaaataaaaattaggaagtttataataatatatatttttcacatttaatttacattaataaaattagaattaaactcacttaatttgtcaaattagtagttttatcttaacgagcaaacttaagaaacaactgttagttataacagttggctttatcacaaacttaaaagagagtctcaccaacacttataaatacattttgccttaactctctcaagatgtgctccaattttcatacttcatatttcatagccaagtctagagagagattgtcgaagatcattgtgtgtgtgtggagagatgttatgagagtatcactcttgaagtgatatctttcagtgtgagatacataattacatgataattgtgagatgtaataaaaaaatttactcttgagtgatattcttagacatatctaattctttactacatgataattctatcaataaagatttacaattcatttactctcgagctaagtttattcttgccaactgtttagtattaacataatttttttgagtaaatgtgacttttaatcacaacaaagaagttacttgtgactaaaataacgtagtatttaaatacaagttgtcactaatttagttttagtgacaacaaattgtaatttttgtaactattacatttaaccacagacgttttagtcgcaatataagaataatgatttataattagtcacaaattttccacctttaattacgatttttttttttttgtgtgactaaaaataagatttttgtaatgtttgtaatcctactgcgtttactctgagccattctctactcgaacaatgaattaagcaaagccttaaggcagttcctccaaagaattagatccaacttgttaaagatttgtgatataacctcgttacatctctgccatttacttttgttgtagtcatttgcaacttctcttatattaatggttagttcacattgccacaacacaatgggctgtgcctacaggttcaaaagaaactaaatacgatggcttcacttctgagtttggactttcggaattaggggaatttacataaaataaaagaataattacaccacatactgaaatttctaacttttttactgttacactgtggggtagaattttttttcaaaaatactgtattctttttttaaaaaaaaaatattgtgtaaattttatactgtgtactgtgttaagtttttactgttgttttttttgttgtttcattattgtttttagttgttttgttttgttttctactattgttttataaaaatacagtatttttaaaaaaatttccgtgtgataatatttttataaaaatcaacccaaatttcagtatttttctaagtttctctaaaataaaatacttgaaattatattttgatttttgacttttttttaaaatagataaatgttatttttacattgcttatagcagcaacatgaaaataacaaacaaaggaaaaaataatccttcgtatttttgtaaaaaataaaagaaagaggaggggaggttatttttacaattcaaaataattttttttgtattttttacggaattctaaataaaaattcttgtagcaactaaaaaagcaacctaaatcgcaactaaaatccacatagcaactcaaatagaaactattagagaaactatcggagtaactgaaaccataaatttaaaaagaaaaaagttaaaaaataatatatgaaataattttccttaaaaaaaatttgttcaatttggtttggtttgataattggaagccaactctcagactaatggaatagaatttcaagttaaacatgggttttgggccactaaggaacaagctcagc

SEQ ID NO: 39947 - DNA, 1232 bp, Cannabis sativa
ggcaccatatggtgtccaacacaccataacgacgtggcgcgttatgattggttagcaatttcttatgttatttattaaatcaaattatacagaactctatattaatttatactaataacaatatatcatctcttgtaatgcgttctagtataagatactcctttaacatttttcttattgaattggagaactattctttacatggatgagctatgatggtattcttttatatatttaactagctaggctttaattattagtttatattaattcccatgttttttttacgtataggatcattatggtaataatttattttgaaattatatacgttatttcttacgtatattatataaccttttttactttagaatattttaaattaaattataaacttattaacatacaaatcgaatacggttttcttaaaataatattctgtattttggtttaccaattcataggttttaatatacgtataatttataatatataattcttatttgaattttcaattatatatatatttctcactatacatattaatgtgctaattatgcttcacatataaagattggtgtattattttttattaattatattcctttctagaaattaatctcatcattacttgacatctatataactaaacgcgtagaagtaaatgagtttgaaacttgaaagatatatatgattacttaaaactcatcaaaatatatacatttcctagaaatagtggagattattcctaattaactaaaattatcactacaaaaaatagctatttttagtcgtaatataattttctttttttttttttgactaaatatgatttttggtcccaacaaaatattacttgtgactgaaatatagcatttagttacaagttgtcactaatttaattttagtcagaacaagtattgtgactaaaaacatatttaatcacaataaattataattttcgtgactaatacttttagctacaacataagaatgatgttttataattaatcataattttgttatttttaattacaaattttgttgtgacgaaaagtaaaataatgatgttttataattaatcataattttgttatttttaattataaattttgttgtgacgaaaagtaaaatattttgtaagatatataaattaattgttataattaataaatacacaattaattatggattatgtcgtcagctgctataataaaattcatgtcatcaag

SEQ ID NO: 39948 - DNA, 1214 bp, Cannabis sativa
aaaaaaaagaagaagaagaaagacatgaatgagtcacttgagatccaaacataatttcgttattatatcaccagaaatatttatgcacctgctctcaataataagttttcttccctattacttgttttgtattgtcatttttttattctcattgtctccttcacaaagaaaccctctgcaaagtctctctacctccagcacaacactttgaggtaaaacaaagatactccccagtaagacttatggataatggttaaacatgacttgttgtgggtcaaatggattaatgcgatttatttgaaaggatcaaatttctaagatccagactcaaattggttttgtagttgaaatgggggaaatgaaagagaagagacgagaagaaatgattttttttttctgtttgttcctcgagttgtttctttcaatttagtatgatatttttcaatattttgtttgttttagttcttatgcttctacttgtcttgatactgaattaggatgcctctgacaaattactgaaacttttgaggttagcacttattctgctttatctcaccttagttcttcaaataattaagtgaatagggactttaatacatctttgcaatagtaatataagaatttgtccctagcttcacactctaattccctgagttgcagaatatgtgggatttgatgcctgatacaaacttgttaaaggaggtcccagaatcatacacatttgaaactgcccttgctaatttaattgtaagtgctcggttcagttgaaaaaaaaaataagactttagctgtttgcgtaattttcttgtcaactttgcatttaattctcttctgttcacaagaaaaaagaaaaaaaaaatcatcaaagacttgttaggtatgacattgatgtgatattgttatcattgatacatgattggatcgctttgtagtttgtggtttttagggaattatttatggttgtgctagttgtatttgcaacttgattgttttttctcttttttgctctaacttactacgtaaggggactgaatttgaacttgtaatactattagtttcctaatgtacacgtgtcagttatagttaggtattgttcggtaagttagttatgttaactaactcctagctagtcctaggatctatataagtacctaattacctactgtattaatgttgttgtaacaatacacactcataatatacaacacaagatt

SEQ ID NO: 39949 - DNA, 1492 bp, Cannabis sativa
tcattttagatttttagtgtaaaattttctaataaaaaactacttctattaaactgtttattatttatttaattttatcttaaaacatgtttatttatttttatttttaaaaaataaaaaaacttatataacttatatacataataaatcgaatattttataataaatatattataaaataaatataaatttgtaataaatcatactaacatagatcataaatattatattataataaaaaaatatttagtatatttattatgtaaaactgatttttttgaacaatgaacatgtatactataataaaaaaaaaaatagtatgtgctattatattaaattgtttattatttatttaattttattttaacatgttaatttatttttttttttaaaaaaacaacttctatttataataaatcgtatattttataagaaaatatattataaaataaacataaatttgtgataaatcatattaaaatcgatcataaatatttagtatgtttatagtgtaaaactgtttatttttttaataaacatattatattattattaaaaattccaaaatattattataatactacatttatatcataaatataaattataataatttaaatattaataatgatattgttatatataaaatatttgtaagtataatgttgattttggagtttaattgaaattaatgctactatttcatgggttgaatgagatttttttttgttatgtaagaaatcaatttgaatgtcactaatataattagaatcattcacatatttaatatcaatatgaactgttcattagagttagggcatcatagcaccctaataggagcggaagacgattttttttcctttccttgtggacatgattactatttagttgtgcttgattagtcatcgcatggctcttcttcacactgatttcaatccgattcgtcgactctattggatggatatcaataccttatactgatcatggaagctagtgtggggcgcttggttcttctatctaatctacgccattcccatattttcttttagcagcatgggaaagaggccatgtgggcccgctaacagattcgctcatggaagtacgctatgatgatccagagaaacgtgtggtttctaaacccattgagatgatccaagaattttgctatttggattttgctagtccttgggaattaagggtagcattatatatatatttataaaaatttatttatagtaagtttacgtataatattatttaatgattaatttgtataattttatgtaaatatatcttcaaatatataaatttttaaaattattttttttgcacattttttgtaattatgttatttttttaatgaaaattatattgtttttttttttcaagcaataacaaatatcattgataattttaagaattattacataaaaaatataaattgacactttatatacaaaaatactttcataaggtaaagataacatttata

SEQ ID NO: 39950 - DNA, 1579 bp, Cannabis sativa
gccgacgctaattgttatttttttgcttcagtcacacaatgaagcataaaatctctccttattttttgcctcgatcaaccaatttggtgagacgggttgaccgacgcaaaaagtacttttcgtagtagtgcatgagaaaatcagcctgacttcgtgttaacacacttccttctctgattatcacctgttgtacatgcattcttctctgcatactaatgcccaataatcccaagtagtactgcataaaagcttctagaacttctcttggctcttctacccttttcccataagcatttattattgataacacctgattgtgttgccttctctcttgtatactggtgtgaaacagggcagaattctcatctctgtcctttgcccaacttaactttgccttctgctgcaaatataataagaaacttttatgtgttgtaacataattgttcctagcttcaagttctgtttgttgcagcccagtatcaagtggttgctggtgtagcttggtttaatactcttcaagagtattccttgcttgaacttcttgagcttggatatctgaaaagtgttgagaatttaagcccttaaaagccatcttcatattcttcaatttagagacaacacagtacattttagttcctttaaactgcccctgccatgtgcttttcaccaactcagtatagctgggatgagtttcctacattttaaagtatttaaatggcttcctaccagtcaccaccttgttatgaacagttaaaacaataggtgaatggtcgacaaattccttcattcatgaatactgcctcggcaatagggaactttaccatccaatcttgattagcaagaacacgatcaatcttaaagaagattcgatcgtctccgaactttttataactccaggtatagtaatttctattgaacttaatatcatccagccaacagttagctacacaatcgataaatttaatggaagaaacatacctaacccgcttcccaatcctttcttcctttgccaagatgtcgttaaagtcacccataacgatccaagcttctcttgtagccaattattgaagatcaagccataatcttttccttccttcttcatcattaaaagcgtaaacaaatgtggcatagaatcgagtcttgttatccaccgttgagacttcaagatgaataaattgactagaacactttataatgtttacagtaaaacttgttcgcctccaacttacaattattttccctcctaaatgacaagcattattggaggtgaaacaccatccttgaagttgaaatacattagagtataaggcaccaagtatttgtgtgttttctacatatctaaatcaagcatctggggtcatcggagatcggtctcggctggacccccattgattttgcaagaagaggaagagataaagaaaggaagaaggagtgggtgggtgtgggtgtgggttctgcaagagagtaagaaaggggtaaatcaaaagcaaaaaaaaaaaaggaagaaagaagaaaaaaaaacgaagaaaaaaaaaagcagaaaaaagaaaaagaaaaaacataataaattttttttttt

SEQ ID NO: 39951 - DNA, 2191 bp, Cannabis sativa
  modified_base (1683)..(1683): a, c, t, g, unknown or other
agtttacagtgccgaaaatacgttcgatgttttttgaacgcgcgtggtaaaatagaatatcaggaactctattttcggtactgtaaactatttagaaattttcaaaaatttacagagataatactgcaactataacgaataccgcaatgaaaaaaaaaattgaaaaaaaaaatatttcggcacgtaattttagacatagaaattaattaagaaattgtaaaaaattgtaataagagattgtaattagcattcttcatgagtcaatcatctatattaacaaaatcgcatgtaagagcaagcgagtttattattgaatatatttctctttctaattattaatacattaatttcatgtattattgtatatatttaaaactcttaccatacaaatgatagtgaaaccaaattatttttctctattaaaataattttattattaaattatattatataaaatattagtattatttcatcagttttccttaagcatgtatatatatataatttttatcaattttttaattatttaattatatatattataatttatgttacttatgtgtggtatcatttcttaactaacttaaagaaatgtttgcatattaagtctgttggcctatataaagtggactattcatctcatttcaaagggagaaaaacaagtcaaacacaagaagaagaagtagacacacacaatacagtagagagagaagttagagagagaaatggagagagatatttgagagagatagagagatagctggaattgggaaattaaattgagcaatattgttgattatgttggctcgggttagtgagttaatgtgtgttgagggattacaccatggatgacctgctgtgattattttcttgtagctcctgagattgatatatatctcttattctaattatcaataaaggttggtcgcaatactttaaaactggagtatgaccaagttcacattgatcttaggatcacaaccaatctgtgttattgtgtctgacacccatttagattcatctcttgttatattttttttctagtttaatgtgttttctagttttttgttcttaatttgtttgttttgatttaactttttttttgtttaagtgtgatcttgaagttggaattacagaggttaattcctatgtatcagagctaaatttcctacaaatcagagcttggttgtttgatcatcaagggagattcaaagaacactagcttccgcaccaagaactcatcaagatctcatcaagaattcatcaaggaaatctacaagaacacaggttgaaggacaatgtcgatggcaaggttcaaactagagaagtttgatggatcaacgaatttcacactatggcgagagagttcgaagggtatacttgtgcaccaaaaggtggcaaatgtacttgggataaaaagttgttggctgagaagaagccaaaggaaattgcagagatagaggagatggcatactacaccatcatcatgtactcatccaatggagttagaagaaagttaatccaagaaaagaccggaaaaggattgtggaactaactagaacagctgtacatggcaccatcaatatcgagcaagattaatcttcttgaaagattgtatgggtttagaatgatctcttctctatccttaaataataatgttgataaatttaatgaaataattgntggtttagctaacattaatcataaggtagacgaagaaagtcaagcaatcatattgctcagatcattaccaatgacatatcaagaagtcaaagtagcaatcaaatatggaagggatgtaatctcactggagggtattcacgctgcattaaaatcaaaggactttgaattgcaagagaagagattaggaaagacgaagcctatcatgaaagaggaagtccaaagagaggatcatcaatgaacaaccagtcgccatcaagatcaaagtcaaagatcaaagataatcaacaatgttatcaatgtggaaagattggcaacattaaacgattctacagtcaattgaagacgcaatctggtttcagatccaactacgatgaccagagatgcaacagattccagaatcaatactcaaaatttaatgatcatggaaatcaaagaaaagactttggagtcgtggctgagagcagtggaaatggaagttcaaatggggaattattttctatttcagaaa

SEQ ID NO: 39952 - DNA, 1067 bp, Cannabis sativa
attacaagtttgttttctagatttctaagagtatccataattcatgcacgacgaacggccaatacgactgtacatagattaacagtacatgctcttcggatggatgaacaacttgtttggctagaaaactttttttctttcatgacgtttgtataatcttttaacctgtttccaaaaaaacatctcattatttttctaacctaactttcctttctcccttacttcttccttctctctctttctacccgccatgaccaccaccatttgccaaaactgctgctgccaccaccaccaagagcaaccaacaccactatcaccatttgccaaaaaattatgggcaagtggtttgctaaaaattattattggagttagttatttatatgtatgtaatttattttttaatagatgtacacatttgtgcttgtattttattgatttttgctcaaaaattggattttaaatttcttacgtttttttttctagttttctaattttttgtgatattctgcgatggtagaccaaatcgcatattaggatgaagttttgagatgcttactaagaaaattaaaccttttgcattttttttaacgttttgcgataatttttatgatgtatttgcgatgtgtgactaaaagttgaaatcttaagtgtgattagtgatgattttgtgatgtttcacaatgtgatttgctttttttagtcacacatcgcaatttcatcaccaaatcatcgcaaaacgttgcaaagtatgcaaagatttaattttttagtcaaatattgcaaaatgtcgcaaaatatgaaaatgtttaattttttactcaaacattacaaaatcatcacaaaatatcatccctaacctcagatttagtctactatcgcaaaatatagcaaaaaactcaactacaagaagaaaaaaaatacaaaaattttgaaatccaattcttaggcaaataattaacaaaacacaagtacaaatgtgtatatctgttaaaaattaaatgcatcatataaataaccaactccatcaatatttttttcagtaaatagtggtggtggctgctctcaac

SEQ ID NO: 39953 - DNA, 1460 bp, Cannabis sativa
ctattttaaataaatattatatttaaagaacatatagagatgctcttacaatgtaataataagaatttaatagtttagtaattctattataacataataaattcgttttcttttaaaaacgtttttgttcaaaattttttctttttttttttatagaaaaaattaattgtgtttgttagtagagagatatgattgaaagagttaggagtggccgtggtcagcatggatcccacttcattacttttctatgagcccacttaattattaatatacatcatgcaatattgaagaagtaaaaaacacaaaaagtcttttcagaaaattaaaaaaaaaaaaacaaaaacaaaaacaaaaacaaaaacatgaaaagatgagttaaagaaatatattacccggttccagcgaagaacgccaaaggaatcatcatctcccacccattaatcgtcatgctgccatttcaaataagacaaaattcacaaatccaaataataaagagttagtatacatatagaaaacgtaacctccctatatttgaaagcatatcataaaatataccatatatatattttgcctgaaagtgaaatattattttcaacattaccaacatggtaagtaagagaattcagtactggacagaattaataaaattaatgtcaataagctgtcataccatatcgataaagcgtctaaagcaatctcagcgtttttcaagtttccagtcatcagtatcagtattctataataccaattttccaagctgttgaattttccaaatttatacacaattaaaaagaatatatataattaacaatatcccaaaataaaaaatgtaacaaaaagagaattaatattaccagagcataaccccagaagaagtagagagtttggtaaactcccaaagaccagaaaaggcttcgattgagaaaccggcccaagtggtcggacagccaccgaagagtgtatagcccaaaagcccaaaaaccaaagtccaccaagagaagttgattgttaaagcggtgccaataacgccaagcttgaattggtacacaaagagccaactaatgaagatgtgcataatgagtgcagccagtgaaacccaagcgataactccagtctttagctggctctgcaagaatctctgtaaaggaaattggaaagcgaagctgaagtgcagcggaatcatacacatcgccgccacacctgataattccgccacgtcgtgaggctgtcctaacacttttaagacaggtgtggcgaagaggtagattgggagtagtaaaacacagcatacggataacactatccacgacctttgcatgtacacccctaacatatagtacttcttagccccgtaggcttgtccgcatagcgtttccaaagcactagccattcccaactgagaaaaaacaaaacatgatggatttatcatcatatgtcaattattgaaattggaataaggg

SEQ ID NO: 39954 - DNA, 1631 bp, Cannabis sativa
ctagtgtggaaggctgtaaagttatacataggttcccaaaacgacgtaaaagttcatgcatgcaaattttctaggtttcatctgtctcataaatgttatttaatacctgtggctttacaatctatacatggaaaatttgtgattcttggaaataaattccatacacattagtgagggtattaatttttataacgggggaggttggtctaagacaaaccacctctctccttttaaaaaaagaaaaaaaaaattccatacacattagttgagatcattgatggcaggtaattgtgatcatggatgtgggtttagaaataaagaatattatttccttgacttgcattgaatgtgtacattgttactcttatatatagagacaaagaatacaagaaagggagactgtgcaaaatcaggatactacatacaaccaagatcctgtttgatatcatcgaccaaatcaattaagcttgaaattgttgctgattttcccttgtagagaatcacatgttctctatacccataaaaggcttcaaactcaatataattgctaattttccacatcggatttggtttattttctaagttcgtatattgccttttataagttgtctaaagtggattgactagtattattctcttcatttatttttggattattttgtttttactccctaaaatataaggcagtggtctcctaacctagcctacaaatgtatcagtatcacttctcctacaaagtaatatacaattttttgcagcagccttctcttttctttctttgcatgttttctccttcattaattgtctcctacctacatggtttcatggtattagagtaaggttcagttaagcaaaagctgtacaagacaacattgactggtgaccgacgagagtagggattgatggttcctctaaggtctcttcagagactactcaggcctacctatccaatatgagatgcacacaatgcaatggttatggcatggattgtgaactatggaggaaaatgtcaaggagtcttctctatattattccactgcaaaataaatatggggtggttggacagttctgctcaacaagagaacgtgatgtcactgaatatttcaatgccgcggtcagattgtggcagtaggatcaaccgagcagtgctgaaaaatataagaaaacaggttgaaagagatataagattttgtttggcatgtgttttgattcagatcttgatgaaggtaggggttgatttgtaacagtttgaagagaggaaagcataaacaagctatgttaggggaacccaaatcatcactatgaacccaaagcatggtcagtagattcttaacagatcttggacagcaacattggtctgctctttaatggactctaaggtacatcaaaggcactctaaacatgggaattatgtttggaaaagagtcatttgccaaagaagttgttactagctgtgtggattttgatgatgctggttgcatagatacaaggaggtcactcacaggctttgtgtttactgtgcttggtagttgtgtaagttgaaaatcgacactgcaaaaggttgtagctttatcttcaacagaagcagaatatatggctgccactgaagcaatcaaagaggcactatggtt

SEQ ID NO: 39955 - DNA, 1151 bp, Cannabis sativa
tgaaaaaaaaaaaaaaaaacctctttatttaaatgatataaatttaattatatttatattattgtgttgggttaagccgatatcattcaggaggagatattaactaccactagaggtcattttcaggaaggatattgcttcaaaaacaaaaactaatacacagtctccacatgcccatgtgtgacaggtaaaagtatataatatatattattaggatatatatcaagaaatcatattaatttatatataaaattaactctgtcaagatgctgattagtatattatttatacatatcgaaattaattgacttgtgtctctttttgaagacgtttacctcatctatgtctccctcaagtctttcccacccaactacccaactatttggatcgatatatggatcagaatctgtttatatttatatatatatttacatatacatacattcatatgttatagatattggtagatgaggagaaggcatatatatcattcacaaagtaggagagaaattatgaaactatgtatatatgcacagcatgcatgtcaatttgggttggtatggtaacacagattaggataattaattttaggatattatgtttgcatgcatttttatcctcaattttaaataattatataaatattttacctaaataaaatgatgaacctgctggttgtaacaaatgtatacatatattacaaaataaatagcagtgaataataatgatcatatatgcaaaatacaattttgttttattactcacgttttgttattctttcttttttcctttttttctttttttttttctgtgatcttcaacaagtaattttatatatatatatatatatattttaaaaaaagaccatgtttgtgattctaaaaaaaaataaaaagacaattctaatttattatatttttataaatatttattatgtactaaagtattggtaagaattaataatactcaacactatataattattatattgtattatggatatctaaagtaatgtattaaaaactaccataaatgcttgattattttttttattttattaatttaatttttaatattttagtaatattaattttgtataaattgggttcattttattagaataaattactgagaaaaatcttattcactct

SEQ ID NO: 39956 - DNA, 1455 bp, Cannabis sativa
gcttcctttcttactttttttaattcataagacttgaacatataagtaagaagaagcatatggagtaatggaggttagaacgaccactaactgttctagagtactaatttcctagacagtagaaaagaagtttaaagcataaatttggcttcccaaatataatttcttggaaccatagtttcaaagttcatcaaacaatactcattttagtatataccaaaggaaagaaaaccccacgggtaaaagcagttagtactttctccaagtgattacaaaaagccaggtcacttggaaaagctctatatctcatttattccaaagaaccaaaaaaaaaaccaaggagttgattttaaagtccttactgtttcggctaggaaaaagctctccatgtggtcttcctgcttgtgaaactctacatcagatatatgacaatatccacaagcacatcttgcactgtattgcaagctagccaccatgtcccgtccagcatcaagatatctttaaaggaaaaaggtagaaaaaaaataacacgcaatttattatgggcacccatgtaaatctcagagtttgtttgcatcaataaggctgaggattttaaaagacagaaaaggatagaaaggaataacacctccaatggcatgatcaataagtcaaatcaccttcaactggaaccatatgaatataataacaattagaataattcctactaccaagaaatcactgtcctaacctgggatctctggtagctttgtagagccagtatgtgctctcaattaactctggacgcaatggataacttttttgcccgtgctaaaaatacataagagtaagaagattagaaccaaattattgattaatagcctgaaaaccattgactactagttttttgagatcatacatttctgattagaaatgaaacttttggaaaagaaaatcaagaaaaaactaatagaacagcttataagtaacaataacaataaaaataatgatatataacactagcatttaagctgggttactatgaagaaataggtctaaacttcttcactaatgaccagttatttttaacatgcaacatttcatcaaggccaaaagttcatacaccttaaaaacataaatcattagaggttgaaagcacaatgacagtactaacttacaaaaaccatgcataaataaaaaataaactaggaacaataatagccataaagaaaaagattcaccttatggcactgaagtttgaattttcgaagaatcacaaaatcttattctatagcagcatgctctttttaaaggcttaatatcacaaagagaaaagtatgggcagtaaatgaatataattaaaatacctgaacgctgagtgtagcaagattgaaaccctctggggtgaaaccatatcttttccagacactaaagaaggcattgtgggttcgaatggcagggccaatatccccggct

SEQ ID NO: 39957 - DNA, 1695 bp, Cannabis sativa
aaatttcggttttagctgagaaagtaaacgccttttgtagtactaacctttatcaaaattttctcccttttgtcatatcaatagctgcaataattggtgagggaatactgttggatcatgggacgggagttgttataggcgaaactgctgttgttggaaatagggtgtctatgatgcaggtaactcgatttctgtcttgttccttttcgagtactagttgtcatgacttatgtttatgtcaaatgcattgctcttttccctaaaaaaggaaactgattgaagttatagtgaactttttacctttattttctcacaatatcctcgtttggtgacatgttaagacataagctggactgaataatcatcatcattttcagtcaaaattgcatcttttttctattgactttgagactgaaatgtagccttaaaaagataagtgggaattcatgtggctttatctgaaaagctttgagttttctttttctgttgaatgaatagtaattgtactcctcagaactatgacctgtgtaggatttgcttctgaattattttttggtaaaaaattccccttgaaccatgaaaataattgcaaatttcccctgattgctgcatttcccctaactaacttaacttagttggaaccaagtataatgattttaaatattcaaacattaactctaaaattacaaattcacaaccctaattttatcgttagagtactatctatgcaattatattttgcctagactctcaaattacagtagattagctgaaaatcctatttattcgtttttgtggcacttgcatgtttaacagccttttcgatatttcgcaggctgtaacgctagggggaacagggaaagaagttggagatcggcatccaaaagttggggagggtgtccttattggagcaagtgtgacaattcttggcaacattaagattggtcatggttctatgatagctgctggttctcttgtgttgaaggatgttcctccacacaggtaaagagtactaatagccgagattgataggcgtcttcatttgttgtgtttggttttttataaagtaatctttcatttttcggctccccaagtattgttgcaggaatgccagcaaaggtgattggatatgtagatgagcaagacccttgtttaagtatgaaacatggtatgtaatgtgaagagcagttaatgaatgaatggtcattttagtttggtaatttcattttaatattgtattgttgttatgtgacaaatgcagatgttaccaaagatttcatttgacacatgcagcagttgtctgttggggattcaaaatctgcaggttagaaagtgtgaagaagtttttaatgtataaatatgtattaatttcaggaaaaatttggagtacactcccaaaaaaaaaagttttggagtgtctcggtataccttttatctatttaagcatttaggagaatttgttagtctttctttgacaacttgtaaattttctaaaaaaagttgaatagtttatacatgtgacagttaatagtcctgtgattcgtaagagaaataccaggtatgttgtgcaatctcacattatttgagaaaggtcaagtatgataattttgagacggtgttggtatgagactacacacagttaaaaaaaacttaaattgattgattggtactacttatatcaacaagatgcatctt

SEQ ID NO: 39958 - DNA, 1241 bp, Cannabis sativa
caaactctgttcttctcttttcttcctctgcttaaatctttcatggtatcagagcccttgacttgcgtcaatggcttcccccgatgacaactcgtctcaggcggtaggctccgatcctggtgtggtgccagctcagaactcctcgacggcatcaccatggaatccattttcgaattctttaacagcttctcttactttgaaactagatcgcacaaactttctctcctggaaatcccaggtggttcctacagtgattggtcatgatcttgatcaattacttttcagcaatgaagctcctccggaaaaactcatcaatggtcgtgagaatcctctgtatgtgcaatggaggcgtaaagatcaattactgctgtcctggcttagatcgtcgatgacagaagggatcttggctactgtggcttcttacactacttcgaattcagtctggaaagctttggaacaaaaatttgccagtcaatctaaggcaaggcttcttcaactcaagagtcaattaaccaatttacagaaaggtaatatgtccatttcagattatgtagataagatcaaagctatatgtgattctttggctattgctggttatcccgtttatgactttgatcttgtgttacatcttctcaatggacttggtcccgagtatgactccgttgtatccagcatcacctctcgaagtgatactctctccctcgaagaagtgcaagctctcttgatgtcacatgagtctcgacttgaaaggcattcttctgcactggatctttctgcaaaaatggcagccaatctcacagtgggttcaagaaatggttcatacaggccctttaatggttcatcaagagatggttctgtgcggggtcaaatgtctgaaaatccttcaagattcttcaatcgggctaatggaaacagacctgtccataataacagacccttgtgccaagtctgtatgaaatttgggcatactgctgttacatgccactatcgttttgatcgcaattgggttacacctaaggcctctgctgctcagccacaggtcaatctcactgaacaaagcttcgaatatgaccctcaggcctttgttgctcaatctgttcctgactttggggatgatgttggatggtatgtggattcgggtgcaaccaatcatattgctcagtctcttgacaatcttgagtcagctactcccttcactggccatgagacagtcactgttgctaatggtaagaaattgctta

SEQ ID NO: 39959 - DNA, 2039 bp, Cannabis sativa
ttatccattttaccgtcataaaataattaataacattctaacaattatataatataaataatcacatgtatagaaaataagaattaatcatatattgcattatctaattaggcaaacccataccatagtctagcaccatatatcacgttatcgcattacctaatcaggtgagcccatgcaataacctggcaccaatatatcgcatcgcctaattaagcaagcatgtgccctaacctggcaccaatatattgcatcacctaatcaagtgagcacgtgacataacctaccaccaatatatcgcatctcctaatcaagcgagtttgtgccctaacctggcaccaatatatcgcatcacctaattaggtgagcccatgaattacattgccattgcctaattgacaattaaccatcaagagatctttcatgccatgtcgtacattatactatttttacatgaagttccagtttaggtatgttggctgacctacttggagaacgatcaacggtcctggaccctatgtcataacaataaaagaacaattaaccaagtaatttaaccttattccaggtctaaaaattcatttccaaaaatcacctacaggtcactagggtatccctacttcaaattccgagaaaatacaaaaaatggagttcaaaaacactatcagaaatgacctgccattttaggaaacaactaccattttctctagttctcctagcaggaaacggctagccgtttttccccaaacagcatactattttctacaggaaacgtaagtcctaaattttgcactcttttaaacaccactaaaacttatccaaattattccaaacttcacaacacacatatatatcacccatacaatagtcccaacgtgaccaaaataaaaaataattccttaaatggaaaatgccattcaagctcaagtttgagctttaaaaaatcaaactcaatttcttcctcaaaaccacctcaaattcaacaagtaaacatcaaaactaaatccatatcaacccagaaatagtttcatgaagtcacaattcccacaactactctatatcacaaagtgaacttacaaaactaatcttttcaacttaaaacgaaaactaatccttacgttaagttttccctcttcagtggattactatctagctactactgggcttgaatcactaggtttctagttagaattaaaaaaaaataaagaaaataagagtttcgtcacactgaaagagcaaaggttcttttcagttctttgtttttaaacgaattttactatatatatacatatattctgaaaaaattaataataataataataataataaaatattaataaaagttattttatcatttattagacactaagaattctagggtattagatcaaatcccaagtacttctaattaccccaataagtatattatcaacttatcataatattcttatcaaaatcagtatttaaacctgctatgatatttttggccctcaatcgagtctctaaagtcgccaaacttaaaaatatttttttttccacaaacaactcatattttttttgacaaagtgattagaatcactcatgaatttacaacgcagacgtctgccaccggcgctggaacctcctcaaactaggatagctcatcgtctaaccgtagagcatgttttgccaagccatgtcacagatgctaaataaatcttcataattaataaattacacgtatttatcaactgatgacaaaatttatgattgatgctaaaataaattagtagaatcataatctaattcattacctaattagccataacatatattaaactttaataattcactgttaagcttatccaaatattatatatattatctgaagccatgtgacactacaatattagtcagaattattgcaatattgtctagcaaccactattcctatggtggcgcatgctcaacagagtctttagaatatataaggttaaacttttcttcttacaattatagttgaagttgaaagtaataatggtaatactctgtttgtaggc

SEQ ID NO: 39960 - DNA, 2022 bp, Cannabis sativa
atctcaattatttacattaaataatttataatatatatactatatatacattatatattatgtatacattatatatacataatatatatactatataaataaaatatatatacactgataatttttgggtatcaaaaaagtggggtcagccaccaccattgaccaccgtggtcggcagcttaacagccacctaggtcagccacgggaagagttgcttgatggcagagcacggaggaggtcgcatgacctaaaccggtcaaactcgtctaggacccaaaccggtctttgtcgcacaatggcggagcacgggaggagggaacgagtccctcggtgcttgattgtggtatgaccaccctagaactaccttcacgtgttcttccaccaccaattgcacgggtcaataatgactcgattggttttgtttctctctcgtccatcatgcatgaaatccatgcatggtttttctacgtgggcacggtacccaaaactactcaggtggttgtgcatagctggggaataattcttgagctcacatgcatgtgattttgacgtgcatggatggctttcaagtttagaaattgagcttgcatgctatgaatattatataggtacaatttttacttgaaataatttcataaaataaattacataaaattcatatgccctgaatttgacttacattattttctaaaaataataacaacaaaacctacacccaattataccatataattaacgcttcatcagctctcatacattcacaataaaactaccatccattcacatacatgtcacatatatataaatacataaaatccacacaacatttaatgtatacacattcatggaactgctcttgatactaattgttagttttatggtactaaatcaggtacgcagcgaaagagttttgtactatctaattatcattgtaccatagcccaaaggatctccagatgtgtgtacattaaatcaaaataaggaatagttagtttagaataaatacctcttgaagtctatcaggatatcctcaaaatttctcgtatgttgtatcccttaatccagataatgcaatttaaactcacattagtgtattgttccaccacacacaaggaatagtgtgggctattaggataaagtgtataggtttgttcttgttgagttctcaacacatgagcaagaacaattgagaaaaaaaaaaaatcaatttcctttttctctctctaattttgaaaattatagttcagattaaatattctgatttctcaaatcaggcttctatttatagtagttaaattcctttaattaaatcatatttaattctttaaataaataaatatctataactgaattcagttactaatatttatgagggaatctctcaaccacttgagaaaatatctcaacaatcttgaaatatctataactatttttcaaattagatctttatctaattgaattaattagcccaaaaagacaaactccataaggacagcaacatagtaggcgcctacccttgtctgtttaagacaagattgatgtcttttgtccttacaatttttgtcttgacaaattttgtcttaacaattttttctttttcctatttaattaatttgaaaaattatttatttattacaaaaaataaataattactattttttcaattcaaaatagatttttttgaacaatattatactactctttatctctacccttgatagtgtttcaaggttgcgattcggagaccatcgacctataattctaagctcaaataaactagattatttattgagtttcatcaaccaaataatccttgtttactaattccatgattactccacaaaaaatatagaattgaactcttagatattatagaattatatttattgagtttaactgtaggtgtccattgatataatccattccagtgactaatcttctatgtgttgattcgtaattagttttggtcaaattatcgttttacccttctaattacttctttatcatttagttccattaatt

SEQ ID NO: 39961 - DNA, 2690 bp, Cannabis sativa
agaaaataaaatgttaaattatgtatacatcgagcaatacaaaggtggcgaggttaaaactcccacttagaacattaccataagtatcagatgaggaagaactgctataataattacttaactccttagaaccaatgatcatgtaagggtcgaaggggttaagtggagacaggtcctaatttgaactagcagtcctatcaaagttagttccatactgtgtagagatcccatagtaagagctattacaacttagttaaacatgatgtttaggataccaactatcaaacctatgggtaattaagtcgatgcagttccagatgaagaagttatattggctatccttaaactgaactaatattgtttgatcagccctaaggatggtaggagaccatccataaacacgggaattattacctcagggagccccatctttagcttcccaagtggttacgttcttaaagtaataggtgtgagcaatgtagtcacaatcatcttcgtcctcaggcacataaatttgttgccaatttgaaaacttgggagttttaaagtcattggtacattggtctttgccaagaatggtgcatgccttcaaattgttgttgtgcaataaaaagtcagcgacttgcagacaataaggaaggttgagcaaaatctcatgcatttccttgaattatggggtgtggatgggtctcttggtgatcgctgaaaacatgacagaagaacataattagttaagtataaaaaacttaaaataagagtttgagagaaattggtacttatgtatgattcagaatctggttttgttgattaattataaactagtggtccaaaagaagtcatccttaaactcctttttgttgggaaaccttacaatgatcttacgatcactaatatgggttccgagataataaaatcctcctgctctgtgcttcctcgtaggataggctttgatagagtaaaaataaataatttctaggggtgttaaacactcccattttaagatatggtagagggatatcaaaatggctagaattttgcaataatttggggaaagtttaaagggtgtgatcccaaggtaattgcaaaattccttgaaatagtccctgagggggagaaatgctccacccctaatgtgctcgacagtccaagccccaatattggaaggctcgctagtgttgcagccctcatcttgatatatgcgctcaggtgggtaacatctaaactccccctgagcaactgatcgaatgcgacatcctttctcattccttatgccacatgaccttaagacatctctgacgtaagggccaatggatatgaccctagatttaattaattctacctcgaaagtgacaaaagggttttgtggagtcttggatttgcgagctttgtaagccatgagtttaaattccaagtcacctagtgaaaagcaacagtgactggtggtaaaaatattggcttcgctgggggaatattaactaagcatgacgattcaagccaagctgcttctcacaagaaacatcatttaccctcaataaattcttgtaaaaattgcctatagtggttagaagtttcttcttgactagacctaatgaggtgattccgaatttttgcatcattaatttgaagtaaggtttgaggtttttgggtttgaggtttataaactaaggcttgaaattgaggacattctgattctgatgtttgtgggagcatgaattctgggctaaattaggacatgattttagagaaaaataccctaattcttgaaaaaatagagcacaaataaaaataccttaaattttctaagccctaaattacccaaacattcatacagagcttacttaaaattatggtaattgcaaaataccatactcgtaaagaaatcaagattaaaaacttaaaaagtcgaaagaaaaaggggaaagtcacttactggatttttgaagaattatggttttgaagaactttgcaatgggaactccgaatgtagaaagatcgggtcttgaagattttgaagttgaggggtgcagtccgatgaaactcgaaggaagaatgtgagagacaaagagggcatgcaagttcagagaagaaggtggttgagagtttttcaaaatctgaaggtttcgtgggcagtaatggcaaaaataaagggaaacttgaaattaatacccaaaaagcgataaatgttcgatcgcgaaaagaatagattgaacggttgggaactaaataagaaaggaatggtcagagcattaaatggtgaaataattcacctcaaagttttgaactgccaaaataaaagcatgtaaattataaatgggaaaaatacaatcatacccttgaggcatttaaaaagtcattttcactttaaaaaagcactttttaggaggcaattattatacctatatttcggacaacaataaaaagttgacatgtgtatcaaagttggaatatgaaccaactcaaaattatgcattattaaatgcacttaaataacttgccttgggaaatacagttaataaaggaactcgaatttgctgccatatagacaatagtgagacacgagtaataactattgaccgatgagaccagcgagacaaacaggtccatctcgggataaacagaatatataacagaattttttggaacaggtaaaataatgagtttgcatctcattgatccatatactcgtgagt

SEQ ID NO: 39962 - DNA, 1380 bp, Cannabis sativa
tgatctaaccttaaccacttgatcgcacaaaccacattttttccacacctccttactccaagaacaatcccacaacacatgagcaccatcctcaatccatcctcccttacaccgagggcacgtaggcaccaccggaatgcctcgtttagacaatgcataattcgttgggagccatgtatgacataccttccaagcgaaatgcttaacttttggcggcaccttcgctttccataaagattgccaccactgttccttctccttgtcattagattgataggagacctcccgcatatcatgagccaaccgatatccactacgcaccgtatactcaccatttttagtgtaatgccacattattttatcttccacaccccacgacccacttggcaagttcaaaatcaaatcaacatcttcctcattaaaatgtgcctttataaacccttcatcccaccccccatccgccaacttcaagtccaccacatacaactcttgcgggaactccggtttatcataaacacggaatgtgaccggccgaggcaaccatggatcatccaatacctgaacccctttcccattcccgattcgccaccgatacccctttaaaagaagctttttcccccacatcatactatgccacataaatgaggaatgactaccacatttagcatccaacacatcgacaccaggataataacaagcctttagaacccgactactcaaaagtgtcggacaccgcaaacaccgccaaacttgctttgccaaaagagcctgattaaacaaccccaagtctctaaatcccaaaccacccttctccttctgcttacacatataattccacttacaccaatgaactttcttttggcggaccgacgatccccaccaaaatcgagcagccatactatgcagactctttgtagtactcttcggtagctgaaaacaactcatcgtatatgtcggcatagcttgaaggatggctttaataagaacctccttaccagccaccgaaaacatggatcctttccaaccacgaaccttttgccaaactttattcttaatcatctcaaacagttcttttttactccttccaacaaacgacggaagtcccaaatactaactataattatttaccactttcacatccaacaaagcagctaaccgactccgaagacttctatcaaccaatgcaccaaaacacatctcagacttggtaaaattgactgcctgaccggacgccgccgtatacttatccaataagtccttgaaacgaccacactccaccccaaaaaattttaaagacacttcattttaataattattattttatgtaaaatttatatctttaattgtactaagcttttttaattttttcttccaattcat

SEQ ID NO: 39963 - DNA, 1195 bp, Cannabis sativa
cccaaaataagatgacatagataatggactacgtaatgcttgcaccacaatgagactgtcggtttcaacaatcactccttgccaagatttcctttttatctaacttaaagcttctcttactccaaaagcactagccatttcatgattaacttgacctggccgacagcaagaaatagcttcaaagaagaccctgttgaatccgttgcatcacagacatagttgtacacatttgaggtaggaaaaagggctgcatcgacattcacttttagaccccttgttgctggtttttgccattgaacacctgcatctgcatcagtcaagaatgaagcacggggaacctggtttctatcttgtgcccgaacccactgctccaaataaaattgagccaaaatagatacccctgccaccgtaggttattttttgtcccaaaccacttcatttctcatcttcgataaagcctagcaggtcattgcaattgttctttgcttctctccatccaagacctgcaacatgttatctaaccagccagagaaagtcaccacatttgcattaatcacatcgatacacgtttgttcccaacatgcttttgcaaaggagcattcgactaagcaatgaaaagttgtttttctcgctatatgacacagtgggcacttttcttcaacttctacatgcttagatcgcagctgtgaagcaattagcaaataatttgctgcagcacgctataagagatctttaactttcggaggcaccctaactttccacagttttctccaaaaactagcagtaaccgattgcagtttagcatctttgttctcttgcagcattatgtactataacttagaggaatactaagaattaactccgaacctctaccattcattagatcacgaatcaaatcaacatcccattccatatgtttaggcaccattctagccttgactttctgctcaacaagtgcaggatgtgctaaggaagttctcagattctcctcatgtggcaacccaatacattgctgtcaataaaaaaggaacttgaaaataaggcgaaaaaacaatcaataaaaaaggaacttgaaaataaggcgaaaaaacaatcttaaaaaaaaagctcaaaagtaaaagttgtaaagactcggtttttgaccgagtcaaatgtatatatatataaaatattaattaaataatgatatatatat

SEQ ID NO: 39964 - DNA, 1498 bp, Cannabis sativa
  modified_base (853)..(859): a, c, t, g, unknown or other
tatttgtgtctatggttatagcgtcagttacacaaaccgacacaaattctgtatatgtcacttaaaaactgaagcaaaaggtcatttttgtagtagtgactaaagcataactatgtagacacgatagggtacaagaggtcttggggcaggcgagggtgctaagaccctatgcggttatgatgactaactcatgaagggtcgtcaaatataatgactctatccagctcacaactccggtgtcggtgctaatgccaagaccaaatccatcgccagcagctacttcccctaccttttccttgcgtcacgaagctgatgaagaccgacgtcaaaagatcacgtcgagacggcagctaagaggagaccattactctcatcagtgcccactgggtttccagtcaagcctggtgcagtactgttggttgaaagacgttgctgggtcgaacccttttttggcaaagtttgctgacaaggatctcctccatcacaatgtaactacaaccctgaagttacattaaagaaagtaacttgtggcattaaaaaccagttagggaatctctacctgagtagaattcattctattggaggtccaagtctttgctgaaaaagcttccaagtgccttgccatccatcgaaggaaacatacttcccaggagatcttcgagtgcatgcacgtgtgtcttggggcttctcgaagctcaagagatgtatgtgcatcgctttctgtgtgtgaaagatcactgggcatacaacacgtcttcaacccgctttccagaatggaaagattgcttgaagtctgtctcacacccagtgatgctttcacccctttgatattttcaagcaaagtctaagcttnnnnnnntatgcaacttcagccttccttcatgaaagttgaagcttgctccataaaaatttaacatgactctcacatgcatgatgtttttcgtgcaagaaagatcactaggggtatggcacgacttcaatcctctttctcaaaattgaaggactgcttgaagtctgccttacttccctggtgctttctccttttgatcttttcaagtgaagtgtcagcttgaatttttatgcagcttcagccttccttcgcggaagccaaagcttgctccataaattcaacaagactctcacatgcgcgatattgtttgtgcaagaaagatcattgggggtatggcacatcttcaaccctccttctcggaatgaaaggactgcttgaagtctaccttactccccatggtgctttctccttttgatcttttcaaacaaggtataagcttgaatttttatgcaacttcagccttccttcgcaaacgccgaagcttactccataaaaatgcaacatgactctcgcatgcgcgatgttttttgtgcaagaaagatcattgggggtatagcccatcttcaaccctccttcccagaatgaaaggactgcttgaagtctgtcttactcctcgtggtgctttctccttttgatcttttcaagcga

SEQ ID NO: 39965 - DNA, 1641 bp, Cannabis sativa
  modified_base (920)..(930): a, c, t, g, unknown or other
attaaaatggaatgtctttaaaaaattttgaggtatcaataaaattttcctaaaagtataatattaaagtagcgtgaatacataattaataatttacttttctaggtaagtgtaaactagaagtaaaataggtagtgtgattaagaaacttattatatttagtatgaggaatatgtgttagagattttattacattcgaagaaaattaaaatgtattacaaatttattgtaaaataatataaagattaaaataagagattaattatatataatgtcatatatatacactatatatattacatatataaaaatagaagaagaaaaatacaacacatatcatataataaacatatatatagcaagagaagaatatatatacactcactcacaaccttaagtgtaaattagtaagaatcaccatgatttgaacaaaatattacacctttatcaaaaacttattatttcccatctttaaaataacgttaggacatcactttagttttagtatatggtatatataatattatttttatttataaataatttaatttgcattacttaaagtatgattcaaagagtgttccaatattattttttttcatgtacacatttttgagaaacaaaaaaattaaattatgaataataattaattggcagtgttgaaaatgtgatcggaacaattagttgcattattattttttttttatttagcgtgcaaatagtttcactttacaaattattaatttttttaaaaaatatatatataaaatatttattataattacaatatacaatctcaaacaaaaaaaagttaaaatataatttctctagaaatcgaaacaaaaaatgtcatacaatcactataaaaattcttacttttaatcagaataaaaattatgactaaaagtaaaaaaattgtnnnnnnnnnnnaattatcattcttatgttgtgacttaaaaagtcgctaaaagtattagtaataaaaattacaatttattgtgactaaatgtattttcagtcataatgtttgttgtgactaaaactaaattagtgacaatttgtgtttaaatgttatgttttagtcacaaataattttttgttgtgacgaaaagtcacatttagtcacaaaaaatttatattgtgacaaaaaattatcattaaaagcaacaatttttttgtgatgaataaaaacaagaatgatggtgaacttcctaaattcatatacttcttgcatggggtattgaattttgacattgcaagagagagaacaagaggtagtaatcactagcttaaacttatataataatgattttatattttttttaatctgtcaatgggatatacatatagttttactttaatttaccaatattaattcctatgaaataaataccaattgtcgtcaaagagtaattaaacttcacatatgtaattaacaatggttaatctgaacaacttagactttgcaatccctaagatatgatcattgaattaattaattattttcttatgtccaattggccgttccctttgttgattcaatgagggaagattctaaagtttggggcacttgcatataacattgtacttgcaaattaataaagcctaataatgctaagctaaccatataataataaaatt

SEQ ID NO: 39966 - DNA, 2163 bp, Cannabis sativa
tgtatatcctgaattcaaatattaccaaatgaatatattgttattaattttctatgttgataaataattaaagttatgtttatataaatatatattatgtgcaagtaatgttaagtgcaatatatgtttaattttttaaattagataatgtttttttttttaattcttaaaatagggtttgagattttgatctttgagaatatttttagctattgcggcttggtattccatttggatgtgattatgtatatttattttatataaacaataaaaccaaattaagatatcatggtaaatcgttgtgtgcctgattgagcaaaatcgtctcttattttaattcatagttaaactagcaaaattaaaaatatggttaaaaatatttataaaaaatacagttaaactaagaatttcattacatagccatattttatataaaatgaatgtatattatatactaaatatataatgtagttaattatacgtgtattcattgtgtatagtaaataaatatgtgtcacatgaatcacatgatccatgaaattttatagatcaaacaactaaaaataataatgaaataaataattagtgtgatttttttttttttactaatagatcttttttgttgttgatcatgatttttttaaacatgttgtcaagatgtttaaaagttgttgattaacaactaatatctattgacatatatttctatacctttgttacatatttctatatgcacataatatattaactacaatttgtgcactcacaaacaataatttatctactttattctttaaaacatatcataaaaattttattttctttgacaattttttttttcacaaaataattaacataatattcacaataaaataaaatgtaacaacgtgttaaggctcaattaggctcgtaatttcctctcagctgtgaagatatggcggctatggcaaggaaaacacgaggtcaaaagttagggtctcaagggaaacatgtgaagaaaaaaggaggtccttcctcaaatattgatttggttttaaaaactaggtctatggtgggaatattagggattacgtctatggaatttttagatttagaaattgttaagaatgatgaagattgaaggctagcgaagactaatcagtctcctccatctccgatggttgcagtaacaatggtggatcgatgttacttaaaagggaaaaatcttccatctctggtggttgtagaatgtttaatttcggggaggattgatcaaaatctttcagaaggggaagataatcttccaacgatgactgcaccatactctgatgtggagagggttaattaagtcccattggagggaggcaattagctggctctggtagctatgaaatccctttctgggatgggggaaaagagaaagatcagaggtcaagaagacaatttcttcctagtttagagttattcaagcttcgaaaagagatgcatttgagtggtaagatttcttcctcaattctaattctaaaattcaatgatgtttttgaaaacacctaattgtttaggggttaaagagagagttaagatttaattagtttatattaaaaaagtagttattggagaacaaccctagtatgttttaagtaataaaataaatatagaaatagatatatggcatagctattgcttgggtgttgtatctcaggaaccaaaattactatcttgtaccaaacaggatattaaaaatagctattgcctacatgtatagcaggctagagagtttatgtagccaaaatcttggtgctgttagtttgtaatgtgattttgaagtaatagaaattgcttagtcatcaaataactaaataaagaacaaaagaaaatagtaaaagttattaaatagaaagaaaagaaaagaaatgagtaaaaatatgtagagtaagagaatcacttaggcatgcttcttcaaatttttaaagaattagatacttaatattaaaggagctgatgaattagttaactacatctatccatttgaattaacttaccattgatctcaacatcttggattacttttctatagattcctggtacaatatttgcaagcctaacaatttcattgatgacctgaaatgttatacaaaaataataaataatatgatttattctagataaaatgtggctatgtaa

SEQ ID NO: 39967 - DNA, 1506 bp, Cannabis sativa
tagggcacaaaacccaacatcagagtgtataagttgtagacattgatttgtttttaaagggacacttgagaaatgcattaaatggtttttaccattttgacaagcaccccaaaagggcaaatcagattttgaaaatttactattcataaaaagtaaaactttattgagaatgacataagatggatgtccaagtcgattgtgccaaagtgcagcaattcgagtggattccttacaagatttagtgttgatattatagctaggaacagtacaagaatcaaaggaattgaaatttacatcagctttatttaaagctaaatgagctgagggaagaggcagattcaatgatctgaaggagggtaaagaaagctgatataggtcctgtttaagtgttccttgaagaagaaccttcatcatgaccttatccaagacaaaacattgagaggagttaaacaaaatatcaatgtcgttatcaagagtaaactgagatacactgatcagatttttgtgtatggttgggacatgcatgactttatgtaaatgtaatggtttaaaggaaaagattgaacaagaacctacagcaagaattgggagagatgctctttcctactatcgattttccttttcctttgtaatccacgacatcattgagttttgaaccatcagaaataacatgatgcgaggctccactatctagataccattgaggatcggcaactgtagttgcataagctagcaaggcctaaggttcctctgtagatgtttcagagggagcagattgaccttttccttggtagctagcttagatcaaatctgtgataacactttagtgcagtgtgaccagccctgccacagacttgacaaaccgatttatttccaccacaattgtttgtgttgtttgtcctaccacctctgcctcaagaaggacctctataacaataacagaatcatattcgttacctagtcctccaagaatgtagaggatgagttcatcatcactttctttgttgtttgaagcatgcctcgaagttgaagaatccttgctcgagatgtatttgacagaagcagaattagcacattccacaactcagaagaggatacacatcgagctacatgtcctaacattgcgtcagagatagaattaaagagccaactcatgaggaattggtgtaagcatatcctgttatcaaaggctagatttggtatcgatcttgtggcatctgctggatctggtatagtagcagggggctagggcgagaaccagtaaggaatccttcaaggcgatgcgcacgaacggtaggcaaaacttgagagcgccagtagacatagttgtttcgatcgaggcgtagattgaggggaacaagttgatgaggaatcacttgttctgctgcaacttgaggaatatcaatggtagcggaaatcgagctttcagatcggggggcagcagaagaagacgacatggatgagagcttcaagaatcttcgaagaacaaagaaaggaaaaaaaaaa

SEQ ID NO: 39968 - DNA, 2645 bp, Cannabis sativa
tatgtagcatctacatctagaatttttgtttatacaccttattttacttatgaggattcaaattaaaattgaatgagaatcaaatcaaatcaaagtagaatccaattctaatgcaatgaactaatttgaaattagaaaattcaatagagtaggatgaaaaatataaagaatcaataaaaataaatgagtataaaaactcattatatactactgacgttggtatctactaagttctacctactgttagatttgaacaatgactcctaccgtatgaaaacaatactctaaccactaaattaagtaggttttttctcctcacaaaagaaaaataaaagggaacctatcccatggatggattataaattgaatattacttatgagcaataccaatcaaagagatcatagagctatcttgacaagaaattatctacatgataaaatatgtatcacaagcataaggctcgtagctcagatggtaatggtagatgttatccatatttttgtaagcacgatacgtggatattaatcaatgaaggccaaggagtcattaagctacccaaatgattaacttagcacaccgggagggacaaagacatttaacctcgcgagaaaggtctccgtaaaagaagtctccacggccaattggccatacaaagggtatctgtgagctagagtctcattcaatccaaaaatctaagaccgtttgctcccgcgaggaatatcgatcttctcaagccaagttaaagcaccttgaggaggcaccagtcgggggtacgcatttggtccatggaggttaagcccacgcgtgtcaggctatggacccaatgaccaggctttttcatgtacgatgtcagaggctgtctcgtatgacgcgctatcctgcagagcatgtgtgtctttttgtactgggaagaatgatccaacgactaggagcaaggagaattcaaataagaatgaccctgaggtagcacgcgtctgaagcccagcctgtacagtcggtacattctaacacccataaaagccacatgaaaaattccccacctaccaatataatgataggatttcatccctgcagtgatccatcaaagacagcctatgcaatggagttggcctataaataccctagagaaggcacaaaaaagggatcacctttcagacctttaccttcggattgaagacttaatcttcatctttctaaacaaactcatttatgtaaccctactattaactccataatattcctactaagcttcctcttcctaaggaggaacacgatggaagggagtaaaagtccatttttcttgtatttgtattagtagtgctcgaccaatgagcctaataaactggacttgttgactaaggatagttagcgcctgaaccacataaaaatctcatgtttaatattttattatttatgccttcattactttcttaagttctagcaatattaagttgccaaaaatctcggtaaacattttagtgctttcattgagagctgaagaaagagatatgcacggcagtcaccgacacgagcctataaaaaaacaagtcggtgctagaaaagaaggaagacctcctaatctcttgttgagctctcaccgacagccaaaaatgtaccagccagaggtgtttctcaaaataagacctagttccctcgcctgcacaagaaaagtagcaaaaataaatgcacgtggtcttaaaacacctactacactgacttttgtccctaaaagcacagatatggctagccaactcttcaggggtaagaccaattgctagtatcctcagattcggatcccccaccataacaccatgcacgagcagagatgcgctaagggtagaaaaagaaaggctacgacctgatgcggttacaacgactaattcaagaggggtcgtcaaatgtaacgactctatccacctagggactctggcaccagtgttagcgcgaggaagggccgaatctatttccaacaactgcttcccctaccttcgcgctaggtggtgaagtagttcgaaaatcgatcctataatggcagcagatgagaggagaccatcagtaccgttggtgtttactgggtcaccagtgaggcctggctatggtattattggacggagcaggccaactttggcaaagttcactcaatgtcgttcttgtcgcttgatgtctctacaatcccaaagctgcattagggagggcaactcgagacattataaaccagttaggaatccttgccggtccactgcttaacctactgggagtccaagtccttgcctcagcagccatcaaatgcctagcacttcatcagaggaaataaaatgcctaagagatgctggggcataagcatgcacctcctagagcctcccgggactcaggagaagcatgcgcactgcatctccatgcgtgaaagatcattgggtgtgccgcaggtcatcaaccctctttcttggaagagaagggctgcttgaagtctgctttactcccaatgactctttcacccattgatctttttaggtgaagtttgcagcttgaatttttatgcaacttcaaccttccttcccagaagcctaagcttgcttcataaaaattcaatgtgactctcgcatgcacattgtttttcgtccaacaaggatcactaggggtacaa

SEQ ID NO: 39969 - DNA, 1893 bp, Cannabis sativa
atttatacaagagctctacagagcaatgacagctaacaacataacagaaactaaccaacttaactaactgaaaataactgtctaactgtacaactaacagacataacaaactcattctttaacaaagtagcagccaaaattttaagattctaaacatctgtctgaatattcaccctactaccatcaccaataagccaacaagatccgtcaagaaaaatctctcatgcccaaagaatacttttttagatataagagcccttagaagtttcctccacagtaagaaaatccacaagaggaaaatacatactcttaaaaacatgagcaaccaaagaattgggacaagaaaataatctccaagcttgcttggccaacattgtcttaatgaaaacaagtatatctctaaaccccattcccccatcagctttatgccagtataatcttttctaagtacaccagtgcattttccttttaccaccccaccagaatctagcataaagcctaagtaatgtagtttgacacaaatttttgatgcaagcatacagtgttatcattgtaaagttttaattataaaaaaattgttaaacccacaaggattgattattaaattttactaattagtatacttttttgattttatgctttgattagacaattaaaagtaaataataattaaaaacataataataaaataattgaaaagtaacaaacaaacaactattttaatcaaaaaataaagacctagagtattgatttctctattttaaactatgaatttcagtttactaattatcctaatttattctataatttatagttttgaagaattctaatgtagtcattaacctctctcgagtgatgatagaattaacttaattaactaccacgatatctctatctaatattagtcaattaatcaatatgattctctttaaataaaattcataaaattagtagaatctctcaatcttacacttttcttatgtcatgcaattctaagtccgattttagattacatctctcaagtgtaaaacctaaaatattcatactgattaatagtgaccaagcattaaaaagacaataattaacacaaaattgcataaaaaaatagcaagaataaatatgagaataatttaaaaactttaattcaaaatataaaatagtttcatcaacatgctagaaaaagtgtttagttcataatgacaaacataatcacgacaataatcatcttcataattaaataactaaataaaataataaagaagaggaagaataatggactttaatgatagttgatgatgtaagcttgagctctctttgtcttgctcttcaatgtgttttctattctcaaagttgctttctgtacatttctagtcgtccaaactcaatttacatcattatttatataggcttaaaaagatagaaaagatgtcatttagaattaggatttgaatttgaaaagaaagtcaggtgatatgttacctaaggccaggcaacatgtcgcctggaccttatctttgagatcccctatttttttatctgtcacgtgcaaaaattagtccgttttgtaaaagtgacgacatgtcgcctaaggtcaagcaacatgtcgcctaaacctcgttatcgagattttgctattttttttaatctacatgcgctgaaatattcactttttataatttaggtgacaatgttgcccaacacctaggcgacatgtgacatgaagcaatattttctattcctgacttcttttgatcatgtttaacttcctcactttgacaatatatcttggattattttttttgcaccaaattcatattattatcgtcttttaagctcaaaactacacaactacaacaatgtttaaattgtagatttaagtctcatggtgttttt

SEQ ID NO: 39970 - DNA, 1157 bp, Cannabis sativa
tacataaaaatattacatgaaatataatttaatataatactatacaatacaatacgttctaatacgacgtaccaaacgagcccatataattttaaacaaagcatttgtaacaacaacttcaatttagtacttatcattagacgattaataatatcaggttaactagaggtttccttttaatgtgaaaggatgtgtggattcaaactttcctggccacattgttacattgttgcagagattgcaggtaagcagtttttatcttaaactttgacttgtttttatagtaatttggatgcatcacaacaaaagttttcttgggaacttttggggaagattggaaaagaagtcagtggaccttgaatttgtattggtaactttgaagaaatagttagcctgacttaaaaaagtaagggaaggaatagaaggttagtcgctatggaaacttttaaagaagtacttgatgagtgcaaattgcttgattttagctatattaagaatgttttaacttggtgaaatgagcatgggaataatagagttatggagcggcttgattgaggtctctgtaacatagaatgtcaaaatcaatttgaaggggttgacattatgcttttttgaaaagggtgtctattttggcccaatattctcttgactagtggtctcatgcacaagatagtaaccaggttccgactgtagcattcttcactgctgttgatggttgtgatcgttggctagaaccagttgggactggtttaaagataaatattgatgtagctttgctttcagaagctgctacttatagtttcatgtgtggctcgaaatgttgttggcgctttggttgaggcaattacttgttgtcgtgcaggctaaataattcctgaaatggccgaggttatgggagttagagaagctttgagttggataaagaaaaaattttgacagagggtcatcgttgaaacagatagtgtaacgccctaactattaggcatgctacgcgaaccgattatgaaaccctaatcccctaattcgggattactagaaggataagcgcgagaaatttaaactttatttgaaacaaaatgaaaattaagcttgtaataactttaaactttacaaaccacaagatacatattgcaggatcccgtaaatattttcacaaa

SEQ ID NO: 39971 - DNA, 1192 bp, Cannabis sativa
atattaataaaattaaaattagtctagatattttataggtatccttcaatctcaaattcagcatattttattaatattttgattgtttgaattataaattgagaaaaatgatattagaaatatttaatttattaattactttttaatagcagatattatatcatttttgacatattggttatttaaaacattaaaatataataaaataacctaaataatttgtatatgagtaaaaattgagatttttaagagttatttcacaacctttaaatttaaaaattagcattattcttattttaatattttttttttttgttaaaaatgataatatctcaaccatcttgttacttttttgtgttttacaactaattaattatttgataaaatctaaattagttatggtcaaattgatgatagatattttgatataaattgaccggtaaaattgatggtagatttttaccaactaaattgattattttgaaaaaaactattatttaattgatttaatgactatgattaatttggtgatagatctttcaaatctaaattaatcttagttaatttgtaacatcctactaatttaggtatgccaattgtgtttaataaattactgtgctcatctttactaatcaaagggtttagtgtaaaataatgtttaacaaaaacttttataataaacataaacttttctaattaaacaaatatgtaaagtttacaaactccaggattccaattctatttttcaaacatttataaaatacaataaatcaaaaagtgttgcccaacgattaacaaaattgagcccatgtcttgtggaagatctaaacattctatgtctaaccatctagatatgtacaattttcattgagttccaaacccattgctattcagcttttgccttatatttacctatacatggaaaatatatcagtgagtcaacagacttagtaagaaaaacataaaatacaaagatacaacttgacttgcaacgaggcatctatacatctaattaccaagtctgaaacccttgtcctatgcgtatgattcttgaacattcttggctatagtacgattaaccataataccacatgcactcaatgttggaaattattttaccaggatctagatttactaccatgtatgttgattaacaccctaaatgtgaattctctaaaacaatagaatttaa

SEQ ID NO: 39972 - DNA, 2111 bp, Cannabis sativa
  modified_base (1112)..(1123): a, c, t, g, unknown or other
  modified_base (1559)..(1559): a, c, t, g, unknown or other
cacactaaatatgaacttgtaacacagaaattttggaggttcctgtttcaactgcgggcaatctgggcaccgtgcatcagaatgcccgagcaaacgaggcggtttttaagtccaacactgacttttagacttgtggaggacacaagggcttccctttttttttgccagagtggttcacagagacagcagcacactacttctcagtgttttagtttgtgctgctcaaaatgattcaaaatctagagatgccattccatacagttatagcaatcaaccttgaactatcctctcgtagatatctagttccctatataatgtttggttgttttcttttgacactaaatcgatttcctgtgttaagttaatgtagttctttgattatagctttggcattttcaatatacccaacattaaaattctaaaattctacaatgatattagtttaaggattctataaataattcacttaaagtcacaatcatccttacaaacatggactctatcaaattttatgctaatctctaatttcataaggtctcaaaatctttatatttcctaacttggataacagagcctaaacttacttggttacatgcccaagagaatgttgatgacacttgtagaaactccttatacttcttcacatcgtcaagaaagttgggattggcaacaagtcccttgatgagaacagtgtaagtaaatgcgatttcatcatcaaacatctgcaagtaaaccttgagagccttcttagtcaaactggaattgccataggccttaaccacaactatataggcaactattttgggcttgtagttattttgctcgatatgagtaaataaatccaatgccttgatggggatgagtttttccttagtcaaagcatctatgtctttgttgtatcattgcggagggaggcctttggtttgcatcttccgaaacacttcttgcaattctttggtgtcttttcccactcgttattcatcaacatcaattgtaggctcctcattaatcgagtcattcgatggggagagctttgattgaagatctttttatggctttggattgcaaaaaaattaaatttgagatctcaacctataataataataataatnnnnnnnnnnnntattattattattattttcaaagtttcagccataatagtttgaagcttatccaaatcactatatagcacttataacctataaatagcatttatccattaatatatatatatattttgaatggaaagttaatttaatacaaattatctaacaatattgaaaagtctaccgtgttgatttcttgaatgttgaattaactagattaaactaatctcaatatgcaagaagctaaaaatagaacacacagaattacaagcttcgtctgaccttgaaacctcatttcaggcgactattgcttgggttcccttaaaccagggtaataacatccactatgaatcaaaggatacactatccagtttctattacaattataccagaaagtaagcataaattaattcataaagaaattacccaacagatttgaacacactcaaatcnaaaatcatctaagaaccttagacttcagaaggcaagaatcccttgcttcttttcagctgatctctcttcagcaaagcaatctgaactcccttcggaaacacacgatctctgatacaccttcaatcccagaagatttcatcagtagacctgcaagaaacaacaaaacaagacaagaaagatatgttgccctaacagagcaatatgcttatcaacgaagaagagttagttagaaaaaccggtaatccctgaatttatactaacaactcataagcaacaaactttgatagctcagctaacgaaaaaaggacagttgtccttagtttgatattactaagttgacctgtcaaagaaccaaaaagaccacaaggttagacgaaactaacaactatatagatgaccaacgcaacataatttgccaccaatatatcagggtcttacaaatataaacatagttagaatagaactaaagattcgatctaaaaaagctgaaagttctagcaaaatcatgagttattctgttagcagaacgataaataaaaaaaaaaaaaaaga

SEQ ID NO: 39973 - DNA, 3678 bp, Cannabis sativa
aaattataaatattaaatatgattggatggacattggatgatattggattggatcagttcggttttctattagatcggatgtcttatccaacatccgatccgatccgatccgatccaattggatttttaaaatttgcatctgatccgatccaattacgattggatatccgattctattagatcagttaagattagatcggtcggttgagattgaatcgaatgactttctgcacacccctatttaatatgtagccatctaattataaatataaatatatatttatattattgggtattaattaaatctcacgcagaaaaaatataagttggagaatataaatattttaactactttattagtatgagaatttttaaaaagtattaaaaataaaattgtgaaaatttaagctcaaaacaaacaaaaaaaaaaaaatcactaaagatggtggcgtggttaaaaatctatatgacaacatacattataattattttaaatcttacacaaatttgtaagatattcgaatatttataatgctgaaaaggtaaaatatattattttaaaatttattttatatgcttatgaaataaattattttaatataaaattttagcattatatattatttaaaattaatttgaccgaaagtattagtgatatatcctaaatgacaacaaagtatatcattacatacaaaataaattataaattaaagtggcgtttggtaatacttttttagtccgttttctatttttaaaattgaaaaagtaaaaatattttcaaaaatatattctataaatctgtttttacttttaaattttttaattagaaatcaaaattttaaaagcaaaaaaaatcactttcaatatttttttaatcagttttttttcttaattaatattttagatttcgaccagacccggacctaaatctcctctccacgaccatggtgctgagcccgccttctgacctgaacccgaatccgactccgaaccctagacccgacttaaaaaaaaattaaaaaatgaaaataaaagtgaattttaaaaaacacaactttgttttttgtttttaaaattaaaaaacaaaaatagttacagaacgcatttttattttttaaaaataaaattttaaaaacaaaaattttactttaacactttcattttgtattttaaaaataaatacgttgataccaaatatatgactccactctccaatctccattgtacaaatgtggtatttatatttatgttacttttgtaaataaatgaaatatatttgtcggccaagtgggtctcacttaatctggttggtgcacgcgagaatggaagtaattgttgtattgttgaaattgaagagattgcatggcaaaacaaggttgggtttgctgcctttttactccaatccaataatatatatttatatacttttataaaataaaaatgaattgagtttttattaaaccaaatgtcgcttcgaagttgatttgtttaattactctccaccaaacgcaccccaactctaaacccaacacactttaaaattaattaaataaaattaattcaatcaaaaacatgattatcatgaattttaattactataattacattattatgccttttctagttatgtttccaaagtttgtccccatatgacgataaggaaactcatccattacatcattaataatctgttttatttatttattttgctttcaatacaatactacctatttccaaaaaatcacacaccttcaagttgtaaatatatattaatacggagaaaattttaatgaatatgtaattatgatgattatattaatttttaattagtagattattattaaatgattataattaagttaaaaattataaataataaataaaatataatttgatatattatttccttataaaatttttattattttttaaaaaattaaattaattataattatcaattttttatttgcaatttattactataaaaaaatcttttaacaattaatttttattacttaaattattaaaatatttatagtaaaactctttataatttaaaattatatcacatataactttataattttaaattatttcacatatagtcatataattttaaattattacaaataaatatttagtttttattttttattttttaaaaaatatatttataaatttaaaaactaaatagaaactagtttaaaatataataaaaataaaaaataagacagcaattattataatctaagctatatcacacaagtggaattgaatggcatatttatcaattaaatcgtgtgcttagtatagattgtattttattgtaataattcacattcccaacccccatattagaaaataccaaaattaattaacactatgactagaagtctatgttaaacccgtatgcaaattaggttatatccttttaatacaagttcaaattacatttaccaatcacaactaaattttaaaaaatcaaattagattaagacccgcatcatttcaacctttaatttgaataaaaaaaaaagaattatttgggacattaatacctcatgttttataatttacacagatacaatttatttaggggtattctatttacaccctataaaatgataagcctaacagacggatgtgaaagcacattccaaaagcacaattcaaaagctgaagaaataattggctcaaccacttgtgttgtccaaaaccactagacaatgaagagctaggcgtgtaactagcagtcgcagagcatgttgtgagtgttatccccacaagagaagaagacggtgtacaacaccctgtatactacatcagcaaaagactaatcaatgttgaaagtcggtacccactcatggagaagctgacttacagtttgctcttggcttccagaaagctaaggccctacttctacgcacacccataaaggtgtacatcaatcaactattgtagcaggttttatgaaagcctgaagcatcatgtcgactactcaagtgggccattgagcttggctagttcgagatcacgtatcaatcaataacagccttaaagggttaagcccttattgactttaaggctaaatgcataaactcatctcttgaaatctctcaagattcaggagaaaagtaagagccagagaagaagtgagagcaagagcagtagcaaaatcctgaatgactaacatggaaactccatattgatggaagcagcactgaccaattgttcggtgcaggcattgcccttataacacctgggggcagcacctgcacagaacaattaaattcaggttcaaagcctcaaataatgaggccaactacgaagccttaatagctggcctcaagctggcacatgaagtacggactgaccacctggacatattcaacgattccaactcgttgtaaatcaagttctaggcgaatagacagctcgaggtaaaaaaaatggtggcctacttgagcaaaatcaaagacttactaagttagctcaaaggttacataatctggtagatccccaagagcataagggtacagcagatgcacttgcgcgcgtggcaagtaacaccattgctgacaaggaaaatttgatgccaatacagttcctagaggaacccaacattaccatcccagaagaagtcgacatgttgggtgacacctattgcagcttacctcc

SEQ ID NO: 39974 - DNA, 1688 bp, Cannabis sativa
tttggagggttttcctaccaaaatatgaggttggatgattttttgcaagtaaattgatagttgagggggttttgccgtaaattactcataataatatataaaacattttaattcacgaaccatcactcattagtcttcttagcatttaaagctcattaatgaagaccactaccccaatagttaacaacaaaattaaataacctacattttatatattcaactttttaaaactagtgtcatgaaaattttgacaagaaatttccatactctttcttagaatttcacttaaaaaaattgttttaaggagttagttacaatgtaatctaattaattagatatgttaaaagagcacgttttagtaaatgagaagtgattctcttatccatagtacaatgcccatatttagacttagtacacccacaaataaattaccacaattttacgctgttttatttaaaatagatagtgtcagtaaactccttactacgtgtttttggctctcaaatagttatattacgaatttttttatattatcgtgtatattgtaattataataaacaagttttctttttcaagaaattctgaataatatacaatactataaacagtgttgaaacattatgttacacgtttatcttttacgtataattgtttgtgtgcaaaaaaatttcaaaatataatttcgacactgtaaataatcttatacgaaagagtacaccgatatatttttttcaatgggagtactagaaaattgcccaataattgattaattatcaaaaacttctaaatttaagtaatggaaattactcctataattaatgtaaaccttattactagtcaactaagtaaagcccatgagagaccatttctactttttaaagcattagataagattcatttcttttttcctttttagagtaagttacaacttagaaaaaataagttcctatccaattagaaccattgattaaaagttcaacctttatcaaagcttatcctatttcctatccaatccacaaaacaacacaaacccaaatgatcaattcattatcttttaaatctatttttagcaaagttattaaagcttgagtggacaattcttttttagccactttcacttaaaaaaaataataataagtgttcagattagtcattagttgaggtgatctctaataagtcaattacaactttcaaccaataatctttatggggtcttatagagatgacctaattgaagatcattataacaatttttaagtatactcctttacagatgtagattattatatacacacaaacacaacaaacaaagaaagaaacttgtccacagccagaaaaaaacatcaaacaaataattgatgaacattcatattcagttttgggaatttgggtcagtcccaatcatgaaaaaaaaagataccctttactgggttagtcatcaattcaattataccaatctccagaaacttagaagagagtcattatcctatgcataataatatgatgctctttcctttaaattattatgtagcgtggagaacccaccaagtagtttctttccatatctcaacccccatacttgaaaagaatccacaaaagaaaaattaattaataatgaaagttatgaacaacaacatcaacaacaatagtaaggacttatttggcattgttttagatattcgttttta

SEQ ID NO: 39975 - DNA, 3839 bp, Cannabis sativa
tgaggtgacacaggtcatgattagttcacacactttatcatcaaaaccgttagcccgaagaactttctctaggaagcaccattccattctatcatatgctttgtgcatatccagttttagagccataagaccaccctttcccttcttcttcttgattgtgtggaccaattcctgagtgaggatggacgattcggcaatccatctccccgggataaaagccgattgaaagggggacacgagcttatccatgacttttcgaagtctcgttgccagtatcttcgagattatcttgtaagcaaagttacaaaggctgataggtctaaatttctccaccgtatccgccctctccgtcttcggaatgagacagataaatgtgtaattcaaccttccatccagccgaccctcagcaaagaagctttgtatcataccgatcacactctcacccactatctgccaatattgtctatagaaacaccctgaaagaccatccggcccaggggctttgaggggatgcatagacgccaccgtcgtagtaatttcttcagtggagggtatttccttcatccacatattctcctcaacagtaacttgagctcggaataaatcaaagaaatcattgttgatggtaggagcctcagatgtgaatagctctctaaagaaagtattaaaagcctccccgattctcctctcacccctgagacactcccctccattcgttctaatctcccaaattcgatttcttcttcttctaatgactgtcgaggcatgaaagaacttcgtatttctgtcccctgcatcaagccatagctctgtagacttttgacgccatatactctcttttctgaaccacagctcattaagctttactcttaggtccttttcttccccttccaaattatcattaagttgctgaccttgaatccaagccagtctagcttcaatcagctaaatttctttatcgcagtcaccgaagttactcttcctccatttctgcagtgcacaccgagtatcattcagccttttgctaaacttcttgagatcattaccgctccccaggcttccgctactgtcataccacacataggatctcttccccaagcttcaaagtacttaaaaggcagaaactttttgtttccaaacttcccagtttccaccaggataaaaccatgatcagatatggttattggtgcattcgtaactttggcattaggatatcgggtgatccaatcatttgaaaccaccgctcgatccagacgttccctcgttagacctccattgaaccgattgttttgccaagtgaacgggcaccccacaaagcccaaatctatacctcccgtgcaatgcatcatttctcgaaaaattctcgtgtcgctatttgtgacaatactgcctcctcttttttcttctggagctgcaataatattcaagtcccccagaagtaaccaagggatagaaaattgaattattctgctttgtaattcttcccagaacactcttttctcattactatatggcctcccatacaccgccattaacatccacggctgggcctccccaggatcccaaaccatagcttcgaataccccattttccgctcttataacattcatcctaatatcaatactccacatgagcatgtgccctcccgcaaggccttctgcgggtaaagagattgactcttgaaacccgattgctctctccaattgcttcatcccttcctcactagacttggtttccatcaagaacatacaatcaggcttgtacctccttttccaagctttgagagcttggattgccggggttctcatcgcaccccgacaattccaagaaagaaacctcattggggaggggggggcttgataagggccgcctcctcgcccaaatgaaaattttgcacttcctgtatcgtaatttccaccagacttccatccctcgaatcaccttccttcttgtcttcaatcgattcatagtctccaagtagtctgcgtggtaaagcttggcctgaaggggacttcctcttggagcatctaactgcacttccctttcttctcttctcatttctcaacttggacgaagaagcctccccatgaaccagtgccgattgccctggtttgatcacgttaacttccaccgtaggcagtacagtgtcttctctatttcctggggagtgtgcagaagccccagagttctttgccacggggataatacataaactagcttttcttttttttttgaacctgaaatgactggcccaatcctctccaattcaatgttatcacaataaatacttctttgggccgctacatctccttcttgggccggttccactaatccttggaccacttcgggtaggctagtattgctgggccaatttaccacagtgggttcaggaaaataatgtggggttcttgacttacaaatatcaacatgtggaatatccacaatctggtcactagtgggccccatatcgggcatgaggcttataataattcctttgtctttttccttattatttatctgggccattggatgaggaaaagcctttgtactcttttgaatatccacgcgggaaccctcctttgccaaaataggtgattttccagcgcttccaaattttgcacccgactgaactttctgagatttcccaatagatgaatttgcagccatctgcctgcacccttccccaacggttcttttgcctgcagaattgtctgatcctttggaagcgtcgttttcatctattgtaattacctgtttgcccttgtccttttccggcttcccactcggggcactctccttcgccagccggttgatgattagtctcgggatactcggatcaaaacagttacggataggcacccctaccttcagccaggctccatacatgggaaccgctcttccaacaggagggtatgcatattctttgggcctgttgcatttattgtacgaatgcgcaagatagccacagttgaaacacaaagccggaagtttatggtatttgaactgcacccattccttccgatctcttgagatatttagataaaaccctgcaacaaatctctggtctactcttaaatcaaccaaaaactttaggaacccccttctggctatagttagtcgtggtgctctgtcaaagtcgatatactgccccaccttccttgcaatcacatcagtgttttcccacgttaagtaaggagtgggaagaccgtgagcctcaacccagaatctagccacctccatattggtcttcgcccaatctccatcagctggccaatctctaatgttcaggagcacaccacttacgagccacggtcgtcttgtgagaatcatttgtttatcctcttcttcatcaaagaagataccccagactcccgtttgcatagtcttcatcctccatctacccttcaaagtccaaatgcctgccagaatttctttgacccgtcctctggaaagatttcgtcttccaaaaagttttgcaaggactcctttactggtaacctcctcattcaactcaaggtctgcctccagctcaagggtcattgagtcaagaaattgttgtctcatagattccacctcctgccccgtaatccctccttggtcaccctccactgtctgttcttcctggaccccatcgacctctgcaagaggctcgtcagcaacaaaggtttcagcaagtgtttcgttttggggtgggagggactcgttaacggttgctctcctatcttcatttccttccattgttacactctggtctctccctgaatcattcatttccatcagttttaagctatcgacaaagtttcgagcgaaacgatcaaaacgatattcctctaggcaag

SEQ ID NO: 39976 - DNA, 1402 bp, Cannabis sativa
caataggggtaccttgtagaaagtatagtccaccatttttgatgcctttcatgattgctagaactccactgcttagcttcatttgacctgattctactttactcgcaataaccaagtcattaagcaccctaatgaaaattggatttctagatagattaggcacaaaccttactattttaggattctgattatgcgatcatacattttgaattttatagatcaggagcctttaatctctctagtcaaattattccctaggatcactttccctccttttcattccctataatcaaacatgtaactcttgccattattcatatggaaagtatatctagaatctaaaatccagtcatcattaaaagatgatgcatcaatatatactgcaccaatgcctgcactatgaggtttagagtttgaattatctctctgccctttatatttattaagatttcctttatttagaaagtagtaatcccttttaaaatatcctagttttccactgctgtagcagccattaggatttggtggacctttagagttagatcttcctttgatgtagttatttcctttgcggtgatccctgctgtggctttttcctttgaagtgtccatgtttcttgtgattgggtctacccctactgaaattcacttcactattagaaccttctgatttctcacttttgatctctaagtctttagacttcaaggctaaggtcacttcttccagtctaatctttgtcccgccatacttaatgacattcttcacctctctataggattcaggcaatgagtttaagaagatgatatcctgattttcatcactcatcgcctcattttttctagaattggccatctcaatatgtaaccttagaaacacatctaagttttcatcaggagccttgttggagctcatcttgtatccaaagattctttctttatgaaagatcttgataatcaaagatttcctttgaaaccggtcttctagttttttccatatatgtgttagagtatttactttgtcaactatcttgataatagaatcatacaacttaaaaatgattagtccagtaacagtttcaagtaattctttctgctatgtattttttggccttagtagcttgttctaagaaagaagggttcaaatcttcttcctctaaatcgtataatctcctattcaatcaaatttttctacatccactttaatgttacaaatgttacataaatacagcaacacaaaacaagaatgtaacaaattagttttaggttagagtaatcttatttatctgttcccaatagaacaaattgccttcttttttgtttcttgatcttgtttccaaattttgttaaatcttcctagcttgaatcaagccctgataccgctgtaggaaattcaataccgagaa

SEQ ID NO: 39977 - DNA, 1620 bp, Cannabis sativa
gtgattcataatcacctggaaatagttatagcgtctgcaagctagtatgtggatggttggctggttgctttcctcttgatgttgctgaagctttcgctattcgcaaggcgctagtccaatgcatctctcttgggtatggaactatatagttgaatatgattgtttgaatattgtgcttaaactaaaaaataatacttttattatcacctctttgggtcttgttttagatgatattgttgaccttggtaatagacttcatgtggttaattttgtgcactgtaatagatcttgtaatggagttgctcatgctttggccaaacttactctgtctactgttaaaagcacggtttggtggccagggaatcctacttgtattcaaaacttattaatagcggatgttattcttgaataaatctttctccccaccgttgtagagtttctattgctctgggtgtttggttgttgagaactttttcctgaaaaagataaatcatttatagatgtgtttgaaacctttaaattagtgttacaagtgaaatattcttgtgagtttaaattttggattcgattttgaatcgtaaagaaaaatatattagtactttcaaaggtgcttcaatggtagaatggcgagtactatgttaatggtgatgacaatgctcaggttgttgtcgtatagtggtgactagtgatagtagtgttgtctaggttgttaaggggaagtataattaaatttttacaaagaataaatttttggcatgtcattttaatggatctctccttatgctttcgtgaaatgatcaatataatagtatcttgtctttaaagacaactaatggaacttattttatctgtgaaggcatcaatccttacgttatttcttataaattttcaaaaccatagttgacaaatcaacttagcaagaaaattatagtcgtcaaaattaattatgatggttaacactatcataggaggtatgatgaattagatgagtaacgtctaagattgttttgcacaattactaaaggaatataatttcgtcttctaatacaaaatgctaggcaaacctagcgcgaatggtgtttaagagatataatgaacatttagctaaggatatggtaagaagtatgattagtcattcttctctattaaactcatttaaaaaaaaaaaaaaaaaacacgtaagcgtgtaacataatcctggacaagggatcaagtatagttaaaattctttatgaaatatggtatggttagactaataatctaacctaaggatatttttcttttttggatgtccaattaaagtaatgtcctataagaacatgaaagaaatttggactccaatatagtaaggaactatactttattgtatactcttagtaattaaagggctacaaattttgtgatctcacactaaggtttaattttgagacaaaaaaaagtcaataatttaaagggtgttgagtttgagggagaaataaaattattagagatattatttgtttgaaaaagaattgacattatactcaatgtttataatcatttttgacaattgcttaggttttattatgtctttcattgattaagatgtgaatctaaaatcaagatatagtaaatatttca

SEQ ID NO: 39978 - DNA, 2621 bp, Cannabis sativa
  modified_base (877)..(886): a, c, t, g, unknown or other
  modified_base (2461)..(2464): a, c, t, g, unknown or other
  modified_base (2586)..(2589): a, c, t, g, unknown or other
aaattttaatatacgtgcctcgcacgtaaatttttgctagtgtatatatatatatatataaaaagacataacttaaaacctaataatccaacatagatagtagacattagtttagtcaaacttaattctcataatctcataataaaactgccaaaaattaaaacttattcaatacgcatggataatttcattagcgttaagaaaaatgagaattaatattttagatctaatattttttttctttaatctcatatgttaaatgtatcttaaatcaattaatatatattttttaaataaaatatattaaatatataaaattataaatgcattttaaaaatatataaatataattggatgacccttggatgataattggatcagtttggtcggttatccattggatagaatgtcccatccaataaccgattcgatccgattggattttcaaaatttacatctcatccgatccaattatgattggatatccgattctattggatcgattgggattggatcggtcggttgcaattggattggatgactttctgcacacccctagaagaaggaatactcaaataaggtgatgcagcagcttatttgatttaattctttttatttaatttatcttatttgattatttgtgctttattatttttcccatttatttagacaataaaagtgaaactttacggttccaaatagggttgttcatcaaaccgctcaaatctcccgcatcgaaaaaaaaatacggtttgaaattctttacggtgcggtcgcggtttgaatttttcttaaaccgcgcagcgcagtgcgatttgcagttttgaattgttaatatgcggttcaaatcgcactgcatattataaaaatactaatnnnnnnnnnnatttaggtccaatatgtgaatgctcagcccaaagcctattaatttttgtattgttgaaacttgaatttttttcatatttattttcaagccttatgttatttttggcaagtgttgctcaagctttgttatatttgtgatagtttaattatttggtggtagtccaaactgcggaaaccgcaccgcacctcaccattttttacagtgcagtttatgtggttttctaatttcgcgatgtaggtatggtttgcgaaatgagaaaaaccgcatgtgcgggttgatttgaaaaaatggtcaaaaaacactccactcgcaccgcaaacagccttaattccaaatatgatcaaatcatcattaatcattaatgataataaacacatatctttatatataaaatgggatcatctaacagcttttgttaaattaatagaatattttaaaactataagaatattctgttaaatttaacggtattagtacaactagttttataaatattaatattatttattttagattaatttaattgtatatattaatattatctattttaagttaattgaacttatactaattttaaattgatttaaatatatatattaatatattatttgtaatattattatttttaatattaaaaatatttttaattttaatattcttaaattttatatttattttcctcaaattttttacaactttaaatattgtttttacaaaaaaattaaaaaaatttaataagtaatttcttttaatttataaaattttaaaatatacataacaaacataaaaactaaaaatataactaattatatgtacaatgcacataagaataacctaacatatatataaaattatcaaaaggtagaccgtccaacacaggtaaagagaatcaaaggaagcctgattgaatggtgggtccacaaccatctttctagacgggtcacaactcgattttagttacgggacagctccaacaacccacgaaagtaggaattcaaacccaaactatctgcctatcttttaggaatattaattagttattttttgtaacttatatatatatatatgataaaatagtgggttttcttatttttaagggatatttacttacttaaagattgatcttctgacttaaatgtattacatgtgttgtttgacttgttttttaaagctaaccaattggattgacccaaacttacatcttgggaacacaatagtgcaattgagtgagagcgctaatcatagatatgaaatctatagtttctataaacacatagaagtgaaacgataatttccttaaagcttgggtaaacgagtttaaatggtggaatgcttatttcagcaattatattagtttactaaaatatcatttacaagtagctaagtattttaaggatactttgaagggtaaaatggtaaatttctccttacacgatgtaaatcaatcaatagaggatcattgattatttaaattaaaataatagataaattatagcgtatacatacttgatatagataaatcaaaatgacaatcagcaaaaccgtgttgtaaatatatctccagttgtgggttcnnnntatttaatgatagatggagattcatacccaacatatattcccaatctcctttgatccatctttgttcgttgtggtggagcaatcggaacatatactatacaactaaagattcttagatgggnnnnatttggctcctgaccaaaagccaattgtaatg

SEQ ID NO: 39979 - DNA, 1637 bp, Cannabis sativa
aaaaatgtaaatattttataaaaaatggtgtcttatgtaattattcctttattttttctaatacccaaattaagtcagggccaaccttggggtaaacttaaatttagtgtaaaacagtagcttgatgagcctttaaaagctttcttaagctacttcaacacatcaacaactataggttaaaatttgaatgataatattcagtttgtagttctacaaccaagaatcattgcaggagaggagctgtgggaagatttacaaggaatacctataagatcaataaacgtttcaatgaacgagctcaaatttatatttaaaaagaggaatcaagagtggaactaaagttgttaaaacctattccccatactaatgctgcaatactgagtgcgagcaataccacaactaacacaacaacgactgtctgaaatgaactagcagagacaactgaatcaaatagaaaaggaaaagtaactcgtaaaacttgtcaaagggcaagaaaattaatataaaaagcgtgaaaaatatgtgccaatctattcagtttacactgaattaaataaaactcataaaaatattttttggccaacaaaatgttagtccaaaataggtttccaagagaggggaattaggactaaacatcgacaggtttactgggtttcaagtttcaaaagtagtacttgtacctgcccgtgaaatgggcgggttggctgggttcgcgggtcataggttgaacagtcaactctttttttctttctttttttttttttttaaaaaaaatctaaattctatatgattatttctttatattaaattaaacatataacaccataatctatattctttatattaaaataattaaaaaacattagtttcagatctaaaatataaaagtcaatctaaaatctaacaagtcattcatcaaatttcatgtccataaccataatgtctaaagtaataactaaagtctagtcgataatattactatatatccataactataatctccaaacaaaaaagtatttatttatttatttttttgacaaaatgagaaaatttcattaattcaaatcgttcatcaatacagaaatgaactccgcgggagcattactctcgcgtaaaatacgatcagctataaaacaagtagatctcgctagaaagtgagctccattgtttgcagaccgtttaacaaacttttttagaaataaacttatgcttcaactcaattaacaaatccttgcacttagaaacaactctaccaaagtaagaattcatggtggaagagctacgaatggactgtatagcaactaggcaatcggattcgacttcaacatccctccagccctgctgctttatccaactcagggcttcaagaatacccactgcttctgcaatttcaggcttgacagcaccctggcgacaagatgcccgagcctccaccattcgaccagcatgatttcgagctacacatgagtagctgtagcgagtagttgattcaaagatcgcagcgtctgtgttaatcttaatcatgttttccttaggtacttgccaatgctcattgccatcttcagagttcatcaacccaaaagaaggatcaaattgtctatcttgagcatagttccattgattaagagtagtcctag

SEQ ID NO: 39980 - DNA, 2460 bp, Cannabis sativa
gtagttatagatatttaagttggtcgagagattccttcaattggttattagatatttaatttaaacctaaaaatctataacagattcggttataaatatttattcaaataattaaatataatttaatttattgtttgaattcaaatattgatttaaataaaatctttattggttttattttatacataccaaataaaccttaaaatatataaagtctaagggattaatctgattaaatcttttttcattatcaactcttagagttcttgcttgtgtattgagaataactaagaacattacatacaaactatatcctaatagcctacactattccttgtgtgtggtgaaagattcagaaaattacagtgtgagttcttcgtcatccaaggatacaacatacgaaaagattcaaggatatcctaataagcttcaagaggtaaattttatttttgactatttatttaagatttaatatatatacatatgctgatcataaggatgtggtacaatgataatcagaaattattattctgctgcatatctgatttagtaccacaaaaccatacacgaaaagaaagtgtactaaatttacaacatgataagagttgtgctaaatttggcacaaatataacattgtgtcaaatttaccctacaataaatatcacttttttatttactattatgtcactaattattatgattctttgacttttacaaaattttacatactttattcaccatattaccattatttaaacaataataaaaaaattgtatattttcaataaaatattaaataactattttacttatttacatcttgtgcattgaagtacaattgtaaatagtgagtcaaatttagtataaattttagatcttgtattgaaaatgatctaaaagtaataattttgttagagcttggtgtggaataacaatctattataataattattaaattaaaatatgttagatccgttattaaattacacaaataacactagttgtgatacctcatttaagatttgtgttagctctttgaatttttgtgatttgtaaagccaacctagcaaattaagaggggcaaaattcgagcagaaaaatataattgggccaaaataaaaatttcaacaaaaatacattttttttctaacttcttatccatggagatggggagatggttgcctacttggtttgtgttaacattaaattattgtatttaaaaagtgattagtgctaattccaatttgtccaatatataataaggctttataaattttatgtgtggatttttatttgtgtattatttatcatttactataatagttctccaatataagttgtggtgtttgttatcatatttgtattgattggttcacttcttactagcaaactaaattctcttcatacaaaaaaatgaatagccattagtgaatgggatgatgagagaggttgagtttgttttaaccttttctacttttaatcttcaagtaattaagttagtattaaattaagattgtgcatagtacttcaattctaaattatataccttttttaaaagagaaatgctaaagggcaccagtagtgcctagcactctcctacgtgttaatatcgttattggtccaactaagtatcggatcccatataatttaatataataatttttagagagtattgatagccaatcacaatacgatatatcgagaaggtattaggcaccactagtgtctaatagtaatgttctttttaaaatgttacttagaaataaatattagaaccaagtttttaataaagtgaaagtgtgatttcttgtatccaaaatatatagtaaaaagcaaagtcataaaagaaaataacccattagcaaacttaatcaaagtccaatttattagtatatgtttaataaaaaaaaaattattaaaggatttttctttctcaaataaaattttcaaactcaaaagggtgtgtaaaatgaataacaaagataaatttcctgataaaatttgatcaaaatggatatcctatttatctaaagatatagagaaaggcttcattatgacccaccatgatatgaaacatcattttccatagaatgaaacatcaaataagtgatgtagctttcaactttttgggtttttttatcactttatttattttcttatttctcttatcctcttcacaatcttttccattgtggcataggaaaccaaggcttaaataaattaaccttattcaaagagtattacttcctgaatgtaatgttttacaaataattagtaatttcttttttggtaataattcttaaattaaaatgtaggtgtactttagcaattcttttattaaaaagaaaaataataaaagacagttcagtattattataagatatcatactattattaatactgttattaatgtacttaaatatcagattttacaaatttaatttaattataaaaagatta

SEQ ID NO: 39981 - DNA, 2491 bp, Cannabis sativa
  modified_base (2444)..(2462): a, c, t, g, unknown or other
agaaaatgagatgggaaaatgacaaaatgtcaaaattgtaaagtggggtatgaataagagagaaaagcaaaaagcgattctcgatgtttgtagggtgaataaagtgggatttggagattttatttgaaacaaaggtgaaacatgacaaagttaagaagatggtggaaaataactttcctaattgggagttttattctagtcatcccatctcgggaagaattttaattctttggcaatcaaaatttgttcaagtggaaattattcatgaagatactcaacttgtccattgtaaaatcaaagtttgtgggcacaaggaaacttttcttgtcacggctgtgtatggaagtaattctaaagaggataggaagagtttgtgggcgaagctatgtagtattggtcacccgaacttacctttggttatattgggtgactttaatgctatgttcacttacgaagacagaaatgggggtagaaaaatccaagcaaaggacattgaagatgctcaaaattggctcaccatggttcaagttgaggaattcaggtgtactggatccttttacacttggactaataagcatgaggttggggaccttattttctctaagcttgatcgggtgtttgttaacaaattgtggcttgatattttcaccaaagcagatgctttttcaaatgggacaatgtttcggatcatactttttgcataatctgaaaccaggatcagagtaatatgggtttcaaacccttctgattttgcaactactgggttgattatcttaactacaagcaaagggtgttaaatgcttgggaaagtcctattgctaggagtggtttggatggtatcatgtagaggctaactcgggttagacaaaccctaattcagttcagtaagattgaagtgggtgatatcacaatgaaatatagggaacccaaggaagtttatagcagaattcaagaggatgcggccaaacatcccactgatatcagcctccaacatgcagcttcccaacaattgcagcatcttcgacatatgcagaaaaataattctagctttgtcacacagcagagtaagattacttgggtcaagtattgtgatgaaaactctagttacttccatgcggctatgaggaaaagaaagctcgagaacagaataacaaccgtttctcaaggcaactttattgaagatgattttgacaaggtgagacatcacttcctagctcatttcgaacactttatgggtagtaaaagttgagctacttgccgaatcaatacagattgtctccaccatggagctagcctcagtttgatccaacaagtgaatctcatcagaccttttagtaagagtgatgtaaagaatgctttctttagcgttcactcctttaaaagtcctggattggatggatttggctcgagttttttcaaaaatctgtggaaggaaattggtgaagatacatcgacaactgttctgggtttcttcaatgatggaagactgccgaaaagtataaatgaaacggtgatctctctaatccccaaggtagtgaatcccttatctgcaagtgattatagacccattgcatgctgcaatacgatatataaatgcatctcgaagatgatttgctctagactctcggaggtgcttccttcttgtgtccaaagtaaccaaggagcctctgtgaagaataggcttcttgctcacaacatcatgattttccaagatctccttaagggttactcgaggaaaaacatttcagcaagatgcattacgaagattgacttgagcaaggcctatgacacaattgactggcagtttatagaagatcttctgcgtcacctttgtttcccttctagattcatcagttggattatgacttgtttaaagggaactagctataatcttcttatgaatggaaggatccagggtaaattcaaaggtgaaaaggggctgcggcaaggagatcctatgtcccctctcatctttatgcttatcatggagtaccttacaagattgctagcccattactctgggagaaaaggatttgggttccaccccttatgcaaacatctaaagctaactaacctgtgttttgcagatgatcttataatattttgcaaggggaatctcaactcggtcagctacttaaatgaggcttttctgagattctgccaagctacgggtctctcagctaataaggccaaatcccacatttattttggtggggttaaggcaggtatcaaaactcagatcttggatctcgttaaaatagaggaaggttccttccctctcaaataccttggggtcaagcttcgtgcaactaaatggaagtctgaagactatggagtgattctagaaaagataaacaagaacttaaactgctgggctagaagaaatctctcgtttgcgggtcgagctcaattgatccactcggtactgttgggttttatgcccnnnnnnnnnnnnnnnnnnntataatcaaatttacttattaatatagat

SEQ ID NO: 39982 - DNA, 1741 bp, Cannabis sativa
ggatttagggatcttaggttgtttaatcaaactcttttagctaaacagatttggagatgtgttcgacatccgacaatgctttgtgctaaggtattaaaggctagttacttccctaataatgatattttaaggctaaatgtgattctcatacttcttttgtttggaggagtttgcattggggtaaagaaattattgttaatggctttcattggtagattgagaatggagagaaaatctgattattagaggacccttgggtgcctcacccacaaacttttaatatttatgacaaacctcctttgtcgaatcaactttatgtgagtgacttgaagctacatgatgggagatgagatgagcttttttattcatggtaatttcaaccaagtagatgctgaacttattttgaacgtacccaccacaaggtgggaaatagaggacaaggtatgttggcactttagtaagaatatgaatacactgttaaaagtagctatcccatgaatttggaattaagaagagggataaatcaatctaatgatagtaatttgttaatttggtaacttggttgaagaagatgtgaaagatgaaaatcccacctaaagtcaaacattttgtgtggaagttagcaaactcctggctgccttctcaataaaatttggttcataggaaggttacaacaaatccaagctattttagatgctcaaaagaaatatgtgagcatgtctttcatgcgctgtggcactgcaatacaattaaggatgtttggagaagatgtagctttaaatagattttacaaagagaagggaatgaggatgtgctagcctttttaatgtggttgtccaaagtgtgtacctcagaagactatgtatttttttagcagtgacttggaatctctggttcatatgatacaacactaaacatggaggtaaaaccccttctgaagtgaggtgctcgaatggtgtgctcactaccttgaagattataaagcagctggtgtgaaaaaaggcaaggcacgaccaaaaaaaaataaagtaacaacctcttactgtcgaggtttctacattaaacgttgatgcagggattaagcaagataaagggcatacgagattgggaagtgtgattcgagatagtaaaggacatgtctcctttgcctctgctacggttctgccattttaatgtcaaccacttcatgctgaattgctcgccattcaagaagggtggtagctagcaatatagaggaaattaccaatatttaagattgagtcatattgtcttgaagttgtccaattaatccataagaaggaggatgtgtgtcgagacattgatggtatatttgatcatatatggaatatgttaatatatgacaatgtaaatgggatttctttagtatattggaaaattaatggggtagcacatactctagccaattatactttgactaacaaagctagtgccatgtggattgaggttaatcccccttgtgcaaatcttgctattaaacaagaattgcctaatcctttgtaacttttctttgaatgaatgaatttatttttttaaaaaaaagaaccaatcatcatgttgacctcagatttggtcaaccaatagtagagtcgtatttattactgatgcttaccacgtattatacaataagaatagaaaagtaaataaggcagaagattttatagaggttcaactccttagttagcgggtaatgacctactccccttttagttatattgatacc

SEQ ID NO: 39983 - DNA, 2090 bp, Cannabis sativa
gcttagattctctctgttagccactgttgattattcatggccatctcatctagtagatcataagcctaattattacttttcttcattaaggctccactagaagcagcatcaatgagtgtacggttggtactgtcaacccattatagaagttgtgcacatgcattcagttctctatcctgttatgagggcactttctgattaggtccctgaatctctcccaggcttcatcaaaagattcattgtcttgctagataaagttattaattttagatttcagtttgacagccttagcaggaggaaagaacttggaagaaattttaaggccaattcctcccaaatgctgatagagttaggtggcaaagaaaccaacttactctttgctcgatccctcaaggagaataggaacagtcttaaccggattgcatcatcgctaaccccattcatcttaaatgtttggcacaactctttgaggttagcaacttgcatgttgggatcttttgatgatagtcccccaaattggactatggattaaaccatctgtagtatggctagcttgaattcaaagttattagcttcaatggcaggttgccctatacaagaacgagccccaatcaagttaggtagcgcatagtcccttaggttacggtcaggtggattgagaccattagcctggtcgtctacgacacctccattatttacatcattagccatctctacttcttgctcacaccacagctctatccaatctcttccttcttcttttctgtctacaagtcttctctatttcaggatcaccaagaatctggcagttggtccttgatgtcgcataaacaagttgttcttgagaaaagagaaaaaattgacacaaatagaattagtgaacattaaaaagaaaaaccaaattagaacaaaatttaatttttattaatatttactaaacaattccccacgacggcaataaaaacatgttggtgatttttaacatgcaagtgaacctatcgattgcaagtaattactcacaagtgaggtcgaacccatagggattgtagttagatactaaaaaattaaactttcacttctatttggcaataataaatttttaaagagcaattaaaactaaaagtaataaaagcataaaatgagtaaattagaatgaaaattgacaatagttagaattaacattattgattttaattgtatctatcttttatggcataatataatttaattcctattgaccaattctacgcaatagcaggtttactgaagtaatttatagtcggttaagatatataaatctcaattacatgccaattttctactctcgtgataaatttaaacatgtaaaaggcattaaacacagaatccctatttgttatccaagccccagaggtactgtcgtcctatattgaaacatgttcctatttcactatagaataatcgacactcacttcttagatttcatatcaaaattataaacattaaagtgatggccaagaaataaaaagaattaagaatgaatgaaatagaatacatagaaaattgaggaagaatcaaatcatattaaaaccctaaataaatgtcaaacaatctccatcaataccctaataaatgtttagctactcttgttcattataacaatttgacacaaatcaattaagaacataagaagaaaatagggaagaacaaattgttaaaaaaatctattgaaaagccttattggtcactttgtttctctgattttgtactctttaattgcctaacaaaaagtgtgaaaattcccattttttaaattgttgaaaacgataaaagaatgaaaaatatttaatttttggaattctgggtgggtgggccatgacactgggcttgtagtgtcgcatgccgtgacattgggcctgtagtgtcgcagcccgtgtattggtcacgatatttcccaaaatttctagcacattggcctcgacactcaaagggagtgtcacggcactcaacggtggatttcaggcagtgagctccctacacattcactacctcaacaataagtcccagtgttgaggtgcgcccatttcttggtaaaaaactatcttctctac

SEQ ID NO: 39984 - DNA, 1878 bp, Cannabis sativa
ttttgataaatcaatgagttgtattgcacaaacaaaatttttacatcctatccgcaccccaaaagggacgagttctatatacatcatgatcaatctatacaaacaattacatgttatttgaattataaagcaagaaaccattctcgatcattgcttttgatcttccggggcattaagttctcaattccaaccttaatagcccattttgtctttttaacaattgtaacagggttgaccataacctcttgccaaatagcagtgttcctagctttccaaaggttgtacaccagaccagttagagcagcagctaggacggctttcctgaattttgaggctttagctctcccaatccaacggatcaattgagggagcctactggtttgagcatgccagttcaaccagttctcacttcaagtaaacaaatatctgcaattgaacattcaaaaaacagatgttgactactttcaggttgtgcattgcagagatagcagcagccaggaacctgtacaccaaatcggatgagtctatcctgggttttcaacctgttaagcatggccaactaagtgatgacactatgcttcggagtgttaagtctagaccaaacttctctgctccaatttagtcgatccagtgcaggtaaaaacaacttgtagcttgcagctatagtatattgttgtccctgaaacacagcaggaaaaattagtattttgagtcgatctttgagggctaccatcttcttccaataccaactcgaatgtattgaaggagagtagtcccaccactcttgattcttgatatacacactatgaacccaccgaagccataaactttcttgtttgtttgaacttgcccgtatgtacttacaaatggcagcttgattccaatgttcaatgttcttaattcccaaaccacccgaagcttttgattgacacacattgttccaagctacagaacctcctccttgaaaaagagcttgtcctttctagaggaaagccctacaaatggcttaaattgacctcagtactttcttaggcaatatcatcatttgactccaataagcctgtatagcagttaaaacagagttatcaaggtgattcttgcagaaaaagagagattcctagagctccaacttttaattctagcagtcatttgctcagctaacagatcacactctttctgagatatctttttcccacaaattggaattcccaagtaggtaaaaggcatgtcatgctttatgaaacctgaaagctgaataatatgattcacagtcccagtctgcatgttactacaataaatggcagttttgcttgcattaggatgcaagccagatgtaagtgaaaaagtttttagtgcctgtaacatgtagaggatgctcctaagatcaccatgacaaaataatagaacatcatcagcaaaagctagatgattaagtttcaatacagagcatctatcatggaacttgaagtcccccttttccccaattttcaacattagtctagacaaatactccatgcccaatacaaataacaagggagacatagggcccccttgtcttatccccctcttagcttcaaaaaagccatgaagagtggcattaaacatcaaggaaaatctaggagtagtaatacagttcattacaaactgtatgaactttttggggaaatttagacctgttaacatctctggaagaaacccccactcaactgtatcataagctttttgaagatccaattttatcatgcaacaaggcttatttgccttcctaccataatgcctcaccaaatcttgacatattaagatattatgtcctataaaccttcctttaacaaaaccaccttgagaatgtgaaattatttcaggaaggatgttattgat

SEQ ID NO: 39985 - DNA, 1835 bp, Cannabis sativa
aaatagagcagtataataatatttgaaaaaatataataaagaaatgaaagaaaacaacagtaaaacaaccttaaaacaataataaaataaactagtaacataaaaatgtaagttggagagtgagggtggacttgaaagtacggtagagatgaagccaacactttgagactaaagagactgaagaacatgaacttagtgggagtttctaaaagatctttacaagaagctcatcacagagcaaactcttcatctctcttattgaataggttgttaaatacgtgtaccacattgacttcctctgaaaaatgtaatgcccaactaaacatataaatattactgaataggtttattttacaaccattcatagtgatcagaatataaaaagatgatcaaaatacaacaatattatttttaaatatcattttgtgacatgactagttagtatttgtaacaggttaaaaccgaaaataaacttctcaaggccgaatcttatgatacatataaggttgtgaccaaaaaattcaatatcgtgaattggaataatgactgtgtacatgatttggaaaactcggaacaaagctttttgaaatcacgagattctaactgtaaagagtcttgttatcattttgagtttgttgtaaagttggtaatctgaagctatttgaaataataactttttatatacaaatgctgaagttgataatgaaatgcacttatttatttacaaaaaagaaaaaaaatactaatgaagaagaataataccattatcaacaacaaccattcatacaaactgatgagagagaaataataaaataacatcactgtcaacctttccaacttaattagttattttgtatggaatctaatacattattttattttaattatttggaatatttcagccgttatttttgtttttttaataaactcatgtattctcaaaaaaaaaaaaataataaactcattattatttttgtttcaactatcctttgttccataaatttatgtatttcaatttatgcaaataagcattcattttcctaatatatttgaatttgtctttaatattttgctcgtagtaatgctcaagttcaaaatcaaaagtttacaagtattatttcttttttccctctctgaatgagttatgagttctaaatttataaatgagatgaaaactaacttcgtgaatgaatattcagcttcccctatatcaaaataatgttatgtattacaactacaactaaactgtattgtatgaaactgaaaatgtctatatcttactctagctctctccattttcttgaatctgtaagactgcgtcgaagttgaattgttcaccttccttaaacatggattcgagatactcaaagctttgctcaactctcaaatccttgctaacatttaaaccttcctgttgtaatttataaataaataaacagataattaaaaattgacccttctcttatttcgccatgtctaatggtaacatgtaataatattcaatatttagtactaaaaaaccaggttcaaactttaaactcaaagtaccttttctacatattcattaacactaatgttgatcactttcttgattacttgcttgaaaactttagaaggtccaatgacttccaatagtacatctttcggtatctgatgtatgagatcattcagtaacaaagatgttattttacccgaaaaagcttattgtctagtcaaaagacgtgtaaatttacagtttccttaaggacttgtgactacgatgagaaatcgatgtttaagaaaaattagaccataaagcctttaaatcgatgtttaaggagctgatattattggta

SEQ ID NO: 39986 - DNA, 2170 bp, Cannabis sativa
cagagcctttctttggaaagctgcgagcttgttcagtcgaaaatcgtcgacatcattgctcgattgacctgtaatggattgaatgaaagaaatttaagaaatatgacaaagtagtaatggggaagtgagttagagactacaagttacctgtggcataagaaggaagaagatgatctaatctcacagaagcagtcccagatccagagcaggaaggatccaaaagaatggctctgacctaaaattgtagaatatgttgtcaaactcacaagggattttcttgaaagagagccatatggaaattgaagctaaggtagctcgtttggttggtgaatgtgtaaagtcgttcgtatattcaagtttgaaactagacatcgtgacattttagtagttaatatagtacagacactaatgaagaaaggaatgatatttttttacgaaaaaataagtaggatcctcgcttgcttaacccttcagatatggcaattgctatgtaggtaccagaaggaactcccactgtcccacatactgactatttgagtgacctctcttgaaaggaatgatattaaaaaatgtttcttttcagtagttttgttatattgagaatttaatgtagacaccctaataaactgacctataaactaagtaaattttcttagcaaaaaaagaactgcagtcgtcttaccttggaataggtcggatcctccgaacttaagcttaagaagtccccatgcaaaacctttatatctacaaactgggttaaggatttaaacaagaaaaaaaagggtggatagacgaggaaaatacaccaaaaaacataaatgatgccaagcttgaaaatagataaaaaaccaaaggtactaaaaaatcttaaatatgaacgttgttataaggatactagaagcaccagagagttcaatggtgtcgttcaaacgtttaacccgttctttgtttagctcgcaagcaatgatcttcccctttcctctcatcagagcagcaagttgcacagttttgttcccaggggctgaacatgcatcaagaaccttcataaaaaccagaaaatatcatttatggaatcagaaaattatagcaatagctatattcgatcatttgagctactgttcttaagtaacatctagtatatttatcgttgatgtatcatatctattgcatttttccagtattatatttcccagccatcagtatataaaaagaagaggataagaaactacctcccatcctggtttaggagcaagagccgctgccaccattgaacttgcctttccctgctcatacaaataatcaccatggcagttattaggtcaaaaagataaaaataacaaacagagagaatcccaacaaccattgtgaagtaatacatatttcatttcagcatgaagggaatactgttcatacttaatttcattaacaactagttaaaaccttacttgcaagaagatacttccattcatgacaagaggatgattatgcaaatcagttcccggtggaagtatcaacaagtccggaaccacgtcatccttttgaacctaatacaaaaaaaccgacatagcaaaagattgttcaagtacaaggggaagaatgctcaataatttagtcgggtacatgatagaaaataatcagcacaagaaaatgcaccatagtttttctcttaacaggttcaatcaaatttaacatagtgaaatgatcttactctgtattctgtacttattctaaaaccccattagtagaacataccgagaattttttctccagttcttgttgtgcagattctacatccagtttcagagtatttactcgaacataacgaggtttcaaaacatcagcatctgcaatcagaacatgggactttgattacagttccatctcagtagccaaaatcaacttaataatatcattgatgttttgaagaatttgtgttgataactgcaaatttgtttacaatataaaccaagaaactataacaattactacaagagatgattcaaacatcgccaattgaggtaacccttttgggtcacaagtcacacaaattcaataataaataaataaaagaaaaaataacagaagaaaaccacatcaaaagcaatatagtgcctagtcattatatacagtgtctgttcgtatacctggagtttgataaagagccaataac

SEQ ID NO: 39987 - DNA, 2367 bp, Cannabis sativa
  modified_base (29)..(33): a, c, t, g, unknown or other
  modified_base (1717)..(1730): a, c, t, g, unknown or other
ttttagttcccatcaatgggtattacccnnnnngaagtgttccatatatgtatatacgtatattttcttttaacgcctgcaataaattattttgatctttatttcaaacatcgtatgtaaattattttcaaatttttgtataaaaaacatttgagatgaattatgtttcataattctttaggcgccagaaaatgtccatgtgctagaagtaaaaataatattaaattctgagtgtttttacggttaaaccctctcaagtatcactctacttgaacttaactctctaagctcaaattttgacggtaaaactctccaaacttttgaattgttagtaaatttaaggtgtcatctattttccacagctacctaccaacatagactgcttatacgtacacccttgtacacgtgacacatttatattggcacaactaatactattatttaaaaaaatataaaattatttcaaattttataatatttttatttgtcatttttataattttatttaattttaaaataatttataaataataatattaggtgtaccaatataaacacgtgtcacgtgtacaagagtatacacataaacaattcatggtagcaatcaactggataataccttatatttactacttgtttagtagtttgaagggtgttactgtcaaaatttgaggttagaaggttaaatgcaggtaatacaacaactacaagattttagctgccaaaaattctttaatttgtacctaaattctacctatacattactatttgtcaaactacattttttaaccctaccgcttcttttccatagtaaactctgtaagtttcctccttttcaaacccttgttcaaattcctcaaaagattgcaaaagtatcttataatatttctgcaagtattctggatggagtttatccatacaatttttatctcacctgaaaacaaaaaattattaattttataatatgggtaattagtgagtttcaacttttagttttaaaaagctttttatcaaaagccaattttaatagctatttcagaaagagcttcttaattaagaagctaaaaggaaaacagcagaagattagtcaaacataactatataaatatataaatatatatatatatatattaaaatcaaacctgtcaattgcatcattaaggagcttaagttcttcaaatataccatatgaatcataaatatcatcagcaattgaggcaagggctatgatcttcactaaaatatttcttgcaaaagagtattggggttcataatagactcctaatatccaaatgtacagttccacaatcctatttcttgcaaatggaaagttgtgtgcactgtctaattccttccaccacctaataattataatatattaattacatatgcaaagagagattagagatgatataaatatcaaaagagtattggggttcacataaacaccaacattatttatttataccttgagatttcactaagctcctttttgtgcaaggattgtaatagattgaaatctaactttgcaagttgtagcaatactttaatttgttatgtgaggcatctttttcatatattgaaatgaaatatttcttttgataatggatcatatatgtttggccccttctaccacaactactactactaataaaccattgtgtaggtgttggtgatgaataattgaataattatatgtatgtatgtatgtatgtannnnnnnnnnnnnntatgtatgtatgtatgtatgttgtgtgtgtggtttttgaattgtaataagaaagcatcactacttatgtattagggtatatgtcaaaccatatgttattataatgtggaaatataagatgtatgtccaaattggtactttcacatcaataaatgcatatgcttgttctattggttgacatatttttcgtttttgatatatatatatatatatatacatatatatatatttatggagaaattatatgatatttaaatgatgatgtatatattataattatagcatgaaagattttgaataatttatggttgtgaaaacaaagttcaaaataatcaactggtgtgtcagtttcgtaatttgttattattgttgacataatttttcgtaagctaatagaagaagatggtaaaaaatatattcaacaatgatttatattattaaccaaaagcgaaaaaaaattaaatagaataataataagtacaagttgatcaaggttgtccccagttgccctacacttattcataccataattaggtaaagatcccattccttgtggttaaatttattaacttgtgaattttaacaagcttaacattaaacatatgatatatgcatgaaagaggtttaattatcataga

SEQ ID NO: 39988 - DNA, 2197 bp, Cannabis sativa
  modified_base (1303)..(1327): a, c, t, g, unknown or other
cttttgtccataatcacctccttgtggaatcgaccgcccgatctatactacaaccaccgctagtggaagtcacattttgggcgttaaacactagtaccacaaaatcagttgaaaatactgacttccacactctaattagcacatcttctattattccccttgaataaaagaatgatcgatccgccaattgtaacaaaattgtaggaggctttacttcatcgatacccaattttttgaatagcaaaaatgacattaaatttatactagacccaagatcacataaagacttctcaaatttcaaaccaccaaagtcacaaggaattgaaaagttacctggatctttaagcttttgaggcagctttttctgaattatggcacaacattccttagttaagctcacagtttcatattccccatacttgtttttcttggtcaacatcaacttcataaacttaacataattgggcatctgctctaatgcatcaataaaaggaatgttgatgttgatttttttttaaatttccaagaacttagcaaagtcctcatcaagtttattcttcataaatatttgaggataaggaattggcagtttatacattggaagatcctctttcttcatagactttacagtaggcttctcttcaggaatctctattttgacttctactgtgtcttcaacctcaggaccagttgacttatcttctacacccccattaagtactttaccactcctcaatgagatggcattgcattgttcttttcgattgacaaatatatcactagggaaattactctttctctatacaacactcacattattggccaattgtcccacttgcacctctatgttcttcatagaagcagtaatattagactaatgagtctccatgttatccaaccttgctttattcttgttaaatctcttgtttgtctctatcatgaaagtacccaaaatgtctattagtgagttcttatcttcttgttgttgtgcattaaacccaggaaggtattgcaagacatttttagtgttaccataagaaggattttcatgctttctcaacctcaaatagtagtaggtaggcattggagcacccccaataattattattataaggtttagtggtcatatattgtgcttattcaatactcacctcaagccattttgatgtagatgcaacagcaacattctctatagctgatgtattcttctaagcagctaagacaaccacttgattagataaagtagaaatttgagctgatatatttgtcataggatccacttcatgtaacccagccacctttnnnnnnnnnnnnnnnnnnnnnnnnnaattatagctattagtggtcatctcatctagtaaattaatggcttcagttgtaggctaagataataacgctcctccggcagcagcatcaataatactcctagttggactattcaacccatagtagaaaattgaaacttgcatccagttctcatagccatgttatgggaagcggcgtaataagtctttgaatcgctcctatgcttcataaagttgttcagaatcaaactgtctaaactgcccaatctcactcctccaccgtgcagactttgatggaggaagaatttcagcatgaacattctagccatttcatcccatgtaattatagaacctcgctacaaagattgcaaccaacttcttgctctatctcttaaagatcgacaaaggaaagaggcatagtcttatggcgtcatcagtaacactattcatcttcagagttgcacatacctccagaaatatggctagatgaatattgggatcttcagtagctaacccaccaaactgattttgttgcaccatatttattaaagcaggctttagttcaaagttattagcagcgatgattagataagcaataccagtcaaattttcattcaccacgggtaagcaatagtcacgaatagcccgttgttgtgcatcagctgcagcaggtgctagttggttattattaaggtcattgtgtattattgttaatggctgcgatggtgaaatttagctttttcttcgctttcaactgctttgaagtcctttcaatctcaggattcagaggtgtggtacttcgatttctttgcataaagtgaatcacaaagcaacaaacaaaataagaaacaaaataaaatctaatttaaagtaaaaacttttagtaataatat

SEQ ID NO: 39989 - DNA, 1427 bp, Cannabis sativa
ttattctgattattttgcagaagggaagcatacacatgctggtctcagagtacaggtgcagaagaattcaattatggatcaagaattgaccatattctatgtgctggaccatgcttgcaccaagagcaggaccagaaaggccacaactttgtaacttgccactttgaggagtgtgacatattgacacagtataaacgatggaaaccgggaaatacactcaggtaaagtagcgcagcacttttattgtcttgaatttgcattatctctgtagtctgtagattctccttgtaagtaatgcatattatacctaaccgctaggatgtgatgtttatatttcttcccaatgacagatggaaagcaggacagcgcatcaagctagaaggctcggatcatgctcctgtttatacaagtttactgcaactacctgacatccctaaacacagcaccccatctttatctgcccgatacatgcctatggtttatggtatccagcaaactcttggtatgaggaattaaatttttctacacaatattctttgctcttatatatgcaattttcacggttttgaagtcttggcctatgattcctgcatcttgtttcttttaccatattccaaattgactgagcccctcagccttgtgcagtgtccaccttaatgaaaagacaagttgcaaaagaaattaagctttccgaagtatcaagttcaattccagatggagacattattcttggaagctgtgctgatagagataaaagaacttttggtctatgtgatgtagctgatgtaccctccggaaacctttgttcttcttcaagccaaggatctgaagttctcatttcgacaggagataagatcccaagagttgctgatgacaaagttgcttctattacctcaattacaccagggagtaaatacatcagatcaatgtctaataacgagcttaagaaaaaagcgaagaaaaatcagcagtcccaactctcaattatgtcattttttcgtaaaacttcagtcgttagcaatggtgctggtgtagatagttcaactaatcaggaagatagttttgagcctagtgatctgtcaaatgagcctctgttgggggatagtcagacaaagaacctcagtcagagtgatagtcctcagcagattgagttggagtcaagtgaaccaactttggatcagattgaagtgattacttgctcttcagagaagaatagtgctgccctacttgagtggcaaaggatacagcagaggatgcagaatagcatccctctttgcaagggtcataaagaaccttgtgttgctagaattgtgaagaaacaaggaccaaattttggtcgccgattttattgttgcgtacgagctgaggtattgtattcctcttactgattacactcacaaaattgaatttgtctccattatataact

SEQ ID NO: 39990 - DNA, 2071 bp, Cannabis sativa
tctctcctaaagttaaggttttattggattggttccctaccaatcataatttttcttcttcataaaagtgcctacaagttctttatgtcctttgtgtggtgagaatgaaacatcttttcatgctttttatgggagttctagctagcttgaactcaatcacgaagtttgtggattttgtgatcccttcttcatctttgcccatgaatatctttatttttttcttagagaacatgaggtggtcttggcaaaagacaaaatgagaaaactccttgttttttctgtggggcatttggtttcgacagaaccattaacttcttgatcttggtaaagttcatagcaagaataaactttggctttactttgaaagacaaaacaataaatacaataatgaatgatgtgtaaattagtaaaagttttgggtaaattcctaccaactcatgccaggactggagtttagatacattacaccaaaaaaaaaaaaaacatctaaagtgcataagcattattacaactcctttaattttttttgaacattgattataaaaacacgtgggcggctgctatagagtatatataaatataaagagtattgctgttgaatattggtggtgccgaatattagtggtgcctagtacttattataggtgatgtcttatgattggtaagtaattttacttaaaatttattttcttaagttataagactcgatatttaattacaccaataacaatataacaccgaaaaaaagtactaaattcgtttgtggtatcaaacttattttatagtcatagtcgggcccaatctagaaatatcatccatcaataaaaagtgtattttatggatccccatgccaaaagtgaccactagtagagccgtatatcaccatgcatgggacacttttagaaaattaaaaacaaaacttgttataacctctaacaataaaataaagtcattaaaataagtacaatcacagttgctaaacaaaataatttaacctaagtagtgttaggtttaaatctaatgacatcattaaggtgacatgttctacttgaaaaacttaaatcttaagcatagtaaaataagagttctatatatctctctttaaatttaaagtctaaagtttgaattttgttatctcaatttgaaaataaataaataaatatatgtgaaaaaagttattataaccctcctttttaagaaaaaacaaagttgtactaaatttgttgatacaccaaacttatatatactaggaaacaactcgcgtttcgtgtacagttatattttctttaatgatatatattaaaaaaattatattttttattaattaataaatctacagaaaaataatctcaaaattattgtattattatattgtagtcaggactacgttaattcaaaactgttgttattgctgtatcttgtcattatattcaaagtcattattagcatcatcgtatctcagtccatagattttttaaacgggttacatgggtcgtatttggattttactttttgacaaaatatctttaatacttctaaatacgatttttttttactatacacgtatatattatttttaataataataataaaaatatttttttgattactacccatctttttttctttattagtttagttagttagaaatttttttgaatggtatataaaaaaaatagttaattaaattaatatatatataaaaagaattaaaaataaaaaataagataaaattattttaagtaattttacagtgttattttattaatttaaatgagatatttaaggagaaaatagatagagttattttgagtgattttaacatttcaccatctcatactcaggcccagccctgagttgaaatggaccataggcgaaaaaaaaaaattggcccttattataaagattaaaaaagttttaaaaattattaaaaaaaaatatgtatattttttaaaaggtgttttttttatttgggctcttaaaataagtgagccctaggcgcggccctaggcgcggacctagcccgtctatgccttgggccggccctgctcatacttctcctttatatata

SEQ ID NO: 39991 - DNA, 2702 bp, Cannabis sativa
  modified_base (1247)..(1251): a, c, t, g, unknown or other
tttggttgaaaaatccaaaatccgtactagtgcagattaaatattgattgacatgtaaaagtaattgatttaatccaatttatatatatattttaaaaaataatatatacaattaatattttaatgtaaaaatagtaatttaaaaatataatacatacgatacaaatatattttaaaacttaataaatcaaatgtatgttacattcttatacatacgaaaaatataatttaaaacaaaattaaacatttctttccacatacaactttttattctaattttgaatttattatttgctatttatttattttaatatgttgttggagtataaaacaacaataatttgttttattttgtggttagttataaaaaaaaaagatatcttttaataaatattaatttatttaatattaaaagtaaccaatctaaaataactgattcaattcacacttttacagatttgattaaatttaagctatggcggattgaattaaattcaaaatctaaaatccgcactaattagtgcagattaagtgtactatgactaaaataataccgattagattagatgaatatcactaggcaatagacaaaataagcaatgaaacaaatttattgtcaaacactaatgatatgagttatgatggtttaaaaaaaattgataggtagaggaacaaatcataaggtgtcgagttgtagaatttaaaaataagatgaatggggttctattttaaaatcaattgacaatagaaggagtagctcattccttatatattcaattatcttttcacacattagcaatgtcggactctctaatacgagtatctatggtgctaattagcaataatcattataacgtttgtagtggtttttaacattcatgttacaaacatggattaaaattgaaattcaagatttatgtagtatttgagttaattatagggtaatttttagttatatacaagtaaattaattatattataaaaaaaatataattacacaattttatataatttataaatatttacaaataattattatattgactttatatatttataattttttagagttttttattttatttttacctttaaaatagtttttttttttttttttgtatttttatggaattttatatcgaaactcccattgcaactaccgttgcagcctaaatagcaacaaaaaatgtacaaaaatccctattacaactaacgctacaactattttagaaacccaaaccgtaaannnnnaaaaaaaattaaaaaaatagtacacggaataattcactaattttttttttaaaatgtaattcagagtagatgatcaagtgcaatgcattgtatattattgtcagatgagagaagctctaagacgcaaaacagagaattgaataatgtggcaatgaaccttgggacttggaggggccattctatgtggtatgaccttaagctttcaaccgagaaatttaagggcatttttggaatttcaaaacctaatcaaacaaacagcactaagagctcatttggaggatgaagacaaaaggataggtcaaagagtcacaatgtcacattctctattatttgtttgataagtaagattagactcaactagactatcttatcgacatatagaatttcactaaattagattgtataacttatctaattttatatttggaaataactaatttaggtagtcccattcttttatccatatgggtgatcttctctttttattattttttttttaaaatggaatttatgatagataatcaatttacatccgcaattataatatctcgtaaagaagaaggagcattatgctcatagaaggtacgatctgacgaaaagcaagaccccctagcaacacaatatgcggccctattagcagaaggattaacaaaataaatttggacattatttaaagtagataaaattaaacgacagtcttccactaacaaatcaaactgagatggcatatgaagtatactagttattgcttggacaacaactaaagcatcagattcaacaaccaccttatcccaacctttacccttgatccaactcaacgcttccttgataccaattacctcagcaatttcaggaagcacacagcccaacctactccctgaaacatcttcaataagagtaccatttgctattccgagctacccaaccaaagccaaacttctgttgcgctttgaagatggctctatcgacattcaccttggcagtatcatgatctggtttagcccaaatattgctattagtaacatcacccgtagcaaaataagcatgaggcgactcaaagtttgtaatcttccaagttgcaaggactgatctagccgacttcacaacatccaaagctgctcgattcttcttctgccatagcaactcgttgcgagctttccaaatactcccactgatcatagcaacgtccaccactacatcaacttgattcccttcgagcaaacccaaaaaaagtcatctggtgcaccaccaggaggcacgactgctgcagaaaaaaaccagcaggagctggaaaaattgcagcccaacaacacgtggaatattgtttcatgttctctgttacagaaagagcaaaaaagatcgacattgatatgcttcgtttggagctgaaccttcgttggaagactaccagaacatgctcgccacaagaaatgacgaaccttaggagggac

SEQ ID NO: 39992 - DNA, 1006 bp, Cannabis sativa
acatattccttggtagagagcagtgcatctatttgggtagcaacaagctccaccaagaccacagctctgaccaccatatttacaaccttcaacagccgcacaatagttatctgtacccaaagtcccttcacagtacaacccttcgcaacatattttggcttgccatggcaacgcgctacagtactcaccaggtaccatacaacgatcaacgttcaagttcggaatgaaattacgacccatacatgaccccacactcatcgtcaaaaccaccaataccaatccaataaagtacttcttcatcatcatcttatagctatatatatattctctgatcaatcttgtgcttattttttagctatacaagtagttgtatttatagcaaaaaggaggaactagcttgagtactgcatgtctacaagaatatagtattatattagataattaaaaagtcttctcttgtgatcactaaaaaaattatatctttacagtgacgtccttaataattatatatataattaataaataataaataatatcttatgtatatttaaaacaagaatcacgtattcgtgtcggctgttttaaataaggctaattaataattttttcctacgaattttgatatgtaccaaatcatgttcactgaattttttggccattaaaaactgcaactgaactattgagattgttagatttaaggacttttatctaattttaggataaaatttctaacatgtatgaaaattcaagaagcataatttagtacatattaaagtttgacggcatgatttggtagatatcaaagtcctgggagtatgatttagtacataaacaatcactaaaatagtaaaataaatgaaattagataaaagttcttaaatttaataatctcaatagttcaggaggaatttttaatgaccataaaagttcaaggagcacgatttagtacatgtcaaagtttaggaaaaaaattaataattagcctttaaataattacgggaactac

SEQ ID NO: 39993 - DNA, 1683 bp, Cannabis sativa
ttatagccgcaatatatgattcattactataccatccgtgattagagtcaatatatacatattacatcacaaatgctatataaaggtactttagtactttttaggtatcatattattattagtataattaattatcaaatcttatataattaaaataatttttaataaatattactgactaacaatgagaagttatttatacaaaatactacacaatactacctagtaagtagtaattaacaatgcttatattatatacactacaattacataaaacgtgacaaaattaatggcattgcacttacgtgtacgtcttctggcccatggaatttggatttcatatatataaatattagaatgtcttattaattatgtgatgaaaattaagataaagtactaattaatactactttattatttaatttatctgagctcaatgtttggagcaagggatcttattgggaaaataaataatggtacaagaattgcatggaaattatgatacaaaaatataagaataaggtaatttggatatttgattgagtatctatcattagatttattcaagattattaaagtcaactgtaatgaaagtctcattattaatgttacaaactaagatatacttcaagctttaaaatcccctatttacactttcaaaaatactatggaacataactcaaattatgactcttacaatttttaagcctgtacaattgactctattataaacatcacattgaatcttctttagcaaaacatcaatatgttaaacttaactatcctaaagaactaaatttctaaccctccaaatgctatatgcaaggacagcacaaacagccttataaacacctttttgaaacttacttaacatgctcattttgatccagtttataatactttcaacagtcaggaatctagagcgaatactcagctaattcgaaatgagaagaagacacctactgctatattaacacttaaaaaagagatgattatgactctcattagaaaccctagacaagccaaaagtaacatcaacatttatagcgaaatgtggcaatctatctttcgttttcaaccttttcaagataatcaaccaaacaaaaaatcgatgtttggagagagaccagttccataatttagaaagcaaagcgctcattgttagtgggaagcaataccttgtaatttttggaaatgttataagtgggccgatcaaagagagatctaaccgagagattacattacaaattcttcactttgacaatgctcttccaataccaacttgcatctgtgggatgagaatactcccaccaattttgattttttaagtacactgagtgcacccacttcacttaaagattatctttttttttggccacatgccaaacatgctccccaattgttgcagtattctaaagagagatgtttctaatgcctacacctccttgagattttggcttgcacgcctcagaccaagccacgtaaccaggacctctagaagctgctaacccactccaaaggaaagacctacaaaccctgttaatttcatcaagaatactcttggaaagaatcaacaattgagcccaataaacatagatagacaacaaggtagagttaactaaggtactcctcccaacaaaagagatattttgggtctcccaaactttaactttcttgaccatc

SEQ ID NO: 39994 - DNA, 2364 bp, Cannabis sativa
aagaaaaaaagaaaagaaaagagagagatcatgaaaagcttgaatttaatgtatttgagtatgtcttactcgattgagatatatagtttgttaggtaattttgtcacgtattatagtaaagaagtgtaagatggagtataattttattttatttttccctttaaataaaaataatataaatttctaagaggataagatctatttattgaccaaatttgttttataaagtttatatatattatatacagtataatttttttaaaataattggggatatagtaattgcttgtacgtattttccacacgagggaagaaaaagctatagagatggacttggttagacttttaaatttatatatacctgtgactttattaaagtacgtacttatatataaagttagtttcttctaagggcttctttggtatttgatcatcatcatcaaaactctacaaagtgtaatatatatccgagtatgcatccattcgaagtaaaataattatgagcaaatgacaaattttacgatcgagtacaaagtggatagtactaattattagtagtaaattttatgacactaatggattattattttctgtggatcaagtaggccaactactaattaacatccttttctatttgttgcatgttcatatatatatatatatatatatatatataaaagattaattaaaaacatggggctctagttatatctcaaagatttgcttgtactaaaaaaataattatttttagtgttaatattttaatcatataaattttttgtaactaaatataatttttaatcacaacaaaaaaaattacttgtgactaaaatatactatttagctataagttgtaactaattaagttttagtcacaagatgtattataaaaatatatttaatcacaacaaattgtaatttttgtgaataaaaatacatttaatcacaacatattataatttttgtgactaatacttttagccacagacattttagtcacaatatagaaataacaatttacaattcgtcataatttttttatttttagtcacaaattttgttttaactaaaagtaaaattttttgtagtgatgttttatatgtgtataagcctatgagtgcttacttaaataagtactactcgactatttataatcctaattaatttggaatagttgtgatacaatatttataataatttagattttcaataataaataataattaaaagaaaatcttaaatacgtggcaatgaatatagagtacttctcctaacttaatctttttgagccattgatcgtgtgttgaatttctaggatcctgcatttcttgctttgtgttaaaataaaataaaaaaattaaacctcatgctcaatgaagttatatgtttggttgagaataataaaattggtcaaagaaaatatgaaattgttgatttttttgccttttatttttccttgaaaatgattacatttgatgaaataagaaatgaaaatcatgagaatcttattttcattatttaatactttattaccaattttacgcaaggtcgtcctcaatctcatctaaaaataagaactaaaagtatataataatagcaagtttacccacaatacacaatttgttaaataaaatcataaagtgtggtgatctttaagcttcaaataagacaagatttgcatctaggtgtacatggttatatatacatcttgttttttcttttgttgatttcttttggttgttttgattatggtgtaagcattcgtttaaattaagaacattttatatgtattttattctggctggctgctgaatcttgtatggaagggaacatgccctttttatataaaaatgtggcaaacaattgctatcacatgcatcatttaaaggaattaaacagaattaaatcatttgtaaacccaaggttaattagacaaagttgtttacataaaggatggaacctgtaattagtactcgagactgccatttgaagtcttcttgtgagatatttcatgattaagacaaagagaagaggtgttaacggatcaccttgtctcaagccttttttacttttgaaggaaccttgcaccctcccattcatacatatgaaatagttagtagatcttacacttccattatcctttgaacaaatcgactaggtaggttgtaggcagaaagcatgtcttctatcttttagaagagcgatttctcacatagcaaggcaaagcttttataggtgaaccgtagaagagtgattgtaacaccctaactagcataggcgtgttagtgtaattttaaacgtactgtacagctcgttgctaatcaacgaggttataaaaatcgtgaataattaaattttgcttat

SEQ ID NO: 39995 - DNA, 984 bp, Cannabis sativa
aagtttatgaattggaagaaaaaagttgaaaaaatttagtataactaaagatataaattttatattaaattaaaattattaaaatgagatgcttttagaaaattttggggtctaaataaaatttcccattttatatttgtcctttctctctcaaggacatttaatatatgttgtcttggaggtgttctcatctccttcctattttctttcttaccaatcaagagagtttttctctccctctctctcccgtttactctctcgatcattccatatttccactctaccaaacataggagtgtgtattaaaaaaaaaactttattattattattattattattattttcagttttgtgattaattatgtttcatgtctttttttaccccataaatgagccgattccgaatgatgggtacttgtaccatgcaccttaatgtttcttaaatataaatttattactaattattattacttcaaggatatttatcgtcacacgtgaactttgtcggaaaatgaaaattattaacaatgaaaaaaattaacataatgttttcaaaaaaaaaaaaaaaaaaaattaacataatgtatgtgtataacattaacaactacgtacagtagtttgttgtttgttgttgttattattgttattttggaaaggcagtagtttgtattaagatatatccatatgtttatctatttaaatttaagttaatataattgatattagaattcgaaatacccctttcgaaatatatataatactgtatatcaaaaaactctttgttttattttttttggtaattggtggtgagatattgaataatatattgttacacatatttcaaatttatttgttggaaaagtacaaagaaataactccaacaatattaaaaaaaaaaaaaaatttcaattattaatttctccacgtcccagaaccgcgttcagcgccaaataatttatttatgtcgattttttaagtctcctt

SEQ ID NO: 39996 - DNA, 1231 bp, Cannabis sativa
  modified_base (528)..(528): a, c, t, g, unknown or other
tatgtatatgtaccttctccatatgtaatgaatctgacagatccaggcttgatgccatcaccttccaaaacctcaacacttttgtaatcatgaggaaatgcctttgggtaaatgtagatgaaatccctaagggattcccaaaccttatctgcatgagatttcacctcaacttcaacatgaagctttccagtacaagccatgttgtttcttttcttttcttaacaaaatatatagtaataatagtaatataaaacacaccacactcaattagatcatatgatattttgtcacactacttatatatatatatatatatatatacagtattatatatacgagctagaactagagctagagctgttttaatttagtggatgggaagagagaggctttaaatggattagatagaagctcaactaccatgttgaaatgatatcatgagaatattggtaaaagagtagttacatataaatcttacatctattaaaaaaaatagtaaaaaagatataactaattataaattattantcttatgttgtgactaaaaaattcgtggccggtcaaaaaaaagtattcatcactacactataaaaaaaatattagcttttcccaacggttaataagaggatcaattataaaaaccgttagaaaaattataatttgttgtgactaattaaatgtgtttttagttacaataatacttattgtgactaaaactaaatcagtgatgacttgtagttaaatactatattttagtcacaaataacattttgttctgattaaaacttacatttcacaaattatattgtgattaaaaagttatgactaaaagtagttgtttcttttagtggatcatatgaccctatatatgagaattgctaaaaaatattattggggtctagtactctccttacttctcggtatcatgttattatcatataattaaatatcaaattacatataattaaagaatataacttttagaaaatattgctacgttacctaatttatcgtgaggcaccacctataaaaaattttgtacactaatgtactttttatataataacaatgttctagcgaaatgagtcgttaaaaaatttatgatattttacaattaataaaatacaacaacggtgaggctaataaaattactattactatatatatataagggataattgcggcaaaagtccccaaaaacttgaggttgatgccgattagtcctcaacct

SEQ ID NO: 39997 - DNA, 2283 bp, Cannabis sativa
gaaatagatctgttcttgagcttttgtcaaacctggcttccctttttagaagagattatcaaattcatgaagaaaaaatagatctttaattattattattttctttaacagttaaattcataaaataaaattaaaaaaatgttgctaataatttaaatttgatgaccattttgctaataatttaatattaaaatacatattaaattgggcaacagtttcatagatttaccaagctaacactcatgaaatatcatgttatgttatgataaaatttatatgtttttggtggttaatttatatatttaatacctgcacaactctgcaatagcaacacattgaataaaacacaaaaaacttcaccataaacaaagcaatgaagtaaccaaaagacataaaacaaagatggaacaggaagaatttgagtacagctctaatcttgaagcagagacgacacaacttgaaagatatcgtaacaactccaatgttattcaagattccgaagttgtgagaatcaagggtaagagaaatacaagcgaaggaccaagtggagagcaaattccaagaaactcaagatattgtcgcatttatcgcgcatctactcatgattatcgttgatgtccaaaccgtcaacaaaataatggatctcaagggtcacgatctagcaacaatcaagtaagagctaactcattcaatgaccacacttataagtatttttcgaactcgcgtgtcacaatacaagagtcatacaatactacagtaactcatattactagctagtttttatgatttaacttttatgatactaatcactgcttcaaaaattctacttttatttatttcatgttatgtttgaggtaggtatttaaggtaattatttcatcttgaacgaatcttaagaaagaaataatatatatctatgttgctttaaaagtcgcaaatccaacataaattgaagataaattattgatggacaactaaattattttaggtaaaaaaactaatcttattaggtgaaaatataaaatatttctatagtaatttttaatctaaaacttaattaaaaaaaaaaatacaccaatatataattcaatatataacaacacttattttcatttattgatcactcttaaaatacaaactttcatgagttttgaaaaaaaaaattctaagcccgtgaatctcaaaatatttgggagaagactaaccaatgtaatacgaaacataaaagcacgagataggtgatattttgtactctacttttactatacatcatgcagaatatataaatatatttggtacctgatataacgtacccaactatcactgcacaaatctatcaaaaaatatgaaaaattaaaaaaacaaaaataacttcaatcctacaacatggatccaccgtataattgtactattaactaccactaactgccattagaaaaatcgttattaaaactggaagaaacctacaataataaattagcagaaaatactaaaatacattaggccttactcagctgtaccacaatctgtaattttattaatttaacacaaaactgactacctatatatataaatataatatttttagatgttacttctatcactaaagggagaacatcataagaaacaggaccataagttgaaaagacttggcacctagaacaacaacaatggcaatgacctttaatgaaaactaatgatgttctaacagacaccaccaagaaaacaaggccttgtttttttttttttttgtaacaatgagggtttatattgaccacaaatacaaaaatattaacaaatcagataatctgaatttttttaaaaaaataaaaaaaataataaacaaatagcagcatgagtacttaaaattttgagtttgtaaactgcataaattcaattatttttttaacggcataagtattcaatatttacaaaattgtaattttccttcagtttcgtcattacaaactctgttattatcttaaacatgatacatataaggctcaaattctaaatcattgagtcttgacaagaacataaagtattaattacttccaaactgaaaaattactgttttacaaacattaagtacttataccgttaaaaaattattcaaaactttaagtacttatgtcgctatgtactctaaaaaattaaaattgtagtagaggaggcaataatgtcataatatacaacatcactagtacaacaatagcttcaaagaatctttcaccaatgctgaggttgaacccctgtccgaaacaggataccatcaaaatcata

SEQ ID NO: 39998 - DNA, 3314 bp, Cannabis sativa
tataaaatgtttctgtggttatcccatatagtcactttaattattggatcaagagatttaatggttgaaagctacaaatatatatacttgtaaaggtaagaaaagtaagagggccatgacacattgttctggtttctcttctgttcattattgcttaattatcataatgataatttaaaaggaaattggtttctctatagcctttagcttttgtgcatttcttttccccaattggtttcttgttattaaattcataccagaaaaaaggaagagataataataataaaaataagcacattaatcggtttaaaggttgtgatatgcatggcaaggggctccctgtctttgttttttgcattgaagtgggtttctgattcttaatttataaagttgagaggacatgattcgtaatcgtatgtggaaggaccacttgagagtgaataacctatagctatccatttgggaaaaataacatcaaattaaaacagctttcgattgatgagcatcttgtcattttttagagttttggaacccataacaatatgaagtgaattttgtttttcttttatacaatacggctcttttccacgtgaaatcgttcatgtttcaccacactaagtgagccataaaaacctccacttgcaattcgaaaagtttctttgttagtttatcaaaggtattctttttttgaaacattattaaaggtattctgaataagagatatacacatataatagattccttctttttataaattgccagaatataatttatgggtacttgttctactagctgttagctagtagctctattatagataagtgatatattaaaaggtagaagtggcgcattacaagcaaaaaaaagttacaaacacccttaaattagtgccaacaaattcaatatttagtactaatagatatgtaggtacaacaaatatcgtgcccaaaagttgcaccataaataataccacaaatagtatcgtcgacacatgtggtgcctagttagaatcataaattctatcaattatatgtttggacacgagaaagtcgtgcccaatgggttattaattttttttttaagaaattaatgttgtattttaagataaatttatatttatatttaaaaaatataattatccaaaactaataaaaagtaatttataaatgtgtgttctaccatataaattagcaatcaaaactacaataaaagtattcaaataactaaatacaacaactaaaataagtgttcaaatagacaatacttatatcatcacactcatacaattacaaatagcagcactataatcccaattgtgtggactcctcctcgtcctcatcatcatcaccattctctccatactgttgttgttaaatttgcggcatttgtggatagtatgactgttgtgatacttctggcatttgcgggtagtacgattgttgtatgtgtgacatctgttgcattgttgtcatcagtgacaactgctacatctgagacgctcgcggcatatgctgcatcaatcgcatcgaaggcatctgctgcatatgcggtgtctgctgtaaatgtgacatatgatgcatatgcaccatctactgcattgaatgcatgcatttggtgcatctatggtgtgtgttgcatggaaggttgatattgcatctgtggtgtgtgctgcatggaagattgcttctacatctgatgcatctgctgtgtctgctgcatctatggtgtctgctacatattcattacctgcatttgcaacatcggcgatgacaactaaggaaaaagggacatttgctgaggtgatgacgaaagaaacataaatggaagaggactctgttgcccttggtgatattgggaagtcctaagttgtgaagatgaagaatacccacctccagacatttgagattaaaacttcatggtggaggcattgacatttctaacagctcctcatgagtaggtagacgaacatcaagtcccaatcttcgagacattcacaacattgttcttgtcaacttttcaaattaatgctccactcttggaccataggtatatcttgagtagaagtaggttgagtgcgccgcgacaaaaatttccccactcctcaattttgaccacgtctttcaccaagtacttcactgggtacacttatttcaagctaatcaactggtctagcgtcaggattaatggcacatttttcataagttgaaaccagttcatcctatttcaagaatataagttagaaagcattataaacataaataaaagagtattttatttaaaactaattaataagtacttacatatctttatgcagccaatttattgataaatgtatttattctttttgaggtatgaactttcttccaagtctcaatgtaacccttattcttctaagagagattaaaggaagaagttaaaaatgtgcaatttgaatataacttaattaaatttatattctaacttactttttcaaaatgtctctcaaccatagatttcgatccctatgttgtagggtactgcatcttttttctattttttgtttttattttagaacgagcaacaaactctagattagtgaaaaacttacaaagaggaggccatttctctggagtaagatcactaggcgggtgggcaacaacattatcaaaatctataggacttttgtagtattctttaaaatgtacatgccttaacagtttttgtttcttatatatatctgtcatttcagctcatgaaatatttataattatctcataatgttcattattgtcgatatcataattgttaacccaatttttgcaaaaaataaaataaaatggctactcttacacaagggcccacaagccaagagtaccttgaacacactaattaaagtcaactctgtgactttgaccaagactcacgaaggccaaataatttaagacatcctacttgagggccccatgacacctttagaagactcgaaaacattgaccaaccatttggtgctaggactcacacacccaagtgtgcccaaactagggtttatgggcccgcgcgagcattttcaccctaaagacctcaatccgacaaggagaccaacaaggacttgactcatataggcataaaaagacttagacttgaacataaaatcaaaattacacaagaaccccatgcaatatggcctatgtgaccactaccacttgaagatggcagtgttcttcttctttttggagagcacatccacatgaagatggaagtgctctccttctttttggagagcactgccacatgaagatggcattattatccttctttttggagagcacatccac

SEQ ID NO: 39999 - DNA, 1215 bp, Cannabis sativa
ggtacaaataagccatgtaaattcccttaactatagatggcttcatattaatacatggaaagggaaaaaaaaaagttttgccttaatcacacaaagttttggtacacataattatgtatatatacatgaagcacttcactactaataagttcaaaccaaaaaaaaattgttgtcactcataatcaacagtgtagaaccaacaattttttgatttggtaagaacaatacaagcaacttcagttgataatgaaatgttattcttctcagaaaagaccccgatgtttaattcttcaatcaagctcttactactctcttcggttaggttcttcatcttctgattcaagattcccagtggctttaaacatgggcggtccgggtctactaagatgtaccgaaaaatatggtgaggagcacaacacaaagggatagatatgtacaatggtagggtgtattgttgtattatagtgttcacatatcatgccttgatgcccatctctcttcatatctcccatacgagcaagacatggcgggaacttcggttaagtgaagggggtctggttcgataccataatcggttagtggtctgtgttcaagaacatcatcgtgagatttcacgaattctggaatttcgatttcttccttcttaacatcatcccaaaggtactgcaaacggctaatatacttgatcttccaatatagactacaaagaataaaagtagaagaaaacaatattaggggcaaacaaagatacattaacacaaagaattacatattatgctttcaaatcttattgagaaaacaacattgtaacattacaatgatagagtgttatagctactggctgcagcaagccccggctgctatttttaaacaatacaaggtttgatttgaatgggtgacaatgcttattgatgcaaaagaatgcatataaatacaaataacgaagaacaaccaaatttcacagttcaacaatttcgagattgtgtaagaagacattgcttagactattatgatgttctattattacaaatattgaactcagggtattatttgtatttttaaaaaatacaaggtctgaattgtcaattaacaaaacagaaatttcgatgttattttggcaaaaacagagtccaaaatagtaaaataatgtactaagcaaatgattatgaaagatcaaacaaaactacataaaattgctactccaaacaacttggt

SEQ ID NO: 40000 - DNA, 1580 bp, Cannabis sativa
ttttagaatttatattaggatgttaatgaaacatactttgtagtaaatctagatcctggtaaaatatttccaaaagttacacacttgtataagtagtcctttattttagaggaaggttggtattaccatagtattttgctattattcgtctccttcagcgaaaggcaactaacttgtattggcctaaaatgaggaaggatgtttagcgttttgttgtggagtgtgttgtctgtcaacaaaacaagtatctcactcaaccgtcaaccgagttgtggcaacaattggccattctagaacaagtttgagatgagatatccatggatttcattgagggattgtctatgtaatatggctttgactctatcatagtcgttgtagactatttcagtaagtatgggaacttcgttcccttttgccatccttatacaacttctacagtagctgaaatttttgcgcaagaagtggtcaagacaaatgggaaaccctactctatagtgtgaaatcgagaaaagattttcctaagtctctttttggagaagttattcaaactcctagggacaagcttgaagcacatcaagacatatcatccccaattagagggttaaactgaagttgtgaacttctactgttatcccaatttttgtccttatgacgtggcatgcctatgtggatagaaccagtgccacatggcaatacatctcactaaaaggatggccaagtgagtactcgagtaaacgaagttcccgtcactcaaatggggatcaactgacagacctactccctctcaagagctggctggctggcctggggacaacactacggccggcccgcttggccaccacagggtcttggtcgaccaaggagtgctctgtaggccttgatggacacttccacacatggccaatagtaatgggctgcgaatagggccctaagagcccagttgaatggctgcatactatctaaagtcaagtggactttggtatttttttaatgtctagctaactatacgattgatgaaggatttgaattgtaaacctagggtttaaggcctccaatataaaggcatcaatctctaagttaaaaactaagttgcctctaagctagaaacctaatatgaaactctaggtgcctaacaaactctctctcttcctcactctctctctctcactctctctcaaatgcttaccctaggttgtccaacacttgaattttcacaagcattgattcatacattgcaatcttaaggtactatagcatatcccacctatagcaatttcgatagtaattcgcttgatataatacaactgaaaggggtgtaggtcattacccgctatcacaagggggccgaacctctataacaaatcctattgtctattgcttttcattcttatttgttcacacacatgttaagcatcagatgtgcacgaccccattgttggttgattattttttgagatcaacagtttggttctttcattcagagcattgatatcgtgatctatcaaacgccacggtgaacacaaaaagaactcctatcgcatcatctatatcttcgtgtcaccctcaagactcacaaattg

SEQ ID NO: 40001 - DNA, 3079 bp, Cannabis sativa
atcggtcccttccaatgtatactttatacatcccatactggtaaactttgccaataccttggaaaggacataacctaattatagaatagaacaaaaaaaaatagtgcagataaataaaaatataaaagatttttatacgtggtatcaacaaaccttgcaaattgttactagtccatagggtcacgcccaaagataagattcattagataaatctcaaaaatacaaagtaattgacttagtatatagagattctctcttattatatgctacaagcttgacatattccacattctcaaatgaatcttgctgaaacctcaagtgatcgaactcccatcaatttgcttaaagagtgtttgcttcctcctgaaacaagacttgagaaacttcctcccaaaagctttattaaccttctcctaaaggtttgcactattgttcttcttatttatagacttgactacagattaaagacaataccagagatataaacatacaggtagagtcgaacacacactcttctacacaataaagacccaattttctaggaatatgaacgaagttcaaagtgaatgaaagtgataccaaacataactactaggattcaccttttgcccgtgtttgaaaatgtaatctcattttgtaataacagttttgtgttgcgttgtaaaagtttataaataaggggatcccaaaatttagcagtattttgaacgaaagttaggttttaatttgaataaattttactaaaaagtttcaattaaactgtgcttttcttaaaccgttagtttattattataaactaaattacaaaaacacacatgtgacatccctacggaatagggcgttacaacatgatatcaaagtgaccaaggtttaaagatcctgaagactggtttgatatgtacattggctgtgaagactcgttcgactcatggttcagtaagtgttaattgttagttgattattagattatttgcaagttgtttgaattatttgcttacctgaatgtgcaagttattaaaaaagcatgataggttataaataagagtcgttgtgtatgtgtatgtatggtaatgcttattagcattgattttggcttaaaagaatctaaaagttcaaaagttgtgattgtaggtgtatttgattatgcacccgaggtcatctaatagggttaatcgtgagctttctgggcttgggtcgagcagtgagagtgcgaaccctctactaccacaaaattaggaacaaatgaacactacaatgcaagagactatccgacagcaaggtgatcagattagagagctgagagagcagaaagctcagcctgctcctaatcccaatcctaaccctctagcacttttaatagtgccataggatgtgggaaattgtttggagccgttgtacgagtagtttaagaagcagaatctgccagtgtttgaaggtggtgttgatccactaaaggcggagcaatggatgggcatgataacatccatttttgacttcatgcgggttgagagtaatgatcaggttggatgtgctatctacatgttgtgtgaggattctcgcatttggtggaaaattgtatctcagggtcatgatctgaataacatgacctgagatgccttctgaaccttgttttacgaaagtactacaatgattctattcgagctgctaaggcagaagaattcatacagttaacccagggctgtatgacgatgacagcgtatgccaccaagttccattgattgacaaagtttgcctttgatgaagtgaccactgaggctgctagaaaatccaaattcatttaaggactggaagaacacatcgcttgagaagtaattgtagctaccaaacaaccagggattgtccaaacttatgctcaagtggttgagctagctcttactactgagggtccagaggatcaaattcaaaagaagaatagtatgagaagagattcgtggaaacaaacgtctaatgtgggctctgaaaagggtgttgaccctaatgaccgtaagaaaagatctaacaattcaccggctacaggttctagcaagaaattgcccacagttatagggagcggaatacaaaaaatatgacactttagttcttgcttgagtattcattctaacccaagtagaggctgatgttggtccttctaccgtgacatgtcagatttctattgatggtactatgttgactgttttgattgattctggtgccacacattcttatgtgtcaagtagagtgattagaaatctgcataaacctagtgatgttttacgatgaggttttggtaccttacttcctactggagaattggttatctccagcaggtgggttaggtcccttccagtgtatgtggagggaagataattatcagtcgatttaattgagctaaatctagaagattttgatgttatactgggtatagactggctagcaaagtatgacgcgaccattaatttcaaaagaaagatggtaactttcgaacctgagggtgaggacccatttgtgtttgcacgaagggctcaaggatcccgcattctaataatctcggtgcttaaggcaagatatttgttgtgagatggatgtgtcaattttctagccagtgtggtcgataccataagagaagtaccaacgggacctgaacacgttctggtggttcgagagtttttggacatttttctcgaggagctactagggttaccaccaaagtgggagattgattttgaaattgatttgataccaggggcaaaaatagtatctaaagctctgtatcagacggcacctacagagatgaaaaagttgaaggttcagttacagggtatgttggatttgaaatttagtagaccgagtacctcaccttggggtgaaccggttttgtttgtaaagaagaaggacagaacattgaggatgtgtattgactatcgagaattgaataagttgacagtgaagaataagtactattttccaaggatagatgatttgtttgatcatttgtagggaaagaccatcttttttaagattgatcttcgatttaattactaccagttgaggatttgagaggaggatattcccaagacag

SEQ ID NO: 40002 - DNA, 1984 bp, Cannabis sativa
ttaaagcaagggaattacccccggcgtggttgccgcagaggccaccatgcactttgcagagtatgtattcgcactcggctccatcaatacatttgagcaacgattggctgaagcttttgcagtaaagcctgccatcataaatgacatatcgagcagctcgataccgcagttttctagcctctatcttatcttcgggtaggatttattttttccaagtaatccattgtcggagtcatccatatgacttctctggcagtatttacctccattacttcggttcaacttacagttgggtgggttaacacatcaacaagaattacatcgagtaattcagcttctcttgttgaggccaaacgggccaaagcgtctgcatgagagttatgaacacggggtagtcgagaaacaatcacttttttgaatttctgtagcaactcgcaagttagggagaggtatctagccacacgtccgcctctggccagatattctctgttgacttggcatacaattatttgggagtggctgaaggcttgtaaatactcaatcttcatctcaagagcagtttcaatcccgcaatcaaagcctcatactcggcttcattgttagctgcagcaaattcaaacctaagtgccacatataccttaaacttactggggcttctgattattataccacctctggacccttagctgttggaggcttcgtcaacatataaagtccatccttttggtacatcatgatcaattttttcttctataagggccacctcagtgctcgcgaactcaagtataaagactgccagggcttgccccttgatcgtagatctaggcttgtacctgatgtcgaactgactcagctctgctaaccattttaacaatcttcctgaggcctctggtttcgccaaaacttggcttaaagggtagtttgttaaaacttcaattctatgagcttggaaataaggtcgcaattttcttgacgcaattaccagggcaaacgccagtttcttcatctgcggatcacgagtttcagcgtctaagagacgcttactgacataatacactgggtactatttccttggtcttcatggattagtactgaactaatcgcgtattcggacaatgcgaggtagatggataaatttctccaggcatcagttttgaaaggatttggggttgcccgaaatgtgacctaagagcttgaaaagcctcttcgcacttctcagcccactgaaacttcttattgacttttaaaatttagaaaaattctttccacttatcagaggaacgtgatataaagcgatttaaagcagcaactttacctttaaggctttggacctcctttgtttggtcggagatcgcatttccgccaaagctttaatcttcgcggggttagcttcaatttcttgcccattcaccttaacccgatgaattttcctgatccgacaccaaagaaatggttgagaggattaactcgcattttatatcatcgcagtatctcgaacattgcgtccaagtggatgacatggtcctttgcatgttgagattttacgagcatatcgtcaacatacacttccatggtttcaccaatttgatccgcgaacatcatgtttaccaatctcttgtatgttgctcctgcatttcataatccaaaaggcattaccttgtaacaatacaaatctcgatctgtaatgaaagaggtatgttccaggtctggttcatacatcagaatttggtgatatcccgagtatgcatctacaaaactgagaagttcatgacctgcagtggcatcgataagttggtcaatgttaggaagcgaaaaactatcctttggacaagccttgtttaaatcaatgaaagcaacgcatgtgcaccatgagccattaggcttgggcacgagtaccggattcgctacccagtttaggtagaacgactccctgatgaagccagacgccaataagcgatctacttcttctttcagcgcttggtac

SEQ ID NO: 40003 - DNA, 1414 bp, Cannabis sativa
attggatccaaaatatgaaatccgcacttagtgcggattggatgttgtttgaccaaaaaagtgcagattggatcggatgaacacccctactaaccatactccagcttaaagccattatcattaatccactataaacaagtttgagtcagtacaacactaatggcagaggtcttagcagaccctctgaaatcacactagaagagtagtaacagtccttcaaccccatgtgtttcccctttgagttcttagtcacaaagaactctatcactctctcactaatactctttgcctctctcattagattgcacgtcttttctttgaaatgggactttgagctatatatagcacaactcatacacaaggaaaggcaaattgtttgtaacaggataaagagttaggatttgagttgtctaaacttagttgaaccagttttaactaacttaccaaataattagttatgttagttaatctgttgaaggataaacttccatatatatttataaagttgtaacagaacaaattaactgataatacacattaaaaatcaggtctgaagtctttttatccatgctgatgttttcccaacttgctgcatataaagcaattcaaattttctcgcaaatttcaaactatccttgatatatttaatctcattaatgtacatggccaattttaatttcaaagtatccttagtttatttagagcacattgtaaggttttttaaaaggtgatctgatccactgttgttggatgtgtttgcatgggcgtgatcggtttaccttcttatgccatttatgttgggtggcgtttggttggaagtaatgaaatggaatgaaaatgaaacaattttcattttattcccttgtttagttgctttttaaagtattggaatgtcattccaataaaatgtcctttccaccattttggtagaatgattattctattttgaaatggaagaaagatcattccaacatgagaaaatattccaatagaatttgttttatatgttcgagtgaggagtgctttccactattccattgacttgtggtttagttgttaaaagaataagaacaatcatacctacgtactaacattttggtgtgtaaaaaaaagtgttgaaatgactacagagcacagatagacagaaatctcatattgagaccaaaaaaaattctcaatccacgcttagttcatttactagtaaaaaaaattatgtatgaattattctaatcctgtcttccacatgaagcagttatcgcaaatcttatgtgcatatgaaagggaagggagaaaaaaacagcaatccaagaaacctctatgctctggtcacagtagcacagttaagaagagaagagaagcctcctgaaaagcctgtactaggaaattgccagtaaaaactaaaaataagttagta

SEQ ID NO: 40004 - DNA, 1951 bp, Cannabis sativa
gggcataaaacccaacatatatctattctcagtcaatgtcacttagttgatcataaatcaatttgatatgaatcatgacttgattaagcttttagctaattatgttatttaatgtctttgacttgttcattactagcttaatatacagactagtctatactaacatcttagaaactcggtattataattgagtgggagtattaatcatagatattgacatctatagcttctatgttagaagtaaaataatggctttgagctttgttaaaaaagtaaatgataaagagatcattttagtaatgatatcagtttactaaaattcatttacaaggaaccgagtgtttaaggataaaatataatagagggataaagtgggataaagtatggcctggcaaatatcagtggaaaaaatgtataaagctgggcaacatcctaggtgccactgtcagtaattaagatagaaatagtattggttcgattagaagggacactgagatatgcaagctgactgtaccccagaacctaggtgtcatcatagattaaaatggatgtgccatcaccaactttcttcctaagtcctaacaagagaagctccttacccaatgaaatactagtctagactagcaaaggatgatgacccttaccagtagccaggaacgtagagtggggaaatagcgagccttaagtaaaggagccaccaattattgaagagattggatgaggcgccaggcttgcttagctagcatagcttggttaaaagctttcatggaccgaaatccaaggccaccatggaacttggatttgcaaatagatgttctacccagtgagttttcttgtttgttcagttccaccccgccagaagttagcaattagtgactctaatttatagtgaaagtagaaagaaagtttgaaacaagttatagaatagggcagaatggcttgaacttggtttaagtaagatttccttaccttctttctaaaagaaagtggagttccacttgttaaaatgaatccaaacacgatcatagaggcaattgaaggcctctttttaggagcgcctaaaagattgagggacacccatgtatttttctattactgcgcgaatagggacattaagaatattggtgatagacatttttgtatcctcatctgtgttgagggagaaacagagagaggatttggcacaattggtttgttggccagatgccaggctatatatagtaatttagtaattctttaatagcaaaatttgcaataggttaaccatcactaaaaagaaaattgttgtcggtaaagaaaaggtgatagatagtgggattagtgcgagcgatcttgaggctaagtgcatgcttcctgggaacacactgatccatcacttggataatgagggagaaaaaaccctcaaaatagagaagaaaaaggtatggagaaagtggatttccctaaagagtacctcgagtggagagaatattcccttgaacttgattattaaccaagaaggaaaaagatgttgtggaaacacaagtcatgataagatcaatgaaacattcaggaaaagcatacctttccatcactttttgaagaaaagaccactcaactgtgtcaaaagctttggccatatcaagtttaagagccacccagccatctcgatgttaggctatttttagcctacattttgggtcattttttatagttattttccatctttattattatatttggaatagaattactcttgctttctatggtttcgggtttcacacttcgaatatatcaattaattgaatttcagaaaacaacaatctatagaatagagaaaattctgaaagaaaataaagctgaaacttcaagccttaatttgactattttatgatccgattttggaaaaagtcaaaacatagaagttttagatttgtttttcttctttccaacgcatcttgaatcaactcat

SEQ ID NO: 40005 - DNA, 2189 bp, Cannabis sativa
  modified_base (2156)..(2159): a, c, t, g, unknown or other
tttttaaatataaatttatatgtatttgataaaaataatttatagtatttttttattatattctatatgtattcttgaaagttttatttttttgattgtttaccaaacacatttttattataattttttcaaaaagtaatttttagtttttcccaacctggaaattaacagtctatctatatcaattttcacaaaacgtttttgaccaaaaacaaattatgaatacactctcaaccaattattgggtagtccgaaaaatcatttccaaaacatatgtctaaattgatataggagtttataataattttatttcatttttctttttttttttttaaataaaaagtccataaatataataatcaaacttattattttatatatataattatataattagtaatgatcatttacttatagagatatgaattattaaaatcatatataggatatcgatcgaacctcgaataaaattaagaacgagattaaagaagttgccgttagttgacaagatattcaaacccatttcaatggcagagccaaacatggccatgggtacggaaagagcatgcaaaaccttctgagctccaattgatacaaaaataatccaacgtcggcataaattttcttcgtctttataagacgagtcaaccaataacttcttcttcaccactttactcgaatatataatatatattaaatcaaacaaacccacttcctttgaattcagtaacatatagctatctgaaaaactcttgtcacactccatatattatatattatatattatgtaaagagtattatatatatatcaactataactatttagctgtgtatgtaatgtgtataaaaatatatactacgtagacagttttctatatatttataggcaaacatgtgaagctcctctcgtgtgggagtcctaatttggccaagtcaggattggccgccatagatgcgtgttattttagtataactgtaaaattaccaatcattgaaaatgatatattcattaaactccaaaaaaaaaaaaaaattgatttatcgatacatattatatattatgaaagtttttatttatatttcaaaaatttatatggacattctattttaataattttgtattttatataaaatttatatttttaattgtattaagttttttctttcaattcatattcttaaaaaatatatctatttatattttttttttatttaagacatctctgagctagcctcgagtgattaaaatatatctatttatcaaacaaaattaaattaaaaattaaatattatctaatatctcaaccaatattcattaatttaactatatataaaccaacagtgagctaaatcattattgtgctattactataattaaaccttcaatatttatttagatcatcacctagctcgaggagtaattaattaattagttacgtaccaacacgttatatcttgattattcttattctagtatagctagctagtgctatcaagcttcttaattacgattatacataataatatatcagcattgttattgggcatcagtagtgtctaacaccttctcgacatgtcgcgttgcgattggctagcgatacttcctaaaaattattatattaaattatatgagacccgatacttagtttaaccaacagcgatattgacacatagctaagaaggtgctaggcaccaccactatcctttagcatttttcataatatatataaacttgtccctagtgtaagttacctcttattgttgtgtttctaaccacgttgcatttattgtatatatatatatatatataaacccccaacatgcatgcatgatgaccaagtagcgtgtgctttgtttcttttgttttatccatatgcttcacatagagtttaagaatttatattcaaattcgtcaaattatataataataatttacatttactgatttatgtaatagtaaaagtctaaagccggccttttctagctctaaaactaaaccacacactaattattaataaattaaatgagttgcattgtatccccattgtagaaaaaagtcctctatatcaaaagtagtttgatttgttggacatagctagccctagctaggtgattaattaacaacggtatacacccatatatatttatatatatannnntatatatatatatatgcgtgtgtaagtata

SEQ ID NO: 40006 - DNA, 2780 bp, Cannabis sativa
  modified_base (2384)..(2388): a, c, t, g, unknown or other
cttcttattttcactatttttattgttttctaattttaattttctcttaaattttatatagccaaatagaagtaaagatttaattttaaagtacttaactacgattcttgtggaatcgacctcactctttgtgagtctataacttgttaatgatatgtatactttggtgttaaaaaaaccacaacactaacaagtaagaaacctaataatgatttcactttatagccatgactttttctcagacagtggtaatgaccgtgtcttataaacgataataattgtattttataaatgataatagtcgtatcccaacatgacatgctatttagtacaattgtactttcttacttttaattctagattcatgcatgccgaccaatctaaatagaaaaatggccgaagatctctgtcttatgtcacaacaatggtaaatcgtccaacaacttgacctaacccattataggtctataaattcataattggaaattttcttatcgatacatagtatgacatcaataccctaaatattaaaaaaacacaaaaaatgggggtcccaaacatcaccaaaaatgacagaccgtttaaaaaaataacaaaccatttttaggtgttcctccccagaaaaatggtcaaccggttttccaaaaccgatctgttgtatttctgcagaaatagagcccgagttttgcttatctcaactccctccaaacctaaccaaatggtctcaaacttcaaaaaataattaagtatcatcaagataacacaacccaactaacaaaaactaaaataaaaacataattcaaaacttaccattaaagatcaagctttgagttccaagagctcaagcttgcttcacccacataaccagctacactaaaagcttaaaaatatcaaaataactctaattctgacctagaaacatattataattcatacttactcatatagaaacaaatccttaaaattcccacttaaaccaaactttaaccttcaaaattcaaagagaaaataaagggttaggactaccttgctcttctccacaagttactttattcttcattgatttttccataggtgaattgctgaagaaaacagatagaacctatcttggttcttggtttcttctagggtcgaacaaggagaaagagaagggtgagaatattgattctaaactttttcaagactatccactaaataaaaattaaataaacccatttacaatatactaaaaaaagagctgcccacttactctagaaagccactaaaacaaaaactaaaacatattaattaagtctaataaaaataccattatacccttagcttaacacttagtaatttctaatcgatgggtaatttggtcataaccaattaccccgagatacttcgataaaaccaatactaaccaaacttaataacatccccaataccatgcactaataccattgtgacatttttggccaccaattaggtctctatgattgtcgaacctaaaaatatttttatttcataaatcatatatacaatatccatatattcctgtaaaatttctgtaattaacaaattacgcttatttactcatttttactaaaattactaattataacataattagcttataaaattataatcttattcattatatcctaaacattcatataatcttatatttaataaaatatgcctaattatacataattagattttaagaaattacaacgatcccctccttataaaaattattttctcgaaatttatttaagcaacttgcgatacagttcccgtattagtgattcttactcctaagtcactttattaatcttattgtttcatcacagtacttaaacaacaaagtcatcttgttcggtatatctattccttcgtatctaatatcttgataggcgattcctctaatattaaacccgtctagagctcaatgctcaaagtatgggtcaaatctgacacgtacttccctaccatgggaatgtgaaaataagatagggaatcaaattataaacatgattcattattgtcctgctttatctacctttctttctgaatctttaaattcccttcagagaataacagtctccagttagaacccattatctctacatttcgattcagcatagcttttctgtttactctgtgaggcgagcatacgagctcaaatctttccaatgggaagaggccacatggcctctttgtctgctgggagaggaaaatgggccgaatgggcctgccttcttggtgcttttattggacttcaaaaataccaatttttatggttttgggctttattttttccatttttttttatttcttttcttttcctttaataatgctattttttaattcaaacaacaaacaaaattaaatccaaacannnnnttttcaacataaaatatatcacaataattttaatgaaaatatttattttaaaatctaattaatttgtaattcctttaataaaaataatacattttcttaactttttatttttttccattattccacacatactaattattatttataaacaaagataaatttaaattaaaataagaaattttcaacataataatataatgcattaatttcttgaaaatattatttaaaatttaattaattttgtattcttatactattaaatatgtaatattttgttatttaacattaaatctagatgtactcatggagatactgtaacgcccgtacttttttttaaaaatattaattttatttacaagcgttaaacgcggaaaaacataatgtcgcatttt

SEQ ID NO: 40007 - DNA, 1260 bp, Cannabis sativa
  modified_base (1025)..(1025): a, c, t, g, unknown or other
aaaggaggctgccatgaaggccatcaaagaatggggtcagcccaagtctaaaatcactcatttagtcttctgcaccacctccagtattgacatgcctagtgctgactaccaatgcgccaaacttcttggcctcaacacctccgtgaagcgtgtgatgttgcaccaactaggctgttacggtggtggtacagttcttcgggtggctaaagatttggcggaaaacaacaagggcgctcgtgttctcgcggtgtgcacagagatcacaacttccacattccacgggccctccgaatccaatttggaatgcttggtgggacaggctctatttggagatggggcttcgtgtctcattgtgggggctgatccggatgcctcattaggagaaaaaccgatctttgagttggtgtcggcagcacaaacgatgttgcctgacacggagacagcgatcaagggagatttaagggaagccgggttgataattaatttgagtaaagatgtgcccgagctaatctccaataacattgagaaatgcttaattgatgctttcactccacttgggattagtgactggaactccttattttggattgcgcacccgggtgggcgagcaattttggatgcagtggaagccaagctccagcttcgaaaggacaagatgagggccactcgtcacgtgatgagtgagtttggaaatatggcaggtgcctgcagtttcttcatagtagatgagatgaggaagaagtctttggaggaaggaaagtctaccaccggagaaggactggagtggggtgttgtctttggatttgggccaggtttgactgtggagactgttgtgctacgcagcgttgccatcaatgtctaagataattaactagtaaacatatgcaatttattatatatctatagtaccgtgcctatattataagcaattcgtgactttttatttttatttaaaaataaaatagtttattaataaaaataaaatagtttataagaaatgtatggatcactttttatttatatanaataaaataaatctcattaaattcaaaaaaaatacaattaggtttttgctttttacatctacaatagcttttctaaatatacttatgttatttagttggattttattctaaataaaaatttactattatttatatattgtttttttggctcgatcaacttataattgtttgtctccacatctgaatctgaatatataatgtggctatataatcgaattcttggtttatgagaaat

SEQ ID NO: 40008 - DNA, 2910 bp, Cannabis sativa
  modified_base (46)..(66): a, c, t, g, unknown or other
  modified_base (2825)..(2868): a, c, t, g, unknown or other
aacataaaatgttatttctgttctttattaactagtaaatctgatnnnnnnnnnnnnnnnnnnnnntagggcacaaaacccaacacggtctagctcactatttcacatgttgttgtaatagaatggatgtcaggcaaaacatgcagagccagggtaattcggtcagatccagtggaactcaaggagttcaatttcctctgaatatttgtttccgaggcagaggcctaagaggtagggcccgcggtcagggagatgttaacccaccgcaagctgcctaggattggaaacatcggtttgctaaaatgtaaaccaggatcaatgaacaagatgaggaaattcggcatttgagatagcaaggtgctcctacaatacctgcacctgaggtgcagatggttcatgcccctgctatgctagtggggccagttgctgttggcaattgaatggaaccattatatgaaatgttttgtaagcaagcacctctagtctttttgggaggtctagacattatgaaagttgagcaatggctagccgttattaatagaactcttaactttatgggagtcactggcaatgatagagtgacatgtgctactttctagttctataaggatgccctagtttggtggggcatggtatccatcacccagaatgtcactagaattacctgggaagaatttgaagagctgtttaatgcaaagtactacaatgaagcaagtttacagtgcaaaaagataggatttcactcaattaacccaaaaagagaacatgtcagttacagaatatgcaacacagtttaatagactggctaggttggcttcgagaattgtgccaatagattttagcaacaaagaaaaatatctggatgggttgaatcccaagattaaacatgacttgatgatcataacagatggtgctactacctatgctgatgaaataaatgctcggccaacttacatttttttattaaaaaattgaatttatatagtgtttgaataaaaactaactgtttatatccattagcacatttttcaaaaagatcttgggaaaaaagggtctatcgtttagaaaacgtagatcgaaaacaggacaatggaaaatcccattttttttgctctaaaacgcgcataactctttactcgattattcgattttagaaattctaattttgttctcttagttaaatgatatgtgattttaaaagtaaatttaaaaaatttaaaaatcatttggggaaataacttgtcgcacaagttagtaggccaaacttcgtacttaaaactttttgaagtataaacttgaaaatcactgtacaagaataagaaatgtaaataaaccttcatgaagtcttctcttgagttccttaagtctttgagttcacttcgaatcacttttgagaattttggtaaacttaccatttttttatgagctagatgaatttcattactccaaaaacgatttttacaaactaaaaagactaaataaatagcctcaagaactaaaattctatacatacagtttactaatgtatctcttttctctcttttttacaaagcctcaaaccacattacctcttccttagttatctttttagaaccaagacatgaaatctatctttcgtaatccccttaactctatacactaactgttcagccatctgctctttcaccagccaaaccttttcatttcttgccacccaaatattgtatagaatacatgctaaggctgctgacaaaacctacttcttgaacttccctatttttgctttctcaatccatattagtagcctttgtaatgaatttgtacaagttttccattgcagccacttctttacctggtccaagcaatctcgactgtagtcacactcaaaaaatagatgttgaagcgattcttcatgtgtgccacacaatacacaagtggagctatcaagtatgtggaatcgatataatctctctctttgttttaacctattttgcacagcaatccacataacaaaacaatgcttaggcaaactatatcgacaccatacttcgttacaccatctaaccttttcctaaggagccgaagcatcttgtagccatcgataatttgatacttttgtgcagtgaactgcattggatcaatgatttgagtaactttgtttttaacctccacaattttcctccagtaccagctactttgagcattagctttatattgccaccaatttccatcttgtaaatagacattgttgaaccactttagccacaaactatcttttttggaagttatagcccataaatatttcatcatagctgatgtgttccatgttgaaatgtccttgaatccgatcccccaagtggatttagtttgacatagtgtgttctaagccactactcctagacccgaggctgcaacttgccctttccataagtaagcttggcgaatactctctaattctacaatgatcttttttggtaatatcataatttgacttccagtatttgtgaatttccattaggaccgagttgactaagactgcaaatcctacaaatgataaattctcggtactccatgatctaaatctgctagtcattttcttagtaagagatttgcattctgttgttcatattttctttgcacatattggaatattgagatacttgaacgacacctcactcctacaaaaaccagacacatctatgattctttgacactctttttcctctattccactatagtagtgctgatttggctttatttggctgaagccctaaactatatgagaatagtttaaggccttgtaaaatataatagatgtttataaaatctgttggaaattattttannnnnnnnnnnnnnnnnnnnnnnnnnnnnnnnnnnnnnnnnnnnaatatgaactttctaaaccgataaaataaacacatataaagt

SEQ ID NO: 40009 - DNA, 1905 bp, Cannabis sativa
acatcaaggtggttcgggaattctcggatgtttttcctgatgaacttttgggtttaccagtttctaaagccccttacagaacggctctagtagaacttaaagaactaaaaatttagcttcacgggttgcttgacctaggattttcacagcctagtgtgtcaccctggggagctcctgtactatttgttaagaaaaaagatgggtccttacgtatgtgcattaaatatcattaattgaacaaactaacaatcaagaataagtatcctttacctaggatcgatgatcttttcgatcaatttctagggaagacggacttttcaaagattgatctccgatcgggctatcatcagttgaaaatctaagaggacattccaaagatggcattccgcaataggtatgggcactatgaatttttggttatgtgttttggactaaccaatgatcccaaattttttatggacctgatgaatagagtattttaggatttcctcgataattgtgttattgtatttatcgacgacattcttgtatactctcaatcagaagaggagatgaacaacatcttcggatggttctatagcggctttgtgaacataagttgtatgccaaattcgagaactgcaagttttggctatctcgagtgtcttttctagaacacgttgttagtaaagatggaattaaagttgattcggggaagattgattccgtcatggatcagccgagatcgaaaatagttatggaggttagaagtttcttgggtctggcttgttattactattggtttgtaaaaggattctctaagatttcaacgccgttaatcgatcttactaagaagaatcagtggtctgtgttgacaaacaagtgtgaatcaaactttcaggagatgagacaaagattaatcatagcatcagtgctagcccaccttttggtaatgaaaagatcgaagtttattgtgatgcatccaaatagggtctggggtgtgtattgatgcaagccgattgggtcatcgctaatgcgtccagtcagtggaaagaatatgaacagcggtacccaactcatgatctagaacttttcacggtagtgtttgctttgaagacttggcggcattatctctatggagagaaatgtgaaatttatactgaccaaaagagcctcaattacttcattactcacaaagacttgaatatgagacagaggcgttggttagagttggttaaggattacgactgtgaaatcctttaccccctgggaaggccaatatagtggctgatgccctgagcaagaagggtcccagacaggtaactagtatgagttagatttcacctcagttggcaaaggacatggtcagatcaagcatcgagtttgttgtaggcaaacttcataacttgacgttgcactatgatatgttataacgtatttaagttgctcagtttactgatccagaattcgtgaagataagagaagtggttcaagctggtcaagccagagattttactgtgtcaaatactgggatgttgttgtttaagaccagaatttgcgttccaagtagtgtgaaacttagaaaccaaattctttaagaggctcataccactccatactccttgcatcctagcaccaccaagatgtaccaagatcttaaaccctacttctggtggagcaggatgaagaagaatgtggtagaatttgtatctcggtgcctaacatgtcagcaaatcaagtctgaacaacaaagaccagcaggtttgttgtagcctttgacactgttgactttgcttttagccaatgacaatgagtctttttgataagcgaaatgatatgttgtaatgagaatatgtaataaagcaataacaagacactggaattttatagaggtttagccccgagcagtttggtaatagcctaatc

SEQ ID NO: 40010 - DNA, 1484 bp, Cannabis sativa
ttcatgaacaatagcttctttctcgataagggttagggtttcagacatgttttgagctaatgcatctgttgctcagatcaagaaagacaagggtttaaacaaagttctaaaggcacaaaggaatttgagaagatgagagaatagataactccaccaaatccagatccttaaatagaaataatgagaaatgtacctggatattaagagcttgttggagaagcctatagtagaagtccccatccgccccttcaaagatcctatgcaaatcccatagagtataggtataatcatcttcccccttcttgatcaggcccaaatggtagcaaccattaatggtaaagggatgtcaggtaagaaaaaggaataccagccaactgaaaactgaataaatttaaatgatttgagaattaaggagtaataaaggataagatacgaggtgaaagaataataaatgagagtcaaaagaaagaagagactaaaagcacttctcagaaacaagaaatgcaataaatggaaagagagaaaagaaatcaaaacgccaaaagatcaacaaataccactaggatgaagacaaacatgaaaggtaccagaagaaaggaacaagatgtatcccgctagagagttccagaagtaaatcatatattgatatatttttagaagtttttttttttttttgagattgtgcaatttgattatataatactttaatctttattttgattttatattgcatataataaattctttctctaattgttatttttagtcttatattttgaggttttaattattgtacctatttttttgtacaatttttttgttaagcactttgccagaatatacgttattcttcttctttttcaataagttaagcacattgtttaaacttttctattatagaaagaagaaaataagtttttgtttgttaattaaaacttgaggcacaaaaagaataattataggttttaaatgttctattttttccataaataaagtttttataaattttataatgtctaaaaataaaaaatgaatatgttcaaaaataaaaaataaaaaaaataaaaaatgaactatgtaatttaatgtgcttgcaaatatatatatatatatatttttaataaaaaaatatgtttgcaaatttttccttttggttagaagatatgattcctttatatttttgtcttatagcttttttttcttgtttgtatccatatttatatgttgatttttatcttgccatggatgaaatttaacaacaacataataaaatcaatattttaaatacaaacaatgatttagatagattgaaaacatcatatgtagaaatggtttttgtgaaaataaaaacaaatattattgcaaagaaaaattatcatactatagcctaacaaaattatattacaatatattattatactagtgagagtactcgtgctacgcacgtgaggtacttttaatttttcaaaaataattattttaaa

SEQ ID NO: 40011 - DNA, 1336 bp, Cannabis sativa
gtgtaaaactacaccgcaccagtaatttttctagctattaaaaattcttcatgaactattgatatggttaaatttaaggatttttatccaattttattaatttagtaattttttatgtagtgaatgatgctccctactttaatatctacttaatgatattttttgaactttaatatgtattaaatgaaattgtttgaacttttgtatatattaaattttttttactaaaaaacaataaaagtctataaatttaacaatttcaataaatttttttaataacggcattatttaatatatgtaaaaattcgggacaaatgtaaattagccaaaattattatagagaacgaaggtgtacgataactaacctacaccaacctccaatttgacagggacgacgtggcttcttgcccaagcaatcaatgtcttcagcttacgtggctggttgagaatcaaccacatggactcgttcaacgctcgaagtttaataaagctaccaactttccacgtgttcgaatttgattggctgggtgttggtttaggaaaaagtacataaagtagaggagaacgaaacgaaatgaaacacgagagagcttcttcttcgagctatactcagctatggcggatcagagttcgaacggtggcggtgggattgaggtgtgtgggttgcaattcagctacgatggacaacctccgctcttcgtcaatttcgatctcgatattaagcctggatctcgatgtttattggttggagccaatggatctggtaagtggtggcaatcaaaattactttcttttctttcgtgttctgtttgtttcccgagaaattgaaaagaaaaagaaaaactgttgtggcagggaaaacaacgtttttgaagattttgggtggtaagcatatggttggagggaaagatgttgtgcaggttttgaatcgttcggcttttcacgataccaatttggtttgtagcggtgatttggcttatttgggtggatcttggagtaaaaccgttggctctgctgtgagtttttttaaatttctatatgaaatttgctttttgtttttcaatttcatcataattgctttgagcattgctatgagcgaggtgagagtctcacattatttgctattagtggtttttagtgattttttttgtctcacattgttaataagtgaaaatataatactatatatataaaatttatggctattcctctattacaaattaattttgtcatgcatgttatcgtatactcactcacatttatccaaattttgacattttgtaatagttattaagttataattatgttaaatggatactattggagaacattatcc

SEQ ID NO: 40012 - DNA, 1303 bp, Cannabis sativa
agcaacttaaaaaagagtacataactttcatgaaaggagtagtttctccacctttgaatttgcctggaacagcttatagaaaagccttgcaggtatgattttaccaaaatattattaggcactaattttttttttcattatatattgatcatataaatgatgtttttcataacagtcaagatcaaccattttgaagtttataaatagaaaaatggatgaaagagtcgagaaaatgaaagaaggaattgaagatttggaagaagataatgacttgcttggatgggttttgaagcattcaaatctttcaacagagcaaattcttgacttaatactaagtcttctttttgctggccatgaaacttcttcagtttccattgctttagctatttactttttaccaggttgtcctagagctattcaacaattgagggtaaaaaattatttttattattattattattatgttaactttctagctaattataattattaacctttacttaatttaaaagttactatttttacatgtttttcaggaagagcatactgaaattgctagagctaaaaagcaagcaggggagacagatttgaattgggatgactacaaaaaaatggaattcacacaatgtgtaagcaaattttacaatacaaaaattaaaaattttataaagtgattaattttaactaaacttaatttcttctcctccctaattattttattgtgtaaaataattaggttataagtgagacacttcggcttggtaacgttgtgagatttcttcacagaaaggcactaaaagacgttaggtacaaaggtaaggactacaaaaagggaaaaaatggcctttgtttctttattttattttttttcatttttttttataaaaggacttaaaatatgcacaaaaaatatgacacacgttatatagtatagtatagtgctgttttttaaaccagtgggttctataaacattattggtttagttattattattcttttttaaaaaaaaatattaatttaaagaaactttagtttgtgtaatgatcatttcgaaaaaaaatgatgaataatgctacgaaatgtacactacttatatttgtataaatcgaaggccaaaattatgatttattatttatttatttatttttttgtttgaataattttgaaataaggttatgacattccatgtggttggaaagtgcttccggtgattgcagccgtgcatttggatccattgctttttgaccaccctcaacacttcaatccatggagatggcaggtcagtctttcacacccttcatt

SEQ ID NO: 40013 - DNA, 1739 bp, Cannabis sativa
agtaactttttattgtgattaaaattcacatttactcacaaaaaaattatgttatgactaaaaaattatcactaaaagtagcagttttttgtagtgaggagaggccaggaacccactcattactaactggttccgtgctttgaaataatatgtattggttgtcatatgcatgcatagtatggtgatagttgcatattgatgacattgaatcatctaccaaaaattattttttaatgtatataattaatatgagtattgttattgggcaccattagtacccaataccttctatataggtggtgcttcatgattggttctgcgatattttttagaagctatttttttaagttatatgagatctaatactcttacaccaataacgatatgacactgaggagagtgctaggcatcagtattgtcttttaacaattttctaaaaatatataagtataaaatatattattatatatttatatttaggaggctttaattcttgaatttttttcttctactgtgagaaaattacgactaatagtgcagaatcaaaacaactaaactttaaataatcaaacgattagcaatgacaagattatcaaatcaacaacaataatcgaatgtaaaataatgccgagcaaatggaatatataaatctagacacaataaatgcaaaaaataaataaatcaacaccaagatatacattggttcaagtttgatagattgatgtgatctatgactctactccaattgtggaacaccaccaaaatccttctttattgattgagtaagaataggtaaaatacagtcgagacgagattctttgttgagttcttactaagtgtttcaactctcacacttatacctaagaatcttcttcatctatagaagactcttaagctcaaacccaatctctctcttttctatgcacctctctctctacacctctcaatcttttctctcttaaactctcaatttcatctgaactgatttctcaaactcgtgtcgaaataacaagtcatcactaacctgatgaaggtggtatttataagcttagaatcaagatcctaaagttagtaacgacaagatatgaggttgttaagttagttagaaataactaacttaaccaactcctctttgagtgaagcctccacgtcagcttaagtatcagggcttctgggagcatataagagcttctggactcaaggaccaaggacattcgctggtgatgctaccagataggattgagcatcctggagtcgactatccaaaactatcattctaggagagacaactagccaactaaaactccatcttgtagtgaggctagctttcttgaatactcgatccagagtggacatgatagtcatatgagaactccctttcaaactcaacaatcattcaacaaaacacctttcgggattgacaaattagctatatgtttttaaaaatattttatttggattccttgttaaaaattaagcaatttttttttacgaaactcaatttcgataaaaattggaaaagatatgaatttttgaaatttgggtgctatggctgtcgagtgggtgcatcaagtgcaccaggcactcgcacaaccaggcacacgcgtgcggtagttcggacatctcccctatctgaagacatggagcaccctgctaattccgtatctgaaggctgttggcgccgagaaaacccgcacatgcaccatgcacgacgccgaggttcctcggctgtctcctcc

SEQ ID NO: 40014 - DNA, 1736 bp, Cannabis sativa
gtaaaataatttccaacaccatcctagacaggataatgtacagacagagctcttccatgcctctcttgagttgtgtcaccaaagctgaagttgaacgccaaatgataaaagttcatgaaggcttctgtaacaaccatgtcgaggggaaaagcctatcaaaaaagatactccgacaggggtactttttgccaataatgatcaaagacttgaaggactatgtcaaaatatgtcacaagtcccagagattttcgaaaattcaaagggctccacccaacgatctcacggtgatgcagtctccttggcccttcgcagtgtgggggatagacctaattggtcaactcccaaagggtaaaggagtacagtttgctgttgtcgcagtagactacttcaccaaatggacaaaagttgaacccctagcaataatcacctccaagaaggtccttgactttgttgtcaagaacatcatattcaaattcggatttccccagaagattatgttagacaacgacaagtagtttgatagtgacatgttcattaatttctgcaactgacatggcatcatcaagagcttctctatcgtggcccatcctcaagcaaatgggcaggtagaatctatcaacaaaaccctcaaggaaactctaaagaaatgccttgaggaagcaaaaggcaacttgcctaagttgctaccagaggtcttatggtcacataggactattgagaagacgaccactgggcaaactccattagctctagcttatagatacaaagcgatgttgcctctagagctactactactgtcttacaaaagaacaacctatgaccaataaataagccaacctatgacaaacttgcctaagtcccttgacgaagtagaagagaaaagaaaacaagccaacctaaagttgtaagctttccaacaaaaggtagcaaggcacttcaacaaacaagtcaagagtagattcataggagacttggtgcttcgaatggtgttcctgaacactaaagactcaataacaggagtgtttagacctacctaggaaagcccctatcaagttatcgagatatctagtaagggagcctacaagctgcgaagctacaacgagaacatgtagctcgttctcctaccaagatattggaatggagagcaccttcgcatatactatgagtaactagcttataaaacactagtccaagtagtaggagttctaccaacttaacattagagtacaaaagtgctagtacgcacgacgtttttggcatggtgtcccaccgttcttcaatggtggcctctactttgttaggcaagtaggggtagccacttgacatctagaagctaaatctgtgtaatgtaagcttgtagattcaatttatgtaagttgcacagtaacaaacaccaattaatgaataaataacaatgtttatattctatttattgtgtctaaacaacttgctcaaagattaacttcttaaagttattcttttagttccacgtgtgtaccatggataacaccctaagaaagaacccaggcaatgtctatgaaacttggtgaatggcaagtgaccaagagacttatctacatggtgacttgggggcacccatattgtacaagggatcgaactagcacaaggaacttatgcagagaaattttaatgcttagaataagctactaaacctgcctctaagtctgcaggcatacttcagcttggcaaattaaatttggacccttacttgtcaa

SEQ ID NO: 40015 - DNA, 1603 bp, Cannabis sativa
ccaaacttttttttttcttaaaattaactttccaaacattaagagtacaaaaacatgaataggttgccggtttttaatttttcatttcccttattttaaattagacaaatattaaccattaaatatcaaaaaaagaccaatctattcaatccaacggctatagtgctattgcagtttcacatccctcaaaatgaagtgagggacttcataattggcctttatatatatatataatttttctcagtacatcctttggaagaatttgttttaatcatatatagtatatactacaacactcagttgatttatagataaaaataaagcagaaaatgtttgaattttgttcatggtcgctttttaattcaaaatctttcaagcaacatatatatactaagagctttaattaaacattaaacatgaaatttacacacacacacatatatatataagtgttatataattattcacaagacttcactttattgtggtattaattagtggtaattctagactatcctttttaagatttattggaatgtagttgatcaagttactaagaaaaacgaaaaaaggacccatatatacatgtatatattgtttttattcagattatttcatggatggatagcaagtactactacgtacctaccaatatgtaccatattaattataagtagatctagctacaaaaaatttatttataagtaagctaggaaacaaagaattatttctatacagacaaggaaagattgatgtgctgaccaaactattcttctaatacacacccaatttttttttaaagtccctttatgttgaagggtaagtaccaatattattatgtgtattatattagttacagctatattatagtatataaattgatcttaataaattaacttaagcaattttaaattagcgattttattgtattatagtgaattgaactcaatttattttttgcttaataaattattataatagtaaaattaggaataaattaacatatatatatatataaagttaggaataaatgaggaggaagggaaggtagtgtttgtgatttgggaaactaaagaagcatagaagaatgaatgatgttgcttggtgaagataagtttgcttcacatggtcatcaatcatgtttgtcttacttattctgcaaacaaaacttttctaaattaaactaaaataatataaacactaattatatatgaatatttagagagtagtagtagtagtatagtactactcggctgcacacgtcaatgcgcatgccatactactcgcatatggctctgtcttttttgatgtatatgtccatgcccaactctctcgaaactagctacacttacaaataaatgatgctcctaaagacaagaattaattaaaaagaagaagccattatttaataattccacctgtacacatgtgtgactaacatatacaaagaatattcaccttttttttagggtatttgctatcataaattaaaaaggatagtcatttacaataaaagtacaacttgttgattttaatgatccaaattaccaagttgattatctttaggttgattgatttcaagatatgaattttagacttgaat

SEQ ID NO: 40016 - DNA, 2610 bp, Cannabis sativa
aagtccaacaaacaaacatcaaataagttaaagtaaaggaaagagaacacaaaacttaagccccataaagcttgatcaaggtggacaattgtttggacatttctcgctaaatctcctccatggcagctaagtaattgttcatcaagatgacttcctgcacatctatagaagcagaactagaacttggaacatcagtagagagagttgccccaacagaagccttacgaggcttagggaaagctccaaagtactctgaggtttgaaaaatggttccagtgactggtggctcgagagcttcatttgaataggccacgttcttctaagaggaaagaaccttatagattaggttaagaaaaataagcttgtggctacattttttacctctacggaaggaaacaatttgctccatgatgagagaagccaagttaatatttgcccctgtagtgattcaaaaaagaagataagccaagtcttgagacaccattgtcttgttcgagtttggaagccaattgctaagagcaaatcgcattagtgaggcttggtcataagtgagattagtgatgcgaacactttgaccagcaacctattcaactagttcactagtgagttcaataaaaatgcaatcacgatccatagacacttcatcacttttcacaccttttggcagtttcaaggcttcgacaatttcatcttcagtgaatgaaaaccaatggtcgcgaacataaactttaccaaaaaactcatattttttatcaagcaaatcatcaatcaaattagcataaaatttgttaactatgccatcaacataaccttcaaagccagttaaagtatcctcccaatttcgatattgaatatacttcacaatgtcataaactctatgagcatttaaatcaagattcctttcatttttaaacttagggatagcatataaattccaatcacactgattgtcattataagaaaatatgaaatttacagcttgagaggaagagaggttactagtgaaagagctctttatatgttgttttctctttgttgctggtgatgctttgactatagaagtagatcgagaagttactgctatagattttggcaatgatggttcaagatccaaataaacaaaatcttcctcaattttaattgggaattcctcactttcagaagagacaacatcattttctatagaaatttctttattaaatgaaaaagactcagtttttgaatcagattccccaaattacacttccatgggatcttcttcttcatcattactcgaggaggttgagggagaattaagcttgagcttttagtggtaggaataggcatgtcatgacaccttttgattcatgcttccttttcaagagaagcttgctgggcacgagtctgagatgaaggaccttttggggttgatgctgctaaagcatcaccagttgcagcaagtggtgactgagaaccacgagaaggagagctctcagcaaaaggagaagaagactttgaaccatacctagaagtcttgggcaattgggtgtgcctcacagatttttgagcaagagttttaggtgctctcttgttggaagaaggagttaaagatgaagctttcttgactggagctctctttgattcacaccgaggtggaaatgaatcaactggaattgaggcagttgcagtagcaggaggagattgtgacgccacaaacgaggtatttgaaggagcaatctctgtatcaataatcttccatggatgccttaaattctttattttagccatgaatttttgaaagagagaattaaaacgaagtgagagaacaacaaggagaagagagattgggtagaaagagatagattgtgagaataaatgaaaaatgaactggtataaataagaatatgaagaaaaaacaaaaaggaaactaatttgaaatttttaaaaagagaacaaaaaaaaaaaacttcattttcctctattaaagaaaaaaaatccacccatttatttatttattaattttaaagaaacacacaataaaataaaaaagaaaacaaaaataaactaagatttttccaataaaaaaaatcagttaaatctgaaaaatcaatcaagaccaaaaattaaacaaaatacaattaataagaaatcaaattttaaaaggaaattcatcagaattaaccaattagggcatatgttgatacttaccacaagaaatacaaaggacaatatttccttagcctataagtcaagtcacataacttttttttattaattttcgaataaacaaaaaaactagaaagatttatacaaaaaaaaaaatcaagttattctagagcatgcatcttttcttgaatcataaaagggacaaatacaaatgttatgtttttaagataataaaaatttagtatctcaaatactaaccatacttaccaaatgttgagagaaaatagacaagatacataaaatgtgattggaatttttgtttaattttagtagaggagacttacaaactggtacacacttgtcagacattgctgtgtgtagtgaaaataggatcattgtccttggcatgcttttcatttttcttctttttcaatttgatctcgcaactggatgctatcacaccat

SEQ ID NO: 40017 - DNA, 4148 bp, Cannabis sativa
ttagtaatcccgtttaagggattagggtttcttaagtatcttgggtaacgtgcctaatagttagggcgttacaatttaacactcacaaatacgctattattagtcacaatacataatgatataaaataatttaccataaaaattgatctggccaaatttattggtgtataagctttgattttgtgattttagaaaattggttgaaattaagattggtgagtatacaacgtgctaaacaataacaattaatactcaaaccatgcctcgcaaataggtaaaaataagatacataacttgggtattataacaccagtaacctgtgaaagaagggaaaaaaattgacacaccaatgggtgagcttcacacttattgtgttgcttgtttgtaaacatatttacaatcatcgcttaaaaatgtcacataaaaaattcgaaacctttgaatgtttgtctttcttagattccttgttttttttttttaattatcctctattaacttatgtcttgacttcccctctagtcaaccttcttagagtcatcaagagcaagttttgttgtaaatgattctcttgtagcatcgagtttatttgtggtatcattctgagccaatttctcaaaatgtgctgcaagaatagaaaaaaaaataaagatacagtcaagttattaggtaaaatttcaactcgataaataaaactctcatgtacgattttaaaagaagcaacaatattgattggtaatgaccagacttatgtttaagttagattacctaaactaaaaattttgaatcaaatcaaaacctcaaatagcatacttacctcttttgcaacaacatatgtatttggaatcgaaccaaacagaaaatactaacaggtaaaacaaaaattatgggttaaaaatagttatgatttttttcttccaataaaaaactatgagctatgaccctcgtactgttataggataggatatatataataatattattaggatgaggaattcaaaaggcaagatagaaatgacgaaataatactcagttacaaaattagcattgagtattagtaattaataatttcagttacagaattttttgaaagcatttcagttacaaaattttagtttagttacaattttttttgaaagcatttcagttattaaatttaagtttcacgtgacatataccttatttattagatattgtgttgttatagcttataagtggaaaaaaataaagcttaaaaatatatataaaagtaaagaaagaaagaaaaagtagctcaaacaacttacaaaaaccacaaaatagaaaaattagattgctaagttgataaatcgccacatcatcactctaaacaacaacattatagatatatatatatatatatatattacattcaatattgtgatattcattaaatccacttatttatgtaaggactgttacattactaatttatataaaaaaaaataattaatttaaaaataattaaataaaataactttaatactcttatacatctactttaccaaattaaattagaaatatttttgtcaatacaccacttattttgttatattttcccacaaaactcaataaaataacttttattctaatactttttccaacaacaaaccaaacatcacaatcaattttcattactactataatataataaagtaactagcaacttaacattgcttgttagtgtatattaaaagtagtatagtgtgggctttgtgtgaaatagaaaaaagttctatgtttaacctggctctccacatcctcaatcattctttcaatcattctttttgatcctcctttgagtggtctagaatttttgttcaccttgtattgtagaatactcttttgctctcttcctattcttttcgataatattaaaaatttgactaaaataaaacactaaaaatggacatcataacaacattgaaaatgtattccggggatctctgttataaaatttttacaaaaggaatatatacgacaacaactcaaaacgcaaaatcaagatacatagcagatgcccaaaacaactcctggcaactcggcacacaggctggtggagtcaatatgtaaattgttggagaagattgtcatctcatggctgctctagcttttccttgcccttacttgcatcctagagcacttgtgagtcacatggactcagtaagaaaagtaacaaagaataatatattaaataactaattatacatttcgctattaaaaaataattaaacaataacattcaagagtgggtaatataacgagccatatgcatggaaatagaaatgatcatatattgtattgcctatttaggcaagcccgtgtcataatttaacatcatatataatatcactgcgccacctaatcaggtgagcccatgccacaacctggtaccaatatatcgcatcgcctaatcagacgagttcgtaccatagcctggtactcatatgtcactaccgcccgtacttaatcaggtatgccgccagaaggaaacctaacaaagagattagacacacgtcccctgctcaggtaagtgtgtgtattctctctgtccgtgcaaaaaagcctttgtggatatcttgggggtcgaccggtcccaggttgatttctaggatttcttccatcattacgagggatttcctggtttcctagtcgcagttgtcttgcatctgcattcatgcaagatgactcagttacattagtttgttcctttccctagtttgaaaacccatgggaagttcctgtaacatcacgttgatgctcctgatttcttgtattacttgtgttgggtggattttctctatccattgggacatccctcgcattctcaagttgttcttcctgagcatttgtgggattcccttagttattttcttgcctcctggtcttggaacctcgaggtcttcctcgtggtctccttatagatagatcaggttaagtttgaggaatggttccttgtgcagccctggcagccttgacttctcgctccaactcagcactttgtcggtttgatttagccaggcattgtcgaagttgcctattttctaattctactagtggaacatatctagtaggatcataagcatcttcacttcgtctctctaggatttgttcaccagcaggattgaaatttccatcgttcctcccagatggtggtttttcaatcgtgttggttctgtgcgatcctaaaggttcttttccaaggcgatggatagtttcctctggatggcttctgtcatgtgggatgttatccgccataggtacaaatttgtaattgtgtttataatgagggtttttttttttttagtttttatcactaagctttcaaggaaagcaccaaattattaacgtagattttcgttaaccaaatatatagccttttacgtaataaacatactacataatttaataataatgcaagatattttatgtagttttgtagttgaaatctacactccacgagtcctacttatttgagatatttatttggatacagagtaaaattctcaataaatgtaaataacagttttttctctcaatttttctgtccctttctccctggattctgcccctatttataggtgtacagaatgacaattatttttattaggatctatttatttacaatcgctcataaaatgtggacatatttcacgtttcatttttatgcacatgggataatatctaataactatctaactaatatttgtctttatccttaaacgattatgctgactaagaaggttatttctcgctaaatgtgagttgtccttcttatctgtctttataggaaaaaatgctaagtataaatatgcttcccctcactgtgttcttcatatcgtaaagatatttgcgaggtggttaccctatcacgtaaacggcgagatggaggaatgtagttaattcctccatgcaccaatatgtgggtcaatgagttgcaagcttttatcccaaatatgtgggtcaataagatgcaagctcccttgtgcgctcttattatatactctatttatcttgagatggaagtattgtcttgtcaattacatctgttattagttattattcttatctcgcatatgcttatgtagtcagcgagtttgaatatttctatcaactttaattaattgaaacga

SEQ ID NO: 40018 - DNA, 1600 bp, Cannabis sativa
tgctcatgttcaactcctctccatgcactcaagggaagtgctcatattgttggccatcggggccacaggcaaagtagtggcaccactctcctctttcatcacaaaagtattttcaagtatgaagtggttcgttggtccctactagccggatgtcatagctgccaaatccaaagtaaagtcttcgattacccccttcattttgagtagtaggtccatttccctttccagtgtcttggggcctggtgccctgagagcgttcacgaggacttggtggaggagtcttattggatctcttgatatttcgaggtttctctacgttagttatagggcccattggttggcacccatgattttgagtcctttcagactcttgcttgaagtttgcttccctctggggggcctcaacacctggtgtttgcgtattgcttgcaaggttaccatgcatggtagtagtgtttcgtgcatttagggtttcctcttgagcattagttcccatgtgaccagttggtcgatgggggaatatctctaatatcctcagaaagacccctacaaggggatggtttcgtgacagagtgataggcttctctgattcattgagataggttagctctctgctgttcgtgctcaacttgttggctctcattgttttgccaaatttccacgaacctgttttaaaactactcgtgttgtctgtcaagagagtcttgtagctgtgatcgtagattagccataattttgctaagcttttcaacccaagtatccccgtcattgggtttttccaactccacccgtggctctctaggtggaatcttctcgttggctcaagcaccaggagcatttagtggccttcggggacgagctaagtagctggttctgggacctcctcttggcacctgaggtgtagtagtagtcttagttcctgcttcagtaactagcatgcccgtagtttgttgactagttgttaggactcctctgttgatgcttgaggagcatgttgcaacaatcttgtaagtaacttccttgagctatggttctcaatgaaagcaccaaaatgttgactcactaatctggacacagacttctaagccacactcgctcgctagattggcgaaaatgatataattgttaagtataaatagagagacacaacaatttatagtagttcactccttatatcgcgacagtaatgaagctacgtctacttcgaatttttattctcatgagatggattacagaaaaatagctaagtctagatgctctaatttctagagagagaaactaaagagatatgctcttaccttgtggaaatgagctagaggagctctccttatatgatattttatgattttaatgatattttctgagaaattgtccgagtatcttctctattttcagcaaagtttaagattcaactatttttgggaatcaaacagaatttttgaagggccataaaggggacccagcgcccaggttggcacctagcactatgcccaacacctatattgtcaacgtggactgtttccaatcaagttctcaaaaaagtgttttgggcattctttccgtcatcagaattaatgaagatttaagaaaactcagggag

SEQ ID NO: 40019 - DNA, 1706 bp, Cannabis sativa
atacatttacatggtaagtatgcttattcttcaagtattcttgctatatagacatttcctcttgtcatgttacaaagttcagccatagcagttagattttttcgattgcccaattggtgggaaatgacaattgttctgaattcgatatcacacctatttgtgttactattctagttcagttcttgaaagaattagaaaggcgttttcaaagagaaaattacaaagttttaaacttttcgagacagtttggtatctccccgagtaatcttttactccctttgttagaaacacaattctttcccccttacaattactcagcctttctatttatacactaacacacctcctaactggtgttaactaacaccttaggactaataggacggctccctcaaaacatttcatctcagccactaccgacatgacaaatcagctaccgaaatcccaaaccaaggcctacctagtttgcttacctagtgattattggtactttcatagaacaataatgatgtggattatctataatgttgcattgggtaaaagctccatacatttctgtgattgtttctcttttgagtatgtaaaagtcttgatcagagataattattgaaagacagatcgatcagatatctcttttaacgaattgtctgattgtgacagcttattaagacttgtttagaaccattaaaaataagaagaaaaactcactttaatttcattggaaagtcttgcattatctctttaacaaatttctccaatgcaggtattcgttatcggctgcagttacatttatggctttcaagagagtaagaccgaaaaagagcagaagatagcaaattattcatatggtaagaaattcatcttcctctcctttgttatgagagaattgatttgcaactatacttgctaattccatttcttcatgttaatgtactcatcatattgaccatattttcttttccatgagtaatatttagctttagctcttgattgaaaaggaaaacaactgatcatattctacaatggattggttggtttgcagatcttgaaccttaggatcccaatacagaattcgatatttttataatatgacaatgtacattataattatagtaggcattttgtttgttttcggaaaattctaaataaattatggtactgaaaataagattcaaatagttacgtttttttttattacatatacaactaaattatttggaatttcataactatacaatattatgtatttgtaaaaaaattgagatataatttctctaattaccgaacatagaaaatgttcctatgataagagcaaaagtgatgttcttacttaagttctctgaaattgtattgttcttaattttgggagccttttgtatagaaaaaaaaagatataagggtgaaagtatgtctagttgacactaaatcgcgacccttttccattttcagcaattttcgatgcagaaagatttatagcgaaagacgagaaaggttaaagagaaaggtgtacttactacttacactacattcgaactttcatgtcgtttttttgaaggtttgcggataaaaaaagagctccaaataaataaaattttgagtacaatatatatgaacacacttataccactttccatgaaatttgtggaaaatggccaatttcttgacaaggtgatgatgatgaggcttattgttattgcccctactcc

SEQ ID NO: 40020 - DNA, 2283 bp, Cannabis sativa
ataatgactactacagtacatgagcatagcatcgccagtgattgcctctcgtactgcagtgaaaatttcaacatgtcatccgaaaccacttgcctgggcttaggctgctgctacagtcctgttcccatgcatctgaagcttttttcactagaaaccaccagcgtgggtaaccataccgatattcataactttaatccttgccagtatggattcttggtggagtagaagagtttcaacatctcccaaatgagactcgattttaggccccacaagtaaatagggtcggccctaagcataggcgggctaggcccgtgcctagggcccactcattttaggggcctagataaaaaaaaatatcttttaaaaaatatacatatttttttaataattttttaaaaataccatttatctttatagcaagggcctaaatttttttttcctatggcccatttcagctcagggccagccctgctaaaacctattctatatataacattgtctgtagtgtcccattaatataagtgtgacactatagactacaccaaatatatttttattactttttaatatttaaataatatataataagtaaactttttgtatttatatattttgtgtttatttataatataataaaataatataataataaaaaatataattttagtgttgtgattggaaaaaaaaaattagtgttaaaattctattatttctgtgttgatttaataccaaatttgatatttaccaattgagatgcccgcaggacaagtttaatggggatagtttttaagttgcttgttaggtatagggttaggattgggatgaggtgggggagagaaattaaaaatagaaatttgactaaatatgcttacgttaccttaaaaaaaatttcctaaagtttttatttttaatgaataagaatcgttgtattgctcaaccaaaactttacagtttacaaccattttcctcaatccactttcctcatgtctcttagtgctctacactaactaattacatttacaattaatctcaacaattcagcattacaatgctacagtcggtacttacaaatctattacaattagcttcctaacaaccattgtttatcctcttcagtaagcttggttgacagccccaaaatcctgagtttacatttctgttgtatccgttgcatgatgacctttgtatgccacagtttttgatgcgaaaggacatcatttctggctttccagatgtgatacaccagcccagcaagaattgttctcaaaatgctcctcctagcagtcggtactgctttgtttttgctaatgtactttgctagctgttgcatattagttgctgtcgatctccattgcagccaagaattaatcccctttaagcactttcggctatactcacactcaaagaataagtgattacttgattcttcttcttgtccacaaagtaagcatgtcaaatcaatggttgtgttgtatttacctatcctctctttggtgtttaatcttccccagaacacaagccatagaataaacttgtgcatgggaatgattaacctatcccaaacagtcttggaccaagataacctttccctgttgtcaaaaagaagctgataggtatgttgaatttttccctaaacttatacttaccaatatttgtagcataaaaaacaactttagtgttatctccaaaataccttcccattcacatcacctccctctctcttcccattccttcttcctttcccactcggcctgtactccaccaccacaacaatttttttttcttctcttcactcattttctacactacaagctactacactacactacaatacaacaagctaccacactacaagctacaacactacaagctctcatatatgaagcatcaatgggtaaataaatcattttttaatcttatttgttgttgttatgtattgtttagaatgttgttttattgcttgatttgtgggttgttgttgttattttgctgttttgtgtgttttaatgcttgctacctgtgaatactgcatttttcctggtttctgctttttttttgcttggtctggtggggtccgattcccacccgatggtggtctgatgtaatataaaagtgggacgacagggataaagtcccacccgattgggctcgatggggggttcaaaaaagggttttgggaaatttttttgatctggtccaataggcccaattaggggccgatggggtgtccgatgggcccaattagggtcaatggggtgtccgatgggggtccaaaaatgggtt

SEQ ID NO: 40021 - DNA, 1329 bp, Cannabis sativa
cccgaacccaggacccaaactcagacttagacacagaatcaagcccaaacctagaccttcactcggacccgaactcgaaccttgaccgggattggaagccagaacttagactcagaactaaacaagaactcagatcgagatcaaaacctgggactcggacccaaacctgaaccgagacccaggaccctaacccacacccggagaccgatctagacatagaccgagatccagacacgcacacaaacacggaccaggactaaaaccccgacccaaactcggaccccgacccgaactcgaaccaaaactcaaacttagaattgccactagaactggaatcagactaagactaggactaggaccacaacaaggtcccatactggaacccaaaacccaaaacaaaaacccattccgagacccaaacttgaaccgcaactaggacccgaacccgaacctagaccaggacccaaaccaagattagaactaggaccttgagacagaattgggatagggacctgagcaacgaacttgaacctaggatctaactcgtgacttgacccccaaaatggaaccagtccaagacccgagatcaggatccgaactttgacctggggcttggaccgaacccgtagcgggtgtctcgatctgggacctagccctggacccgaaccaagaccaggacccgaacccaaacccaaacctgaacccagtcccagacaaaaaccttgaccaaaacccgtagcctgtgactcaaaattggaaccaaaatcgaaagtagacagggacccgagaacgggactagaacaagcacttggacctagacctggaatcgtaaccggatctagacctagacccaaaaccgtaaccagactagtacccggactccaaccaagacctagacccgaacctggacccgaacctggatcccaaccaagacttggactcgggagccgaacattgacccaaactcagacccaaacattgaaccagacttgggacacagaatcggccgggacctagaaccgcaccccagctttggtcctgaatgcaaactcgaacctgggactcgcgacctgaattagaaccaaaccgggacacgtgacagggatccagatctgggactcagaccaggactcgaactcagaccaggtcccaaacacggaccatgaccaagacccaagactcgaaactggaacttgaacaagaaccgttagaccaggcccctcgaaccagactaggaccgtgacaagtacctagagccagagctagaacctaacacgcacctagccccaagcaaaaaccgagactgggactcgagcccagacacggtcc

SEQ ID NO: 40022 - DNA, 2106 bp, Cannabis sativa
cccagggttctgtccctatttatagatgtacgagaagacagttatttttttgggatctactcattcataaccgctcatgaaatgaggatatttctcacgttttatctttgtgcacatgagataatattaaataactgttcaaccgctctttgtctttatccatagatggttatgctgagtgtattggacggttcttgccaagcacatgttctctttcttaattgtctttgtaggaaaaatattaagtgttaagatacaatgcatctcgtgattctcctttgccgtttgaatggtattagcgaggtagttacttccatatgtcaaaagcgaggtgagtaattgttgaagttgtttccactccttaacatactcataagtatgtggatcaatgagctgtaagttcttactcataagtatgtggatcaatgagctgcaagcttttactcacgagtatgtggatcgatgagctgcaaactcttttttaactcgttttgaacaactttcattgtgtattctatttatcctgagaaggacttgttgtcccaccaatctcatttaatagttattattcacatctcgctatcgcctatatggtggcgagttcaatttttttattaactgtaattctcgaggcgagttatttaatgtgcatttaataatgcatgacttgagttggttcatattccagccatggtacacgtgtcagcttttaattactaacaaaaatttaaatataacaattgctccttaaaaagtactttgtatttaataatgcatggcttaggctggttcatattctaaaaatttacacaatagcattgatgtcatttatcttttttaataaaatattaaagctaaaaagttattgttgctaaaaattaggatatatactaaatcataatgtgtgagatcatcattatagtatttttgaagagtactatatcattggagtatgtttagaagtaagagagctaaaaataatgtagaagagagagaaaataaaatattatatttttgcatgatcgggagatttttagcattcttaaaggatatataacattagagaaatatagacaacaataaaataaaagtttatttgtactgcagatccctaaactatataaattttggcaagctgatcctcaaattttattttttggtaaattggtctccaaacttttatttacttaaaaacataaagtcctcattcttaaatttggtatttatttatttatttagttttgtactaattttaaatatttttatattaatatacctcatcaattaaaaaaatatatttttttttttatttacatgtattttttttaaaatatgtcaaataggaaaaaaaaaaaaacaaatcaataatttttttttaaatatgcccaaatcagaagaagaatatatatattttttatttatatatttttgttcaaaaaaaatcaaaatatattttgaacattataaaactataaatatatacatgtgaactaacaatttatcttatgaacaaagcttacacaaaatattccgctaaggaatagttcacatgcacttcaagcaaatattcatcctcattaaatattaaatagttgatctgcatgcatccagaaaaacaacaactatatatgtcaataaaaaattttagatgctataattattttctcaactattagaggaggattatttattaaatatatgaaagaaactaatataaaatttatttacatctgtagaaaaatatcaatatctaaaagtaagaacttaatattactaataaaataaattttttggatcaatttaccaaaaattaaaatataaaaataaacttgacaaaacatttacagtttaaggaccatctaatcaaaaactacataacaaccattacgctaataaatgattgtaaaatatcattacgctacattcaaagaaaaactacataacaaccatgaaatactaaatcctagagttaatcattgtagtagtgaacaacctcattaaccatacatggcagcacaggtggaacaaccttcaaagcagagaaattctggaacaatatttcaacatctttcaaataaacacacacagaaatgtgtagatattgaa

SEQ ID NO: 40023 - DNA, 1501 bp, Cannabis sativa
aagtggttacagaacgcatttttgtttttcaaaaataatttttttaaaaacaaaagttttactttcattttgataagaagaggctcaaaagagccttacttcactattattgcttgctctaaatgtagctaaagttttagctcaaaatgaaatgaggcaaaatagagaagattttatttgatttgatagagcaagtttttaacccaatttttttaaattttcaactaaaaatgtattttacctcatttgttgaggatgctcttaaaattgaaatgaggtcatgctttaattattttttttttcaatatttatattcgaataattagtaattttatctcttaaacttttgacacatctgatcatgctccttaaaatatacgacttgttaaaaatttatcctgaacttttacatttatagaaatttagtcattttgttgggttctgttacattattctgtttaaagctaacgtgtctttgtaaattcacaacttcgccgttaaactttgacaattatcgcattgtaccccctctaaataaaaatttgaaagattcaacattttttttgtaaatcttaaaaaattaatttagatcttaaaaaaactatttgaatgattaataattttttttttaaaaaaaaaaaagaaatcaaaattttaaaaataattatgggatttaaaaattaattattttttattaaaaaaatctatttagatataaaaagtatattaagaattcaatttttgtaaaaactaaattttacgggaataagtttaagtctattttttctcaaaaaatctagatttatttaagaaacataatattttttagtttaatttctactttgtaaaataatatatatttttattaaatttctaattatttttccttatattttaatatatgtgtttgtaaatataaataagtttgattttctattcgcaaaatcttagtttgtttaaattatttattgaatttttaataattttggttcaattttttaaggtatgtatttattaataaaataaagtttaaaaattatttcttaagaataatttagattttctaattaaaattcatatttttttcatcaatttatttcttttatcaagttttttgataattttttttaattttcaaattaataaaaaaattataatttttaagaatgaactttttttaataaaatggggcaaagtttaatgttggtcaaagttaagggagtaaaaatactaatttttaacagtagaagaaacagaacctaacagaatgggcatgattatgtaactgttattttaaggagattttaaaaagtcatatatgtgagggtgcatgattaggtagtgtcaaaagtttaaggagtaaaaatgataattattctttatattattatttcggtggtacgtatttttaaaaggtcgcaaaaaatatattatatcatgaccgcgcataaaaaatataggttatgctatgtaacgccctaatgctaaggcacgctacagt

SEQ ID NO: 40024 - DNA, 2965 bp, Cannabis sativa
  modified_base (2934)..(2940): a, c, t, g, unknown or other
aaccttgatggcactgttgaaaggttcaaaccttggttgcaaaaggattccaacaaacacctcgattggatttcacagacctatagtccagtcatcaaaccgtgtacgattcgcattatgtttactcttgcagcctcttttaactggaaaattcaacaagttgacataaataatgcttttttgaatggtgaaagaaaccatatacatgcaacaacctcctagatttatagattcaaattttcctcattatgtctgcaaacttaacaaagccttgtacgggctaaaacaagcacctcgggtctggtttcataaactgaaaacatcattagtacaatggggtttcataaattccaaatcagacacaagcttgttttcataaacaaaaatggccaactacttctactacttgtgtatgtcgatgatatactcattactggtgtcaattcctctgcagttaacaaaatcatcaacaaactacatcagtagtttgctctcaagaaacttggccttgtcacttacttcttaggctttgaagttatgagaaacaactccaccattcatctcactcaacaaaaatacaccaaatacctgctcatcaaaacaaatatgctagattgcaagcctcaatctacacccatgtgctcaacttccaagttgtcaacaaaatcaagcacacctttggccaaggcaatagagtaccggagtgtaattggtgctttacaatgcctctgttacaacagacccaacattgcctttattgttaatagactaattcatttcatgcaatgccccaccactgatcattggggagcttgcaagagagttcttcaatacttagcagggacaatacatcttggactcaccttcactccattaaataatcttgatttgtaaagatatactgactctgattggacaagaaactttaatgatcttaagtctacttttggatacaccatctttcttggtgggaacctcataagttggtgctccaagaagcaacatgttgtggctcactctagcacagaagttaaatatcgtgcacttactctatctacctctgaactaatttggatccagtccttatgcttagtgaaatgtcaacaccattaccaacctgtcctatcctttggtgtgataacttaggagctagctccttagcctcgaatctgatcatccatgctcgcacaaagtacatcgaaatagacaaacctatttgagatagagtcttagccaaacaattggatgtgtgttatgtggaatcggcttatcaagtggcagacatcttcaccaaactgttatcaatcttcgcttttactcattttagacacaaggtgacacttagtgttcacccgtgtcacttgaggggcctattaaaaatgaggattcagacacaccaaaaagtttgttagaaaattaatttcatttttttaactaacttacaactgttgtaacagctctaaagagcttttctcccttttcttgtataaactctgcctataaataaagttcaggggtgctctgagtgtgttgagcagtccattttctccatcttcatctttctccatttttcacttttctctcctttgaatcaagatcaactgttcttgatttttggtaaataatactttttttattattttaaaataactattgcagtattgaaaatgcgttggggagttacaagtttgttgttgaaatttactctaggtgcaccaggcaacatgtcacctaagacacttggagcaaattccagcaatgattttaaggagaacttaaatggttacagtctcattataacccccatattaccttaattaaatcccttaagatatattaatgtaactataagagccatgagtttttgaatgttgtttaattgtgttttcagttttaaaattgtgtttttaaaagtgagaataataaactattttttgtcattttaaaatttaatggttttagctcaggttttttaaatctatctttagattttttttttaaaattgataatgcaatgtgccttaataaaattgttgtaaaatagatgttagattgatggaggttgagatttaacatccaaacacaccaaatcggacgaagctagtgaaaccaaaatcgccttctaaaaagcttagttttacacttcaaacactaaaataaaattgtttcaatgtcgagaatgtatgtttttggatattaaaattgaaagattttttttttttgaaaaaaaaaatgaagaaatacaaccaagaatcgagcttatgacagtgcgatttaagttttccattgtaagtttagagagagagggctgagaaaagagagaaggaaagaggaagaagaagggggtttcaacttgcgtttagggttaattaaagccattggctttagttattttgtaataaccgaagccataagggacatccgtcaaccatcacgtgcatttatggcttcggttattaaaaaatagttgaagccaaaggctaaatattcacgatttcttatttttgtccaccacaaaacaaaaaactgaaggtataggtatgggtatacactatagccttgatttttataatataacccaaaaaatatattttaattgttgagcaagaagccgaaactgataaaaaaaaacactccttcaatgctatagcttcgataacaaataaattgtagtagtagtagtaatgggcacaataaattgtaacctagctaaccaataaagcaagctcacctaataacttagaacaattctaataatgaagcagggtcgccaataaggaccacaagctagctgtaatgaagggtacaaataattaaggaaagagtaaacaaaagatgttcattcacatcatgtaaaaggatattaatgtttgtacgataaaagaaaaaatattgataacaatctttgattatgtcacttttaccagcacagtnnnnnnntgcgctggtaaaagtaacttttacc

SEQ ID NO: 40025 - DNA, 1876 bp, Cannabis sativa
tataaaggcaaagaaaatttaactttgatggtgaaaactgacacaactataaaataattatgccagattttatatgaagagttggaggttgacttgttggttgaaattggagagtttttccttgaacatggaggagcaaatagttctaccaaatgttattatgaaagaatgccaactaagagtgttcttagagataagagtgtcaatatcgaacatagaatttatgccattatttgtgaccaaagtaagaaaggatgggaatttggagcctaccccactatcctctcccttgaagtgtggtaggatcttttgttcttgaaaaaaaagaatattagggttggtgttaatgaggaggttcctaccaatgtagatcaacaacaagaagtggcaggattcagtcagtttaaggagttcgatactctcttctacaataatgatgctattgtagatttaaatatagatgatgaacatgatttggtagtcaatgaagccgtagaggtacctttcttgaggttagattgtgcaccaagcaactatggtgcacaacgagaacgataaccccgtaatgaaaagagaaatatacctagaactagcagtagttgacaaggaagatcagaagaacatgctcctcgtcatgcactagtctctacgttcttgtctttcaaagtttgtaccaatttgaaagctcttatgtggacaaagaaatatataatagaaaatcatgagcttactacttctttacaaagtaaagaattaggggagatacaacttagcaatgtgtacgaaaataaggaagaattgagacaaggtagtggctaggatcttcaatcaattacaattttaagtggatggtgaagaaattaggcaccaatgtgttgtacgttatatgcaaggattcagattgcaaatggagattgaggggaaagaagaagatacattctaacaactttgaggttgctatatttttcaataaacacacatgtaatatagatgtaaaaaacattcagatcaccgtcaagtaacattgtggaggttcagggagaggaacttacgtatgttagggggtacattatcgttatcctatatgaagctacctagatacttgtacatgctccaacaaaagaattcatgtaacattactgacctgcatgtagaggatgagcagttcaataattattttttgtcacttggtgcatgtaggagggaatttactttttgtcgtcctgtcaccagtatcaatggcacattcttgaagacaaagtgtggcaacataatgttagttgctatggcatgcgatgcagaaaaccaattgtttttattgctttatgtatgagatgatagtaacacacatattatattaattagtataattttatacatgagagttatatatattgttggtataaaataatatatgtataattaatcatatttagtgtatatgataataataataatagagataatgatagaaaagatgtattcatcattttttgaatggagttttggaattgattttccattagtggtttttatctcattttataagatgagaaagtgaactatgagagttacacttatgagatttgtcttgtcatagcaagaacaaatatatcagaagtggatctaaacttgtaaaatgagtcataattggaagaacaactttagactcaaatcaaagtgaatcatggtggattcaaaaattgtgaaaagataacaaagttggagaagcaattttgaatcttaaataaccaaagtggtgaacaaaattgatgaaaattttgttaattttggtataatatttgagttaatctcactgaggagataactttcaaattatgggtaaaaataatcacattatttttttaaatggtga

SEQ ID NO: 40026 - DNA, 4331 bp, Cannabis sativa
gacataggaaagacccaagaaaaacgactaaaatcatcaatgaagacaatatagtacttgtagttatcttttgaagtgatgtgggatggcccccatacatcagtatggataagggccaggggctgatttgcacgagaagtggacaaagaaaagggaagcctgtgactttttccctgttggtaggcattgcaaaattgcaggcctttaaggctatgaggaatattagcttgagacaacattttagtgagtgtagatgatgaaggatggccgagtttgcaatgccacaggttaatgtcagtagacaaattagagttgtacacaagagctttatgtgaaaagcacaaatcagaatcagtatttttattaaaaactataggattacaagcttcttgaatacaagattgattacaagattgacaaaaaggttacttagactgtaaagagctgcaagactcaacaagatgacattgaagtgaagtgccaaacaagcccgagccttcatctccaagaagataaagcccatctttaagtgtccctttgacaagaactgctcccgtttgcttgtccttgacaaaacaacacgttttatgaaattcaagaaagacattattgtcgttagtaagtttggaaacactaactaaatttttagttatggaagggacatgcaaaacggattgtaaatgcaaaggagaagaagacttagagggaatgaaagctttaccaatatgggagatgacaagcttcttaccatcacctacagcaacagtttcttgtccagaatagggtgtggtggtgtcaagaggagcctcactataggagatgtgatgagtagctccagtgtccacataccaaccttgatcatcaccaaaatcagggatggtttgagcaacgaaggctgaaggatcatagtcaagaacatgttcagtaaggtgagcttgtggggaagaattgccaacaaccgatttgggggttatccaatttttgtcaaacctgtaatgacaggttggagcagtatggccatagcgcatacaaacttggcacaatggtctatttggattgtgagatctggtgtattgagatggatgaggaggttttgagggaattctggagaaggaatcagaggagggacttctgccattattgttataaggtctatatcctccatttcttgaaccaaaagtgagatttgctgccatctttgttgaaagatccatcattgtagtgtggcgttcgagtcttgtttcatgagacattaataaggcctgaacttcttcaagggagagattgtcacttcgagatgtaatgcccgataccacggagtcaaactcgggtccaaggccattaagcagatggagaaccaaatcaatatcagaaataggatgaccagctacagcaagagaatcacaaagaactttgattttgtcaacataatctgaaattgattggttacctttatgcagattggacaattggctcttgagttgaagcaacctagccttggactgactagagaacttttgttccagggctttccaaacaccattagaactggtgtaacttgcgactgtgccaagaatgccttctgtcatcgaagacctgagccaagaaagaagaagctgatctttcttgcgccattgttgaaaagcaggattcggattaccattaaggagagatcgaggaggagattggtcagtgagaagaatctcatcgagttcgtggccaatcaccgtgggaagaacttgagacttccaagcaaggaagttagtgcgatcgagtttgatggtgagagaggacgtgagagaatgagaaaatggattccaggaaggagctgctgtaacagagggattaacaccagaatcggagacaccagctggagacgagttgtcgccagaggaagccattgacagaggtcagtggctctgataccatgaagattgagaagcagagaaagagagagagagagaacacaaggaatgctttgaactcttacctctacactgaggcaatttcctttatttatagagagatttcaatacaattacaaaacagaaattctgttacataacagaattgatgaaatgcagaaagaaagcaaacacataccaacaaactaatgaaacagtaataacagtaaaaaccaatttaactaacttggttatcatcccccctcaaacgaaaaggggtagaaaccactttaagtttggacttcagatacttaaaccgatctttaggaagacttttcgtaaaaatatcagctatttgatcaatagtaggaacatatcgcacttcaagttctttgttgagcaattgatcacggacaaaatgttggtcaatctctatgtgtttgcatcgggcatgaaaaatcgggttggcagctagagaggctgctccttgattatcaacccaaataatgggaatgtcagctagtgcaacttgcatttcagtgaacaaggatcgaagccatttgatctcagcagcagtgttagccaacgcacgaaattccgactctgtagatgatctggccacaacgtgctgctttttagcagaccaagaaataaggttgggacctatgaacacggcatatcctccagtagattttctatcgtcaaggcagctcgcccaatccgcatcggagtatgcaacaagagacatacgagaaactggtctgagtaaaataccatcagaaatggtaccctttaagtaacgcaataggcgtttgcaagcctcccagtggactgtagttggggcatggataaactgtgacaatttgttgatgatgtatgcaacatcaggtcgtgtgagcgtcaaatattgaagggatcccagggtacttcgatacagagagacatcatcaaatggagatccttcactgagagatagtttgtgagctgtagaagtgggactagcacagcttttggcgccctcaagatgaactttggtaaagtaaatcagtgatatatttggtctgagacaaataaagaccttcactatccctgtgaacttcaacacctaagaagtagtgcaaaggccccaagtctttgagagaaaaagcagagttgagatcaactattagcttttgaaccagttgggagtttggacctgtgacaagaatgtcatcgacatacaccaataaaataatcaaggtagaaccggttccatgaataaacagtgaagtatcagcccttgatgcagtaaaaccccaattaaaaagtgtagttttgagtttatcattccatgcccgaggagcctgctttaggccatacaatgctttgtgaagtttgcacacatgatgaggtttggaggggtcttcaaagcctggtggttgaggcatatagactgtttcttgaagagtgccatttagaaaagcatttgccacatccaactgtcgaatttcccaattgtatgagatagcaagagtaagaaccaaccgcactgtgacaggtttaattacagggctaaaagtatcttcataatcaatccctggtttttgaagatatcctttagctacaaggcgagattttaacctgtccaaagttccattcgcattgagtttgaccctatggacccatttgttgcctatgagatgcatgtgaggctcatagggaacaagtgtccaagtcccttgagaagtgagggctgtgaactcattgttcatagaagcaaaccaaccagggtgtttaagggcagatttaagtgattttggttcagtaggcaacaaggattcaggcagtctgtgtttggtagctaagtaagctttaggcttgtaaattccatgttgagatcgagtgatcatggaatgagttcttacaggtgctgtagtatcaatgggaggagcaactaccctggtttctggtgcagtaacctgactgggagaattcgaggttgctggtggagaatgcacagatgcagtagcatgttcatgaccaacaccagtaggagaattagtcccagtggacagtgtgtcattggttggctcaggtaaaattgatggagatgcagaaccagacatgatagaaacattatgcatagcattagaatgagtcatatcagatgcaaagtttgtagtaaaagtagcagttggataagtagttggtggagattgtacctgagagtgacactgagttgaagttgcagggaagacatgctcgttaaaaacaacatttcttgcaatgaacatgcggccagctttattttcacagagataccctttgtgcttgggggagtagcctaggaaaaggcactcttcagacctataatccaatttgtggtgattgtaaggtcttaagtggggaaaacaagcacatccaaacacctttaaaacaccataatca

SEQ ID NO: 40027 - DNA, 1457 bp, Cannabis sativa
aaaatagattacattgaaatggagttttatttaaggtataaaacccaacaataagctcatgtgagtactctaagcttttatagcaaaccaaattcttcaattaagagaaacctaaatctataaatacagaattaattttgcattacttcaaaataatttataacaccttaacattaattcaaaataatttacaacccacaacaccttaatcaagacctaaaaaattaaatttctaaaaactaatctaatcttttaaaaaaagtcattctaaaattatttttaatatctctatccgtaatctatttctttacttattttttctaaccgataaaaaataatgtggtagtcatttttataaaaacaagtagttaactcttgatttgttttatgtatagagtaaatctactagaagacaatagtcataattataagcgaaatatggtgatgacaactagtgtgatacaattaaataatataactttaatttattatacattgaaataatattttttgagttattatttattatattaataattttttatacttttaattactgtattaaaaagattaaaatagtcgcgtgaagagcaactatattgccttaattatatatgtattatataaatttatcagttgttatattatacatatatattttgagttctaatttgatttatttattttgaaaaactaattggtatatttataataaataaattaattaaaagttataatttattagatttaaataatttgtatgatattaatttttttattattaaaatgaaaaaaaaaataaaaatttactagaatagttatttatattattaaaaaaatatatcaaaattttaaatttgataggcttttatgattaaaattatcattaaacaaaatacaaccgcatgagaaacgcgatttgtttcctagtttgtttaaatgagggtttcaactcttactgtaatagctaaagattaaggaatcggattagcgaactctaactagttaaatgtgtattaatgtagaattatattatgatataatttaatatatgtgaattaaactaattaatgacatgttaagaccctgttggtgagctagggatatttttgtaattttgactagaaaagggtaaaattataattttaatattatggtgtgtttatggactatactattatataatatactcgctttgtccttttttaggtattttttaacaagtcggcgtggtatagtcacaatcgggtattttgggtcgaaccgggttcggagccataagcaaaaaaaaatttttgggcccttactatgaagataaatggtattttaaaaaatatatgtatattttttaaaaagaatttttttatttgggcccctaaaatgagtgggtcctaagcatgggcctagcctgcctatgtctaggtccagctctaataataactcaatacactcttaag

SEQ ID NO: 40028 - DNA, 2199 bp, Cannabis sativa
gcatatattgtactgagaattaaaataaaaataaatacttaattaaatacactaggttgcatcgtctgccttaataataagggaacttagaaacctataagaaaattaattaagaaaatcaataaactaataatgaccacttcaagcgttttctcttaattaaactgtttgaaactgtactgaattctaaaaacttaagttctatttataggaaggtaaaacgactaattcgtaattaaatttattacaaattacacgtggaaaaaaatacaattacagaaaagttacaaccggagtgccacgtgtcactctctcattggttgcatgtgacacgtggcgcctgcagaacaaaggagaaaattgcatttttattgtttgaggaccacagttgaatgaggcccattgcgagcctgggaagtggcgcacacgcacggccagcaaaagtggtgagcggcacgcgcccgtggagacagagagggaataagggttgtcggcttgggcaagggttattggcttgggcctgcgaagcgaatgagaagaggccacgtagcctctttgtctactggagaagaggatttcggccgattgggccttgttgtttgggttgttttggctcttcaaaaaataccaaattttatatccctaggccatatttttgtcaacttttcattcttctcttttatttttacaaatactattttctcaatcaaacacaaacaaaattaaatccaaacaaaatattttcaacataaaatttataacaataattttaataaaaaatattttatttaaaatctaatttaatttgtaatttttttaataaaaacaaagcatttttttaactttttatttctttttttttcatataccataaatactaattattatttataaataaagataaattatatctcaaataaaatattttcactataaaaatatataactttaattttatgaaagtattatttaaaatttaattaactttgtatttttatactatgaaatatgtaatattttggtatttatcaaaaaaaaaaaaaaacaataaaagaaataatttttaaaaaaaagtacacaaaccttaacaaccatttcaccaagaatctcctccagaacaacatcacgaggaatattgacagtagggaattttctcttgccctacaaaaaaaaacaaatcaaacaaaaaaagaaaaaaatacaactgttaaagaaaatataaaatatttgaaaacaccaaacacatacaaataaaaataaaaacaatacactattcaaatataattgaaaaactaaaacacaataatatacaactataaaaatataacacaaaaattctaaaaaaaatacaaaaacaaacaccttactttggcaactttagctatttcaataaactcatcttcaaggtcaaaatcaggatcataatcttccaacatagattgatgtcgtttagaattcctcttgaaaggagaatcagccactaacttacgtttggaatgaacgggagaagtaggactaggagagaaaattctttttccctattgacgtcggggtaaggtagatttaggtttttttttttagagtttttttaattacaagcaaggaagacttaaatcgagttatagccatgaaaaaagaaaattaaatgaaaatttatagaaaaagaaaaggaaaaaaaatcaattaggagggataaataaaagagaaaatagattttttttttcaaaaaaaaatgatcaaaacaaactacaacaaaattgaacaaaaaaaccaaatacactatacacaaacgtggctgaaatttttaaaactaaagaaaaaataaaaaagaacagtgtaacgataacaattaaaatgaagagttataatatatgactcttctctcttaatttaattgcaataaaaaaaaattgacacaaatgtgacaactaacattacatcaaaactatgctattgatgagcgtctgcctatgttttgtgctctgtggcagttgaatgtcccatatgggttttaaccgtttttttcttctttttttttcccagtattgttcggtttctttcagttttttagcagttaccttcattgccttcatccctttctgaattttgtctagttcctatccataaattctatttgtttcttaccattgttcttgcctttacgtcttttccgagttctttgctgattcaatggatcca

SEQ ID NO: 40029 - DNA, 1496 bp, Cannabis sativa
agtgagtggtcatttggggactgagtgaagttttgttgtaagagtgtagaactcagtttagcataccattaccgagaagattatttgagacagtatatgttcttctgcaatttgcagacatcattatgtggaatggggtctttgggtgtgtaaccttggggaagtttcatgtaaacttcttcattcaagtccccagatagaaatgtgttgttggtgtccatatggtgtaagtgccatagcagccaaggcaaaatgagtttcaaagtgttaaatttggccactggggcatatgtatcaaagtagtctatgcctagtaattcggtgtatcatttggtgactaaacgtgctttgcaatgttggacagaaccatcaagattgtatttatttttatacatcaatttattgccaattacatgctggtttgatggtaatgggacaacaatccaagtatgatttttttagagcatttatttcggtgtccatagcattattccaaactttgtatttggaagcttgtttataggatgttggttcatgtattaggcttagagagagaataaccgctcgaaattctagagagaatttgtcatatgacaagtagttagtgagagggtgttctgtactattgtgtgttgtcactaagtcacattgataatcatgtagatatgttggagtttgttgtgcacgaccttttctggtagtgcttggttcgttatgttggtgtgatgaatttttatgctgaggttgattgatctcaagaatgggagaataagagtgatgtttctcatgaagaaactggtgggatggattaatctcagaggtattatgttgagattgttgggtgtcttgattgtttggctgagatggattgatctcagtgacaataggtggggttttatgttgctgagatgaattggtctcaagtatagttgagaaaaaattatctaagttgtgtgtttggggtactttgccaaaaggatagatgttttcataaaagataacatctcttgaatggaaaatattgttagtttgaatgtctaggagagtgtaagccttcatgttgtatgggtagccaatgaaaacagctttggctcgaggggagaatttggttgttatagtgacagaagaagcgtatgtaaggcaaccaaagttacgaaggtgagtgtatttgggaggtttatggtggagtagttcataggatattttgtcctttaattagacagatggagtcctatttaaaagatatacagtagttgataccatgaaactccaatattgcagaggtaaatttgattgaaaagcaagtgctcgagcaacattgagtatatgataatgtttccttttaacaacaacattttgatgtggtctacccacacataaagtgtaatgtagtgctccctttgtagcatagaaagtggtgagattgagttctttggcattatctgtgagaattgctttgatattgattttacattgagtgtgtatgaattggaaaa

SEQ ID NO: 40030 - DNA, 3150 bp, Cannabis sativa
tcctgttaaggcctggacttccttgggcttggttggtgatggcatatctatcaaagccttaattttctcaagatttgcttcaattcccctcgcgttgaatgtaaattccagaaactttcctaaggaaactccaaaggaacactttttcgggttaagtttcatattgtacttccttaatatttcgaagcactccgagaggtctgtagtatgaattcccatcagtatcgatttcaccaccatatcatcgacctaaacctccatgttccgcccaatctgattcatgaacatttcattcactagtcgctgctatgttgccccagcgttcttcaacccaaaaccaaatggcatgaccttatagcaataaagtcccatgttggttacgaagcttgtgtgttcctgatttgggacatgcattttatctggttatatccagagtatgcatccatcaatgacataagctcatgcctagcaattgcatccaccaactggtcaatccttggtagtggaaagaaatcctttgggcacgccttattcagatcagaaaaatcaatacaagttctccaagttccattgggttttgggacgagaacaggattggttatccacgagagataaaacacctcgtgtataaagttgttgaccaacaacttatccatgtcctgtttgagtgcatgttgtctctcggaatccaagggcctcctcttttttctctttgctgggtagtttggatcgacatttaagtgatggaagatgatattagggtcaatccctatcatatctccaatttaattgttcatccaggttcttcccaatgtaaacacactttgtgggatttcctaggtccagaacaacctcttccaactctttaattggtttcaataaattcctttcatcttgaatctgaggatcaagatcttcatccttcttctcgctttcttcagtcaagactgccattagctagtgaccagcttttctgtgctatagctctatgcgatagcatccgcgagccagcatttgatcatctcacactactcccacacccacttgtgtctgaaacttcagggataagtgcttaatcgaactaactgcccctagttcgattaatactggacgacccagtagtatattgtaagccgatagcaggtcgacaaccaaaaagtcttgcattattgtggtggataaaggtgcttcgcccaaagttaatgcgagctcgattattccttgactggcgacattttcgcgagtaaatccataaagatttaccatgcaaggtctaaatttagcttttccaagtcccatcttctttagtctttccctgtaaaggatgttcactgaacttccattgtccaccaacaccctttttatcctcttgttagagagtcggatggtgactactaatgggtcgacgtgagggtacctcacatctttttcatctttctccgaaaaatataatcgaaggttcctcagtgtttactttcttggaaggttctggagcaaaggctgactgctcgtccttcacttccttcacatacctcttttgggcgttattgccctctcctgcaataactggccctcccgagataatcatgatatcctctccttcaacaaaaggaggttgtaatccttggtttcctgggttgttgggcagattggtctggttatgtccatttccctatcttttcatatattatttgaagtggccttgcgcgatgagactctctatctcatctttcaactgacgacactcgtctgttgtgtgcccgatgtctttgtggtacttgcagtatctggtttgatctcttttatgcctcgcgtgcctcatgggctcaggtttactaaatgcaaccttgtgctcataagcgagataaatgttttctcgagtttcattaagctcagtgtaaatggtgtaaattggcacgtacttgtcgtgcttcgtttgtttctttttgtctttagctgaacccttagagtcgtctttcctctttgacccagaagccctgggttattagcttttgtcgagacagtacttgttgaaataatgctgggtttgcttcttgagctagtttttaacaagttcatctctttttgagcttcttcctttcaaacaaacacctaagccctctcgttgaactcggtgatatttttcagtgcacgaccctttaggtcatcccacagttcgccttcagtagtggagagattagtagtgatccctgcctgaagggcagtatgctgggtactatcatccaaattccttactctcacagtagccgtgctaaaacgacttaactatgccttaagagtctcgccaggcttttactttatggttgtgagtgaggatgcttcggatcgcctatcccttgcggcctggaactgccttttgaagtccttagacaactgttcctaggaagtgatggaatgatgagtaaacttattgaaccagctgcttgctactccaactagtgaggtgggaaacaaaatacaacgtagattgttcgtaacattgctagctcgcattatagtattgaaattattcaaatgcgagaccggataagtggtcccgtcagatgaagagacgtgggggtttttaaatccttggggaaaaggagtattcatgatgtctggatggtatggctcaagttcctcgtctgagtcatatccagattgttttccttgctccccgacttgatatcttctgaacttatcctccaactcatctattcacaattggattggatccccttgctctggaccgagttgttggcgaagattaggttttttctggttcaagtattcttgcagatctggtttgttataatttcaagctggcctcgttctactcacggactttgtcctactcatggactgtgtccttgagtgattatttaatgttaaattaatttaatttaatttaataatttcaaaaaaaaaataaataaataaataattttttttcggaataaaataaataaataaatttaaaattaaacctataaatttgaaaaattaggtttcaactaacaatctttttcataaaaaatgctaacaacttttcaaatttcatgttacttttcaaattaaatattcaataaaataaaatgataatttaatatcatttttctgattttacaatttaatttaaataaaaaataa

SEQ ID NO: 40031 - DNA, 1091 bp, Cannabis sativa
  modified_base (968)..(973): a, c, t, g, unknown or other
ttgaataattattaattaattaattaatgagattcacatatgcatgcagtattgtcacattgttatgatcagaaaaagtcaagaagtacgtacgtagcattgatcatctgaaaacagaccagctttgctctaccacaaaaattgatatatataaatatatatatatatatatatataaattataagaaagaaaatgatgtgtgaacaagtatacatatatggaaaaagacaagtccatcctgtccattcaatgagacttctactatatatggatttaattttctataggtctcttgttctttttaccattcatttataatataaaaacaacccttttcaaattctttccataaccattggaaattttgatacatatatatattttgtaaataaataaagaatagctttactcgaatctcaatgaccacagtgacagtggcagcttatttctttcttttatttttttccaaaagagaaaagaaagaaagaaattggtggtggtagctagctaagcttaatgtctagtaaattataaagaagacaatatatacatatatatagtatactaattataattttttattacaattttttaatcaatttatacatttaaaatttggtgttgaaatatttgttttagtattagttataatttataataccgaaaatataatttttaatattctagtttattatgccggtattctaaaaacttcaaacagtaaattattttaaaaattttaaaaaatttataacaattatatgtaagtataataaacaccactatagaaatattaaaaagaatttattctaacatgtatatttttaaacataaaaaaaatacagcatatataaagatatagggtgattctacaatgcacccccttaaagggatgtactgatacacccttaaattgtttcggtatccaaaaaatttttttttgctaattttttttcatattcatgtnnnnnntagctatttaagatatcctacaaatttttgaaaaattttgaataatttacaaaaaaaacaatgttcaaacagtctattttacacgcttataaaaaaaatagtcacgcatgcaacacac

SEQ ID NO: 40032 - DNA, 1996 bp, Cannabis sativa
acttttgtacatgtgtcaaatttatattggtacacctaatattataatttaaaaaatataaaaattattttaaaatttataataatttttattttttaagagtattttatatcataaatacctaactctaacttctagttgcaaataaatatctaagtttaattttagcagtaacaatacttaatttatatttatgtaactctgtcggtacctaactattaaatattaagtcattatccacgtgtattggtatatttaaacattttttttttaaaaaaataaaaatttaatcacttggaccaataaaggattgccacgtgacaatatacttaacacttaacaaccatatacccacagatattctagaagttaaatttaggtatttatgccacaaattacttattttttaaagatttaattttgatttttataattttattaaattttaaaattaattttgaaaataattattaaataataatattaggtgtactaatataaatgtatcatgtgtacaaaagtgtatacataagtagcccattgtgacagttaactggatgacaccttaaatatgatactagttcagtaatttggagggtttcactattaaaatttaagcttttagggttaaatgtaagtgaaacgacagttggaagggtttagtcgccaaaaaactgttaaataaatgacaaagacaaaaactaaacaaaacacccaaattcgagggattaacaccaagccaccaccttgtccataagcctaagtatagtgccaattgttagagagcaactgcagcaaaccaaatcaaagccccctccttcccaaaatcgtgatgattccataaatgaaactactaaaaagatggaaaactcattggaaaagaatccatgatgcacagttagccaaagcccaaataagtaatcacccttctcggccaagaggccgaagttggtggtacccacttaatcgaggcatgaaaaaaagaaaggaaaacttacaaaaatactaaattttgggtaaaggtttacatttatcctgcaacacggcaaaaattatatttatactaccctgatttttttttatcttatacagtagggaccaaaaactacatacgaggcctccatcttccacagacatggacaaaaccaccccagcaacacaagaacactagaaaataactattaattttggcgagatggagcaaaaacagtaaaatcgacgttaaataaataatcgtgacaaaaaaacagtaaaacaacattaaaacaaataaaaaaacaaaaggaaaaaatgatttaaaaaactaactatcttctgtatagcctcaacaccatatgcaataacggctatatttgcaagtctagtactagaaaatcagaattaaaaaactattaaaacaacacaaaaataaatgtaaaacagtaaagcagatataaccacttaaaaaaaatataaatgaaccacacacctcaaaactcttttgtcagtgagctcttcaaatgtatttataggagacttagaataaaaaaaatcacaaaaatagtcatagagaaggaagaagaaatgtatttatagcctccatcttttacaccatggacagaaccaccacaacaatacaagaacacctggaaaacaaccattaatttcatcgagatggagcaagaacggtgaaattgatgtcaaataaataaatcatggcaaaataactgtataacaacactaaaataaatcaaaaaaaaaaaaagaaaaaaatgattaaaaaaactaacaatcttttgcatagcctcaccagatgcaatagtgactatatttggaaggccagttctaaaaaatcataataaaaaaaccacactcttatctttctcaaaaacctaactgaaaatttaaaaaactaaagaaaggaaaatgaaagagagagagagagagagataataatcgtatgaattttgaaacataaaaaatcacgaataagaagataaacaaagagagagagaga

SEQ ID NO: 40033 - DNA, 1306 bp, Cannabis sativa
ttatttatgaaacgggaaactatatttttggaaagatgatacttacgagaatcgtattatcaattaattgattatcttgtgacaaaagattttattaatgacatgttaataatattatatgtttttaaagtaatactattttcgcagcacattagaatttacccttaaaatcatcccatttatttatttatttgcaatgaacgtgaaaaggtgatacttaccatatttgtgaaagaattttgggctatcaaagtaaaactaggaaagtttcaatttttatgcttatgagataatgtggagaaagttttgatttagtttttatgtattttgaatatttaatactgcatttgatgcatgtgagaatctattaatttttgtcataattaatataatcaattttccttttagtttaaaaaaaattatcaatcagttgattatattaaatatattagtgatatcttaataatatcatacatattaaagtaataccatttttgcatcacattaaaattcatcctaaaaatcgtctcatttatttatttatttgcaatgaatgtgaaaagatgatatcatatttgtattatcagttagttgattatattgattttattagtgagatcttaataatatcatagattttagtaatagtattttttatttatttattatttttcaatgaatttaaaaaaatgatagttaccaaatttgtattatcaattagttgattgtcttgagatcggatattaattagtgacatcttaataatttcataaatttttaaagtaatgtcatttttgcatcacaaaaatcagcctcacattttaccttttatttatttcgcaatgaatttaaaaaggacaagagattttattagtgagtttttgggcaaatggagattgtatatattaagaatgattaaattttaaagtatgtttccttagaaaatctatataaaatagaaaaaaaaaaatatgatgatattatattgacacttaattaaaacctaattaatctttaaagtcttgatttttattttttttaattataaattctaattaactaaagtcttactcgcaattatcctctttcattcactctccaccatacttacataaaaaatgattgacaacgaaaacatagaacctatagcaaatttgtccgaagatgaagataatttttttcatttcatgagttatatgaaaaggaaatgtaaataagatgtctctgacatgagtaacagtggaattgagcatgacactgaagatgttagccatgaatggattgatcctgatgtagctgtttggag

SEQ ID NO: 40034 - DNA, 2044 bp, Cannabis sativa
  modified_base (34)..(36): a, c, t, g, unknown or other
ttaaaattttgtaagatgtcttaaataactatannntacatgaccatgagaaaaaatttaactaaaaaattatttcggatactaaaaaagataagggtgcatcaaaatattcattttaagaaggtatattatagaatttccctatagttaataataataataacgatgtaaaatcgaaatcacactggagaatttgtgtcataaatagtttgactttgattaatttgtgtaaaagttacttattaaattttattaaataataaaataaattttgtattttttaaaattactacaaaataagagctgagctcaatttttatattttttttaatataattaatctaaaaaaaatttctatatgaataatgtatttttatcataatactaatcgattaatatattatttagctttattttaacaaaatattaattcacgttatatttatactatttttaaaaatataaaatttattttattatttaacaaaataaaaaattcaattaataatttttacaaatcacaaaatccatatttaccataatttattaatatataaagttgataaactttgctttccgtcggttaatttagtaagcaatatctatcaatacacgtataattattttatattatattctcacaaacaaactttgattaagaaactttgaaaaactaataataaaattgacgaattaatacatagtaataataatatgaaacatatatacaattatacatgacctttggccaatatacatataataaaacatgacatttctttttccaaacattacgatcaatatttacaattggacgaaaactcacacactatagctaattaccagattcaacacagaaaccagaagtggccccctttgggtttctccacatcttttttccttttttattaaaaactaaaaaaaaaatagtaattaataatatatatatatatagtagtagcacttgtaagaaaattacatatgataaacccaataatactttgcaaatattattacaatattccacaatgaatcaacataccacatattcttaattgatgagtagtacgtacgtagactttcagagaatttttctccactttccactttcaaattttcttagtaaccaaacaaacacatggtgatattgacggagtaattaggctgctaccctgcgacgaaccggagagtattgaacaccagaagaagaagaagaaacggaagaggtcgaagaagaggaagaagctctggcgaaaggtgaggattgaaagcggcctgagtcgccgccgggaaggcggatgtaggcgatggaagccatgggagagtcgttattgatgaaccatgaactcaacaagtcgtgatgatgttcgtgcctgttgttgtttccgtttttgtactctactattactttgtacacaaatggaataagaccttccatttttaatatctatgaattgatttaagacacagaaggagacagaaatttttgaagaagaagaagaagaagttattagtttggtagagagagagatgggttgaaatgtggaggggattataggaaagggtttaaaaaggagtagaaaatgagatgaaatagtggtgacgtggcgtaatgggttgttgtccagctagctcttcacgccaagccatgccacgtatgcagactatatatatttaaaccctgcacgaagacatatactattcaaatgaaagctctatctaaactatagccccctcctcattcttattcattacatcttaccaaatctccacacttatcacattcttttatatatttctttatcttcttggaattttctttctttctaattgttgttgctataatgaaattttagacaaagtattattgcttgtcatgaatagagtccatatttataccattttttttagttatttagctatataatttgttatcattttctaaatttagtagttacatggtaaaattctacttttttcatattaataatagtcgttaattataataaattatgactttctttttatatatatttatatttta

SEQ ID NO: 40035 - DNA, 1664 bp, Cannabis sativa
ttgattaattgattaataaaaaggatatttttcaacttaccccaatatttgcaatggattggggagcattgttatgggccataaaggtacgtagcatcactataaattgacgttttataattgattacaggtttttttttataattttatttaaagtaaaatatgtaggacctgatattaaattgtaccaataatgatattatacatcacaagactactagacaccatctataccctttaacatttctcgtggattgggttcagtcttgagacttttacatgagaaaagaaaaggtgaaatctcacaattttaaatagagaaatgctaaaggtcactggtgcttaggattcttgtaaaatttaatattgctgttagtgcaattcaacatcagatctcatttattttaatttaataaagattatagagaattactaatcagttatagaacacaacctcataatatggtgctaggtattttggcgccctataacaatgtttttttttaaatattgcaatacaatcctaaaaagaaaaatatattggaatacaattttcctatattaatatgaggaagttgataaattacaaagaggtgggacttgaataaaagggaaagcatgatggtatttttaaaacaccatggcccataaacattgcttaacccatttcctttgaagggcattgtgcatttaaaagatgtcattatgcaaattataaccgagatctgttgggtttgtgggccaactgagcttggactttttgggcttctttactcttgcaacattatcagtttggtgtttttacaaaaatattagaatttaggtataaatttataattttactgtcacacggaattttttacaaaatactgtctttttataaaacaaccgtaaaacgacaacagagaataatttaaacacattgaaacaactaaaaaataatcgtgaaaacttaataaagtacacagtataaacttacacactatttttaaaaaaaattccgcccacaataaaaaaagtaaaaatttagaaatttcaatatataatgtaaaaagctctatcagtttccttggtttgggccatattttcacattttttattatttctttctcaactttgtttattttaattttctttcacattgtcaaagtataatttctcataaacaaataatcataaagtaattaaaatgaaatattttcagttatccattcaaaatatatatatatatatatattcaattataaaatataaagaatcttacaattatatagatataatgtaaaataattataaaaatacctacaaccaacttacactacaaaaaatcttacttttagtcacaaataaattatcattcctatgttgtgactaaaaagtctatgattaaaagtattagtcacaaaaattacaatttattgtggctaaatgtgtttttagttgtgactaaaactaaattaatgacaacgtgtagctaaatacaatgttttagtcacaagtaactttttgttgtgactaaaaattacatttagccacaaaaaatttatattgtaactaaaaaattgtcactaaaagtagctactttttgtagtgttatttacaataatattagtgtaacgttagcatgaaataccagattgtaacgtccccgcttcaagcctcca

SEQ ID NO: 40036 - DNA, 2132 bp, Cannabis sativa
tgctagtctggtacgttcccttaataatttacatttttatcataatattgttgttgctgctgtggatgtgcgggggtcttattttggcttggaagaggggttttatatttgaaagtatttcgatttcaaagaattagatatcgggtcttgtgttttttgacccagagcatcatccgtggttattgtcttgtgtttatgagcctccttacttccatgagaaaaagagattttggttagacttgatggattttggaaataagtttggttgattatgagtgatgtgaattttgtcctaactaacttagagtgcgttgggtctaaagggaaggatcagttcctcccctttatcttgaagcttattaatcgtcatgctttgattgatttacccattaaaggtgattacgtgacttgggataaccatagagatggagagaatcacattaagtcggccctagacaaggctctggtcaatgagggctagttataaatttttcatagagtggtggtccaatcactcctcacttgtaatttttatcacagcctcatttgtgttagtaccgtgatccctgacctcagaattagacgaccattctgctttgaggcgtggtggatcagggacccttgtagttccttggttgtggaaaatgcttgtgcgtctatttcccatgcctatgcccctacttgagtcttcaagaaagttggtgtcacctgtctggcgcttagtagatggaacaaggagcagtttgggaagttggatacttgtatctccaagctggagctccagctatagaatattcagaaaatgcctattggtactagaagttcgactcaggaggctgagactagaaaggcccttaatgaggtgttaagacagaaggctttgttttggcagtagagatcccgggcttcttggattaaagatggtgataagtgttccaagtactttttatcggccactatctgtaataggcgtaactcggtagagagtaccttgaacaagaatgggatgtggatcactaagagagaagagattggtaggaaatttactgacttcttgagggacattttttctaatccatcccaaggacccttggaaaatcttgactatctgatcttggatcatctatctccaattgagcaagctggacatgaaattatcccagggcatgatgaaattagacagacacttttctctatggggagcttgaaggcccccgggcccggatggtatgactattttgttctttaagcattattggaactttgttggggcataattctgtgaggcagttattgattttttttcagtcagggaggatgcaacgagggttcaatgatacgaatgtgactcttattcctaaggttcccaacccaaaaaaagtgtcccaatttagacctctttccctgtgcaatgttatctacaaggttttctccaagttgattgctaacaaaattagaccgattctccctcgtctgatatgtcctactcaagcagctttcatccagggtcaaaatatttaggataacaatgttcttatccaaaagatcatccactcgtttaaactcaagataaggaaagaagggtcgtttgctattaagattgacctggttaaagcttacgataaattaagctggcaattcattgatcacgtgcattgtaggttcaaggccccgattaagttttgtaattgggttcgacagtgtatctcaacgacttcctttaaccttcacctcaatggtagcaagatgagtagttttgttccgaagtgtggcctctgacaatgggaccctctctccccttacctttttatttgggtggtagaaatcctctcatgtattcttaaaaacatgctagataatggaactattagaggaatgaagttgagtagggatggtcgtaagccctctcatatgttctttgttgatgacatgatttttgtgggcaaagcaaatttagcggaagcaaggggcttttggcaatgtttagaaacattttgtaactggtcgagatagagtgttaataaattcaaaacctcaatattcttcaataacaatactaatgagggtatgaaaggaggcatcaagcaggaactgggtctcagcaatatcatacgtaacatcaattatttggg

SEQ ID NO: 40037 - DNA, 2142 bp, Cannabis sativa
aagatgaatgggctactcctcccatagccaattggttttaggatggaacctcaatcatcttatccccaaattctaacacttttacaatacatatgtcatctcatagttgacaccttaagagttgtttaatataggagagagtgttggattgtggagggtatttgaaactcttgtttcttgtaatttttttgatggaaaatttactataaaatgtagtaggtgcatgttctttatattttttgaaaaaaaattaacagagtcttatattttaggggtagaattaggtagtgtggaaagtatatgggacaaatgtaaaatttaaacacaatgagcattgtattatcaataataataaacacaactaagcttataaacatcccaaatcaatcattttatttagggcgttaaataataataaacatacctcaatatttagtattctctatttgtgtgtctctttgattcaccataacaccgaactactataaatagcagttacaattaaaaagttgactcattcagaaaatttaataaagataagtcattttcaaattcagactctctcaacttggtgtcagacgtcgaaggttcttccatggcttcctccggcaacaatgctttagccaacacctttgttattcccacaacaatgtttctccctccacttcgcctaaatcgtaataactacttcttctggcattctcaggtgcttcctactatatgggctcacgatcttgaacggattcttctcaatcaaactcccccacaaccatgaattcgttaagctcctgagcaaacaacaatggtgagcaaccttgaattcactcaatggatgagattagatcaatttcttctttcttggctaatatcttccatctctaaaattatgctggatcatgttatcaattgcacctctgctcatgagctatggtacacttttgagcaactgtttggaacaacatcatgagcctgtcttatacatctgatgagtcaactacagaacaccaagaaaggttcactgcaagttgatgaatacctcctgaagatgaaaaatctggctgatggcttaagagcagctagaaaccccatcactgatgaccaactcattctatatgttcttgctggtttgcgacctaaatatgaatttgtagttgttaatcttacctcctaagatcactttactatctaagaagttcaattcttgttgcaaaatcatgaaactcaaattgaatccaatgttgtctcccttaactttgatcttgctagtgcatctgtcaactacacttgtaattttttttaaaaaaaaaaaattcttaatagttcacaatgttaaaaataaattttaaatattatatgttttttctttaacatattgtaaataactgtttaaatcttattttttagcattataaactatttagaatttttaaaaaaattataaatagttttatgttgaccaaaaaaaattctttgacaccgaaataaataaagaatataccaaaatgacccttttaaaagtgtactatagatttttttaatatatatattatttatataaacctttattttgtggggtatagctcttttctcactaaatgggctctatatcctttttatggagagaagttgaagaatatccattttttatacattaattaaattttactttcaaataaaatttaattcaaacatactttttttatgagtattgtatccaaattatcctcacagactcacataactataagacataatttcaaacataatagatttgtattctttgtagtagatgtgtaggtttgtaagaaaattctggtaaaattttgattagagaagaatgaaattattatcgtgaagtgataagggtaaaattggtagaataattaaaaaaaaataaacataatagattttacaagaaagagtaaaaattaaaaacatcaaattaaaagaaatatatagtataatttcctctatccatttggtaaactcagttctcaattctcatcaagtcatcaaaacctaaacttaattaaaaattcagatgcaaacatcactacttgcatatgcttaattattacacattttaattagttaaagtaataattaagtcatatctcaaaaatgaacaatgatcatcacaat

SEQ ID NO: 40038 - DNA, 1487 bp, Cannabis sativa
aattgaatcaaccattacaatgttcaaatataaagcctttattaatttatcaaattagtcaaaaaaaaaaaattatataaactttaacaggaacattatttatattgaacatttgatttgaaaaagaacaagacgttctaataagagtatgaacaaccatattagtatatcgtttaataaaaaataagaacacattgtttaaagatgcaagaaatttgagacaatcatctatataataacccaaaaaatagcataggttctaaattaattcgaatggcttgcattgctaccaaaacaatccaactccagcttcacttttgctcatggatgagttttgatccaatcagcttaaccaattgctttagccaactctaaaacccccattctagcaaagccacccgacttagacatcactaaatttctttgagagtcttgagcgacagtcaacctctgtcaatctcttattacaatttcttaatcaacctccgcacccaaaaatacatgtcgaaatatttttttccaatttttttatggtggtattcgttattgttacaacattatccatgtaattttttgaacaatttcgaatagttgacagtgctgatcaggtttgaaattttttgaacgcatgtgtggtaaattggaatatcgagaattctatttttggtactgtaaactattcaaattgtaattataacgaatacgactatgaagaaaaattaaaaaaaaaatattctgatatgtgattttggacacggagtgttacaaaaattccaacatgcaagcatactaattgttttcaagtaataaactcagatgttgatcccacaaaaactgtagctaattactaattaattgaatctttgattctatttggctaacaacatttgaaagtttattgtaatcaaataagagaaagaaaacaaataaacaagataagaaaatatgtaatgcccagttaaatgatctgtggctaaaagtattagttacaaaaattacaatttattgtgactaaatgagtttttagtcacaatatttgttgtggctaaaactaaattagtgataacttgtatctaaacatagacgaacctaaaggtgttgagggaagactaaagcccaccttaaaatttgaaaatatattaataaataactgttgctttcatatataggaattataaagttcaaatcaaattttaactcattaccaccagaataggaggatgttgctaaactataattctattttaatttagcttgtcattaattgttttaaattatattaaatgtataactaagtccattctaaaattaaatcttaggttcgtcactgtatctaaatactatattttagttaaaaaaaaattatgttgtgactaaaaagttgacattaaatgtagttattttttaccagtggtgcctagcaccttctagatgtgtcgacttgcaattggttagcgatactccataaaaattattatattaaacta

SEQ ID NO: 40039 - DNA, 1488 bp, Cannabis sativa
  modified_base (56)..(68): a, c, t, g, unknown or other
aaaataaaatttttaaaaacaaaaattttattttcattttgtgattaaaaaattannnnnnnnnnnnnttaccaaacggcacctaagttttttggagtttggaccatacatacaccataagtactctttgtaacataatacctaatgtttataatttgtagaattctttatactttgttttgattgtattgctgtagctaattgcttgttgaactgatgtttctgttggttgatcaataatgtacatgaattacttataataaaatattcctaaagtgtttggaaagccacaatataattgaatttatgtgtataattgaaagtaattataagcttttacatatttgtttaactatataattacactttaattgtataattaaaagtaattgagaggttctaattcttattctcatggatcccataaaaattgagtaaaattataatgtgtaaattactaaaaattttctattttaaaattaactattaaaaaaatgaaaatgttttaattagggaaggtattagaagcttggtattggaacatgagtctggtcttttgacctgtgttgtttgttttgctgtggtttgttgtcttttattgtctatacctattgttatgtctgatcgagatattatggatttggatggagaacatcagtatgatgttatacaaggaggggaggacgatgatggtggcattgtatacgagtcaggggaaaaagagttatcagattttgatgatcgtgggtgcctcgtgggaagatttcttacagaccgaacgttggatttcatggcaatgcaacataagatggcatctttatggcggccaggatgaggtttatatgttaaagaactggatcagaacttgtatttgtttcagttttatcatgaagttgatattgatcgagtgattgaaggaagtccttggacctttgatagggtgccattgattttctctcgtctgaaggagaatgaagaaccacgatctgtggtcttaaacaagctggatttttggatccaacttcatggaatgtctaccggtttcatgtcagcaaaagtggtgaaggatattgggaattatattggcaagtttatagaggcagataaaaacaatgtcatgggaatatggcgcgattacctccgagttagattttcagtccgtgtggatttacctctcaaacgcagaatgaaattagagcaaaaaggaggtgagacttgttatgctaatttcaaatatgaggatttaccaactttctatttcatttgtggaatacttggccattccgagaagttctgtcacaagctttttgatactccactacacttgattaaaaagccttatagtattgaactcaaagccatgcctaggcgacgtcaacatactattggagcaaaatggctcaggcaaggtttaactagtaaagatggaggtgacacggtgcacaatggtggtggtcagtgtaaagaccgcttagtttaatttgaaaa

SEQ ID NO: 40040 - DNA, 1791 bp, Cannabis sativa
aaaaaaattattaattttttaaaaactaattgtcagcatatattccaaaaacaattttgaaaaaaaaaaaaaaagatttattatatatataaagtaagtatttttcttctttgtgtagtgttgcgttttagttttgagttgtggagaagagcagagagcagagactatggtgtctcccaatcgaaatccagcacaagggtttagttaccctcattcatccaatatgcataatgacttgcccggcatcaattcgatgcaaccaccggaaaataccataccatcgcccactgctaatgtgaatacgacgtcgtttgaggtccctccaaccaagaagatccgaaaaccctatactattaccaagtccagggagagttggtcggaacaggaacatcagaagttcgttgaagctgtgcagttgtaagtataccttgtcaatattattttttgtaactatttgtttctttatcaatggttgaattgaattatgtgcagccaattcaattgtgtgttggttgatgagaaaattaaagaaaagatatctttttttctcttgatagagataattaggtgttcgttttggatttttagtttatcattaaagaaagtagatgttttgggtattttagttatgttatgttaatctcctctgaaaacgtccaactccaagtgaccaaaacagaggtgtgctgaacctttgaaataagtttctaaaatttgtgtacgactttcgttgtgacttttaatgtactcttgaaaaaattggagtgtcataaaaagtgtacaccgcccatgccctaacaattaattgaacaagcaatttagtacctttattattgtaattttgagtttcttaatcacattcaatgaaaaataaataaactagaattgttctgattgaggctctttgtatatggtttgaattcagatttggtcgcgactggaaaaagattgaagcattcgttggtacaaaaactgccgttcaggtattgttcttaccatcttttgagtttacctgacacagtttctattgttctcaatggtttcaatagaaacatttagagcatagttaccgtttttattacatacgtggatttactcttatttaatccaaggaatggcttttgacagatacgtagccacgcacagaagcactttgagaaagttctgaaaagtgggataaaagagcgtgtacctccccctagaccaaagaagaaggctactcatccatacccacataaatcccctacagatggtctgtatgtttaacctttattttagttctttcttcctttttaatacccttttgctcataagcttgtcttgcagctccaaatgttgctcagttcaatggggctacaaatgttacacagtccactggggcttcatattttactcatgccaatgggtttccaattgttacttatatgactgggtctccaactgttgctcatttcactggtgctccaacttttacaaatgacaatggggatccagttatgtctcatttcgattggactccagctgttacacatgttgctgggtctcctaatgttactcatgataccgggccatttcattattctgctgctttgtatgaacctgcattctgtagcccacattcatcatcagcggttgtaaatcccattaacggtgcttcatcgcctccttggcgatcaagttctgcaccaccagtcattttaccacaactggaaacaggtttcaaccgcttcttgctaaactttggaaactacatttggcttttagtctatttgtttcttcatttctctgtat

SEQ ID NO: 40041 - DNA, 1181 bp, Cannabis sativa
atcggttttcgtggcctggtaacctgtggtggcgcgtggattccacggaccagttgagtgtgtgccttttccagtaccaacttcggtggcggcggcgcgtgatgttgcaacgccggtgaggtgaacaggattgccgtgctcgtctgttaaacgaacagggttgccttgttcgtcggtgaggaggattgggttgccgtgttcgtcaagtaaatcggccattttctttctttttctttttcttctataagtttcgatctttgtagtaatgtaaatatatatgtatataatttaacagttacagttatatatatgaacttaaaagtttgtatatgtatatatatttgattttgacggtggatgagataggagagaataatatgagtttgatctcatgcatgtaactgttgttttacacgtgttattaacccatcgtggagatgacacgtgtggaaataagttcacacgtggcttcttaactatttggataagtactatactagctcgataaataatggaactgaaatataattaattagtattatcttgtcatttaataaatatttacttttattttttgagttaccattttatgttttctatggaagtaataattgtatattgtttttttcacatattgttccttcaaatttttttagagttcagtaaccaccatcttcctccctaaattcatcttttttcattgttctagtaatctttttctactatacatcatatgggttcatttgaatattccatgaattacatacttctccactttgatggagaaaattttaaatttgtatcaacagtccaaaaagtagaagttcttgaaaataaagatgtaccaccatacgtgccccctgctccagtcccttggaagccgcctatggtccaagatgcttttgggtgtgtaatagtagcgatgccgaggccaatctctaattgttttcatccaattaaaatggatctaaagaagaaacgacctacattatttcaagagcctatactcataaagaaatggcttaacccaccatcaggacgcctcaaatatagaatagatgaagcaattgtgttatcgatttaagtaatcggtattacgagagaaactctatgagagatatggtggatattacattcatcattgttcagggctatattcaactacaagaaattgatgctct

SEQ ID NO: 40042 - DNA, 3561 bp, Cannabis sativa
aggttgtgttagctagattggaaaggcttcaaaaggcccaagacggcatgatacaattactgagttcgcttctaccacagacacaccaagaagcatatgttgaaaggagcgacttacatgaagaacgaacgataaatgaatctgtgatagggcaagtgcataatgttgaacaacaaactcaagcaacacatgataatgatcaaggaatcaaaacttatgagattactgaaaggattggtgaagaggcccgatcttcctctaattaagttcgtcacaaaagacaagttgattggtctccttaaagctgaaaggggtaaatcatcatcatcggtaacttccatcgactttcatccaccctaccctttgaaagttgcagtcaaaccttaccctcaaggttacatgagtccatgtacttggtggagggtccagatctctaatatgcttcgccaaatttcataaatggggtcttaaatacaataattctcaaataatttcatataattaattatataataatataattactcaattataactaatacatttttaattagggttgcaaatctatttactaattttaaattattatatcagtttgggttggtgttgtagagtcaaaaaggtgggctaccacatcctttaattgggcctccctttcccaagtaataatagtgggctcagggtgttggtgggggtcctcaatttacaaagttggacatgtgtaatttttactgtgtggtcgactgttagtctgacatgtggcatgagagaaagaatgacgtagtcgttcttaagattttaatccaggtaggccataggatggttcacgaaaactctatccatcgtggactcacatttcttaccattactgtcaccacgaatgctctgagtagtggcctgccctccacctttggctgtcctttttgtacgattaggcaaaattcctttcgtgactgttggggtggtggtcctattcacatgcccattagaggagggaggagtaagcctgcttttctttcttggtggattaatcttcaagttttccatctagtttgaaatggcagcaggtaaaaggagttgtattctgtgcatttatggcttcttagtatctaagcagctacgaacaggggagctaataacttttatactagagccatagattgaacaccggaggaaaggcaaaggccttgggctatgaaaaaaaaaccaacatcgtgaaataagtaaccacagttaaagaaaatagaagggagcttataatatttaaattgaatccactccttttggcctctttctatactcaagcgaaacctcactaggatcctttctagcaaataaactactaccaagaattttaaaaccctcttctcatcactgccttttattctgttttgtcaaacttgatgtgttttcctagtttagcaccaatggccagggcattttgccaagaaagataaggggttggtaacccatggacctaaacctagagtcttgttgcaatcacgtccaccttctgccagtttccatcatttggccactcctgtaagttgagaatttgacctcccatcagccatgggcatccttccaagacctcattcttatccttcgaggaatcatagaagattacccaaagaccaggctccatcgtctttattttctattgtccacacaagttctaaatgccttcaaggattttcttgaccctgtttcgaggaaggcatctctttccaaaacatttgccaaaacacctttagcagcaatgtcatcactaactccaaagtctggttcaaattctaaggaagaattttggaggaactgtagccgaagttcttccatatcgtcgttttgggtaatatcattttccattttagtattagagttggtgttctccatttaagcagggagaggagacatatttagaaggaatgaccaaggagttaaagttgggaaacaaacatctcatacagagaaaagttgatgcttattaattactcaaaagatgcccaatacaacttatctcctaaatctctcacataaaatttaaaacattgaattgttctaagagactttgcacagtatttaggtacaaaaagtcaaactttaattgagagtttattacgagagattaaagtttttgggattaagaatgtaaaactaaacttttcttcgatatgattttagtggaagacgtgattaagtagatgttagtttaagcttatttttaaagtaatctcaaactctttaaatgctttagcttaagattcttttaatctcaacccctctcaactaaaacccaccaagtaaaattcttaaaacactccatatgtcgcataagggtcatattgtattaaataacaaataacattatgtttggataaaattttatattatattagttatcacgacattaaatgttaatataatgtgagttgtattatttaatacataacaaatgacttgtattagcttgtattagaatatttacaaagggtctggatcaacctggtcgaccttggactcgaactcgaactcagacccgaatcccaaacctagcctcggacctggaccctagacccaaatccaaacctagactcgaaccctgacctaaatcggatcgaactcaaactcggacctagactccagacctgtaccctagaccctagactccggactcggactcaaacccaaacccgaacctcggacccaatacccgaatcagacccagatccagacccaaaccggatcctaaacccctgatccaaactcgaatctggacctagaaccagacccaaaccccggtccctgtccaggttcaagtccaggatttaagtttgggtttgggttcgacttcagctttagttttagctccatttttctgggtctgggtctaggtccgggtttaaatccggagtctcggtcgtggttcgagtccgagtccgagtcttgggcatgttctgggtgtgggtttacataacctatcattacaagttagtaccaaatacagtattgtattaaataatactaatgcaatacaatacaatatcacggtgtaccaaacgagtctataagtacgtaaaagatcaccgcaatagacccaggaataccaaacttggtgcgcggaggaagtttctccattcaatttttcgttgcaataataagttttctttctaatttagtttttagtttattttcttgtagtgtattgtgagaataatgaagcagaagaaggctttaattaatttattctatttgccttggtgaatagtatttttccctttacgtctcctattaaataattctttccttcattagtgataaaagcattaactaccaaaagaaaagaaaaagtaaaaagtcgatgtacgtacacaaagaaccaaaacccaaattactagtttggttttaagtagcctaaactaaacacgtactcttctatatattaccaatttgtacatacataattacaaaaattactctcaaattgaagattagttttgattttctttcttagaaacaaattcaaattagtgtttacgtacattaacatgataccaaactttg

SEQ ID NO: 40043 - DNA, 2336 bp, Cannabis sativa
aaaaaaacgtaagaaaatcaacggcaagattattttataagtgaattcaaaataagaagtttaaatgacatatcaattatttaataagtaaaaaatgcataaattttatgtaagaaggggcatattattatcaaaatacttataaaggactaaataataaattattttttatagaaaaaaataattgagtattggggtcgatcagatgcccccatcataaaaccaatgtaacagtgcccctaaaaatatactacaaattctcctaaaaattggatgagaaataaataaattaatactataaaattgcaccataatttaaacttctttatcaaccctttagatcaaatgaacggccacgattataaaaacaaggtgtgtagaccatcgagaaaataaaaaggtgaaaacccttcttgtttttttttgtggaagatggacatctttgtttcccactaacacctttgataatcactactctcaaatcaattatgacatatgacttataacatatataactcgcctataagggtggcaaaacagctatccacgccacgtagattttaaggcggttaattgcagcaaaactctcaattaacccttaaaatttatttgcaaaatttctaaaattacgatacctttaagtaatttataatttccatctaaaattagctgttaagtgtcatgttatattgtctatttaagtagggtatgtgtgtcacaattttatttgtccacataaatatatatatttttggaattttataagtacctgatcattaaatgttaagtcattatctgcgtgcaattttcttattggtatatttaaattaatttttttaaaaatttaatgacttggatcaatcaagaattgtcatgtggcaatttacttaccacttaatagctaagtatctacaaaagttccaaaattataacttatgtattattaccgacaaaaattaaacttagatatttatttgcaattgagagttaaacttaagtatttatgacgcaaattactcttttaaaatatatgtggaccaataaaattgtgacacgaggacaatacaacatgacacttaacagccaaatttggatggaaactgtaaattgctaacagtatcgtaattttaaagattttaccgctaaaaaataagttatatatgttaagtgcaagcaaaataaaagtactgagggttttgccgcaattaaccttcaaatttatgagttaggattgaaaaaattaggcacaagtaaaaaacgaatcgacatgacttgacacaaaatagaaataggtcaaacacaatacgacctattgaatatgaatttgacacgatttttaaataaaataaaataaaacattatgaataatgatatacaactatgtaaaaatatatgtttagtgattcacttaaaaaatattaaatttatttttaaaaaaaaaaattgagaatttttaaaaatctaatttttaatatagccataaaaaaaaattatgtatacagatgtatttaagttttctaataaactaaattaatcatttttttatataattccagcttcaatattagcaaaacgggttaaaatgaatcaacataaacacgataagattttttacaagtcaggtcagggttgagaagattagacgcgagttgaaaacgggtcgacacgcctgacacgaaatatataaaagcgagtaaaataaaatataatacgaacactacacgatgacacgttttgccactcctaccagcatgctcatacctagatatatatactagtggcgaagcacgttgtgcccatatttcaatcagtaaatatgatcgcaacatgtgtataggaactcaaaaataagtaggctcgcatgttaagataattaatgtattattttaatgcgtctcggataatactcgtattactcaaaatttaagtcttgccttagaccaaaaggataagccaaatttactaatcacaaagtagtaggcaagcgagatgaaatacctacactatagcctcctcaaaaaacattgtacatacaaaatatggcttccgaagatttgtattaataaatatgagtttagcgagaagatgaaagctaagatggttgcaagatcgaatgctttcatcatgagaagcacaagaaatacaatttgaaagagtttgcttataaagattatacaaaaattatccaaaatctcgtttaagataaatcctttacaagatgaatgttcaacgaggcattctatttgtaagaagcatccctatgatgtatatcaattcatccacgttatttgctaggaggacaagtatcgaaaggaaagacgattcaagttaataac

SEQ ID NO: 40044 - DNA, 1950 bp, Cannabis sativa
gggcggggcggggcaaagacccgattagagacccgattgtgtcggggcgggactgccccgtcgggtcggccccgacccgatccgcgaaaaagctttccaagacactcaccttaatttttatatttggaattcccttcttgtagaccgagtcgctcataggtttgatagctggtaccctagattccatgtccagattaattgtcacaagtcataatatggtatagccgaacaatatggcatcatgacagatagggcaagtcatttagatgcgagctgggatttagaaccaatcacgccctttgatatattaaagattacaggctgcagggattatagtggatattatggttcttctaccccctcttctagtgatagctcgccttctagtggctttggtaaattccttagatggaaaattatactctcccttcctttttcatctgcctttttaataattgcaacactttactttgtcttgcagacatgggttttgaagatgtcatggaccggaaagggaagaaaaggggaaccaacccagaggttcctactgacatcgaggtagtgcctcctaaaaaaggcaaaaaaaaaaaaaaaaaccactacccgtaagaagaagatgttgtccgagcccattgacctcgaggcctctgaaaccgagacccatgaacagattcctccttcgatcactcccaacaccaatgcacctcctcttgagacagctcatgcctctgcttcctcgagccaggccattgaaactttgtcggccgcagtgggagaagctggttctgaatttgcccaggcatttaggattgcctgctggggcaaactcaaggctctccttccccaaaattgggatctaatcaatcttgggagtctcgaagagacgcttgcgaggaacctggactacccttatggtaagttggttgtattgttattattattattatttttttgttcctcttattcatttgctcgtaattctccaggctactttcctttcttttacctacaatcgacgactcttggagcggcttagatacttggaaggcgaggtccaaaaattactagcccaatgtagggttgtgattaagcaacgggacgacgcccagcaggaaatcacctgtctcaaataggaggctgagaagttgaagaaagatctcaaagaagccgagaagaccgacaagacccaggctgatgaatttgagaagaagctcgatgagaaggaggccaaactcacagggaaggaagctgaaaccacagaacgatgtaataaggttagcctctgtaccgtataccgagcctggatggcgaatccaatatggacacaagcttcatggaagaagaggaagagaaaactttggcttactgcgagaatgccaggaaggaggaggaaaaggccgaggcagaggaagaagaagaagatctatccaagtctcccaccatgtaggcttggtttttattaatctccttttcttttcttttcttgaaaatggccttttggccgagacaatggtttgccccttgtagcactttttgtaaagacaaatttgcgaagttggatggccaactttgctttttaatgcctcatacttctaagtttgaacttcaatatgtagttgtttgcttgcatctcattcacaatttaaacaatcatatgcataaagtttcttaggggtttccattgctcgtatttctctctaacgttaagtagttaataacctactttacgcacgagcaacttgtcatttgccctacactcgatttgggagcagtcattgattccgcatcgcgatcatcagtagtgatcttatttcaagcaaacttaaatatatttttaatgacctagtcactatgtatatatttttattgcttgcatgagtagttagatcttctacccacgtgttaggtttaagtacttttttcaagacactttgatgtctcgtttaatac

SEQ ID NO: 40045 - DNA, 1370 bp, Cannabis sativa
aaaaaaaaaaaaaaacaaaaccagcaacatactcttcaaaatgtttaaaaagtcattgttgcaagtgcaacaagtttcatacggtcattgttcgtggtttgtggctttagtggaatctccggtagctatcgtggtcattaatgggttttttttaagtaaaaatagaaagatagagcagagagatgagtgagttagaaagaaagttattttttttaagatgtaattattaatatgagggggtaaaaaagaaaaaataagtcaaaataaatattatttagtataaattagttaaaagtctaaaattgataatgggtatatttttaagattatataatgaaattttccttacaagatctttaatccatactaaatgtaacactaaaatattaaatttattgagatgttacattaaaatcattctaattatattttaaattttatcctatatataagattatttattatagtgtttcattaatattagcattaaaatttaataattcttgtgttaataataatttaatataataatataataataaaaaatataattttagtgtaatttttaatattataattaaataaaaaatatttaatgttaaaatttaattatttttgtattaatttaaccttaaatttaatatttattattggatggtattattattaaatatttatcactattttatgaaaatatctatatcttgtagattgtagtagtttgcagatagaaaaaaatttcaccataataaatgtcgtcaatgatttatactctaatttttaatatattctattaagacaaaatagaaacggaaacatagtacaaaatgtaaactatatgaagacaaatatgtaaaacaaaatgtaattatcaattattatatttttttcccttaataaatacttggtttttatttattggctatgtttttattgattatcttttagattatccatgtatttaaattaatgagacaaaatgaaacttaagtaagagcaagttgatatgtggtgacactaattatattctatcataattaacaagtcacataacctgtcactaccggatgttgattatatttcgtgcaattcacattaacattttctttaatggacattaataaacacacaaatttcctcggccacaactattaaaacaaaacaaacaaaacccaataataacatcttctaaatatattatcttacatattttttaattaaagtgttacacatttttagtgttatgttagagtggtccatcttagagcatcaccaaggacgcatcaaatttggtgatgcagtagaattagccctccaacgtagctgcaaatattacactaaattgttgtgtgtgctacagtgcacggcat

SEQ ID NO: 40046 - DNA, 1104 bp, Cannabis sativa
  modified_base (109)..(116): a, c, t, g, unknown or other
ttttttatatatatttttataaatggtcctttaataatggtacattatgctagaaaacacatgatacatgtttttagaaaacgcactatctaataataataataataannnnnnnnataataataataaagaaaaaaaaagaaagagagccaagcaataataataaaagtattaataaaaaatatgtccctacactgcacttatatgtcactataatatttaattaatttaccgacaataataataatgaatattgttacgataattttgttttatttttttatgataaatcaaaacttttttgaatattatttaagggatgcctatggaaaaatataaattagatttaagtattattgaggtaattatttaatgattattaggagtaaattgaatattggcttaattatgaaactagtattatttgtactgcaccgtatagtatggtgcagaatattcacttaactacgaaacttgtattagccaaaacaaatattaaaaagtgtaaaaatatttacattacaccatatataatatatattatattttatatattatcatagattttgataaataatatctttcaagttaatgatgataatgattgataactctaagatttagagttatttttattatctttaaacttgaattctaaactaaataatagagtaattagtgtctatattatgtaattatgtttagtttgttgtgtctttgtaataaatggatgtgtgtgtgttaataagtgttaaatagacatatgttattgtttttatgtgtattaagcagaaaaatgcgaaaatgagtatttggaaatatttgggacaagaaggaaaaagagcagaaaaagacttattgctgactggcattgctatagcaacttattgctgactggcattgctatagcaatcatcgcgtagcaatttgccagcctagtaagtgtattttggcaaacaatccagttggcattaatgaagaataaaaggtgcttaggtggtgaaaatacggacaatgactcaactaatatgtgaaaaatgaagggcaagtggaccatgacttggatttctaattagggtaaactttagtaccctaattggggag

SEQ ID NO: 40047 - DNA, 2181 bp, Cannabis sativa
ttttgtaaagttacaattaattccaaaactcagaataaattaggggcgtctgtgaaagtaataagcaaagtaagtatagtagctacacatagttgtattgtattaaatgtctcataattatcaaaattaatttattactatgagaagatatataagatgattagtttacagatctacgtcatttatttcagccaaaatagataatatttatgtatatatatatatataaacatatatatttatataacaaattgtcttagggacgtagacgtgctatatgtatagattattaattagatacctcttgtatttatatatataatataaataatatttattgttaagctatattggatttgagagtggtcattgaaccacttaattaagttgacattattgttacattacatattaattaagctaaatgaaaagatcaggtcgcatttagttgaaagtaatgaaatagaatgaaacagatataaaataattttcattttattttttgtttaattatattttaaagtattggaatatcattttaatagaatgtcatttttatcatttttatagaataactattttattttaaaatagaagaaagtaccattctaaaaaatttaatgatttctttttattaatttttttttatacatttaaaattttattctatcccattcataatcctaattttattctcaattctattcctatgtaaatgccacctaataagatttatatattatatttttatctattcctatcattactagaaaaaaatggaatatttacataaaaaaatataaaaagaaaaaaaacattacccctatatttttacaagactattcctatatttttacctttcttattattttttttttaattttttttttttttttatgaatgagctaagaaattcattaccaaacatgtttaatacaatctatgtacaccttcaaataggccaaagtatttatacagaagtataataaatcaagtacatctattataaatcatcaaaccaatctcaatccctccttataatgttctttggcattacataaataattcggttcttaactaatcagtttatctgctgtagtagttgctgcatgttaacatcatttaaattccaaatttttccatgtcgaacataccaaatttgaaacactaaatttgccacagtaggagagaatacttgtttcttaaacttgttttgtgtagatccttcaatccatctcagcaacccctgtagagagccagtttttgcattccaattcagccacctcttcacctgggaaagacagtgaatcgaaataacacaatcgaaaaataaatggtcctttgtttcaactgcagtgttgcagagtatacacattggatcatctatcattttgaacttatataatctctctctcattttttatctatcttggatggccaaccaaagcacaaagctatgctttggaattagtttaccccgtacatctttactccaatagaagtgctcctgagatggattcaacagtttataaccagctgcaatatggtatttgtcccctgcaaattgcactggatcaaatatctgtctttactctgtctttggcttcaataatctttttccaataccagctgcagttggatggagtattgtagctccaccaatcggcttgatatatacattttgtatccattggatccataggttgtccttcttgttggcaatcgaccacacatgctttatgatagctgctatgttccaatctcatatgttcaaaaatcccaatcgtcctactttttttgatttgcaaagtgtattccaagctacaattcctgcaccccccatgtgactctgccctttctagagaaagcatctacaaacagagttattgtttcgattacactaatacatcttacacatgttataccaacttcacacactatctattttctcttattttctatcattctttttcagtttcatttcaatttttatcgtacaagaaacaaaggtactttttttagggaaaaaaagtacaagaaacttagttggtcaacaatgttacataatatatacatgtggatgtaatacatcattaataaaataatagaattataatgagcatatatagtatgtagtgtgagtgtttagacaaaaacgagattgaacgagagagaaagaat

SEQ ID NO: 40048 - DNA, 1136 bp, Cannabis sativa
acagtgatatcataagtggtgatccgattagaggaatacatgtaatggtgacaattatgtactataataatataagtggatgacatatactatcatcgaaatccaaacagtttttatttacaattgaaaaacatactcataaagataaaacagtaaagacataaatacctttgatgaattgaggaacaccaataccaagggaggtagaacagaaagtaattggaactatgataagagctttatgaaatctgacttaatggcacgacattactccctcaataatctgcactagaattttttaattaatacatatatataggtatattaagttatggtgccacaaaacaaacaactaagtgtgataattttattgaatgaattatgcctgtctcatacaaatttatataaatgtacagtttaataatctttgtaaatgtttatataaacgtgtcaaacttaacaagacaaaaatatataataaaacaaaaatttcatatacaagagactcaaagaagttgcttcctataagtttacatatattatttataaatgaaaaaaggattactattgactcaatgatgcaaccattcaaataaatagttacagtcaaacaaaacagccccaatgataaagttttccatctctaaatctaattacaaattgttttaacttatattcattcaattttattttgacaatgtatactaacccattagttattaatcatactcgaaaaaaaatatatcctaacataaaaaaatgaattattctctttaaacccaagtgccattaaccaaaacagttagagttatttgatttttatttttttagagaaaaaaattggttcacaggataaattaattggagttgaaaataaagttgttattaacctataaaattggattctctataagattatatataaaaattcaccccacatatagcctagtactaattgacttaagaaccaccatagctaatactaaaactcagatcacaaatcaaataacatgaacatatagcaagtggcaacaactgttataactcatttggttataatttaattaggagcttcaaatgagtgaaaggtccatttatcaagatcaacactgaagtggcaagtgcttgtgtttctc

SEQ ID NO: 40049 - DNA, 3882 bp, Cannabis sativa
  modified_base (3126)..(3126): a, c, t, g, unknown or other
atttgcttgagagcatagcttttgaattgtgcgagcagatcacgtattttgcttagataagctatcatcttttctccctgagctttgtactcccagatacatgatttacctttagttgtgagtcattgcagattcaatgtgtttggcatgcaaatcccgagcaagttttaggtcgaaaataagggcttcatattgagtttcattgttggatgcttgaaacccgaatttgactgctctgtgcagatgttgcccctgaggtgtgacaagggcgatccctacgatgaacaagttatccgtggccgacccatctacatgtaacttcctggttggtttgtcttttttgttgttcggttgaggttcttatactagctcagggttgttttttgaagtgttatcttctttacccgtacattcaaccacaaagtctgctaaggcctgtcccttaatcgctattcaggactgaaagatgatttcatacttgcccaactccactggccatttgagcaaccatccagaggcgtcaggtttatgcagtacttggcgtaatggttgattagtgtacacccgaacaagatgagcctgaaagtaaggccttagctttcttgttgctaagattaggcaataagtgagcttttctatcaacgggtaccggccttcagcttcaatgagtcttttgctgatgtagtaagtcgaatgttgtatattgttctcttctctgatcagtacgacacttacgacatgtttcgtgacagccatgtatcttcctaattcttctccgtccagaggttttgagagtacatgaggttttgcgagttgcatttttagctcttgaaaggtgttctcgcattcctccgtacattcaaattgtttgttttctccccagatgttgaagaatggaacacacttgtccgttgactttgaaacaaatctactgagtgcagcaatccgaccagttaaactttgaacttccttggtttttgtaggcgatttcatatccagaagggcttgaattttctctggattagcttcaataccttgggcattaacgacaaagtccagaaacttacccaagctaactctaaaggagcaatttaagatattgagtttcatgttgtatttcctgaggactttgacgcattcgtccaggtcacctatattctcccaacctttcttgatttgacgagcatgtcatccacatatacttccatattttgtctgatctggtctttgaacattttatttaccaatctttggtatgtagctccggcgttcttgagaccaaatggcatgaccttataacagtatagacccatatctgttcgaaaacttgtatgttcttggtccgttggatgcattttgattgtaccccgaatgattgtaccctgaataggcgtccatgaagcttaatatctcatgcctttctgttgcatccacaagttgacctattcttggaagtggaaaacagtctttggggcacgccttattgaggtcggtgaagttgatacatactcgccattttttgttcggcttgggcattagtacggggttagctacctaggctgggtagaaagcttcaattatgaaattgttgttgcgcagcttttctaccgcttcttttagtgctagggctcgttctttgttcaacattctccttttttgttgaacgagccgaaagtttggatcgatgttcagggcatgtaaaattatagacggatcgcttccgaccatgtccttatgcgaccatgcaaaaatatctaagtttgctcttagaaattttatcagtgctgattttacttcgagaaacaaaccttatccaattttgagttttctggtaggaacacttgggtcaattccaatctgttctaatttttccatcggtcgaacatttgtatttggttccccaagtcagggatccacatcttcgtccccgccttgggcggttccctatttggcaatgctctttcccttgtccgaactttgactggacgattcttcctttttagccttagttagggcaaggttgtaacattcccgtgcaacttgttggttttctctcaggcaccctaccccattctttgttgggaacttgatgcacgaatggaatatcgatgtaacaacttttaagtcgtataaggttggtcggcccaacatgacgttaaaagctgatggaacatccaacaccaaaaattgtgccatcatagttatgctctttggagctttcccaacagtgaggggtaagcaaatttgccctaaaagtgcaacactctggctggagaaaccgtatacgggctggaggcaacagatcaaatctttgagttgaggccccattttttcatatggtgttttgaacaggatatttgttgaggctccattgtctatcatagtgcgggccactgttttgttagtaacctgtacttccacaattaatggatcattgtgtgggaagcgaaccttgacagcatcctcttcattcaatgttatagtgggttcccctacccgtggtatttttggtttcctttcttctacggccagcaccacttctttttgttcgggttgtaaggttcgggcatacctttcccgagctttgctcgaatctccagctatatgcagacccccaatgatgacttgcaaatgcccatctactgtggaggcaatactaagtcttgcttattatctgtctgggcggccctctgattctggtcagccttgacatatttttgtacgtgtgggttattttttcttattaggaattcaatttctcgctttaaattgttgcattcattggtgtcatggccacagtctccatgaaaatggcaaaatttggacatgtcccgcttacttatgtcctttttcatgggagcaggtttcttgtacggaaccactgactgagtggccatgtagatggtttccagatcgtcagtcaggatagagaaagcagtgaatttggagggattctctctaggggtctgttcggctttgttagtgaactttccctttttttccattgccttgtttgttgttattgttaaatcgtttactgcctgagcttgaactactaggatactgggggttttgaacagacgttccagctgagggagcttgtgattggcccaatttaggctcganttctgctcgttgaatggcctcttcgagcttgttgaaaccatctgcgtggttgagaaagtcactcatagaatctactgggccacatttcttgatgtccttccacaactctccaagaatttcggcggctaatttcccttcttcagttaactgtactacttttgtcgcctccgtcatgaatctgcttatataagcccggagaggctctcctagcctttgcttcacttcgaccaggtcttctaaatgtaacgggagttggcgtgaagaagagaattgtgcatgaaattccaagaagaaggccttcgaagaattgaaacttcctggtgtcagcttgaagtaccattgttgagcggcttttgagagtgtggctgggaaaactctgcaacacacatctcctcgtaccccttgcaaatccatttgcatttcaaaatacttaagatgtgataagggatcttctttcccggtatacatcttccaggtcaacatcttgaacttgtggggtagctctagaacattgatctcttgagtaaatggggatccacgtgctcggtccaactcgagatcattgagcgtttgaccggccaggccttggaacatatttttcagttcatccaactgtgttcgcacggatggatgaacttgttcggcctcttggccgaccagtgtcacgtcaagatctctttgagctggatcttaaatgcgaaccccgggctgagtggctggttgaacatattgttcgtctaaccctctccttctatt

SEQ ID NO: 40050 - DNA, 1889 bp, Cannabis sativa
  modified_base (1861)..(1862): a, c, t, g, unknown or other
aacttacatttgaggatgactagttttctgctgtggggttggtatggaaagatagactaagagttgttatgtattctagctacttcttcctgttcaatcaaactagtcagttacagatttaacaggttaaattgagcaaattagttgtttcaaaacttagatggcttgaaatttttaatcttattggtagaattttgtttcaggcataacctattggtgagtgttgtccaatgaagtaggtagtgcaactaattgtgttttggatatgttgatttgaagtttttctagctcattaaaattagattatggtgttctttttttctatgatagtgtgccttagtagtatctgtgctgctattcaatttggtggcaagaggttagttgccttttttaatgctattacacttagtgatcgctgtttttgtctacatttgagtttaaaccaggtagagaggcaaattcaaaacttttccttctgtttgtagtgatgtagtctactttattttattgcaaaagctcggtcgatgttgatgttgttcagattaagggagtagaattagaatttggtgaaattgagaaacaatagtacctgtggattgcttgaaagtttcatgtcaattggagtttaggtgtgacaatttccaattaaacaaacctgtattaactgctgagttgttctgtcttcctgccttgtgtagtttatttatttttttcattccatttgtttgttggggttaagaataatgattgttatataccagaacaaaacatgtgtgcttttcacctattaagaacttctaattttgctaatggaaggaataacagtgagtgtgataatgaaataacacatgagagttagcgtaaatggttaaatacattatgtttcggctgatgtttgaggcacatctacttacctacatctacatggtagttggtatagggagctcaaatttaaaacaataatgattgattaataatggaattacaacactctttttttcttacgtatgtctgtacagcactaattatggttgtagtctattgattcgcatgcttctgctgccaaatgaaaaaaaaatcttggatgaatgtattgtaagtgttacattatgaacacagtgtaaaggcttattagtaatttgtaaatggcgtgagcctataaatgtgtaattggatagtcattaatggatatggattgaaaaaatagaactttagttcatttgggagattgacactatttcgaagagtgcacttggagattcgtccagtctcgaagagaactttgtaaatgacagtgtaatagtcctttttgagacaggacaaatctccaaacccactcttcgcgacagtgtcaatgtcttaattaaatcaaagttctattttctattccatatccaatttactaataagcccttacactattttcgtagtgtaacacagtaagaggctgtttggctttatagtttaaaaactgttttctgttttttaaaactgaaaataatttttaaaaactaataggggtcgtttggcaaaatttttaaaaaagttttttaaaaattgagttttaaaaaactaaaaaacagaaaacatcaaaatgttgtttttaatattcaaaaacaattttttcttaatgaagttatctactttcattcaaaaaaatattcaaaaacaattttttttgtctaacatattatattttgtattttgctcacatactcggatcctagacccgaaactatacccaaacttggatccggatgggttaatgtcatggtatggtgttaaaatattgaatctaaaaatagtttttaaaacttgtgccaaacactattgaatttttaaaatgacaaaaaactgtttnntattcttacttttaaaaacacaatttt

SEQ ID NO: 40051 - DNA, 3679 bp, Cannabis sativa
atcttttcaactccacaaataacacaacacacacatacactaatacaccacacaacacatattgtcttagagctaggatactaaaatctcaaaaataaaaaatagtaaaaattagatacaaaattgctttaataaaactctaaatgtcatcttaatatatgtggagtttgtagtgtcacactaaaaatagtaggacactataaaatatactatttttttttttttagtttttaatattaaaattatgtatttatgattaaatttttatatttatataaatattctaatatgagatagtttaataaaataatataataataaaaatattttttaatctaaatttttatattgtagttggaataaaaaaaatttagagctaaaattatacttttgatgatattttgatactatagttaaattttaatattggagttgcccttacaaaataaatattctatttattctttgtcaaaaactaaaacaattcttatattattttattaaatttgaatacaaatagtataatatagattgcttttcaagtgcaccaataaacttctatcatatttataatatctgaatagctattatcttaatttttttttataggatggtatatattataatacggaataatttataatataaaaattaagattaaataatttattttacacgtatataaaataaaaaaaaatacaaataatataatttctatagtgcaccgatgcaccattatctctttcgacatccaatagagtattttagtttattttttttttcatgatcatgtatgttatagttatctaagatattctgtaaaattttaaaaaattcgaaaaaatctaatacactgaaactagacttcaaacagtctattgcacacgtcattctaaaatatattgtttaaatattattctctatattataaattaatctcaatttcttaaaattatgtcaaatatcttaaataactatagtatacacgaccataaaaaaaataaatcaaattttacttggatgtcaaaacaatatagaatgcgttgatatatcttttttaagataccaatatattaaaaaaatgtattccttacaaaaaaaaaagtaaagattacgtatagtgccaaccaaatagcaaatttgctgttacttatacagttggatgaagtgaaaatagaatttcatacaaattgtatgctttgctagcttagtgtggtaatgcaaactaccattttgttattcttctttataagaactttttctattgtcctatcattacaagaaaaagagaccaattgcgacaacacctactgcaaattcaaggatgacatctatgtaagatcgccacgccgcattatccatatctgagtaaaattttctaagtactttccctttaatattttatttataaggttatattgcgagaactaatcatcgtaatagccttataatttggagcaaaatgtattgcacaaactatatatatggttgcaccaaaaaaatcaagggatatatatggtgatgaaaagtagtcatctagatgaaaacaaatttggcaatgaaacaaatagggcaattggaaaattcctccaaaatatttgcatatattacgacaacaagttgtcgcagtaagggtgacaagtattttggacgaaaatatcttacgttgtattttatgcgcctatttttaataaaattcttttgtttaaccaaatatataccctatatatttgatttttttttttttacatgtaagtatatttatatttgtcacctacacaaatgagccaactaaaatgatttattgtctcaaaaatcctactacgacaactttcgacgtatgttgcaaaaattattgctgctatgcaagtgcactcgcaatttgtaataaatcttggtaagaccaagtatcctcctacaaggattaaattattaattaccaattaattattgtgtagtttagtttataattggttaaccatatatgtttgtttgtaacagtaaataacaaaacataaactattgtaaattgcaaaaaataataaagaaacataatataacagaagaaataaataaacagttaggtgtttaaatctcatcaactatccctcctaccagttattaatgcacattttcttttcttcttcttatcaagctagctaacaaattattaaaagcaatttataaccagttacgaattacaaacctcgacattgatgagaatttccatatttttatgataaattcatcaactaggaaaattaacattcacaattttaatatgctcctatatcattaagttaatgtctaacctatcatatcataattaaatttcactttttagatttgattcaaaaatcactactacaaaataccccttccatacaaaataccccttccatgaccatttttcatgtctagtatatattggtgcaggacattaatttttttttttgccatgtccaacattttagagttttatgctttaattaaaactccaattgaatatgtacttttattattattaataatcaataaagaaagtagaaattattctgacttgaacaaatcacattactcacatgccatattcatgattatttatttaaaattaaattctattaaatcctaagattaatcattgcactaagttaagcgttaaattcttttcaggactttggtaaaataaataagatcaggtgtatttgttacataagactagaccggtctggatctaatgttataaatagcagaatgtaccgttagctaactaatttagtcaaatcacggatattgaccgtcggccaattcaacctcaattatgattgataagcattctaactaattagattattattgggttccttggtctgttcattaccaacttattgttatatttatttttatgcatttttagagtccatttagtgtgtatttttagtatttttatgctctattattcaatttaggtttgttttcttcttgttccaaattttaatggtaaaatacatcataaagattgaatgagagaaaacatgctaaacaagatgagttttatacatttaacatgaattattgagttgtaggatacaatgggcaaaaataaaaataatataaaagaaattaattaattaattattagtatgaaacaataaagtgacacttaatgaaaaaaatgtttatatgtacaatatttttcgtgactccacctaaacattttcctataatttatactgttattttatttttgatattgatatgaagtgtattaatttttgtagctagtatttgtgatgtccaaggtgcattcatagattgaactttgctttaggtcagttttgaagtgcatggtgtaatatatacacttactcattttcacttgcattcaattttattttaaataaataaataaataaataaaaccaaacagagttatatttttctacagttccgaatatctttctttcttcttcttatttttttttttttattttcaaatcacatcacatctcatatcatatcaaacaacttatctatgtcttcatatattctcttcaatgagctttctcaccaaaaactattacaagatctacctagccttgttaggaaacctaattaactcagccattgatattgtgatagtgaggctatatagctttggtataataagttttttttt

SEQ ID NO: 40052 - DNA, 2472 bp, Cannabis sativa
ctctttcctcagtaaatcagtccaataaaatcattgctatcatgttatggcattatcgtctaggtcatccaaattttcgtgtatctcaaacacttactcccatccttttttgtcaatgtaaaccctgagtctcaggtgtgatatttgtcaattttctatatactctcgtcactcatttgtcccaagatctcatcaaccctctcaccccttctcactcattcaccaagatatctgggaaccatccaaaattcaaaatataagtgggacaagttggttcttgttactaattgatgatcatagctgcctcagttggacatttcttatgaaagaaaagtctaaaacaagtcatatcttccaaaacttatacaaaatgatccaaaaccaatttcaacgaatattcaggtgttaaaaactaacaatgctcgtgacaaaatggtgtttacaattctgttcttggaccgtgtttacaatcaaataagattattcatcaaagttattgtgttgacacaccacaacaaaatggtgtggcggaatgtaaaaatcgtcatttgcttgaggtagctcgatctttacttttttcataacatgttcaagaaagattttggggtgaacaatcctcactactacttatctcatagacaaaatgccatcaagagtcttaaagttcaaaactccactgcaaatcttcttcgaatcatatccttactttcatcttctatctcaaatttccctttgtgtcattggttgttttgcatttgcccatgttctttcctcaaaccgaagcaaacttatgctcgcgccaccaaatgtatccttcttggttgcccatccagtaagaagagttacaaatgctattgccttgtttctaaaaaggtgttccactctatggatgtcactttctttgaagaacaaccttactacaccaattctacaattcagggggagaaccagagtcaagaactgcaaaattgggactttgtttctctcattgacattcatctaattctcctcaagtacttcttcacaaaacacaaatttgttcagaaataatacgaactccttccgtttctcatactctaaatctttcaattgagccaaatgagccaagaaatcttcttccaatctgttcaagtccttctatccatatcccaagcaaataaatccatgtttctcacactccaaattgttcaattgagccaaatgagccaagaaatcctcatcaaagtcctcctgtccatatcccaagcaaagaaatccatgtttactcaaggagaaagaagcaactcccaagcattgaacaagctactacgtgaactcagcaaggtcaagattatgattcgatcccattcatcgttgacgagactagaccataatctattatagaagaaaatatgacaggtgatctgagcatacccattgctcacaaaaaaggggtatgctcttgcactcaacttcccattcacaactatctaagttactcaagcttatctcctacatatagagcctttatcacctacttggaccaagttcagattcccaattcagtccaagagcttagagcacctgaaaagaataaaaaatggatcatcacggatttatcacttggaaaacgcacaattggatgcaaatggattttttccatcaactataaggcagatggaagcattgaaagttcaaggctcacttagtggccaaatgattcacctaatcctatggcattgaatatcaggagatgtttgctcctattgctaagttaaacactattcgagttcttttgtctattgtagtgaataatgatcggcctttattccagcttgatgtaaagaatgcatttcttaacggtgacctagttgaagaagtatacagagatatccctctaggatttgaggacatattcacaaagggaaaggtgtgcaaactcaagaaatccttctacatcctcaagcaatcctctcgagactacactcaattccaattagatcacactttgtttataaaacactcagctggtgaaaaactatcgacatcaattgtttatgttgatgatattgtggttacaagaaatttcatgaagaaaaattactcatctcaagcagctcctttccaatgaatttgagattaaggacgtagggcaattaaggtacttcctagggatggaagtagcaagatagagacttggcatctcaatcactcaacgaaagtatattctcaacctcttacaagaatcagggatgatcaggtgcaagccagttgacacaccgatggaccctaatattaccagacttggagttcaaacagacggaataaaagttgatcaaggaaggtacctacatcacgtgggaaagttgatttacctaactcacactcggcctgatataagctttgctgttagtgctgttagtcaatttctcaataattcctctaaggaacacatagatgttgtctaccagattctcaagtatctcaagggat

SEQ ID NO: 40053 - DNA, 2151 bp, Cannabis sativa
tagtaaacaagaaaaaggttcaaagttaatatgaggttatgatgaagaaaaagaagttgtctgaagggaaagctatattagagtaatggttgataaactaaaaaaaatcccagatgatgattaatggtttaaaaggtcaaattactaacagttctgagaatgcatcaaactatgaagagcaatatgcataattagaaaacgtaagttaatgaaaagttaggctacctgattcagtgtttggtctcgctcatcattgaaacttctaccacgctttcctccaaccgcgtcaagttcatcaatgaaaataattgaaggggaagatttccttgccacaaggaaaaggtctctaatgcgtgctgcccctcgtccaacaaacatctccacaaattcactagcagaaacagtgaaaaatggtacacctgcctctccagccactgcacgggcaagtaacgttttccctgttcctggaggacccaccagtaaaacacctctgggtaattttgctccaagcttttggtagtttatagcaccttgtaagcatgaaactatctggaaacaaaaactgtgtcattaaagataaactaagaagaaacttcacaaaaaaaagctagcttttgcagttttctacttcttggagtaatcttgtcagcaaatgttttaactcatcaaaaaagagattctatcagcacaaatttgtaggtaaacactttcggaacaaactgaatcctaaaatgtctgtattgttcccataatcatttcttagtgtaatacataatatgttatatgtacatacgcctacatataccaataaattaatcccaaaagagaaagctccaacaacaaactatgatacacttgtgattctagtcttaagattttctatgtatgcatacacataatacatacagttttttgaaaaagagaaagggacctcttgtcttagacaggaccctccctgttatgtattgagaatcctcacttgtggcggcggaaaacattggttacaaaaatagccccagacaaacaaggcttataacaattagcacccaacagtggtatgcactcaacatacagttatgggtacacaacactcattgtggctgaaccaggacacgtttctcataattatagaagggattttaaccatatcaactgcttatatgtcaaaaataattatttatccggaaccacattcttataggaaaaaaaggtatatcattatctagttaatcaatcatctaactaccatgataagaaatgactgacaagaaaaaatattttaacactggatgtaagctcaaatgacaaaatgtttagtgcttacctccatgagctccactttagcagaatcaacaccttcaacatcatcaaaaccaactacctcggtatcacgttgcctctttttggcagggctgttagcagcagaaagttgccgataaaggagccacatcaaaggaatcaaaggaatccatagagttagaacagttatcaaaatactcctcattgacatcaataatgattgaggcgctgagctataactagttcccttgtctcgcatcaagctaagaagaaacttttcatcatggtctacttttcttgtgccatactgccactcagggattgaagcccgagcctttgaggatttcttcaatatattgaaactttgtggtgtgacagatcttgtaccaatatcactctcaaccttactggcctcatcttcatttggcaaacttattggcattgcttctcccttggacttttgagcacctgcttcttcactctgcaagtttgtattgtaatatatacggcgagacccctcttcaatcagaacctttgtaacagacccgttttgaaggttcgctatcaagtctgaatatggaactacttttggagatggcaatgctgttagtttcaaaaacaaatagcacatccccaatgcaactgaaacagagccagatagcaatactcttcttatattcttgcgcacataagtcttgacatcattcaacattgtctcaattgaaactctcttcattctaatagtcaataaccgcaatctcggacgtaatctcaataaaaatctccttctcattttgcccttttcctttttccctaaataggattgtttatctccattgtttccactcctca

SEQ ID NO: 40054 - DNA, 1090 bp, Cannabis sativa
  modified_base (1013)..(1057): a, c, t, g, unknown or other
tcagctactccgtagtatgacttagtacaactaatttgaacacaaaatctgggataccaactgtcaaacctatgtgtaatgtgatctacgaggaagggatgccaaatatagaagttaaagcggctatctcgaaatgtaactagagtgttacattcagccctaagaagtgtgggtgaccaaccacattgattacctcgggatgctccttcaccggcttcctgaggggcagtatgctaaaggtaagtgcccgcgccacgagatcttaagctgtctcgtcgtctgggatgggaacttgctgccaagaagaatacttgggatatttgtaattacaagtaaattccttgtcatttaggatatccacagacctcagattaatctcgcttagaaggaagttgtaatgcccgtatttaaaatttataaatctcaaaagctatttttattatattataattatataaccatataggtcgggatctcgagttataaaatgcagttgaaaatcatatttactattacaaaaccccttgacaattttttttttttttttacaattgacacgcatctacaaaatacaattcaaaatattgaaagaccgaaaccctccaggctgcactgccacgatatgtacaatcactgccaagccccaactcactgctcgtccaacttagcttttcctttacctacacaatgtagcaaactgatgagtcgacagactcagtaagatatgcataacatatatgaaagcaatgctctaccggctttatgcttaagccgacctgagctcatcaaccgagctcaccaaatggttaagaacgttcttaaaggaagtacgaccactgtaccatatgcacaaaagtacatactctgtactcgtgttggtagggtcttcactgtacttctagaagttactaagtgttgtaccacatgcacgacgtaccccctagtactcgtgtcgctaacactgtaactattctaaaatcttacactgtactaactgttggaatttattttannnnnnnnnnnnnnnnnnnnnnnnnnnnnnnnnnnnnnnnnnnnnatatgaactttctaaaacgataagatcggaaga

SEQ ID NO: 40055 - DNA, 1764 bp, Cannabis sativa
catgaaaaaggtttttcctttttatttgttttatacaactagaaagacccagaaaatgggctttagagattattcactaccaatttgattagagatctgttctttatatggttttatttatttcagggagctttacatgaatgacataagtggaaaaattccagaggagttgggcaatttgaaaaatctagtcagtatggatctttataacaacaaatttgaaggaaaaattcccaagtctttttccaaattgaactcactcaagtttctgtgagttaactttagactcattagccatttatatatttagtaataatgccaacattttttggtaatttttttggcttaatgtggataaaaatctgaatgtacagacggataaacaacaacaaactgtctggaacaatccctagggagctcactaaactcactaatctgaaagtcttgtaagtttttcatatttttcaatttgttgggagaaagaaattttgaaaaattgggtgttttcgattaaattcaatgggttttgattgttcaattggagatttttatgacatttatgatttgattcagtgatgtctccaacaatgatctgtgtggaacaatacctgtcgatggccctttcactacatttcccatggaaaggtaccatttgttatatttctcaacttgacatattttaggctttgaaaaattattcggtttgatgaaccaagctatgaacaatacaacattgcgccaaagattgtgttgagtgcatcatgtacgcctcgtgaagagggaaaagagtcggtttttttgtgttttcatctctagcgaaaagggtttaacagtgtttgtttcaattgttgaattctgatttttcgccattttatgtttcagtttcgaaaacaccaggctgagtggaccggagctcaaaggattggcgccctatgactttggatgctgaagaaaggtataggaataggagataggaagttaagtaaccatattatatgatgataaaataggtatgtccttataaatctactagtggcaaaagtcaagccagtaaataaggcgactcgactctggattttgcatgggaacttgttaaattattgcccctttttcaattataatgttgttgatttagtataaatcaaactaatatatattcatgatcataggatatcccaaaaatgttatatttggttctcttttgagctcttgcttgcttccctatcaatttcctaaattatatacacattttgtgtctagatgaatataaaagaaaaaacgttgtttcattttgtttagatcaagaattggagttccattgtttctttcttggagcaataatcaattggttatatattaaagttagtttcacattgttaacgtgtggaaataaattatcatatataagatgaatgagttactcttattattggttttgagatgaaaccttatttattttatcccaaattttatttctattttttggagatgaagatagctgaagaaattcagcactggtattgtgaatcacttttttcagtcccactctggccatggagaaacacaataccatgccactcttaggccatcttcaacttggacactaaatttggtgttcaccaataccaaatatgatgttatagattctttgattctaattacaacactaaaataatatttttcattattatattttttttagccaaattatcaatctttattacattaaaagtagaagtgttcataaaatattcactccaattt

SEQ ID NO: 40056 - DNA, 5157 bp, Cannabis sativa
  modified_base (351)..(351): a, c, t, g, unknown or other
  modified_base (437)..(441): a, c, t, g, unknown or other
  modified_base (614)..(617): a, c, t, g, unknown or other
  modified_base (1108)..(1109): a, c, t, g, unknown or other
agtctcttaattagtaaataaatcgaaaaacctcttttcttcacagttaagcccttgcttagtgaaaattaataaataaaaagtagtctaattttaaaaataaaaagtagtctaattttaaaattataattgattaattaaaactaattaacttggccctatataagcaagcttccaataagtagaactaaaatttatcaagtaaattttctaacttattaatttctccttgcgccactatagattcagaattgcactcttatttatatagcacactctatatgtactaagatatagatacgttatgaattatccattgttacaaaccaaatagtcaaagatcctctatanatgatctacatcgaatagggataaatttaccattctaccattcaatgtattttatctttagatcacttagctacctataaatgatnnnnnagtaaactaatataattagtaaaatgaggtctcaatcatttatctctattaagccaagctcgaaaaaaattatcgtttcacttttatatacttatagaaattataaatctgatatctatgattagcgatcccactcaattgaactatcatgttcccaagatgtatgtgttcannnntacgagcttcaacgaacaactctaagaacataaataatacaattaagatcgaacctaaccgtcttaggattaagatccatagacctaagatcaactagtgatattgacttagaaagatataaatggtaagtttatgatatcttatccaagttcaatatcagtccaatccaatgtatactccatacattcaatactagcatactttgccactgttctggaaaggacataacacttattcaaggtgtaagtataccttatcgctgatttatcacgtcagtctaaatcttgtgtgctgacaaatcatgggacttaaacttttgaacatataatcatgattatattccagtgtgttgagaacgctataatcatgaataatatatgttttggacttaatagactttatacattaaacatataatcatgaaataaatcatgtgaaccatgaaccataaaatgatttttgatattttattaattagtaaatctgattnnattgaaataagttttatttaaggcacaaaacccaacaatagcccactgacctcttcatcatgcaagagagttgtgaactgagtatatgacaataggtgaagagacacatctctagaactagccacctttaccacactaccttgccaagaaaactccattgttaaggctttatgatcatgtatacaaaggcccaaaagttcacgaccattgcatgcctagaaccacattgagaccgtagatcgacatgatgtataaatcaacaacaaaatgatgaccctataaaaccaacttaacatcttgacaaagtttcgagcatattaaaaaattatcgttacccatgtagaccttaaatcatttagttttctcccaaggcaagtgtaactgagtagccaaggactcttgaataaaaaatttgttactttcgatgtcaatcaaaaatttgagaatttccccaccaaattttcatggattaaaaaatttgaggatttgatgaattcaacaaggcatccaagctaacctcatcaacaatgttatcttctgcatctggtgtctccacccctctagtgaaagtaagtcatcgttatcctcatcagtaccacataaaacaaagacttgattctcacatttatgcccaaaactgtatttctcatcacaagtgaagcaaatgacacgttctctttatctcgcatctttgatggagtcaaccgtttaataggtagtggtgcagtacattgcttagccctaaacaacgttgggccattgatatgggaccctgtattagcgacaaaaccagatccattgataggtgatcccaaactctggccttgtttaggcacccaactagtgcaagtgttgctcacacgcaaacgactcaccatatcatcgttctaatcctcaaacaattgagctttgaccatggcatcagctaaatcatagggcctagaaatgagtaattcatgacagatctcaagcatcagaccccacataaagaaatttagatacatttgctctgagactctattagtttctatcataagttcctcaaatttggctctgaattgaggtatgcgacctatctaagtgagcttagctatatatcccaagggatcatcataaactgaagctccaaatcgcatatgtagagcacaaattaaagattcccaatccgcaattttgcctcacatctccatccactgaaaccatgttgattgtgttccatcaaaaagaaaaggcaccaccaagaggcacagtgtcgtatcgactcgatgaagatcaaaaaaattgatcttataaattcaatcatccacctcattgccatcacatcttagtaccttaactctcagtgtcttgagaatttgtattaacatcacgacaatccattttagcacctgaccattgcttgagtcgtaattggagatacattgttctcactaccagtgctaggcaacaatggaggtgaaatgtgagacaagtgctcattgagaatagccttgagttcttccatctgaaattttttaaacagtatagaagtaattttgagaaaattattgagaaagtgtagatacctcaataagtattgcacttatcaaatgagttttttttcctagtctatctacgagttctctttgtattgagttggatttcacgtagctaaagattgaaagttctatgaggaaattatattcaatatggttttttaatattttgttgcaaaaatatgatacttttagatttgatcattttttatggcatattttagtttttaaattattttatggttttttaatatgtttagatcaattatttttaaaaaagtaaaaaaatttaaaactatttcttctccttcattcaagtatcctacctgtctcacccccaacagtggaccaactgacctccgttcactagcgacacatccggtgactggcagttcaaacagaccatggatatgagatctccaccaccaaaactctaaaggatcgaacggattccaccgcaattggagatttagaaaccagtttactgaaaaatcgatttcataataaacaaatcttatatgagttttagtattcgtaactaacttattaatgttatgattacatggaagtaactgatttcttaattgattacctgaacagaattatttttaactgagttatttatcatgaaacgattttgataaattttgactacatagaaataaaatttatgtaattttttaagtgtttgatggtatttctttttatatgtatgataatttctctcatatttttaatatttttttaaatgttatatttagtagaattaagtttgtatattatagtagccataggcataatctaatagttctacaattaagtattaaattcaagattagttaggttagttaggactgttaaggatgttagttattttctgttattcaagttgttttactaaacaaccctttgtttactgctatatatagcagaccattgtatcccatttaatcaattctcaattgaataaaatcaaatagtttttcctctgtttaaatcctaatatggtatcagaagttcacctctgaagctccaagaaatcaaattgcagcttcatttttccaccgccattaaagcttcaagaactcaaattgcagcttctccaatggcaagaactcgggccaccttctctgctaccaccactgacaacgacactccagtggtcgatgcaccttccgctctgcaacacactgaattggcccctgaaactcaagttaatcctaatcctgttcctccaattaattcaatctctacttcttctcattctttgcacgatcttcctgcatatgaggacattcgatccccatattaccttagcaatgcagatcaccctggtttagcattagccactcccgtcttaacagatcgcaatttctaaccatggaaacgcgactttaaactctccattggtgcaagaaataaaactccttttcttgatggcactttaccccaaccttccccaactgattctttgttcagttcttggaatcgatgtaaccaaatggttatgtcttcttggatattgcactctatttcaccagaaatcaaaagtagtatcatgtattttgatacagcttcagaaatgtggacaatgctcaataatcgtttcaatcaaggaaacagaccacgaatctttgagttaaatgaaactctcacatatcttaaccaaggagctaaatctgtgagtgcctatttcactaagctcacgaccatatgggatgagattaatcaactcagaccccgaatcccttgcacctgtacagctgctacacaaaatcaagatcacttaaatcatgaccaaatccttcaatttcttaaaggcctcaatgattcatatcatgccattcgagatcaaatcttgttacttgatccttgtcctccattaaacaaggtcttttctatggttattcatcaagaaagacaaaggacttaggcaatagaacaattccaccccttgctgcatcaacaaccactaaccccactgtttctgatccaacagcaaatcaatcttctaaaaacaaaaggccacgacctcattgcacacattgccaaaaacctggtcactataaagataagtgctactttcttcatggttttcccctggctatggaaaaccaagaaacaatgacactgcaaatcaacaaaccagaaagcaggaatctggctctacttcacggactactgcacaaactcatcaggtttctctccctaccagtgatcagactcttactcctgcccaatgccagcaactcatctcaatgcttagccaacaattacaaccaactgatgcttctacatcagatgctgcagcagtgaacaatatctctggtaaattcaatcccttttcaattcattcttggattgttgacagcggtgccacacaccatgtttgttgttacaatcaatgtttttcctcttttacaaatatctcaacaaaacagcatgtcactctccctaatggcaccactgttaccattgaaaaaattggcacagtcacattaaataagcatatc

SEQ ID NO: 40057 - DNA, 1347 bp, Cannabis sativa
acgaaggttatctttcactgtttgtttgaattcctttgtgttcttatttaacatctgcatatcaatgaaaaacatatataaatatgatatatagaaaatactctctttaataagaaatgaaagctaattacttacctcaaaatagtcacaagatttagtttctaatgacacaattgcagaagcattacaggaatcatagttcacatgttgtgaggaaacttgtttaagcttttgctcccatagttcagatcttctcttgaaaatcttctcttcatatgtaccaaccaagagaatgaacttctcaactctagatagtttgataaactctgcttccttatcctccacctgattttatacatgtaaagtagtagtgaatagtgatcatttgttataaatttattgcttaaaaaatacaagtaattgcattgaggttggaattttaattaccttgaccatatcaacaagatagccaccaatatttttcaactctttcttataaacatccattaacaaatcaatggctccctggtacaagtaaaaattatataaaacaaccatgaataacataccacatcttaattagagcaaaagggttgattgagcatataatgctaacctcaggaagtttcaaggagggtgtgcgaggaagaaaatcatttccaacaaagaaacacatgaagataaagtcatctactattcgctcaatatcgaacttaaagctctcaggaggatcagaaatttgcatgtcaagctccaaatactctctcaatatccaaacatgcagaaactgagaaacagattaacaaaatgaatgagatataagtcataatatagctgaaatactatttaacaagtaaataaaaaggattacctcataatgcttcaatttaacagtggagtagccatgtttttcttctgagtttgatacatttggaaaccatcttctacatggaagtgaagatgaagttgctgctggtgtaagttggcttttatcaggatatggtttatagctcaaattgctctgttgctcttcaacatacacaacctatgaagatgagaaaaaaattaaaccaaacatgcatacatcttcacgtgaacctttactgtatatttcttattaatgacaacttgtaacgagtaactaaaagttagctttttttgtagtgaatacatttgcataacgcaaagatcaacaaaagcacagcttagctagttatcatactaaactattatatcttacacgtactaattccattccaaaacaatgaacattactcctaacaagaacagataagttttcagagatatttcaaatttgaattaaacctctctcaataatgaaaaatg

SEQ ID NO: 40058 - DNA, 2751 bp, Cannabis sativa
gttattaattttaagtatttctaatatagctcatcaataaattagaaatatttcttgaagtatctacacatttaacccatgacactctaatatctagtgacccacaattactaaaatagtaatacaccaatacatatgagtccatattaagaattttaatctaatagttggtactacctatttcaacaaggtgcatcttattttcggtggcccatcacttgagaagcccaaaattaagcatgcttgacttggagtaatcttgggacgagtgacatattcctgaaatttttcctaagaattaaccgtgtgattgaggcaaaaatatgctaaaaatacttgtattgatttgcatggccaatgatcattctaggaagcaactagaataacgttgtcaagattctagaatgaaaaatattctttgtattattgaaagagaagaatacaagcctataaatagagtgagctagtgtacacgagatctaaccaatactctagcagaatacaactaatttatgttataaatattactaattaaagttagttacaaactactctatcagggtaggctaaaggcttgaagagcctaaacttctctcaacacccccctcaaactgagattggaggagctgtcaatgctaactttagatctcaaggtaggaaaccttaagctggatattgctttggtaattaaggcaatcagtaatctgatctacataggaacatgcctcacttcaagttctttgttcatcattttttctcgaacaaaaagtacaagtctaactctatatgtttagttcgagcatggagggctgaatttgcagcaagaagcactgtggtgagactgtcacaccatagaattagatttgagggtaacgagacatgaatctcagagagaagagaattgatccatgtgatttctacagtcaagcttgccaagctcttgaattcagcttcagaggatgacctggaaacattttgctacttcatggatttttaggctataagatttgagccaagatagatgcagtacccactggttgatcttttatcatcatttcagatgccaaatttgcatcacagaagcctatcaaatttaatgagggatatttcttcaggtgaatgccatagtcaatggtccctgataaatattttagaattctctttagtgtactctaatgtgataggagagggtatgcatgacttggagaactttatttacacaaaaggagattttaggtctagtgactattagatactcagaccaccaactatagatctgtagacccatttgcagtcactagacctgcaaaccaccaactatagatctgtatacctaagaatttatttatggagctatctacattttccttgatcctatagatccatttacaaccaacaatagttcttctaacaaggagttcaaccacagtccgtgtcttatttttttttactaaggcatcaatttcttcatgcattgctctgaccactttggatacttaagggcctcaattattgagtttggaatcaagctaacaatgagcacttgtggcttaaaaatccattcttgaatttggtgtgcattgactgagcattaatagtggtaacatatgctggagtaggtgttgcaaatgttggagtaggtgtttcaaatgaagaggggaattctgttgatgagacatcagtacctgtgtttaaaatagaagcaacactagaagaagtgttaatggtgttagaaatggagacaattggaacattatcttattgatcattagtagaggatggataagtggatggtgaaggaggcagtggtgaaggatttacagggtgatgtaaaggtggggaagcaaagatactgggggaggggacatgatgtggaagtggaacttgagtctaaataatggaaagtatattgataaaaaacaactcttgagagataaattctcccttctagactaaaacatttgtatctcttgtgaatgaggctataccctataaacttgtattctgtagaacataactgaagattgtttttattgtaaggtttgagatttggaaaataggagcagccaaagacttttaaggttgtataatctggacatttgtgaaatagcatttgaaatggggaagtatgattgagttttggtgagggtaatctattatttgggtagtaacaccctactagtttaggcgtgttaacgtaatttttaacttaactgtgcagctcgttactaatcaatgagtttattgaaaatcgtgattaattaaaatttattttactaattataaataccaaaacaacatacttgtattaaaccgagatgctatttaaaaaaatatttacaaaagttttattgtgtatattacgaaagtttgtcgcccagcgactatacaaaataagtcctcttatccgaaagaccgtacgctccaggcctaatcgccccgacatgtatgctccctctcacggctgctcaaccttggccttacccttacctacacatgcaaacaatatatgtgagtcgacagactaagtaaaaaaagcataaataataacatggcaataacccagattataatcaggtgcccatacaccgaaccataatcctaaccccacgtctgatacagtactgagtcaagaacgatcatccgacagaactactgaccataatatcaacctatactcggtacgctagtcgtactctagtcgtaccgatgtgatgctgtcaaatagtacagtactatcgaccataatat

SEQ ID NO: 40059 - DNA, 2070 bp, Cannabis sativa
ttagcaactttgattccatgaatccacttcttctcttcaaatcttcgaatgacagcagaaaaacattcagcacaaacaagaaataaataaggagatatgggatccccctgtcgaagtcctctacttggcacaatcggccccaaagaatggccagttgtcactatctgatactgcaccgatgaaagacacccaaaaataagtcgaactcatttatcagcaaaacccattcgtctcatcattgcacacaaaaagtgccaatccactttgtcataagctttgctcaagtccaacttcagcgccatatactcatccttgccgacttgctttctctttaaatagtgcaaaacttcaaagctaaccataatattatcagtaattaatctcccaggaatgaaagcactttgattcaaggaaataatctcagataatagtcccttcattctgttagcaagcactttggtaatgatcttagcaataacattacaaagagagataggatgcaactcactcattcgatctggcttcttcttcttaggaatgaggacaatattagtatcattcatcccattcggcatttcctcattaatccaaaaatttctaacagtattgatcacatcattaccaacaatcgaccaatatttttgaaagaatttaggattcataccatcaggccccggaaatttatcggagtgcatttgaaacaccgcatctttgacttcctcttccccaaccggccgaagcaagaaaacattgtgttcctcccgaactgaaggagtgacacaatccagcacatcatcccatctagtaggctcagcagtaaaagctttgaatagaaatcaacaatgactgtctctaatccactatcccaatgtcgcaaggttccctcatcatctttcaaacagaaaatttgattgttgcgtcttctggtactagctttagagtgaaagaacttactattttggtctccttctttcaaccaaagttgtttggatctttgtttccaaaatgtttccctctgattaagcaccgcaaagagctcctttttagcactataaaaaagttgcttcccctcatcatctcgcctacttttataccttttcaactcccgattgcaactttttattcgagaagcaaagctcccaaaaacttattttccccaatcattaagctctcggccacactcctcaattttttccccaatgtcgtggcctctcattctatcccaacatcttcggataacctcttcacatccttggtgagtcgtccaccaattttcaaatttgaaccggtgctcatgagtgaaaaccgtacccatgcaaagctccataagcaaaggagagtgatccgatggagagacttctagattagtaagtttagccatcgggaagatgctcaaccaatcattattcaccaaagctctatctaatctagcttcaatccaattaggtgaatccctactcttctcccaagtaaaaggatgaccatgcatctccatgtctcgcaaaccacacaaccgaagtgcctcttgaaacccttcaataagccacaccggataaggttgtcctcccactttctcggattgactaaggacattgttaaagtctcccataaggcaccatggcaaagttgaacgactaagaagagttgttaacagatcccaagttttctttctaagactccgatttggttcaccatacacccccgtgaatctaaactcccgttgtccttcgaaagaaaccttacaatcaatatggttctcaaaaaaggtgtctaccgaaacctcatcttcattcttccatagcaatgccaaacccccacttcttccgtgggcctctaccacaaaacatccctcaaagcccaacgttctactcaaagtatccaccttcatctttttactcaaaatttcacacaaaaatacgatattgggcagttgattagtaaccaactctttaaggaactgaatattccgtgagcccaagcccacggcagttccaagataagattttcatgatgatgggcgagccccaataccaaggcccgccaaagatgagttttttgaaaagttactca

SEQ ID NO: 40060 - DNA, 1393 bp, Cannabis sativa
  modified_base (956)..(959): a, c, t, g, unknown or other
ataaaagttatactaaatggtactagtatgatgaatcaatgaatggtgacccatatccgttaggtaggcgaggggtcgatgatcattttgaaagtaatgattgtgaggatcatcctacataatttcttgatgatgctcaaaaagagtttattcatgatcctaaaaaatttaatagcatggttaaagatgtagatagggtcgttatttagtggctggggaaaaacaccgactacgaaccatgatgaaattttataacataaaggtggagaatggagtaagaaataagtgttatagtcaatttaatctgcttttaaagagatcctgccgatggaaaattgttttttggagtcaacgtatgaggtgaagaaaactttaagttcgatagggttgaagtatgagaagattcatgcatgtccaaatgattgcattttatatcgtaaagagtatgcccacatggacacttgttcggaatgtggtttgccacagtacaaacccaacaagagtaatgagattcgaaaacttactccaaagaaagtcttctacttggctttgattccacgactcaagcggttctatcaaagtgcagaaacttctaaaaacttattatggcacaagaaaaggtgagtgaaagaaggtaaaccccgacatcctgttgattcacatgcttggaaaaagtaaattatttgaatccagactttgcagctgaaccaagacatctatgccttagtcaatctgccaatggagtaaatccacatagatctcttagcagccgacatagttcatgccatgtgttccttgttatgtacaaccttcctcctcggttggtgatgaaaagaaaatttatgatgctatcgctaatggtttcagggcctaaacaatcgggacacgatatttatatttatttggcaccgtcagttgatgacttgaaagagttgtacgaagatggtgttgatgcnnnngatggttttaagaaagaagttttcaatttaaaggatgtgatgttatggactgttaatgatttcactgcgtatagtaatctatcagggttgagcacaaaaagctatgaaagttgtcctatttattgtactaatacacgagctcgtcggttgtcaaatggatgcaaaatgtgttacatgggccatagacgatatttgcccctaagtcaccctaatagaaataaaaaacaagcatttgacggtattgtagcacgagaagttgcacctttgccacttttagggcaacaaatacttgaagaagttgagaaaatagatttcaagtatggaaagggcaagaaatagagaaaaactaatggatgttttcaaagaaaattgattttcttctgtcttccatactagaaagatttacttgttagacattgtttggatgtcatgca

SEQ ID NO: 40061 - DNA, 1692 bp, Cannabis sativa
tttgataaatcatttcaaggaccagaaaccttgcaagcatttgttggcagtgccaacattgttgaagcttctcaattgtatgcttcaccagaaatcattagggacaccaactggtgtccagatataggtgctactcgccacttgactgccaatgcacataatctttcctacacatgactgccaaggtgatcaacaaattcaaatgggtgatggttcaggtttgcccattcacacagtagcaaaaacatcttttctttcttcctttcactcaaaaaatctggtgcttaacaatttgttgcatgtaccttccgtcactaagaacttgttgattgtctctcaatttgctaatgataacagtgtttgctttgaattttatccctcttgctgtcttgtcaaggatttggatacaacgaagatcttgctggttggaggctcgatcaaggtctatacaagtttgatgccattcaactccactctctcactcaaatagagcagcctaatacatcttcatatactttgtaacctagcttaataagttcaaatcctcaatgtaacactcatgttgtccctgttgttaatgctaaatatttattttggcataacagattaggacaccctacaattaggattgtacaacatgctttatcctcttgtaatatcaaaattaacaacaaaacaactgatgggttttcaaatttatgtcatgattgttgcttaggaaaatatcacaaactttcctttcccacatccactactatttactctaaaccactacaattcttgcactctgatttatgggaggccttggtcgtattttggctcattttccttcaagtatgacacgagatcttaccaaatgccttttcgtactcgcccaacaccttactttcttaaacctatgcgaaatcttgacacatgggagtgtcttggtcgcatatggcacgctcttttcttctagccccaatgatgttatcttgttctttgtacttcattatttcaacaagttaagtctttagtgccttgttgaaattcttggttttgaagtgaactggctcgagtttctattcagacttaactttattagaaatattaaagaaactagcctagagtgaaaccctaggtatacgaaaattaacactttctcaaggaattagtctcatatggcctttttcttgccatgtggcattcaaacaaggtgtcattactgtagtcgagtttagtctgtcttttgtctttttcgctttttggtcaaagtcatgaagttgattttttaattttttaaaaatcaagtataaaaattttaaaatcaaaggagattattaaaggcgacaacacataattgacaatgaatcttgatagttagacttaacttcaatgttctttcattgctttaattactttgctttgtatctatttatgtgctacattagttatttgttctaacattgttttgacatgtttgaactttaagtgtttatgtaattgtagatgttatgggattttttctattttaggttaatattactttaaataaacatttatagtactacaagcaaaaataaacatttatattgtttagttatttcaaatatactatttctaaagtttgttatttacaaaaatacggtagaaaaacttccccaaatgcgcaaggagaagtgtgacacacatgtggctatgtgggcgagtgag

SEQ ID NO: 40062 - DNA, 1589 bp, Cannabis sativa
ggtaaaatatatccaacaattattatgtaagcctgactctcttgctgtagagtttacaaagcaaaatattttccaaatatagattttctctcattcgatcttggaaataacccaagctttgtgtggcgcagtatttggggtgcaaaggatttggttcaattaggggctgctcgtgttataggtgatggtaaagatacaaaaattatgggctctccttggcttccatcatccagtaataagtatgtctcttctaaccatcctggcctcaccaatcacaatgtaaattctcttcttcaaaccaatacaaactgttgggatgttgaggcagttcatgatctattttctcctgaagaagctgaattaatcttaagcattccaattggtaccaactctagacccgatagttgggcatggacagcagactatcaaggcaatttcactgtgcaaagtgcatatcagctgttgcagagtcaaaaaccagtcgaggtgcggccaaacaactctggtttttggcgaaaattctagcacctgaagctacctcccaaggttctgaatttcctgtggcgagcaattgcaggttcactcccaacctgtgtcaacctcgtcatgaaacatgtaccaatatcctctcaatgcccggtttgccaagctactgcagaaacaacaactcatgcccttttaacttgtgactttgctcgatcttgctgggcagtttttggttggcctgctacgattgacttctccttttcttttggccactggttcgagctgctgcagaacacaaatgacaaagattttatttgtcgtgctgcaactctctgttgggctttgtggaaggctcgaaacaaagttgtctggaacaaacacacttcaactgttaaagaagttatggctacgtcttcaattactcttgatcactggaggaaagcttaagatgaaagtgctcttttatcactatcgttcgataatagtgatgatggggttgagctatggacaccacctgcaactaataacctcaagattgatgtagatgcgacactcttcccaaatgacaactcatatggttacggcctagtggtgagggatcactttggtaagttccttgaggccaaaactagccaattcaatggtagctatccggctgaagttgttgaagcattgaggataaaggaagctcttagctggataaaaggaaaaatttgggaaaacatggaacttacagtcttttatctgtgcaagcaataagaagtaaccaaaagatgtcttctacttttggaatagttatagaagattgtcgtttgttgttatcctctttaaataatgttaagatacgatttgttaaacgatcagcaaatcgagttgctcatgctattgcaaggcagtcccggtttaatcctggtggttgcattttatagcaagatatctggcccaatttgagggatatcttgttttcttaatgctcttgatttattgaagttgatatttcattcaaaaaataaactacatggatgttgaccttttagtgacaacatttaataatttgttattttcttatttaaaaaaaatcacccaaaaatttctcataaacc

SEQ ID NO: 40063 - DNA, 1290 bp, Cannabis sativa
aagtcaccaaaaaatccatcaatgttggaaaaatcaccgtccccggaaaagtcatcggaaagtcattggagttgtcttattgctggaaaagtcaccaggattaaatattttagatataaattaatataaaacgacttctataatataataaataaaataagtaatacacaataacttaaactaattataataaaaaaagaagagaaaattatgtacactagaagctgcttacaagaattaaaattatggctgcaatggaggatcaaagctgaatctctgccgactattttgagatggattgatcaagcaaaactaagcaaattcaaggcaagttgttatacagcatgcattgttgccttggtttacaaaatttggcaagcacggaaccaaatgttatggtcccaggagactacacaaccgcaaacaatcatgcaggagacaaaatggctgataaaaaatagaattacttgtgtaatgccaaagtgtatagatcaaaaagagttagaatggtttcaagatttataatagtttgcttgttttttcatagtaagatgtatagttgcttgctctttaaagagccataggatgtaacaaaaaaatttattgtgcaatgaaattcctgattcattgaaaaaaaaaagaagagaaaatcatttcttaaaatactaaaacataaattaaaaataaaactagttctacaacaaaatgagtaaaaacgaataacacataatacctcataaaccggttataattttaaaaaaaatggggatcaattctaaaaatactgaggcatccagttccataacaaaataaataaaaacaaataacatacaataactcaaaatataatattaaaaaagtggttatatttataaactagatatgaatttaagacacagaaattagtttcgtaaagcaactaagataaaaacttacacataaaaattagttaaataaaataaataaatcaaaaatcggttcattgaattaactaaatcaaaaatcaattcccaaaataactaaattaaaaacaagttcattgatgaattaaataaatcaaaaaccagtttatgaaataaataattcaagaaccgttttctgaaataacttaagtaaaaaaaaccagatgcggcataaattaaaatagaaccagtttcacaaaagaattactaaaaacaaataacacacaataactcagaaatcagttattaaaaaaaaaaacaagagtgaatcaattccaaaaatactgatacataaattaaaacaaaaaacagttccacaacaaaatga

SEQ ID NO: 40064 - DNA, 1617 bp, Cannabis sativa
acggtgatggaagaatttggtatttttatccccagacttgagccaattgactcaaagatctttgtttccaataaattttatttttgtccaagagactatccagtttggattgaagagctttggctttagaaatatccctgacagtaggattgttggattgaagaatgaggtcaaggtctttttgagtggtagtgatctgcgatttcagggaattctggcctatgttccatcttctaatatcctgaatacaactattctgtcgagagatgaaatcagaaagggtggaggggagattgttttgtttagacttagaccatgaaggattggccaactggtaaaaatatttatcagtgagccaatgattttcaaaaatgaaattgttaggattcctaggtttcctaaggtcatcatcaagagtgatctttaaagctctatgatcagacacccaaggtggaagagggaggccatggggaaaagagactgtcagagattgttggcaatactctagtcgagacgctcaaggagagggccatgctcccaagtgtatttgttaccaatatgggtgaggggtaacaagttgtgcttgtgaagaaaatactggaagttagtttttgcatggttagagggactagtactagtatttttatcattaacagaaagatagtcattaaaatcactacaaataagccactctaaattaggagcagaaacaaaaagtctatccaaaagactccaagtgaaaggcttgttactaggataggggagccatagaaactagaaatgtgccaattcatttcatcattaatattaacaatacaatctgtatgaataagggagtaagttaaaaaatataaacattaatattattgttccacaaaagtatgagacctccccctaaactgctcctaggaactttaaaaacattatcaaaacctaatctactcttgatgcaagttccatgaccataggtgagcttggtttccatgacaaaaaacaaaatgggttggtgttgcttcaccaacagggagagattacggaatgcccgaggactccctagaccttgagcattccaacttagcagactcattttccttggcgaggttgcaaagtaacacccgccgtttcttcaggggtagagatggaggggagaacaacatcatcattctgagcagctcaagcacgtttgagaatgctcctgacaaaatttccaacttgagcatttttcctggtgaaaggcctcttggtaccagtagtggtagtggtggtggcagcatttggttcctggatagtgacgcccttgttctggggcctgggagcagtataggttggtggagtaggggcatcaagaagggctatcccttttcctttgtcaatatgagtaatcacagaagtggccataacagggagggtgaaagagtggaaaaagccatattcaaaccagctaggggtatgcactttagtaggagcagtagtgatgtcctgattgagcgttgggactgtgaagacaaaagcaaggttcaaaaattgatccacagcctattgtaggccttggttagagtcatttccatgggacaaatattcttcaattggagtgaaattggagagatcaaaggggtt

SEQ ID NO: 40065 - DNA, 1393 bp, Cannabis sativa
acagcttatggagattgctactgggctcgaggcttctgggcaacaattcatttgggttgtgagaagagaaaagaaagaaggggttagtgaagaatggcttccagaaggatttgaagagagaatggaaggaaagggtgtcatagtaagaggatgggcacctcaaattccaatccttgagcacgaagcaattgggggatttttgactcattgtggttggaactctactttggaaagcatctgtgctggtgttccgatggtgacttggcctgtttcggcagagcaattttgtaatgagaagttggttagtgaaattctgagagttgggattgaagttggagctaagaaatggaaagtactggtgggtgattttgtgaagagggatgccatagaaagagctgtgactcggcttatgaagggagatgaagctgaggaaatgagaagcagagtgaaggaacttgcagacaaggcaaggaatgctatcttggatggaggctcatctgtcttggatttagatgctttgtttcatgatttgaaaaatgccagtgccactagaaaagagtgatatatatatatatacatgtatatgagtttcaatttaaaattatacgtggtgtagttctcttctccactcttttaataatttagacaatcttaaaaattacgttggttataagagttttatgcctcatctttctttagttgtgtcatcggtatgtaataggagagtttccatccattaagaatgacactattcaatttaaaattactcttgctcttcgctttgccaaaaataaaaataaaaattactcttgttcttctttagaagctgttgttatttttgttcttctttactcttgtgatgataaatggttatggtttttgctattatgacagttgcttaaatgttttaatggttttttataatttttattatagtaaagtatatagaatttgatatttaattgtattaatagtgatactacatcttattatagtgacagtgtttaatatttctctacgttaataatgtgtcaatacaatatcagctatcaaagtgttcacataaacactgtgttagctttgtaagcccatctcatgtgtagtttttgtttatattatcattgtgtaggattttcttgtcttccaagaatactccctacaccaactcaatgtcaatcaaaacgacatggacaaatctgtccaagaaaaattaaacacagaattaaactaaacgaccaagaaaccaagttgtttcctcctacacgacaaatcgtttaaccaaaacgatttgtcgttctgccctgaacaaaatcaggcaaaaaatgagttaaccctagctcagaattgccaaagaaccttcgagagtttgaaccaaactctctctctctctctc

SEQ ID NO: 40066 - DNA, 1912 bp, Cannabis sativa
actgagatacgtgaaagataccattaactatggtctcttctataagaaaggtgatgaggttaagattattggctactgcaatgctaattatgctagagaccatgatacttgccaattaataactagttatgtattcatgtttggatctatagtaatatcttgatgtagcaaaaggcaatttacagtgttgttatcaaccacagattatgcaactaatgaaggatttgcaccactttaccgattatgtagtgcaacttcattgtgataatcaatgttattcgtttggcaaaaaatctagtatttcatgtacgaacaaagaatgtggagatgcatgattattttctcacagagaaagtacaccaagaagatatggagatgcaccgaataaagagcgaagaccaggtagcaaacttgttcactaaaggactcgacatttcaagattttaaaagttaagagaacaactcaatatgaaaaggtgttgagggggagtgttgaaagtcaacacctactttgaacattctagaaactttaagaaatgttgagataaattaagtgctatctagcacttgtgccttagacataagcccaaaaaaatttctagaaagctctagcaaatttttaattcatcaccaccgaccgacaccatctatatatacgaaccttgaatcctttgtggtgagtgcaaaaaataagtgaagtagtgtatggtgtgttgcttatatacaagtgtatattctaaagtgccccaaaataaatttcctaagtgtgaattgtatatgtgtgtgtagtaaggttgtcaagtggtaaaataaaagtgtgagtgcttggtgcattgtggtctagtaaaagtattcaagtcttagtgtaattactttcgaaataataaaagtaattatgttcttcacgtgctttcgcgttcaacacttttcacgtgttgtcatgttcaacacttttgtggttcaagataatgtcgatgagtccttacatataaatacacccaaagagtaaaagagagagaacagagtcactgccaagtcaatagtatattggattgtctagagtgaggatagagtacatacttctaaggaaatataataaaagaggtgagaaagtgattttaatgtgtggagaattttagttggttgtatcctgtgcaagagagaaccaagctctaaattatcaaatatagacattattattatattcttcatttttctttactcttctagctaactaatcaacggaagcaacccctattgaattggtatgggagtagatgtggtaaattgatatcggtcctaagaagatacgcaattgaaagtttggaaagaacactttaaagctaaagctttacaattataacttgatcggaatatatctaaagtcaaattttattaccaggaactcaaagagtgggaaatgctaaaatcaattgttcagtgattgccaatgatggagaaaaaagatgcaatatcgcgagtgacgatctccaactaagggttgtagatggagatgcctcattggcactagtctctttgtcggtagagattcaatgggctaaacctactccaataaatactacgagaaatgtcacttttgccagcacaaaagtttggtattgcgctggtgaaatggaatttacttttgatgtgttggcaaaagaggttagcaaatcaacgttgatattagaacttttgctagcacaaaataaaaagcgctcgcaaaaataattttttccaacgcgtaaatgcgctagtaaaagttagattttagccactgcaaatgtgcgctggtaaaactttgacttttttgccagcgcaatttgcgaaatacactggtaaaagttacttttaccaaaacgattaagactctcatgctcgagtctgatatgattggactagaagggaatgc

SEQ ID NO: 40067 - DNA, 1598 bp, Cannabis sativa
  modified_base (251)..(251): a, c, t, g, unknown or other
atagagttcgcaagaccattaaatgatcttggaatgaaaataaactcacaatacataaattgtttagagaacaccctaatgcgattgggcaccgagatcaaaggccgatctggacaattagagacatcctccaaagatttgatgagtcgtttacaatctaagaagagagtaatcttcctcaaagaattacaatggaaaagatataattagtgctttcacttacaaaagatctcatataatttaatataatnatttttagagaatatcactaactactcgtatagtacgacctatataagtggtgttagagaacattagtacataacaatgttcttaatttattactaattatggtctccaattccaacaagagaggcttgtgcaattttaaaactatatatggaccacttcaattatatatgtctaaaagaaacaatattctatcttcttttcttttacttttgttgccttcttctttttctcatgggttggctcaaaaaccataaatattatgttactagattagattatatatacatatagaaagattcatcattattaatttgatgtataaagtaaaagaatttcaaccacaaaaaactaataattatgattcttttgcagctctgtgattaagaagaataaaaaaacatgtgtatatatcatatagagaagagttaaatatgatatcaattaaaaagaaatgacatgtctttctttataatatttgagtcttattaatttacaagtgcacatataatcattactcgttatatatatatatatatatatatatatattatattgagaataataattaaaaaatggttctaatttgtcttctttttcatttctatataattatgtgaaaattaacattatatataatgaattttacaatcgaaagaatgatatctcttatcatgaatttatagtttatttatttcaaagttatatagaaaaaaaaaagaaccattttaaacaaaattatattataaggtgtagtgcttttaacaaaaattattattttaataattttttttaagttaaaattaacactataaattatttttcttaaaatatctaaaaatttaatatatatatatatatatatataaatattacattttaatgtacaattattgtatttatactctttctttggtgtaattttttattttgtattaatttatgccaatttttaatgtaatttttgctaaagaaaacctaggagtcaacaacaccactaaatggagagtattttttttccatggaaatacacattattttttaacattttttatatatagtaacaataatgctctttaattcatattagaatgggacagtagtgagaatataattagtaagctttgtcatttgattgactcaattgtagcattaaaaaattgactaatcaccaccatctaacaaaacaacaaaaagttggataattaaggcatttttcaaaattaaaaaagaaaaagttggaaaaaggcatgggatgggcttgtgccgcacacactctccactcattagtgggcccatttatacaagacccgtgcccaacacacgcacttccttgccttattttcttt

SEQ ID NO: 40068 - DNA, 2263 bp, Cannabis sativa
aagtgatgaccaaagagagagactacttgtctgcatggtcacttggggggcacatttgagatgagggatatttttaggctttaatggccttttgtacagtggtcccatgggtacaagatgtcactttcctactacatgctgcaggtgctagaggttgcctagcaccccgtacccttgtctaatgtcagatcatccctagttgcaggttacaagaggatggtcctgggttcatgcgcgtggtcactagctataggttgcaggaggatggtccccgggttcatgtgtgtggtccccagctacatgcggggtggtccccaggtatagggtgtaagagagtggttgcagcgtacccttggtcgagtcttcaggccttgcagtccaattttcaccgctacttgtaccttcttgttctcagtcttcagtaggtgtagtggtatgctcatcccttgcacaccttgtcctttcattcctttccaatgtcgttatgcaatcgctctctcccttatgctcgtggatctgtccctaaacacactccaccatgcacatcatggctcacatgtgagccccccacctccttccactgtgttaagcccttgtctacaccccttatggctcgcgtgcaggcccccatcttctcgtaccatgccaacaatcattaccttgaagaaatatcattgttaagaaggaaatgattgtgagtcatgtaagggtatatttgcttttggagagagcaaaaattgccttcttaacaatgatatttcttcaagtgtgttgcattatttccacgcccttagtgtagaaggataatactgccagctatattcgttagagttgttttgtatattcctcttttctctatcttttattgttattagtttgttaataacttagtcactattttccttgattgtagtatatatcagtattcccttgcttgtagtatatattagtattctttcttgtaaatgtacatgcctatataaaggctctttatgaattaataattatcaattgcttccaacattcacatggtatcagtgccctttgatctttaattttttcccccttcgtgtttccattcatcactatggccaccaattaattaaataatgttgaagattccaccaaagctttcattcttcttcaccttccaaataccatcaaactcacatctaccaactatcttgcctgaaaaactcaaatccaggcacaacttttgggtcacaatctttataaatatgttgatggcactttccctttccctcctgctaatattaccaccaataacatcacagcggctgatcccgatgctctcacttggttctgacaagatcgattggtcttcggtgcacttgtcggcactctttctcaggatcttgttcctcttgtctctcaaacaactactactcatgaagcctagacaattctacaatctacttttgctaaccattctaggggtcatttcaagcaaatcaaatatcgcttggaaaaattaactaagggatctttcacgattagtgaatatacgcaagcaataaaacaatgcactgatcaacttgcagccatgggaaaaccaatggatagcgacgatattgttcataaaatttttaaaggtctggattatgaagcttacaaatcagtagttgatgttgttaatggtcgtgatacagttatatcatttgaagaactacatgaaaaattaatcatgaatgagctagttatgatccaatcatcgactccctcctcgtctgtattccccatcacagccgtggctgcccaacctaaatcacatgttaccactaacaagccatgggctgctccacctaccttgttgcctactcctcgtcaaaactatcctactagtcaagaatgcccatatcttggaaaatgtcaatggtgtcaggttcaaggtcatgccttgaatcagtgtcctatgtttaaagctcaatttcctgcgattcaaatcctgacacctacacaagcacgagcacctcaagctggtcgtgtttcctatcaaactcctcaagtaaacatggcaacggctgccgcttcctctttaggtggttggcttctttatagtggagcttcccaccatgtgacaaatgacactaacaatctttctcttcatgctccatatgatgggaacgaggaattaatcataggagatggtttgtaatatcccagaaaataaataatatttaaatagacatattttattaaatatgtaattattttggaaacgaagtaagattatgatcttact

SEQ ID NO: 40069 - DNA, 2521 bp, Cannabis sativa
caccagctctaagtggtgctaggtaccactaggagaaatgctaaaagataccactattgtctagtaccctcatcggtgtcatatcgttattagtgtaattaagtattgaatctcatgtagcttaagaaaagagtttttgaaaaatataactaattaatggtaaaacgtcatctataaaaagtattagacatgagcacccaaactgtacccaataataatgctcttaccaactagtgcatgtataatagcaatgctcttatcatattcactaaaattataccaaatataagtttgttttacattcccattccaagaacctaaacctcatatcaaacactccatcaaactcttatttttctttgtatttaattttttatatatataattaaaattaaaaggaaactttttttttgaaaccaaattaaaaggcaattttaacatttaaatatccattttaataaaatagtatcataaattattctcttaattaatagtggtagcttcattagttagtttagaaacattttgatgataacatttcttagttatgttcattttttttttattaatatatattaacattattcgaattatgattctcaattattatatgtaaaagttttgttgaaataaggatatatatatagaaataaggatatatatatatatatacatatatgtatatatatataacatctatatacccaaatgtttaacctaagttacaaatctaagaatagttctaacagaagtatatacatgatgtaacatatatttatagttttcacttttacatttaagaaaaacaaagtagtgtacttaatattctaatattatacacacaagcttataggatagatcttattatttaccaaaaacagaaaagaagaaggaaaaaaagggaccattgtgaaagagagagagagctaataaaaaataattatatatgtagcattagaattaataataataatggagattggagagttaatcaagtcgttggaagtcattttcaagctcaataataattctaaagtttatgaatttttagggcaaaaacaaaatgaagaaaatggaccaaaatccaaattgtacgatcgatttgtgttgaaaccttatttgaacactattaatcactagtatttaaatagtatcgaataaatgaatagaagaaaaaaagttatggctctgcatggcctctgggatgtgggcctttgatcataatcgaccaaaatagactactagggatctattaatgtacacatatatatgtatatataggctgttattatatatatatattgctgttgtttgaatgtgcatgtaatgaatcaattctgatgcctcaattatgcatgtccaaagttactttttgggtacatgttatatgatattacaaatcttaacagattaacttgttaagttagccctaacttccatttgaaaaaaattatccttattaaattcacaatgtaaatctttaagttgaatagttagtcgagatatactttagtcgactgcatgcatgtcttaacttgctccttaaagctagtgtacatcttttggcacaactttgaggaaaaaatagtatcgcacaatattaaataaagaaggacatcttgaacactcacataaaatgtcatattaaaagggaaatttgattttatatgcatttcgctaaaagtaataggaaaatttaaagatttatgcatattgtagtttaaaattaataagcaaaacttaacttacttaatattggtggaataggttaaaagcaaaacttaacttacttaatattggtggaataggttaatttttatgtatatcccaatgtacccctcatttcaaaattttataatatctctctatttccctcttgttctttctctctctttccctctcactggttctcaatgaaaaatctactgaaccccactaaaggatctaagaccgagaccatcgcaatcatctgaccgactccacaccaatctaaccgatcgagagggctccatttcaattcgaccgagacctctcccatcccttcctcaaccgtaaacggagagaccaccaccactaacgcaaaccacgaacacagaccacaaacggagagaacatgaacgaagacgttctctgtaattttttagttttcttcattattttgttggtctgatagtgttcgatatagtcccaatataggttcgataggaggttctaaattttaagtttttcaggttaatgaagaaagtctgatagtggtccgatgtaggttcgatggtggttcgatgcatagtaactgattggtgaacatatttcgtgtctgatgggatgtccgatagtatccggatggggtctgatggggtatttaaaatcgtacaaatacggaaaaaaagagaccccatttaaagatagaaagaaagaaagaaatataaaaatctcttctttaaactgtacctctccttaattaagacaaagaaaaaccaaaaactaatcgaaaattacgtcaaaactctaatgtgagaaa

SEQ ID NO: 40070 - DNA, 1991 bp, Cannabis sativa
ggttgagatcaccaaccaaaagccacggtaagtgacatagattgattttagctgtcaaattatcccaaaaatctttttttttttcagcctcgtaaggcctaccgtagacagcatacaacatccatttaaatctgttaatggtatcattgactacaaccgtaaacatcccattagaagattcactaacctttagatttatatcttgattccataatagagtaaagcctcccgccatcccttcagcaggaattgtcacggagtttgggaacccaataaacttctctatggcatttccctcttcttcattcgccttagtttccatcaaaaacacgcactctggtctatgtatcttaacccaagcttggagagcttgagttgccgaggttctatgaataccccggcaattccacgatatgattttcatggcgaggtcgggggcatgataagggccgcctcctcgcccgcctgaaaattttgaatttcatgaacagccacttccaccaagttttgctctgaaatgagatttttaatttcagacttccggggtgccaccgtagtagggatggtctcagggttcctctgatctcctcgcagtcttctcttactcttttttttttgaagttgagtcattcttggtgccactacttccaggagtgaaagtgttaacgtctaaagtgggaaggagggtagtagaagacaaacccaatttgtttcccacattaacgatattaacatctggagtaataacagggatgatagacaagtaggcttttctcttcttggacctagagaaggtttggcccatatcagagaaaatagtagtatcatgagttacaattgtttgggctggaccctctttggcatccactaattcatttaccacatcttttaaagttttatccgtgggccatgtgacataagttggttctggatgccgatggggcaccctggacttacaaatttcttcatgaggcttttccacaagttggtctctagtgagccctatatcagccataaggcttgcgatgacccccttgtctctttcacgattatctatatggttcatttggtgggattttttccttagatcagagcgagggcgtggcttactagcattgcccaaagtgggggaaagccttcctacaaccataccatgtatagcatttcccatcctaacgttcgaaagaccagttgtaccctagtcagacgcctctgatgggtcgttttcgtcagaactaatgactgttttacccttatcacctttaaccgtgggagctcgctcgccgaagacaccagaggcaggggaaggatcatggaacttcagtcttggaattctcgaatcaaagcagtttttaatgggcactcccactttaatccatgccccatagagagggacggcttttccaatcgggggatatgcatattctgtaggtcttttgcatttagagtatgaatgagccaaatggccacagttgaagcaaatcgccggagtttgtgatacttgaactgcacccactcttttctgtcgcaagagatatttaggtagaaacctgggacaagcttctggttgagaagaacgtcgacttggaactttagaaatcctctctgggcgatgttctctcttgttgctctatcaaaatctatgaattctcccactttcttggcaatgacactcgtattttcccatgtgaggtatggtgtgggtagaccatgagcttccatccacaatcttgctttgcacatattaacctcttcccatcttccatcttcgggccattctctgatattgaggaggagtccattgactattcagggtcacttcctaaggacttcccttttatcagtttccaggtcaaagtaaaaaccccataacccaggtttcaaagttttcatgcgccattttcctgagagtgaccaaatcttggatagtatgtctttaatacgtcctctagcaatagttcgtcgaccaaaggtggtggccagaacacctt

SEQ ID NO: 40071 - DNA, 1680 bp, Cannabis sativa
agtttcttttccagatacctctttttgttgttgcttttttttttttttttgttgagaggattggcttattgattagattggatttgtccaatagtattaaaatcgtttattattgaatggatatatattcacttcatccttcttgttgttcttttctgtttttaaatgctttacacacaaaactacatgagcattctactaaacgaggaccccaacttaccatttattaaaaggaaaaatggaccccactataccaaattattaattggacagtaattagcaaaaagaaaatatatacattaattggacacatgatttattatacccaaagttttcatataaaattcccgtgaaacatgtggtttttattttataatttcataaaaaaagaataaactttggattttttccttctaattatattgtgttgtcatttagccaaagcttttcaatgtggacaaaccaccaaatagtaatattataaagtaatggctcaaaattgaaatgtctaaacaaaaatcaaataattgataggtgggttgtgcattcctcacaattttttacttttgcttcatattatgatattattatgttattttgttaaggttttgctcccttagttattattattattttatttttttgtaaaaattactcctctaactatcaaaataagtgcaaatttactctctagttgtatttttgttcatttttacaaatattttcataatccaaggttacactactataatttcagagttccatgcaaaaaagaaaaaaataataattattttaataatattctaacgataaactttagaagtatacatgtaattttagaattaatatttgaatgttaagaccattatatttgactttaattagtttaagttagttaaataaatcacattaacaaattgtctcattatctcaaaaaaataaacaaaatacaaccggaagggtaagtttgagaagaaattttataaaaaaaaaaatacacgtagtaaaactctacaaatgttaaaatttaagaagtaaaaatcctatttattcttttcaaaatggtacatccttagcccattttttttagtataacaaaaagggctaagttagaaaatgactctaaatacgattcaattctaaaaatactatgatattttttgaatgtatatatttcacagccggccaatattgagaatgaaaccaatgatgcactggaaaatatttcttcttcattgacatgttggatgctttaggggtttatgtgataaaaacttaatgagattcatataataaactatatgtatatatgtttgtgtttttgtatatgtactgaactcgttttaggcctaacatatcctcaaatcccagatgaatgaatatctattcttcttagggaatcaattttgttgctaagcatatagagctattttttcatatcaaaacaaaaagtgtaaacttatgttggttaacttattattattattataataataataacaaggacagttgtgactgtaatttttttagcaatgtgagtctgtgtctcatttgcaatcctgttatttgattgaatttggaattgaaatttaaacataaaaattatggggtgtgccatttggagattaggctaaataagaagattgatgcatttgtgagagattagatggatgtggatga

SEQ ID NO: 40072 - DNA, 2019 bp, Cannabis sativa
  modified_base (1819)..(1828): a, c, t, g, unknown or other
  modified_base (1962)..(1970): a, c, t, g, unknown or other
aatagtgtctttcgccgcggctgcttgggcggtggtggtggtgtaatcgaggaccctaggatccaagttttgtttgtcttcatgcattatttcctctattctgaacacctcctgtcgaaggggtggtgcttctaacaaataaatgacgttgactgagttcttttccgcgagctttcatgccgcgttgtaacattcttgcgagtccgattagactactcacacagatcctactctagagggggtagggaacttcatggtgagatgatagatggacgtgataatcttcatctccttcaggatagggcgaccaatcactgcattatatgccgagtattggtcgataactgcgaagtcagccattgatttggccacgacaagtgtggtccccagactaattgggagttttatcattccatttaaagcaatggtgtcttcggtaaaactgtagatactcgacacgaccggtcgtagatccttctcttgtagtcccatttccttaaaatattgaaagttcaggagattcacggaacttccgttgtccacaagtatgcggtggacattatctcctccaatattagcaacgatgaccagtgcatcggcatgtgggtggtgaacccatctggcatcgctttccataaatgtgatatcatcccaatccttcttgaacaatttttctggccactcactcaaagtgttcacattggtgagtggcctctctctggcctccttagcgtatcgctcctgcaatttcctggaatctcctacgatgtgaggttcgccgatgatggtcagtatattgcgaggagttcttgaaccactcgcattgttattttcttctttgtcattcgtttggggatgaccttcctcgttcttcttatacttattgaatttccctcgtctaattaattcctctattcgtcctgcaaaaacaaacatgccaaagtggtatgacctatatatttgtgatacttacagaacttcttagggtctctcttgtcgcggtttcccctgattaggggaggcttcttgaagactctgttcttttcttcgatggcatagatatggtcccgtgggactgctaattctgtgtagttcacaaatcgtggtcctcccttcctcttaggggatgactccttttttggaggggatttggccagctttggactttgctgtctccgcggactgcgtcttttgggacttctccccctggaactctttcctctaggactgcgagaccgtgatcgtggtactggcgactcgcgtttatccttccctttctctagttcagctagagaattttcaatcctcttatgcggttctagcaaaaaactcgaccaacgattcaggtcttcaggcctgcagctccttccaaaagtcggttctttgcaggacacctattatcaacatacaaactaacgaagactcgggggccttctctacttttgttacttcagcattaaagtttttaaaataatcttgtagagactcacaaacctcttgtttaatgttagccagggtggtatagggtggcctataggtcatcgtggcttgaaagtgcatgagaaagaggtcgacaaaagtctcccgtgtggatatagatgcttcaagaaattggctgaaccaatcgtgagcattatcctccagggttgccataagaatgcgacacttcgcaagctggggtacctggtccacttccataatagtatcaaatttttctaaataatttataggattactggtacctttatatttcggagactcggatagtcgaaattccttaggtaatcgagcttgtcgcactttcgtagtgaaaggagannnnnnnnnnagcttgtatatgggctttctctgctgctcgatcatcttcaaagcttataaaagcattccctgatcgatacctactactagggtagtgttaccatgagtcgtcgtaggtgccgtttgttgggttttatgccctannnnnnnnncatttcaatataattagatttactcattaatatagatcagaaataacat

SEQ ID NO: 40073 - DNA, 1309 bp, Cannabis sativa
aacaataagatagattccaccatagtcatatacttaagaaaccagttcaaacaacaaaacataatattgaaaaaataaaaacaagaacatcaactcgaaaaactacgattaacataatcgcaaactcacatgagaaaaaaataagaaaaatagaaactattagattaggaaccagttaccaaaaaaaaaaaaacaaataaagaaatacaaaacccacctaaactaaaaccagatatcttttatagaacaaaaacaaaaataaaataaaaagaaggcagaagaataaatttactatcaaacaaatataaataaaataaaaacttagcacgattagaaggaaaatgacaatgatcggccaaaaattcttgctagctttatccaaaatatatagaacaccaacaatttttacaagaaaaaaaatgaaaatataagttctataagctgaaaaaatagaaagcgaatgaagaagaaagtgaaaaaaaaaaatggaagaatgtggttgaagagccataagcttggagattaagatatggggaagctactctactagagtgaggaaaatgtgaagaatgaaagaaaaaacagctattccaaagatgtaacataggctaaaccataaaaatataaagattggtaaaagttcataacaaatgaattttaaaataattatatactataaaaatgtaaagtgtaaacccttaaatttttctcacaatttgtgtaattttcacagaaaaaatgtcgttatcttactattttctaaaaaaaaatgataactaattaagatttatgttcttgtactttgactgacatataatcattcctttaaatttttcatatcattaaattttttttatgtactaaatcgtgctctcaaattttaatatgtattaaatcgtgttttctaaactttcatctacatcagacttttattagtgaaattagataaaaaattcttaaattcaacaatctcaattgttcagaggaatttctagtagcctgaaaaattcaagtacatgatttgataaaacaaaaaatatgattgtctgaaaacttataactgtatttggttatgcataaaaatatctagttagattactgttaaataaattatattatttggttcgataaaaaatacattactcagttaaatgcaggatttttataatttgtcgtaaaaaattatgtaaaagtattaatatatttaattcatagtattaagattaaaaataaaatttagaaactacatttttaaaaatatttaaaattaacctctaatcttatttttataaggataaatactattttg

SEQ ID NO: 40074 - DNA, 2828 bp, Cannabis sativa
taattgcaacacctcccatgagatttggacaacctttgctcagctctttgcaaccagatctcgtgcccgattactacaattacgaaatctgcttcaaacaaccaagaagggatctctgtcaattgaagaatttattctcaaaatgaagcaatttgcagatcaacttgcagcagcaggccaacccatctctgatgatgatctggtactatacattcttgggggtttaggatccgagtacgaagctgtggtagtcaatttaacatcaagaatcgaacctttgtctctccaagaagtgcaatttatgttgcaaagtcaagaaatgagaatccagcagcataccactgaatctttgcacaatgttcaagccaacatggccagcaccagaggttcatcttcaaatcgtgttttcagaggtgccaatcgaggaggacgatttaatcccacaaacagaggtggtcgtggcacaagacctgtttgtcaactctgtggtcgtgctgggcacattgctgtcaaatgctaccaccgttttgacattacttacacaggcaacaacaccaacaactcctcctcaaaccctcccaccactgaaacaccccaggctcttctttctgagtcaaacaccaacttcgacaactccacagcctggtatttggattcaggtgcaacacatcatatgaccaatgacactgatcaacttcctactgctacagactacaaaggcaaggctaaggtagtagtaggtaatggctcctcaattcccattagaaaaattggttctggttcagtttatactcattttcccaatcattctttagtattgcaagacattcttcatgtgccaaatgtcaccaaaaatcttcttagcatttcccaatttacaaaacataatcatgtcattcttgaatttgatgaattatcttgtctcataaaggacaagacaaccaaacaaattcttctgcagggccatctcagtgaaggattatacaagcttgaagttcaagcattggttcctccccagcccaaagctctcaatcacaccaccacttccaatcctgtcattgacaagtctcaaattgccaatatttggcatcatagacttggtcatccatctcactctatactaagtaaagttttacataaagttgttcccaatgtaaagtgcaaagcacctgacttttgtaatgcttgtcaaactggtaaactacatcagttcagtttcaaaattactttaaataatactgttcagccatttgatctaattcttactgatgtttggggcccttctttctacccctctgctgatggttttaaatattacataagctttcttgatgattttacaagattcacttggatctttcccatgaaaaacaaatccgaagcaacaaccttattctgtcaattcaattcctatgtggaaaggcaatttcaaacaaaaattaaatctgtccaaagtgatcttggaaaagaatttgaccctttgtataaactttttaaaaaccttggcatcattcaaaggaattcttgtcctcacactcaccaacagcaaggtaaagttgagaggaagcatagacatgttgtggacactggcttaaccttgctgtctcaagctaatatgcctttatctttttggtgggaagcatttgcttcagcagcctatttaattaataggctccccacatccacattaaactttcaaacaccttatgacaaattatttcatcattcacctgactataatttacttaaggtgtttggttgctcatgctttccccttctcacaccatatgcatctcataaagttgcctttagatcatccaaatgcattttcataggttatagtcccaattttaaaggatacaggtgcctacacccatcgggtagaatttatgtggctaggagtgtcacttttaatgaaaaagaatttccctataatgatctttttcctcctacttcttcatcatcatctaccacgatctacaacactcctcagtccctttttcccatgcctaacactgttacaaactcaccaaacctgccaccatcaccccatgtgtctacacagtaccctacacctcccactcccccatccatatcacctagcttcacacctaattcgacaaatccacctgccctcagacaaccacagtcctcttttcccacaaatcactcacctactcctattgattctatattacctactgcctctctccccacacatactatcaaccaacatcccatggtgacacgatccaaactaggcatatataaacccaaaagttttcttgcaaatattaataatgaatcagaaccaacttctctaaaggaagctcttgccaaccccaaatggaatgctgctatgggacatgaaatgactgcattaaagaacaagaaaacttggactcttgttccaagaacagctgatatgattgtaattagcaacaagtgggtctacagaattaaattcaatgcagatggtagtgttgaaagactcaaagcaagactagttgcaaagggttttcaacaaacagcaggggttgatttctttgagacctatagtcctgtcatcaaaccttgtactattcgaataatgttcactttagctatctctaatggttgggacatacaacaagttgacataaataatgcattcctaaatggtcagcttcaagaagatgtttatatggctcaaccacaaggttttgtggacaaagatttccccaatcatgtatgtaaacttcacaaagccatatatggcctcaaacaagctccaagagcttggtttgatactttgaaaaccactttggttcaatggggatatcaatgca

SEQ ID NO: 40075 - DNA, 2312 bp, Cannabis sativa
  modified_base (986)..(989): a, c, t, g, unknown or other
tttttttttttttcttttgatttactcttttattcctcctctcgcagaacccacacccacccactccttcttcttcttcctttcttcatctccttcctcttcttaattttttcacatattttcatatatcttctctgcaatttggcaagaaattccattattgtaacttcaagtcccaaaacaaggcttaatcactagaagaaatttgatttgaacaacttaccttcttctgcatcagctcaggaactaatttaccatctttttctactttcttctgtaattcaacacaaaataatcccaattcaaactcaaacttcaacaaaaacatgccaattaatagccaaagcctcttcctttacaaactcatgttactttaaactattaatcttcacacccgaaatagaaaaaacatgaaagctaatacaagtgaaaatacatttaagaagaattttacatttggagcaccaagtttacatttttttcatgttaaacagttggaaagaataagacagctttagaaaaaggaaaaaaagagcaaacctctttgaataagacagatttaggaaatgggcaaaaaaaacttggatgaggcgaattatctccttctcgagctttgattcttctttagggagctgggttttggaactgtcgtcatcttcgtaatctttgtcggagaaattggcgaagtcgaagaaaaggtcttcgagggattgtgattgggattgggattgggagagggagaataaagggttattggttggtcgaatacggagtctgcccatgagggtttggaggagaatcacagttaagaagacgaaggagatgaagaaaggaagaagaagaaggagtgggtgggtgtgggttctgcgagaggaggaaaaaaagagtaaatcaaaagaaaaaaaaaagagagagagagaagaaaaaaacggaaaaaaagcagaaaaagaaaaagaaaaaaagtaataaaaaaatattttattttnnnntatttttattttttaattttttcaaatatttataattattttttaaaattaatattaagtggaccaataaaaatttgtcacgtgtacaagtgtgtacacgtaggcagtccaccgtgacacttaactgtgatttttggacggaggtgtacagagcaaaacggaatgggagtttaggtagttttgccgccaaaattttagtttttgtggttaactgttaaaaactgtaaagttcaagtaggttaaccgccaatatcccgaaaaaaaattgtatgtataaaaaaatatttaattttgttttaaattgtatgtagaaatatatatataagaatagaatataaatttaatctattatgttttgaaatataattgtattatatgtattagattttaaattactatttttttcatattaaaatgctaattgtatatataaattttttaaaattttttttaaatatgtatggattggattggatcggttacttttacatgtcaatcaatatccaattcgtacaagtgcagattttgaatttttcaatccaatccaatccgcacaagtacgaatattcgtactttgcgggttgaattggatgggatcgtgcgaattgaattggatcgactattttatgaacacccctaaagtaacttattagagagggttttaattagtttcttggaatgaccacattatttatccaccaccaaaatacaaaagtttaaactttcacataatgacagtgtaacattataacatcttgttatcccattttttattctcatgacgtggcatgcttacatggacaagattaatgccacgtggcagtaaacgaagaccccaacactcaaacggacattaagtgacagacaagctccctctcaagagctggccgaccctatggccggccagccttgggacagctccatggccggtcggccttgggacatttccatggtcggccagcctggcctccacaggggcctggccgaccaaggagtgcactgtaggctttcctagatacttctacacgtggaagacaactgtgggctgtgaattgggccctaaaagccaatagaatggctgaataatatctataatcaagggcactttggtcttttgtaaatatctaacaaattatacaaatactaagggatttgaattgtaaacttaaagttttaggtctcctatataaagaccttaaccttaggctgaaaacctaagttgcctctaaactagaaacctgatcttgaactctaagtgtctgataaactctctctctctctctctctgtctctctctctgtctctgtctctctctctctctct

SEQ ID NO: 40076 - DNA, 3044 bp, Cannabis sativa
gattgtccatgtctaaaagaaagcgacctactctgcgactcaacttaaaaatttcattcgataatatcgctcctattttatttttagtaacgttgtttacaacatatatagataaaagatatgtatgtgtgtgtttgtataatcactagtcactatagttttgagaatcaatctcaaccattaattttgataccatttgatttggcttgaactcttcaaagaattaaagcttggtaagagataggttgtgttttttatgagcgttgttattaggtacttgacgttgtgcattgtgtccaatactgttacgttatgagtggttagtcgttcgacagtttcttataggattttcactctttgaactttgacacgtactaaatcatgttacatcaactttttaaaccattaaaatttctcccaaacaatatattgagattgttagatttaagaattttttgttcaatctctctaacgtggtgattgtccatgtaccaaattgtgccccaaactttgatatatacaaaattttgcccccaaactttgatatgtatcaaattttatttcttgaactctcgttcacatcaagtatccattagtaaatttggatggaaaaatccaacgatcgtaattattatcagtaattttggataaatggcatgtggaccctcacagagacccattacgggaactggatccattcacttgcccagtgcagataacttatttagtctatcaattatgaaggggataaattcgaacgaacagtccgacactagtatcacttcctaggcggttccaaataatgggtcccatatactaattccacactttgcaaataagaaatatgaactcaaggaggagatcctcaagggtcatctggatacataatatgaaaaggcatcatagatcacacagtatcctgaaatttgcccatgtggcattctctaacatgatcttgagaaatcaagcggcctatcccttgtgtcaggtcttggaaagacgcacaacaaaagagaaattgtgtttttgggtggacacccattacattagacattccttgctcccaacaacgactgatgccccaactgtcactgtcaatagtacaaccatgtacaaaaggcaactcattttaacttgggtatcacctacctgccccaatagctccaaatccaccccagttaatcacaaaacaatgtcaacatatcatctccatactgactcaacaactacaaccatccacttcaactcctctagagacaaatgttgctgtgacgaacttctatggtaacatgaattcattcccttacaatttttggatcattgatagtgggacaaccccccatgtttgttgtgatgttaggtgttttcctttctttatcaataaaaaatatgttgcagcaggcctagcccgcctatgcccagggccgggcctgtacacaaataactaaaaccaatgacatactcgtcttggtcactcatctgtaattatcacaaattaactcaattaaagagaaggttgtttggaaggaagttgaggtttgagttggagggtcgtagagtctaattggtgatgagaaaatggcttttcctgcttggtgttttagatcgaaagcttgtgattcatctaggatttgaagttgagaactttttgagaatttagcactgcccagaaatttaatgtcttcaaaaattcttaggtttttgatggaattgaaatttgagaaaaagaggtgttttgttaccatagttgaaggtccattgttagtactattgacttgtgaagattattcttataaacaagtgggaagagctcattttggatttaaggttggagatgaagaaagtttgaagcttttagatgaattgagtgtaaagatcgaatctttgtggtttgtgagttgagctaaagataggaagataatatcttgtgttgaattaagtgagataatgattggttgtgaatttgttttgtgagtatgtgagaaaagaaagaaataaaaaaggtattttaaattatgaaaataaaataaatattattttggactatatattttataaaaattatcgattggaccctctgttttgttttatgataaatatgactttatattctgtatttgttcgtgctaaaaattgtattcaagttggttatattaaaaagattgtcgaaaattgagctcatgatattattttgagaaatatagtgtctattttatcttttaacaaaatagacaatccaatcagtaatttttataaaatacaggatctaaaatggtatttatccatgaatatattatttgggatttattagtaatttttaattggtgtgtaaagtttatataatcattaatagatagggaataaaaaatagaactttaatttaattgaaaaaaagattgatactctcttgaggaatgcatttttattatttaatagaatataagtaaagtaggcaaagattacaaacgaaattgtcatctcaagacacttgggaaattgaccattaattgagttgggtccattcacataacatgttgttgtgtttattgtttttatgtgtacatgttttttggttagttttagttcttttcaatgggggaccaccatttctgtattagaacattattaaaacgaacccatattagtttaagatttagcaaaagaattatactatttttacactatcgtttcaacaagttaaagtccttcactatcattggaagccatctccaatacttaagtggaatatgtgactatatattaaggtgcatgaagttccattttaaaattaatttgtaaatattagaatataaaagtgtatggttaagaaagtataaatatataagtgtatgataaggtgaatgaagttccattttaaaattaattgttaatgaaaagagtagcttattcattttatatattctattatctttctacacattagcaatgtgaaactttctaacagaacaaaacaaatagaacaattgaattactccattgtcaaagtatagttagtatcaatcaatctatttaagttatttcta

SEQ ID NO: 40077 - DNA, 1059 bp, Cannabis sativa
gtctatatataaattatgtatatatattttgatcttatgtagtaatcaatttggaccagtacatgattaaatactattttacttgctttatgattttttttaggtgttgtttctcaatggagttaggattggtgagttcaagtgggggctgtgattggtatggtacccatgtttactattacaaaaaaatagacatcttaactttctttctacaaagatggatttatggcttatgacctacttcacataaagccaccacatgaattgtccatttggtttgtaaattatattatatatatatgtaatatatttacttgtgcttattattagattaattattatataaaatccatgttataataaagacaaattagtgtaattttttttttttttgaaatgcaaattagtgtaatttaaatgagatcatttagtcaacttttctatcatttttttactactaataaattctcatctctaatttttggtcaaattgaaacttatgattttgtattcatatccttctttttgtttttccttttattatttgaaaaatataattaatcagttgttttttttttcttaattaattaacatttatatatatatatatatatatatatatatatcaatgtacattatgaaagtgaagtgcacggtaggttggtaataattaagatcatcagtccacaacactccatagctaaaacattatttgcattctggctttgttctatgcttgttggcccctcaggagacgacattacaactcactcataaccttttatctttcgtatattttcatccaaatttttattgggaaattttagtggataaaaattaatccatgaatcgagcaatatcataaaaacaaaaatcactttcacgaaaataaaatctaattttataaaagagtaaaaagaatgatgcttttgtaaaaatttacatcatttccattcttgactcacaagccacgaatccaacacctaatttaatttgaaaactttcctaaatctgccaaaatttatgtttttaatatgctagaacattaaaagtcaaatt

SEQ ID NO: 40078 - DNA, 1884 bp, Cannabis sativa
atattatctttcgggtagttatcttactgctaccttgtgcgttcaggagcaagaagatccattggttgtggtaattcagtcagtatatttggctgcccgatttgtagaacccatatgttagctcgaaccatcctgctttggaaggacaaatggtgtccagtctattctcggtggggttgaaacgttgagatttagaagttgttaatgatctttttaaagacaaggacagagaattattgatctttatccggctgagtggtacggtggacaatgattcatggtattggaacaaggaggcatcgagtttttactcggttaaaagtgcatacaaattcttacaacaacctattgatgtcgtggatcttgatcatgacagggaagggtacaaaaaactctggaagctagatatccctccaaaagttcaacattttttagggtgtgcaatcttggggtgtctcccaacaaaggtacaattaaatactaagcatgtgaatgttgattttttgtgccctttttgtaacttagctgaggaaaccatatcccatattcttcttggatgtggttatagccgctcttgttggaatttatcttgtgtgaatatggctggtttgaatggccatgagtacagcttgtggtttttcaagctacttgcttcacatattgtgcgagaagcagccatgataagttggaaaatttgggcagtttggaatgatatcgtgtggaaagataaaacgtgttcaactatagacgtggtgcggttgactagaatagttcttgaccaatggattagtgctcaatcacaaaaaatgggtgcattgttagttgatgatattaacaatgttagtgagcactggcagaaaccaatgttgcatacagttaaggtaaatgttgacggtgccatttttcaagcggagaacaagtttggatttggatgtgtagcccgagattctaatggtcatcttatcgaagctatttctgtgagctgttttggttcggtccaacctgaagtagctgagataattgggatcaaagaagcgttaagttagataaaaagaaaagaatggtctaatgtggtagtcgaaactgatgccttgattgttgttcaagctattaaaagttcgattgaaatgccttctcagtttggattgcttgtgcgtgattgtcgaggcttactttctttattaaaaaatgtgtctttagtctttgtaaaacgatctgctaaaaggctgctcattgtgttgctagagggtcttgtttaatgtcagattatactttcagtgagcttgatgctccttggtggtgatcaccaaaaattgtataaggctctacttggagaaaaatatcttcctgattctttgtctaagaaggataagaaagagattcttgcaaaggctcatagtgcaatcatattgaatctcagtgataatgttctgaggaaggttgtaaaagaagccacagccgtagggactggctaaagcttgaaagtctgtatatgactaaattgttggtgaataacttatatctgaaacatgccttgtattcgttcaagatgatggaggacaaatctattggagaacagattgatgagtttaacaagttgattcttgatcttaaaaacattggtgttaccattaaagacgaggatcaagccttattattactcagttctttactgaaattgtttggctattttaaagatacaatgctctatggaagagagtcgattacactcgatgatgttcaatccatcttgaattcaaaagatctaaatcaaaagagtgagttaaagaactctggaagtggtgatggattgtatactagaggtaaaagtgagaaaagggaaagccacaaagaatcaaaaggaaaatcaagatctaaatcaca

SEQ ID NO: 40079 - DNA, 1450 bp, Cannabis sativa
  modified_base (30)..(33): a, c, t, g, unknown or other
gcattccattggaatgtcattccaatactnnnnaatgcaaccaaacaaaggaatggagtgaaaattgtttcctttccattccattccatttcatttcctagtgttaaattaataaatgtatttccaaacttacctcttttttctttaattaattaccaaatcaatggaaattcaacctgccacgtcactcctactttgtaatttaaaccataaataggagatataggggttacactatcaaattgacttttttttttggttattattattatcaattatcattatttttttttttagaaagtcaattatcattattatactaccaaaaaggaagaaactcatatggttaatatgtatgtcactactcatttatttttgtcttgtttggtagaaaatagaaatctcctcatctaattatgtacgattctatgtatttgtagttttaataattattaaaaaaatgattttgtttattttttattgattttgatatggattagaatattatacgttctataaaaataatatacattttttttataaaggaaatttatataatttacaactaaaaaacagatttttttaacatttttttggacatttttcttaatttatatttttaagaatttctcaaaaaaaaaaaaaaagaatttttttacaagttttcacttgttttttccatggaaaaaatattattttcacaacaaaaaatattactctatatagttgtataaattacattattttagtaacatcaaaataagataaaaataatatttcatatttttgtaagaaaaatagtaagaatatagaagaaaaaataacaaatttgtaataatgtaaaatttttgtcatttttgtatatttatgaaatgattcctttttatatactcccaaaacaatgagaatgactctagtttaatgggctcataagtattgttgggcttttgtctaggacgatgagcccatgttttggagcaaatttttggttttcgttttttttttttttgaaatttacatggtatactaatttttgtcatttttttacaaaaatactgcctgtttactttttactatgtttttttataagtttcatactacagcatactttgttaagtttttactggtgtttttcagttgttctactgctgttttgagttgttctgctttgtgttctagtggtgttttataaaaacacagtattattgaaagtattttcgtgtgacaatatttttgtaaatattaactcaaattctagtatttttgtaagtttctctttttttttcttaggaataattttattttttgtagagtggttgacttttttatgaagtcattatgcatttacatttttttttgggtaaatactactgttgaccgagattttcagcaaccaataaaataatataagattagagaactgtaagaaattaagagaaggatttttacg

SEQ ID NO: 40080 - DNA, 2649 bp, Cannabis sativa
tgtaggttatactgtatttactattttattttattagtattattaaaatatttttcaaaaaaatattaaaatgtgatagttacttgaaatttaaaatttgaagatattttgaattgtttttaacaactccatttttcaaattgagtggtttattttttttagataaaaaattaaaataaaatcatttaaccacctaggttgttatactagttgttgcatggtcgattatttttttaacaaacctcccacacaatgaaaaaaatattgccatctctttcctaacattttaacagccaacaaaatcaaataaaaaaaaaattatccttgaccctatataaatgatccaataaatttaagtaaaagaaaatgcattgtttagtatagaatgacgtgagggagggtacaacacagtccaagtttattaatttaaaaaagaaaagaaaattagagagagagagagagagagagagagagaaacggagagagaagtggcactttaccacttttatatgttttctttgttgcacgcatccaaatagctgaaaacagagggaagacaaaatactccaaacagaaaaaacacaaacacacagaaagagaaagagaaggagaacccaacaacaaacgtataacaccaaaaaagaagaagaagaagaagaaaaagaagatgattcagtctaattgggtctcttgcataaataaccgtttatgaatacgctgcagaagtagaaagttagtgggtgttgtctctttcttcttctcctgtattaaagttttaataagtaaccaaaattgtgtttgtgattgtgaggtggggtgggtgatcccttttgttgaaaactgaaatttttaggagtggtgggttataataggctattatttgatttggttactttagatgaaggccatgctcctaccctttgaggtgtttcaagggaagaggcatttagatttcttcactactactgctactactacttctaccactgctgcttcagattcaccaccaccaccaccacagcaaacgacaccaaagtggaacactttaatcaccaaacacaattgctatgtgggcagcactgagcccacctctgttctcgaccctacaactagctcaagtcctaccagatccacctcaacactgtcttcctcgctcgccagcaccagcgacggcggcgccgcaaccggctccacagacaccgccggcggcgtggcgccagcagcccccgagaccccatcggcagcagcattagcggagggaaaatgtgggcttggaatggaggactgggagagcgtgttagctgagtcaccgggtcatgaccagtccattttgaggttgatgatggcggatgttgatgacccatctctgggattgaacaggcttttgcagagcgggagtgtctcctcatcccaagaaatggaattcaatggaggaggtttccaagtggtggatcaagggtatgagaatttgatgagcagcattattgaccctccttctgttcaaggaacaacttgttctgatttcccttttaatagctcatccaatgctcaaaacaacaattctttgagtcccatgttttcgacttcagctaacaatttaatgccagcttcgctttctcctttagtatttcatcaacaacagcatcagcagcagcagttggtccactctgtggatgccaatcctcaaatggtgataaaccagaaccaacctcatttggtaatgcctttaacatatgctcaattgcaagagcaccacgttatgtctcaacaacccccggcgaagaggctgaatactggtggggttaggtctaactatcagctccaaaaggttcagtttccgaattcagggcaagagctttttgttcgtggacaggaacagcagctgcagttgttccaacagcagaggccaaccatggctgtgtcaaagcagaagatgttgagcccaggagcaggagcgggagacgaattggcgaaccaccagcttcagcaggctttgattgaccaactttcaaaggctgctgagcttatagaaaccggaaatccggtactcgcgcaagggatattggcgcggctcaatcaccatgtctctcctcttggtaagcctttccaacgagctgctttctatttcaaggaggccttacagttgctccttcacaactcattggctttgccacccttcaatctcgttttcaagattggagcttacaaaactttttctgaagtctcaccggttcttcagtttgccaatttcacttgtaaccaagccattttagaagccttggaaggctttagtagaattcatgttattgattttgatattggatatggtgggcaatgggcctcttttatgcaagagctggccttaaggaatgctagtgctgcagatggttctcttaagataactgcttttgtctccccatccacacatgaagaattcgagcttggttttactcacgaaaacttgaaacattttgctgctgatatcaacttggcctttgagctcgaaattgtaagcctggaaacgttcaactctggttcttggccagtgcctcttcacgtctcagaggatgaggcaattgcggtaaatctcccaattacctctctttccagctgccctttatcccttcctttggtcctccgctttctgaa

SEQ ID NO: 40081 - DNA, 1152 bp, Cannabis sativa
gatgagcataattaggagaacataaattttctgtgtcattctgaaaacaaaattggcactaaagcgagttctattgtggtgattcaaagataatattttttcaatgcattttcccaatcctagttttcttggttggattctcaaatgattttagttgcgtaccatatgtatatttttttaaaatactaaaaatccctatctcaatattgattcaaggcaaggatttcagcatatattagtcattatctcttgaagcttttttatacgggtcagcctagattttgttgcttcttgtacattattacagttatcactgttggattctgaatcgagcggacatttgtcatgtacttattaattgcgcttattgttttagaaaacacatgaacatctattcaattccttttattcattcatcgtttactgtttctttctcagattttcatatattgtcctttcgtatgcagttacagatccaagattgcttgagaacaactgcacaacatctgaagatgtgtctaaaaacgaaaacggctcgcctgggtactgaaaatgatcatttacctcattagttagtgcgtttttcgttgagttgagaatttagatgaattggttttcctggtttcagtttgtccgcaggagtggcaggtactgatcacaatcatcatgagggaatgccagatggtggggaacccgcagctacaggcaagtttgatggcgagacctgtgagcttttgagtgaaacttacatcgagatcccaaatgtgagtgatacaatgaatgagaatgagtacatttcaaacggctctccaagtgctccaagcttgagcaatgtgtcgcctcgggtcacaactcgtcaaaacttgaaacgtggaccagcagccaatacgaatgccaccattgatgccgaaaagcgacaaggaaagagactgagcagaaacagtaaaagaaagttgtaatttattagttgagcttagtgtctatcacgtaggttttattgttaggtagtttttcgtgtttgagatatttaagcttagtattagcagtaggtagtctggaattggaaagagacctaaaggttgattgtgaatgttaagtagttctgcaactttcattctgtttgttcctttatgcttgggcaaaaaaattgtg

SEQ ID NO: 40082 - DNA, 2514 bp, Cannabis sativa
ttattaaataaatagatttgacatttatagagttggaattaaaatatggcatttgtgaaagaaaaattaagctgttaaataaaatagaaaaattgaaaccctgtagggcctactaaggttcgaccataagggttcaataaagtcattatttcatctttttctaattccatgtaaattctaaccctaaccgtagaagcaaccctataaatagaatgttataagctcttattttctaacctgataacgtaattgtcattctttatcagatgaaatagaaaagaggctctttgatattcgaaatctcttcctttcttcttcatattttcgaaccctaagtgagttgagaaatttcccacataattcaagccaatactcaggccttttcaaaagattatgaagaatttcaacaataaaaggatcaagggttagagatctaaactaaaggagacattatattccgctaccactaatgtaaggatttatattccgccaccactaatgtaaatatttatttaactcttatgtgtttatttcattgtcttaaaaaattaatatttaggatgttagattatagtcatataatcaacatacattttagtaaatctagatcctagtaaaataatttccaatagtagggtgtccctattggttttgtctttttaggttaattaattaaatgattaattcaatagataaatatttgaatttgaaatgtagttgagatattcctcaattggttataagatataaatatctataactgaatttggttatattatttaatgactaatttgaatttaaataattaattaactaaatatttattggatttatttaatatacaatataacaaagttctatatagttttttgaaataagagaattttttacgttacttttttgaaagcctaaaaaggttttactagtaaacatttttctatctatcactaaggaaatagttcttataaatgtgttgagatataatcaagaacttcatatacattattatcctactagcccacactagtccttatgtgtagtggaaggtctagaagattaaggtgtgaattttttcagtattgtttctttactgttggcgattgcaccagtgttgtcacaaataacactagtggattttacatatttggaataacaccaagctctgtaaagaactttcttagccataccagttccttagtagcttcatcggcagctatgtacttagactccatggtagagttagaaattgtgaattgcttgacgcttctctaaacaactactccaccccaagtgtgaataccattccagatgtagactttctgtcatcaagacaagcctaaaaatctgagtcggtatagcctaaaggattcaaagtacgatccttgtagactaacacatagtttctagtcccctttaaatatttcagaatgtgtttaactgcccttcaatgttcatttcttgggtttgactgatacctactcacaaattcccactgcatagcaaatgtttggtctagtgcataacaggacatacattagacttccaattgcctaagcataaggaattcttctctatcttctatcttttggggatcagtaggggactgttccttggatagacgcaaaccatatctagaaggcataattgcccctttggtgttggtcattgagaaacgctctaacaccttattaatgtaagttgcttgcaagagagcaagcaatttgttcttctgatctctaataatttggatcccaagaacataattagcttcacccaagtccttcattttgaatagggtgctaagccattcatttacgtctgtcatcttctttactttgttaccaatgactaagatgtcatcaacataaaggaccaagaatactaccacttgattatccttgagctggtaaaaacaaggttcatcttaattttggtgaaagccacatgttttgattatttgatcaaaacttttgttcccaaaagcgagaagcctgcttaagtccataaatagacctattcaacttggcgactttcccttcttgtccttgaagtttgcaacctactggttgctccaaatagattatctcatcaagaattccgttaaaaaaagctatcttgacatccatttgccaaattttataatcgaaagcggaaactatatagagaagtattcaaataaatttgagcatggcgactggactaaaagtatcctcatattctacacattctctttgggtgtaacccttttctacaagtctatctttcaaacatttgacttgtccattgtcacctcttttcttcttgtagactcatttgcactgatgggatgatagtcataaagtgcatctacatattcttatacttcatttttcttcatggaatccatttctaaatccatgtccgctgaccattgtttttgttcaagacttgccattgcttgtttataggttaatgggtcatcatcaataccatcaccaataaccatattgatttcaccatccaagttataacgag

SEQ ID NO: 40083 - DNA, 3033 bp, Cannabis sativa
taataaacatattttattatttaatgattaaaatgtatggtttcatgttgtaataagttttcaaaatgtataagtttttaaaataattttttttcacattttatgtaattatgttagttttattgtacatttatgaaaaaagccctatatataatgtatatacataatatatagtgtatatataatatatacactataatttatcatttaataatttaatgtaaagatatttatttaaatttaaattctaaatgaatattataattattaatttgaattacaaattcaaattgataaatatcttaattatttaataataaaataatgtaatagttttattgttttaaccaaaaataaataattaatgttattattttaaaacaaacttatatgataataaagttatcttgaataaaaagtttatttaagaatgaattaattagtattttttaattaatttatgggttataagattatcataaaaggttatttaaaaataaattaattaaaattgttttaattaatttatgggtaatatagttatcttaaagaaagagtttatttaagaataaattaattaaaattattttaagtaatttatgaattttgaaaatatcttaaataaataatttatttaagaataaattaattaaaattgttttaattaatttggagggtttaaaagatctcttaaataaaaagtttatttaagaataattaattaaaaatgtcttaattaattttgaggcttacgactatcctataaaattactaaaatgccattgctgctatggagattagttttgtaatttaatttttaatttcaaaggttgtaaaattagaaatcctcaattaatacctcggtcatcatcattgtttatttattgcttttaaataaatgttcattaatagttgattaataacatgctcatgcattagtgaataacatgacatagataaaaatctcacacaattatattattatgcatctcatagtagaaacatgagataataggactgtcctatgtgtttacatatttataatttttgaaacttaagcatgtaaactaacttattttaattcataatgaacttgataatttaaaagagttttatattatgaattaaagagttaactcagatttaataattatggtgagaaatttatttataatttgagacttttattataaataaattaatcataattattcaagttgttgacatgtgttaattctaagaattaataaaccaaacacattaatctaaaatagtgagtaggagagaaagagtatatgtcaatgtatgtgacatgcgacttccattattagtcaataccgagggagtatagactggccttgagacaagtttattttcatctccctaagataagagaaagtgatgtattttagtgtgacatcaacccttaaggtgacacactaagttaagtcatgaattctgaaataatgagttacactcacaaagtgcaactaagcttcatagtggttagttgttaaagtggtcaaaaagcagtactttatattttgaaaagaaaatatgagatatttaggtttcaaataacaaagatgacaattgtctcataaactcaatgaaattgactcgatactgaccctaaggcggtgataattgtcaaagatttttattgtggaataacttaaataatattttatgtattttacttgtatgcgctcatgcatcatatttacagtaattttaaaatgatatttattatttattctatcactttatttatttcaaaaatatctactatgccaaattcccttaatgttttactagcaattgaaaattgaatggtgaatatttccttaagtagaaatctaatttgaatatgatcttagtttgtgagaaccacacatttgtctttactaagtagtgtctctatcaaaactcatgtaaagcacataattacactaatacatgaggcggagacacataagtctattgtagacaagaggactcaagtgaacattattcttgagtcgctcactcattgcttcaaagtgttcacctgtgtgatgaacaacctatagttcaacatgactcaatagttgaacgagttgactatgtttaaaaacctttacaaggataagtccaaggaaggtgagtcaaatgagttgaaggaaagtctaactttccttcttattcggataagaaaaggaaatgggacggtaagaacaacaatgtgaagaccaagctgaaaggcaagaaggcaccaaaagccaaggagaactaagctagccctatgtccatggacaagaaaagcaaaatgcaagtacttctattgtggagtaatgggacactagaagagaaattgtaacaagtatctctccgagcttaagaaaaattaaatttgatttatttgttcttgaagcaaaattagtagaagatgattaattcttatggattgttgattcaggggctactaataatatttcttctttaaagtaaatacttaatttgtcaagaaaactggctaatagaaaggtgaccataagagtggaaaatggagcacaagtgtctctcaagtgtgttggcaaagttcgtttaggtttactaataatgagattattaattccaagtttggaacaccattttttatgcaaaataaagtaatggaatttatgtgctcaagctaagtgagcaattaaagaataattcagactagcattgcctcaacataattagagggaaaaatgtttctaatgataataaaacgtatctatggcatctacatttaggtcatattggcctagacaaaataaacaatttaacaaaggattgtcctttaagagaactaaaagttagaactcttccaatatgccaatcttgtcaaggaggcaagatggcgcaaagaccttttttttttttttttctgtaaaaggcataagagccaaagaacaacttgagcttattcacactgatgtgtgcgaacctattaatattcaagctcgaagtagttatgaatacttcatcacttttattgatgattat

SEQ ID NO: 40084 - DNA, 1082 bp, Cannabis sativa
atctaagatcctcgtaaaatatttccaacataaagatgatatgatttgggagtgaaagagttctgaccttttcagtgttaagtctacttatcatttggctctctctcaacaggatattccctcttcctcttctttttctgtttcaaaaaagttttagactaaaatttggacttctaaaacacccccaaaagttaaactttttgtttggagaatgttgtctaatgctcttcctgtagcttcctctcttttcaaaaagtgtgttgttgattctcaagtttgtcctctatgcaaactcggaccaaaaactactacgcatgccctgctagaatgctacagatcgagaaaagcttagcaatcatcaaagtttgctatatactataataattataagtatcttgatattaataaatttttcctaggtattattcaagaactagataaagactatattggtattttatactattttttgtgagcactttgaaaccaaagaaataatacttttcacaattagcatactctccctcccattgaagtgcatgattggagtgttaattttttcttcaagtacttggatgtccagcaggttcaagcaccaaataacaactctactgctgctcaacatgatgtagtggaagctgatgtcttgggcactttaaagatttttactaatgcatccattgatcctcattgcaaaaagcatagtgttggcgttgttctcttggataatttcaatcaagttaaagcaggattttccaaaccaattattgggcttgttccccctgttgtagcagaagctaggggtgttcgcggtgcgagtggtgcgatttttgaccattttttcaaaccaacccgcacatgcagttttttcaatttttcaaaccgcatccgcaccgcgaaactaaaagactgcaaaaaccgcaccgcaaaaaatagtgcggtgcggtgcggttttacaggttatgcggtttgaactatcagcaaataattaaactatcacaaatacaacaaagcttgagcaacacttgtcaaaaataccataagacttgacaataaatatgaaaaaaaaaattaagtttcaa

SEQ ID NO: 40085 - DNA, 977 bp, Cannabis sativa
aatggtttccttaaaaaaaaaatatatttattttaagtcttttctacattttttcatcatcttttttcttccgtgtttttttttttttgcttcttttttttaatgtttctttatatttgttgattagtaaatatataatagtatagaaaattatacgaccatacatataattttatttttttgtatttttattctttttttatatatataaatttttgttaattattattaatttattttcttataaattatttacttattattagataatagtaaagcgaactacatgggcttgtatttaaactggacgactgatgatcttagctttagtaaggaaacttataccacactatgttcttgtgtaaatcttcttttaccaattgtttaaatataattaatgaaagtaacatatatgattataacttacaagttttgacagggttacgtgcatgtggcacgtcatccacacctagcatatatagaagagacaagaataaaccaatttttgcattactctatttcttttccatattttttgaaaatatattgaaatcacaataaaatttgattttatgtattcctaggtaacaatgttaaatatatgatctataaaattatttgatagtaattacataggtttaaacatttaaatttttgagtgttaaattattataatctttttcatttttaatgattgaggtattgtaaaattctcaaataaaattgtaaattgatcataacatgatataggttacgcattattaagtttgagtgctaattcatttttgaagtgtagcatatttttttaacttattaattaatttctacgcttataaatatatacatatatattatattgtgatatataggatgatgtgaatttattttaacactaatgagataataatttttttaatgtactattatattattgatgtttttttatttttacgtttcaaaacagttttttttttttt

SEQ ID NO: 40086 - DNA, 3857 bp, Cannabis sativa
ggcaaagagaaaatcgataccagctgtcatttggaagttgacggacaagtggtatattgatgagataacttgaaggtcatatagggctggcctttcgagcatcacattatatgaagacttcacatccaccactatgaacgtgaccatgaaggtggtctaccttgcggtagtgctgattgtgagtggtagtctgattttatcacatggggcaataccagctccgttgaaaccatacattagctatttgcacgactataggtcttcaagtgaaaagcccatccaggttaagatttgtttgaataagatgtttgaggatgctctgtcatcaatcattaccctttacaccatcatgttggctatctacacctcaacatccaagggatttttgtaagggtagttgacatgataggattccatacattatattgaagagcagcatgtttctgtctaatgagaaatttaatgtcatcctgcaactgattacactcatttgtatcatgaccgcaattattgtgatagcaacataattttttcatgtccatcttccttaactctttgaagggaagggattattggtacatcactgttgattgtgtggttctatagatctcctctcttagggccaagaggatggagtaggtagtgaaatgaggctcatactctcgaaagggcctaccaccagttttagctttctttccactaggggagttgccttgttttccaccattattggctcttttccctttgtttgaacctcctttcttcccattaccctgcgcctcagtgttaggggatggggagtctaatgactttttcttatcgccttttaagcccttagctcgggtgaccacttcttcttgcttgataaagtcatccattctaataagaaagtcatttatggtgtgaactgccttgagatagtggtcggaccatagagggcccatctccttgagctcgactacaagtgccattaaccttgtgttctcactaagcctttttatcttagcggctacctctaagaagtgtggtatatactccttgaggaggtcatcttctttttgcttgatgtctaccaaatcatttgatttgatttggcattgtcaggaaggagcaaattggttgccaaaagcatccactagatctttccatgagttgatcaatccaggggaagcttgaggtgccaccgctaagctatgcctgtcagcgtggcagggaagattctacacctgattctccctgtaaattagtatgcactttaaagtattagatgtgagatagtagatcttccttcctgttgtattgattccaggaagggttcttgaactttggaggattggtaaagctttaatccgattagagagtggtgtgtgtcactctctgttgagttctaactttgacaacttcagggtcatgattcccttcactagagttgttaggtagtcaaactctgccatgttgacaccatggatggtggtttgcatcccagctggagcttttattacccgattagggtctcctcttaaagctcctgcttttaccaactattatctacttaaagtgtactgttggtcttttggtcttcaaaatcggccatggactctagttgacttggatcttgtcattttctcctgaccatcgggtcgtgaaagaaacatcggtgatgtttccagaaagaattttgggccatcttgggatgaaacgctaccagagcattcatctggagtgttgtagtggctacttccctcaaagtagtcttcagcttgatcacaagtacaaagagaattgaactggttcctcaagtttaactcctctccatgtagtcgagggaagtactcatactgctagccatcgaggccccaggcaaagtgatggcacaactcaactctttcatctcgggagtactctcgagtatgaagcggctcgttggtccttacttgtcagatctcatagcctctagttctgaagtaaagtcttcgattactcccttcattttgagtagcaagtccctttcctttggtagtgtcttggggtctggtgtcatgagtgcattgaaaaggactcagtggaggagtcctgttggctctctcaatgttctgaggttgctccacatcaggtggagggcctattggttggcatccacgagtttgagacctttcagactcttactcaaagttttcttccctttggggagcctcaacacctggtgtttgcttagtacttccagggctaccaagcatgttagtcgtgtttcgtgcattgagggtttccccttgagcactagttcccatgtgactagttggtcgatggggaatctctcttaccaactcgaaaagacctcttcgaggggtgcttccgtgactagagtgaaggcttctctaatctgttgagacaggttagctctttattgttcctactcaaccttttggctttcaatgtttcgctagttccccatgaaccactattcaaaagagctcgtatcaattgtcgagggagtcttgtagctatttttgtaggttagccacagtttggctgagttgttcaactcgaggatcgacctcctaagagtcttccaacttcacatgtggctccccaagtggaactactcgtcagttccagtaccaagagcatttggcggccttgggggatgagttgtggagctggttataggcctcctgctagcacctgagctgtatgagtagtcccaattccaacttcagtaactggtgtacctcgagtttgctggccagttgatgtggatcttctttcaacacttgaggagcgtattgcaaccatcttgtaagtgactttcttgagttttggctctcaatgaaagtaccaaaatattgactaggaaatttggacacagactcctaagccacactcgctctctagattggtgagaatgagagatatgttaggtataaatgctagacacatcaatttatagtagttcacttcctgtatcgcaagagtaatatagctacgtctactttgagtttttattcacatgagatagattatagaaaaatggctaagtctgaatgctccaatttttagagagagaaactagagatagatgtttggatcttatggctacttttttggatatgcaaaatgagcttgttgagctctccttttataggtgaaggagtacctattaaatgtgaataaaataatccaaaaagtatggaaaatgtatttaggctatttttgactgtagatgataatctaacggtgaaaattaaattctgaggttgattatcaatttttggagttcgagtcgcggcctgcaggacctatggtaagttgtagcttaaatttgtaactcccttggaggtgaaatttggagtcaatagctttagaactgcaattgaaatgtgagacatgaattgatagagcattgaattagctttaaaacacaagttgaattgcatcaattagatcaatatttagtgatttatgactattttactaaaggatgttttgggcccaacgcccaaggtgacatgtgatattaacctgaatgctaggtgagtgggaaaacgtgtcaagatgtattttttgatgcctaagtgatattttgacataacttagtccatttctgtgttgtggcaaagttgttcactaattcttgaagatgttgttctatagaaatgagagactcgaaactacccagtttttaagtaaatcacattgttacaaatgtgaaaatatgaagttgtgaatttgactgttctgacttcatggctctaagttattgtgaaaaactagatgttgcccctgaattcgcccaaaatacgtggaccagtcgaaaagggacacgtggatcagataacttgtaaatgtttgataagtct

SEQ ID NO: 40087 - DNA, 1850 bp, Cannabis sativa
ttggaagcagtcgcaggaacagcaggttctggacgaggagcaatttggctgagttgttgactgagtagagaaattagttgctgacattgagtgaacagatcaactgaaattggtgtgccagatgcatcatctgcattgaagctggccgaggcttgatgagcagtggcctttcctttttcttgcttctttttgttaccatatcaggatggaatccatgaatgaagaagcatttttcaactagatggcctagttttccacagatggaacacgaaggtctggatttcttggttcgtggaggattggtggaagaagatggcctaatcgatgacgcaagtggtggaatatcagaattgccaagggttctttggcattctcttgaacaatcatggtgcaaactctcgagaggttaggaatcggctccttgggtaagatttgagcacgaatagaggcatatgattcgtttaaaccattcaaaaattgcagcacctggttttggttgtagtagtcaagaaagaccttcatggcaccacaagtgtaggtcatattgggttggaattcctttaattcatcccaaaaggattttagtttggtaaaatatgaggtgacggactgatcaccttgttgcaaacaagttaattgtgtttgtaattgaaagatgcgaggaccatttgcctcattaaatctttcagtaagatcatgccacatatatcagtagcaagatcaaagtacattatactttgagcaatttcaagggagactgaatgaacgagcttagacattaccatattattgcaatgaatccaagagtttaggaggttactagtagctggtcgatcgatgaaggccctatcttgtttttagcagcaagtgccatggtgatgtctctcttccatgactgataatttgcaccatttaggatcgaggaaaccaagacgaggctagggtgatcgtcggaggtgaggaagaaggggttggaaacatcgtcaagagttccacgatcttgagctgggcgggaatgagtatcaacaacagtaggaaaatgaacaaaggaatctaggccaatctaggatcgaggtcttgaagatcggggaggagcagctgaagatggaggaatctgagcagaggcgtcgtcgatcgggaagtgtctcggactgaggaggcttagactcagatggaggaaaaccatcttgggatcttgttgaaggtttggccatggaagaagtgtgagatgtgtgctctgatacaatgagagaattcgagagagataaagacaatattttattatcttaattgaattaaaatagtttgtacagagcatatgcctatatataggcagcgaatgagaacaaagttagttggcgtttaactaacttgagttagctccataaccaaaaataacaacctcgaacagaaactataaactgaactaaagcttataactaagagcatctccaatggtaaaaaaattaagggatgcttgctcaggtggatagatgaagtggcaaaattttgagatgctacaccattggagagaaaaaaatgctattctaggaatatgtgtgaatgctatacagtagcattaattttatcattatttttttaataaaaaattaaaactaaaaaattattgttgttaaaaaattaaataataatgtgtgagatcataattatagtatttttaaagaatgttatcctattaatggagtgattttagaagtaagaatgctaaaaatgatgtgaaagagagataaaataaaatattatatttttgaataatgtgaagatttttggagatgctctaactatttctaatacgtagtgatacaatacttgcttcatgcaccatgtgt

SEQ ID NO: 40088 - DNA, 3647 bp, Cannabis sativa
gataatcttgcgttcttgaatcaagaacaagtccttcaattcctaacaggtctgaatgaatcttttttccctgttagagcacaaattctgctcattgagccctttccttccttgtctaaagtattttccatggttatccatgaagaaagacaaaggaaactcaaaaacccccaaattccttcactcattgctactgcccaggataactctgcttcggctgttgcacaaactccttcagcatcagctgctgctgcaaaccaagggcgaaataaacgaatgagaccctattgcaccaattgccataaaccaggacatcttaaagaaaaatgtttctttttgattggattcccacctggttatggtgacaagaaaaagaatgatactacacaacctgcagctaatcacgcatccgcatctactgactcactttctctcttggccaacatcaccaaacaagaagatattcagactcttatttctctgttaagtcagaaattgcagcccacatcttcaactgctgatgcatctcaaccttttgcttccaatatcactggtaaactcaaacctttttctcaaaatttgtggattgtagacagtggtgctactcaccacatttgttgcaatattaatcttttttaccacttacacaacaaacctattgccacttccatcaaactccctactggtttgtgcatcaccatacaacaatcgggtagcatcaaatttaatgacaacttaactcttcataatgttctctatgtccctgaattccaattcaatttatttagtgttcctaccttcctagattccatatctcacaaggttttcttcactcaatcttactgtgttattcaggtttctccgaccaagaggattgggattgctaaacgagttggccatctatattttctgctgcaacagcccgatgtgccacctactgattttcacccatctacttgtcataattcttgtaacaatgtccattcctggcatgctaggcttggacatccttctatgtccactacaaactttgtaaacaaaatgctccatttcaaggattcaaataaaattctaccatgttctatatgtcatctagctaaacaaaagcggctgccattttcatccaataataattttgctgcatctagctttgatcttatacacatggatatatggggcccctttcacatacaaagcatagaaggttttagttattttttaactatagtagatgaccacagtcagttttgctgggtctatatgttaaaatcaaaagctgatgttcaacagcttatccctcaattctatagtcttgttcacacacaattctcaacaaacatcaaagcaattcgctgtgacaacgctaaagaattgaacatgtcctccttctatgctcaaaagggcatcaaaataaacaattcttgtgtggaaacacctcaacaaaactcagttgttgagcgaaaacaccaacacatcttaaacgttgcaagagctttagcttttcaatcatctcttgcacttgtctactggccatattttatcaacactgctgtctacttgataaatcgcactcctacacctcatttacagcacaaaacaccacatgagttgctatatcacaaaccccctgcttatgatcacctccgaacctttgggtgcttagcttatgcatcttccctaccaagtaagaggcataaattctcacctagatctcatgcctccatcttcataggctatcccaatggcatgaaagcctatactttacttgatattgctaccaaaagaatttttcattctcgagatgtcatcttctatgagaatgtctttcctcttaaaggttcggccaaccataatctagatctttttttctcctctcatactgctgcaactaaccccagaccgtgcttagttcctacaattacaacacccatgtacaggtctcataatacagatgcagcaacaccacctagacctcccactttcacgcagtgcaacaccacttctcccaccatcatggccgagacaatccctacaggaatttcacctggtctcccacaccagtatcctgtagaaccagaatctgcaacatccattcctgcagaaaatactactcaaacactccctaccgttccaaaaactaaagctggcagaacaattcacaaaccaggccacttcaaggattatgtgtgtcaaaactcaaccgcacacccccttgacaaatatctttcttataatagactccataaaaattttcgaaatgctatacttcaagcatatatcgaactcgagcctacttcctatagccaagccaaacaattttctcaatggctcaaagcgatggacaatgaatttcttgctcttaagaaaaacaacacatggaaagttgtctcccttccccctggctgccatgtaattggcaataaatgggtgtataaaattaaatacaactataaaggagaggttgaaagacataaagcccgattagttgccaaaggatacaaccaacaacatggcattgactatgtggaaacttttgcacccgttgcaaagttcaacactctcaaacttctatttgctctcactgccataaacaattgggaactacaccaaatggacatcaacaatgcctttttacatggtgacctcactgaggatgtatacatgaccattccaaaaggctatattcatgatggtccccttcccccgaatgctgtctgcaaactcaacaaaagcctatatggcttaaaacagtcatctcgacaatggtttgccaaactcagctcaaccctccttgatattggtttccaacaatcccccaatgaccattctctattcattcgaactacttctaccaattttctagctctcttagtttatgtcgatgacataatcattgctagcaacaatcatgctgatgcatctgctttcaaactattcctacactccaaattccatctcaaagaccttggttcccctcgattctttcttgggttggaaatagctcggtcaaaagcaggcatagccatttctcaaagaccatttatactccaacttttatcagaatcaggctcccttggtgtcaaagctgtttccacaccaatggatgcaaacatctctcttagcaaagataatggaccaccggttgctgatcctacttcatacaggagtttgattggcaaactcctctatctcaccattacaaggcctgacatcacttatgctgtcaatcgcctaagccaatttctccaagacccgagacaacctcacatgaaagctgccattagaattctacaatatcttaaaggcaccccgggtcaaggcatttttttcagctcccacaacaccaacaatttccaacttcatgccttcaccgatgctgattggggcacttgtcctgacacaaggcgctctataacaggatattgcatctttcttggcaattctcttatctcttggaaatcgaaaaagcaagccactgtgtccaaatcttctgcagaatctgaataccgttctctagctaacaccacatgtgaaatcctatggctcttcaacatcctcaaagactttggcgttgatcatccacaacctgcaacaatttactgtgacaaccaagcggctctccacatatccgagaatgcagtcttcca

SEQ ID NO: 40089 - DNA, 1041 bp, Cannabis sativa
attactcttgctcaaaaatgcttactttatagctggtatcaaatcaccatcaaattaaagaatatattactaggttaagtatactgtttatgttttgtgtctaaaattgttttgctgatttgggataatttgcatcagccgtcatgtttgtaaattcaaagccataaataaataaacaatattgaaattataatatgtctcaattcaagtgttgaatattattggttacaaatgatcatactatcattatatattattatatatattgaaatatatatatagggaatgagggtggtatatagatatattatttaataaaatggttttctctaaattaataataaaaaaaaaaaatacatgttttgcgtcatggttacttaaacgtgctattgttttttttttctttgtcgaacaatacataaacgtgatttttatgagggataaataaatattaattaaataagagtaattggtgagagtgacgaaattatagactattttgcacagtaataaataattactacgaatacttttgttttgttttttttattactaaataacatcgtttttaatgaaaattttatatatacactactaaaaattttacttttagtcccaaaaaaatttgtgactaaagataaaaagattatggctaattataaattatcattattatgttgtgactaaaagatccgtagctaaaagtattagtcacaaaaattacaatttgttgtaagtaagggcgcgtttggaaagccacctgggaattggaattagatgtaattagaagtaattacacagtttgacgtgtttgtgtggccacgtaattacatagtaaatgtgtaattagaggtaattgggaggcctcaattactctctccaattctcataccccccatgagaattgggtgtaattacactgtgtaattacatataaaaaataaattcaaataattttaattaattgatatgatattttaattatttttaatgtattgactttcctttttttttttatcaatcatcaaaaaataaggttgg

SEQ ID NO: 40090 - DNA, 1675 bp, Cannabis sativa
  modified_base (1379)..(1402): a, c, t, g, unknown or other
tgaactttatcaacgtagtcagagatcgaaaggcagctttgcgatcaggggagaattgattctttagttgcagaagtcgagctttcgattaactagagaacctctgttccagagcatgccaaactgagtacaatgaagtgaattgagccacagaggtaaggacaccctcagtcatggaagatcgcaaccaagataacaacaatttatctttgtgtttccattagccatattctagattgggagctccattcatcaagattgagggtggtggattgcttgtaaagaaaatttcatccaattcatgactaataaaagttggcacaacttgcaatttccaagaaaataaattagtacgatcacatttaagagtgagagttgatgtgagagaatgagagaaaggattctagttggagtttatctggatcagattagcagtggtggtttgagtgagaatccctggagttgtgggagcatgatcagtaaatgtggactccatggttgatgtgattcaatggcaatctgataccatgtaaaactcaaagtatgagtttaaagaaaaatagagcaaaatcgagagagagaagacaaagcttattttattcattgtcaaagatgagtagttatacaatacaattaaaaaaaaaaaaactaaacagacaagttgcaaaattagttgcaacaaataacagaattaactaaagaaataactaattccaaacggtcttcatgaagatgtgagtgtgtattgtcatataatacataaacaatagactatttaggattttacctttcgaactatgacttctgtattattgtgccaattgaactttttagtccattaaaaatagtccctgagatattatagtgttataaattggtcattttgtcaagttttgtgacacgcagtaaacaaaataatgacatggctgcttagctagttgccacatcaatgccatgtcaacgccatatatgtaattaattttaaaagaataatttatttttttaatttagttttacgtaatttttctaatcattaattaatttttagtttaatgattttatgaaatgcataatttttattttttaatgttaaattatacatgcgacgctaatgtgtcgattgactaagcaagcatatcattattttatttgctacatatgacaaaatttgagagaatgactaatttataatgctgtgaatagtttagggaccataaaaagttcaaagggcacaataatgtatatgttatagggggataaaaatcctaaatagcctaaattaggacttttgcgttgcccctgaattttgacatgtaccaaaccatgcctcttgaattttttagatcgttaaaaattcctcctgaactattaaaattgtnnnnnnnnnnnnnnnnnnnnnnnnttcattcaattttactaatgtgatcgatgtccatatactaaattgtgtccctaaacttcaatatttaccaattcatgcatcttgaactttaacattaacatgtactaaattgtgctcctcaaattttcatcaatgtaagactttttttagtgaaattggataaaaatcattaaatctaataatttcaatagttcaaggggaatttttaattactcgaaaagttgataaaatataatttgatatatatcaaatgacaaaaatctaaattagcct

SEQ ID NO: 40091 - DNA, 1107 bp, Cannabis sativa
aaaaacaatacatatattaaaattttattgtctactaatttccgaactatatcacccaatcacaagatccataaattaggttagccttaatgtagacttcctaaacatatacaattgagttttattgaatgaaaagacccctccgcctattaataagcaacgttcaccagtacagaaacaaaaactaaaaacttaaaaaaaaacttcagattcctatcaatgctatccagagctataacaccatgttgattggtcaccaaaattagcccacctcaccatgttgtgggctacaccattacaacttcttggaatccatattacaacttggtttttttcaaacttgaataacaacttaaagagaaaagagaaagagaaagaatagctaaacatgaatgaatagccaaagaagtttaataatttagttttgtttagaggaactcctaaaatccagccaagtggtaatatctttaaggacagtaagaattctctcatcaggttctccttcaagtatgcaatgatagccttcttcatatagtttaagagttttgtctttgctagaggctttctcatacaaaaattggctcacttgaggatctgtaactctatctttagctccatgaagaattagcaatggagatgacacctgcaacaacgcaaaaaattgtaatacttagatgcgaaaatgttatgaagtatttgttgggaatttatttatttagggctataattgtatatataaaatgtgtgttaggtcatcatataaaaagtcaaagttatgtggtctattttagaataaaatttatgacttaagggcatgattgtcataattttaatatgtggatactataagaacaatttctaatttgatgatggaccaaataaaaatagtcaataaatattacgaactgttttgggagttgatcataggtaatggtccccagtttgcaatgttgtatctttttattcttgaatcctcatcatcaagagactaaggttctagaaaaaaatttcactgcaaagttgaaagatcataccattctaaggttgatgctatggactcttgtacgtttctgctaatttttgattctattgtttgattctcataaa

SEQ ID NO: 40092 - DNA, 2308 bp, Cannabis sativa
tttaaaatttttattagctaatttctgtacttagtttttaaatttatagtcattttgcatttcaaacctttatggtaaacctaagcccatgaaaatgtttaaaaatgataaaatgccataaaaaattggtacaattaaagggatttttacatcacatactgaaatttttcacttcttttcttttttgctatgggtgcagattttttttttttcaaaaatactgtgtattttttataatatgtactgtgttaaagtttctcagttgttctattgttatttttaattgttctgttttatgttttacggttattttataaagagatagtatttttgaaaaaatttctatatggtagtatttttataaaaaataacttaaattctagtattttttgtaagttcccaaaattaaatctgccatttatttgtagtattatttagggaggatatcttccttgttaagaaataagactagcccaaacccttttctttttacttatttatttatgagaaatgttaaatggcactaatggtgtctagcactttcctatgtgtcaatatcgttattggttcaactatgtatcggatcccacataatttaatataatagtttttatggagtatcgctagccaatcgcaatgcgatatgtcgaaaaggtactagacaccacaagtgcctaataaaaatggtctttattcatttattttgtagggtactagccggaagtattaactttctcatgaatgggaaatttgacgtagtcttggggtttggcccgaaataaaagatagaatatgcacctatctatcatcagatgaaattggagacaaattaatgaaataaagttcatatatactagtcacgtggaatcacaatacattggaattaatctgtatgcatattatatatagtgatacgattttgtcccgtgatgtactttcatggaatgtattccgtggtacattagatggatttcaggtacgttactattttttgaccctaattatccttagatcaacccaatcctcagatcaaataactctcttatttaacgactgccgtacatcacgaaatacattcggtggtaaacgtacatcacggaacaaaatcgtgtccctatatatatatatagaatatacacataccatatattgaatagcttaagcctgtaatcttcatgtagtatctataacatttatataaaatatataaaaaaaggatatgaaagcagcaacaattaagatatcgattaacataaataaagttactttctacgtatactttagccctttccatgttgtcttccactcaagcacgtaataaagcgacaaaggcccatagagaaaaaagttatagccttaactttatctccgtatatataacatatattagagtataagagttacatacacacttagccatacatatataatttctccaattcttttcgctctaaattcacaaaataatatccatggcaagtacagcattattgcctaataataataatcagcaacaacaacagtccgtaatagggcaagcgagtagtaccactgctactactattgcttcagcctcttttggttccattggtcccttttttgcagtaatttcagtactattcgttttgacgatgctatcgtgctattttggccggacttatggccggcgttgggcggcagctccgctcgagaggattgatatcggtggtagcggtggtggtggtggtggcagtagcagtagctgtattggttggatgaagagtgtcaaaagccgtttgtggatggcttgtcatgagtttgaagttagacgaaataacaagatggtggttctttgtggtgatgtagatgagaagagtgacattaaggttagagatcatagtgaagtttgatcacatcgatccttattcctaggcttagttttttaacataacttcatcactaaaattaataaatagctatctcagaatttgcccattttaattacacagttttatttgactttgattttcttcaaaggaaatgtattaaccaaacaatagtacatactaaattatttagggccatgcaatccattcaggcatgcgctgttaatattattttggtttacgagagcatttacacttttattttcgcccaattaatttgaaatttcgtaattttttttttttttttttatgaatcaagtgaatttcattgctcaaaacacatttatacaaccaaatagcattctccaagtacaagaacctaaaaaacaataaactttacaaactttacaatgcctctaatcactaattgacactttctttgg

SEQ ID NO: 40093 - DNA, 1305 bp, Cannabis sativa
ttctattgataacaaatcagattacattgaaatgggttttatttagggcataaaatcccaacatttggcacccaaaagggattggggtattagaaccttaggaaatcccttttcttaataccctaatttgcctttcatctggagttgtcgtaacttgggctcatcatgctatactcgcatggaaggaaaaacgagtagtttacgctttagtagctaccgttatactggctctagtattcacttgctttcaaggaatggaatattatcaagcactcttcactatttcaggtagtatttagggttccacctttttcttagcaacttgctttcatggttttcatatgattatcggtactcttttcttgatcatatgttgtatttgccaaaatcttggtcatctcaccaaggagcatctcgttggctttgaagtagctgcatggtattggcatattgtagacgtggtttggttattcctatttgtctctacatattggcggggaggtatatggaagaacaaaacaatggattgagtaatgaaatcttgaagacaaagagaattgggcttttccaaagaattagggcttctttcctactccctttgattatcatataaaaaaagtcacttccactttcctacaaaatctctctttattctagcacataaatgaacaagaaattcctcatagaaatgaggaagacccaggggaacgtaggtcacctgcgaggaatcaccagcgtacttcccaaacccatatagagagggctcatacaaaccccagcgggggaaatatgacaaaccacactcatgggggaagaacaaagcgtgaagaagcaagtggcacctcagggcgttcaaggacccacagtcgatcaactcgaagaggagagagtgctcaacaagctaatgatcgagaaagcatgggaatcagtaaatccgcgagtcactccaggacaagatccttgagcaggacgaggtccatgagtaggacacagtctatgagtaaaatgaggtctgctagcaattacaccctgtcagatctgcgagatcacttgaatcgaaaaaaaccttatcttcgccaacaaattggtccaaagcaggaggatcctatccaattgcgaatagacgagttggaggataagttcaggagatatcaagtaggggaaatagggagacaatctggatacgactcagatgaagaacttgagtcgaaccatccagatattctgaatactccttttcccctgggatttaaaaaccctcatgtctcatcgtatgatggaaccaccgatccggtctcgcatttg

SEQ ID NO: 40094 - DNA, 1283 bp, Cannabis sativa
tatttgagtaggggatttcatcttctatactatcatatatttattatctatttataattctctaataaatatgctataagagtgctttagtctaattatcttttaacgatgaacaaccattttattaaaaaattataagagagtaatacatcatgaaaaaaaatggagaattcatctaaattagtttactatccaccctgattacatgcactgctaatttataaataagaacataaattaaggactaagtaaactagtaaaaatctctaacaaagatcttaataaattcaaaacaaataaataatctcgtacaaagcacaaaaaattaaattcaaccgtcaatcttttaggtttttttttcacataaactatcaatcttcaaaacagaaaacaaagtgttgtagtctaattaattgaacatcatttaaggcatttttgataagaaatttatacatttaataataataataataataataataataatagaacacacaaaatcaataatatacttttgttttaccaacattatgttctttatcttcaatatctttgcaataaagtgtgggcatatttgcatcccgattcccaactaaccaactctcgattctttcattttatttttttttttgaaaatacctcaaatgttcattaagggcatcaccaatgtgtgtagttcacaatggttcttgtaagtgtaaaactaaataatggtaaggtaactgagggagggtcaactttttgtgaggtcacctgaggcaatcttggtgagcatatgaaaacgaaacaacaataacctttgcacacacacgcattgttaagaacttatttgactgttagatagtctcacatcgttaatgtgtacaaaaataataaaatatataaaataaatgaaatactcccctattaccaattgcttttaaaataaaatttcattcatcttacccttaaattctaacactactacataaactcacattgaaccataactccccacccaccaaagaccctttacttcccttcgtcctttggttgcttcatttttcttcttgtgtttgtctttttactttaataaaattaaatcagctaaaattctcaatttcctttgagattgaaaaataactaatcttagttttgcaataaaatttaagaaaatgattaaagtcagtttataattaatttattttataatatatttgtgtgtaaattaaaatttaaaatgtcacttcagaaagaacaaacaaattacatacacagatattattaatcttgccccaccatta

SEQ ID NO: 40095 - DNA, 2097 bp, Cannabis sativa
tttaaccccagccattagatcatgccccaattcaatccagcggctactgtacaatcagggattgtattccctattttggcataacgggaccaaatcttatccctaccaatatatttcatcttaactatccctatattaaccacaaccattaaattaaataattaatccatctaatggttagggtacatcacggaataaatacccttaaatcacgtttacacgcctaaactaatcggatgttacggctacaatagggaaaattggagctttggtgaatttcaagtttaatgaaagggatgagaagagagattgaatgagaatgaaaaagagtggaaagaaaaaaaaaattaccttgaatagtgcttaaatgttccttaaaattgtgagttgaaagtttgagctcttgaatggtttgtgtttgaattgagtgagatgttttgaaaaaagaggagaaaattacattaataaaagaaagaggccttatggccgtgtcacacttatggccaagactttccaaaatgcccttggcttatttggcacatgttatttgtattaagtgtcaatggcactcctctccctataatacttgtcatgtgtgttgataaaatttgtgatttaaacatttaattatgtgaaagaatgaaaatttgccattcttagacaaattaagtttcttgtcatgtaataaagtttaaattccacaaattttgagagaaatcgccaagaagacaaacgactcgcaacgttgacagtatcaactgagtactccaagagatgacaaaataagcgaaatgcgacatgcttattactttcaagacaaaaaaggtacaataacaaaaatcttttccgaaagtttttgacaaacacttttggggggcaaatgttatatccaatttttagaaaattaaaaaaatcatccttgtgactttgaccaggacttataaatatcaaatgagtaaaaacatccttcttgagggcccatggcacttttagaggacttgaaaacatcaaccaaccatttggtgtcgggactcacacactcaagtgtgcccaaactatggtttatgggcccgtgcaagcattttcacatttgaaacctcaatccgccaagaaaaacaataaggacttgactcatttgagcatgaaatgacttaaaactatgcataaagtcaatatgtcatcaaaccctcaaggaacaaggcatatgcgcccatatgtaaatggcaatgctcttcaattttgaagagcattgccacaaaggaatggcagtggtcactccgtacaaaccatgaaaggaaaattgaccaaatgtgttcccccaacactaagaagtgcaaaacaagtgaaagaaactatttcccacctaggaccaaccctagccgaccactaccatatggaaatggcaatgctcttcaactttgaagagcactacaacaaaggaatggcaatgatcggccactacataaggaaaggaattttattggccaagttgtatttctaacatctatgtaccaaataaaagtgagaaaaatcactcaaggcttcataagccccttatgcgaccaataccactttccaactccaacgggtggcagtggcctcccgttagggtttcggacgtcgaaatgaggtttcggggtcctaagacccccaaaatatgactcaccatcaaaaaccaagtcaaaatatactctaagcgatccgagaacatgcataaccgaacactgccatttggcatgccagtgctcgcaattagtacaggatagcataaactgtcttcaataaattgggcataactctctcaatttttatccaaatgacctatataacttgcaatggaaagataatttcaagacagatctaaatgtacctcgtaatcatagccaaattctgaagtatcggatccacaattggctcaaaaggtagtacattttactcaagaattaacgtggttaagtaaagggtgttggaagacactgccacaacccatgtggcattgtatgcgagcattgacattctaaaaagcatgttttcaagcctacatgtgacatctcatgtcatttcattttaaattggtgcatcctcaaccgaaaataa

SEQ ID NO: 40096 - DNA, 1711 bp, Cannabis sativa
tgttgacatttcaaagaaaaacacttgttcaagatctttcatataatttttcaaacaaaaactcttgcattattggttgaacttttctatttgaatgttagttgattttaataagttctttggttagaaaataagtttttagttggagggtatccctccttcagttatacttgatagcttattaattctaatagctaataacacatttcttgacaaaaaataacaaaagtataagtaatagaaccattcaacatattcaaagtataccaatcaactctgcacacatagctttataagccttgataaagtcaattctagttgttctataaatttaacttagattgtgaacactggatgataagcttttgaatcagctcttcaaacaccacactttctctaatattaattggtaaatttatttttgctatgcatttagcaaaacactgtccaacaacaacaggatcataagccaaattattaaccaaaaccatcttttgataataatcagataaacaattactgaataagcattcaaccatgtgccttttactagcaaaagagagagagatttacaatacttacattgagtttcttttacttttttgtcagaatgttctccaataactgatgtttgtcttttcttacttgttttaaaagcattaattgttgtttcatttgggtttacagcttcaccttcaaaatggtccacaacttcacaatggctattcatattccaattttttcaatgagcaacttcaacgttttataataacaaaaacaaatcataaatcagctctaaaaagtaaaggtggtaatgtttggtaacaatctcattccaaaactagaaagggaaaccaaaacaccacaactttaaattgtatcatcatgataattattatacttggaaaaaagcaaccactaaaaagattaaattctaatgtttaccaaacaatgctgcattgagtgttctgtctttgaggattttcaacaatcagtttgagctcactctctcttttcttttttattttcttcttctttttcagttttagccctaaaacaaaagtcacaacaccaaaataaaggttaacattgcaaaatttgaacataaataataataaaaaaaaatcttacgccgggatagacttaggggagtaccggagtttcttgccgggaaagaattgaatgaaggtagaaattgaataaagacaaataagattgtagagaatatgaaagaaaaggggagaaataaaatgaagggaaagcgtagggaaatgtgacaatttgggcctgtttggctattaattgggaccaggcccatactcggcccattgacttcaaaagttcaaaaaagtatagcctaagtgcctcaatttaggcgccggtgttattcactttcaccagcaaagttgagcaagtgtactttgaacttcaagtattttttttctgctaattttcttgttcatcaaaatacattcttttaatttggtgtttgatttcataacgatatttgaatggttcaatccttgaaaattattaaagagattattgagcatatttgataacaaactagaaggaacaagtgtatttcttgtttcaattttgaagcagtcctatttgatagtgttatctctcaaaaaatctaaaataattgtgcatgaatttttactctagatttggaggtccaacaaggtggagcttattggccaaagag

SEQ ID NO: 40097 - DNA, 1673 bp, Cannabis sativa
  modified_base (240)..(240): a, c, t, g, unknown or other
gtgttctatgttatatacaaatagatcttgggttcattattaatttttctaacacttaatgttataattttcttactactactcccgttaactcataaatatgaacacgtgggggttcagattcattatatttatttttattttattttaaaatttaatattcttaatatcagaaactgaatgctacttgtttaaaaaaaactagttttcatagcaattttcatatgatattggcacttnaattcgataattatgttccatatactgcactggtttatcaactatagtaatttagtattatatctctcttatttttttaaaaaaacaagtaacatttagtttctgatattaagaattttaagttttaaaataaaaataaatgtgatacatctaaaccctctacgtatctatatttatgagttaacggaagtagtagtattggtgtaagggaattgtaacattaagtatttttgtctccaaaaataaacattaagtatttaagtgtataaaatctgaaacattaagtatttatatcgcaatttaccattttcctactacccattgcacagttattataaattatgactattacacacttaaataactaatagattcgaattgtatttcataattttttttaaaaaatgtagatattcgaatttaggttgaatatacataaaaaagacgtaccattcaaaatatttgggaaattaattagccattcaatactacaaaatatatttttggtgtcaattttaaattaacatgtacttatacttatatagtgtatttgttttacaaatcgacacctattctacaatgataaaaagtttattttttaatttcggttctaaaccgagacttttggacattggtgctaattttaaactgactcttagtctcttacgagctagtgtgtaattctttttcgcactatatgtctcgattattagaaccaacaaaaaaaaaaaaaattatagttcatgggtgtggacgtcgtgagagacgattgtccacacccataaattttgcatgagactcgaaaccaataatacttaacactttctagatgtgctataaagattatatcgctaactaattgtaagaggtcatgtcatattctatattaatgctccaatatataagaacattattaatattattgggtaccaatagtgcttagtttgaattgcgctggtaaaatagaattcacttgtgatgtgttagcaaaaggggttggcaaatcaatgttggtactaaaatttttgctagcatataaaatgaaaagcgctggcaaaaatgacttttctcagtgcgtaaatgcgcgggtaaaagttagattttagttactgcaaatgtacgctggtaaaactttgacctctttgccagcgcagtttatgaaatgcgctggtaaaagttacttttaccagcatagtagcgaactgtgctggtaaaagtgacatttcttgcagtgactgatactctctaaaagttattatattaaattatatgagattcaatactcagttagactaatatcgatattaacacatatggagaatcataaatattattggtgccttttagcctttatcaatatgttgttagacttttatttggccttacattaaattttattggttttattaaaacttgggttgattggatagttc

SEQ ID NO: 40098 - DNA, 1072 bp, Cannabis sativa
atttattacccaaaaattaaaagttggcaaattcgaagtagaaaagatgaattttgaaacgtcatgatcactaaaggcggttgcaagcactcgaggttgccattggaaagaattttaattctctagcttaataaaaagtttgtaagaaaaaattactagccatcagaacagtggagaaactgaaaaagaagaaacattactgagaaaaaaaatatgaattgagttgaaagaaaaaattcactctcatattatgtaaaaacgtaaattgaatgaattatatttttattattcaatgaatttagcactatacaaagtaattatagagtagttagttacaaaagatctgaaaattttatcataagctatcaactgaaaaccagctggcactaactaactttctaactaaaactaactgacattcaaaactaactttctaactaaaactaactccaacacagatgaaaaattaaagtaaacaaagactttgttaaactagaacaatagattcttaaatcactattttagtttttaggccctcgcaagctacttgtaacttctatctatatttaacttttaaaaactaaaataataggttctcccattagtattttcaattttcaagaaaaatatgttatcgataggcacatagcaaaaaaaggtcaaaaagtcatgattaactaaaacaataaaaaaaatgctaaaaaacattagtagtgtctagaattatatcgttatgagaaatgttaaaaggcattagtgatatttaatacccgctattggtccaagtaagtatcgagtcccatataatttaatataagggagaagttgaaaaatactctttttttatacattaaccaaatttacctccaaataaaatttaatttaaatatacatctttttataagtattgtacctaaattatcctcaagtctcacataattaagatttaattttaaacataatagatttatattttttggagataaatgtatagcttatgagaaatttaggcaaaattttgattaaagaaaaatagtgaagtgatagaggtaaaactggtagaataattaaa

SEQ ID NO: 40099 - DNA, 2362 bp, Cannabis sativa
ttattctacttctttaggaattggcctattcaaactcctcatgagataaactttctttgtaacttaaaaagaagtccaacccacaaggaacacaaattttatcacttccatcaatttggcccattcatagaaaacataaccaaatgtaattgtggcctttattaccaagagtacttctatactcttgttcttttgtcaagacacattaccttccaaaaagtaagccctttcattagacctgctcctcttattaacatgaagaggagagtcgatgccatgtttcttgaaattgatgcatgggagagagaaggtcaaactctctttaatactgaaaatcattagaaggtggggttgatcatgccatgcaagagagtgtatgctgatactagtttccctgcaaatcttggaccatgccactcgagaaaagtgatgaagatgctcagaatgctactgttatcttgtcaagtgacttcttttagaaatgacatataatttttagggagaatgtctattttcttagaccacgttgatggagaagttactttccagagaacaatgtggaattagcaggtggatgatgctccacattgtgctcattaacttgttgtcttgtttttgttttgttgtactaaccgctggtctttattctttgtagacaatatgaacttcttgtatgctatggccacttgttcaaatatgaagaggaagattctagtgccaaaagaaactgagccttctcaagggaagtggttcaaggcattcctactgcctctactacttcaaagaagaaagtcaggaagaggggtagagctactgatgctgctcatcctactcaaaactatggtaatgagagatctaacactgctggttcaccatgggttgatatctcaatagattttgtgttgggtgtacctaggagtaaacgtgggagggagttaatttttgtggtggtagatagattttctaagattgctcattttatcccatgtcataaaactgatgatgattctaatgttgcagatttttttgtcagagagattgtgagattagatggtatgcctagaaccattgtatccgatagggatgctaagttcttaagttacttttggaaaacattgtggagaaaacttgggacaaaagttttgttttctagtacttgtcatcctcaaaccgatggtcaaacagaagtagttaatataactttatccactttattgagggctgtcataagtgaaaatattaagacttaggaggattatttaccacatgttgaatttgcttataatcgttctactgctgcagacgcgttagctcgattggcaagtagtaatgtaagtgataaggtgaacttggttcctatccagttccttgaagagcctagcatcactggacggaagatgttgaaatgattgatacttccccaaactggaagacacctatagccgcctacttcaacactggggaactcccagattatcggaatgaagctcgaaagatgagaaggaaggatggacggtatatcatagtagagggaattatgtacaaaagaggattctcgatgccattgctcaaatgtgttactcaggaagaagttgcatgactcctatctgaggtgcacgacggattctgtggaaatcatgccgtcgggcaaagtttgtctaagaaaattctaaggcaaggttatttctagccaatgatgattgaagattcaaaagcctatgttaagaaatgtgacaaatgctggagattttcaaagatacctcaagctctgcctaacgagttaactcaggtgcaaagtctgtggctctttgccatttggggaattgagttgatcggacaattacccaaaggttaaggaggagtgcagtatgcagtggtagcggttgattacttcactaagtggacagaagctgaaccactcgcaaccattacatcaaagaaagttcaagactttattttgaagaacataatctgtcggttcagattttcgtacaaaatagtttcagataatggcaagcagttcgacaaccagtccttaactgacttctgtgtaaaccatggtatcatcaaaagtttctccgcagtgacacatcctcaagtgaatggtcaagttgaagtagtcaacaagaccttgaaggatacactaaagaaaaaacttcaagctgccaaaggaaattggctggaagaacttcctgaagttctatggtcatatcggacaactgagaaaacggcaaccgaacagagtccatttgctatggcatattgatatgaagccatgctgcctgtagaactcgagccaccatcccacaggagattgacgtacaaccaagataccaatcacgtactcctggccgaatcactt

SEQ ID NO: 40100 - DNA, 885 bp, Cannabis sativa
ttaatgaaaataagaaaggcccaatgctggacgactcagttggaaatccaaaggataaaaataaataaaaggtaaaaagcacaaacaacaaaagtgagaaagacaaaatagggaccaccccccgaggaagtaacagtaagaaaaactaggaagacacacaaatgccgacggaaaaattagaagaaaataagttagggtttaaagcctatcacctcggactgacggaggaagatccatatgatggatagattcaagaaggacccaaagaggaccttccatctagctcaccgacaggaaattcacttctttagaagaatagggcggcatagaacagaagcgtcttagaatacgacaaacaagtacctccgtcgagaaaaggcatcaaaacgaaggtttacattgtgattctcccgttcaccacggatagtaaaaagaagttccaacagaagaaagaccgctggccaaagaagtgagataaacaatccaaaaataagacacgataccgccggacccaaaggtcacaaaaaatagtagccatcacctaacaacaagacgcgtggcaaaacaaggtgagcagagagaacacgtcaagagaagaataggctgaggacaaatcatccatgcaaccaaaggacttaccacataaataagaaagggactacgaaaaaaggggcagaattaggaactgaaaaagaaagaactcacacacaaaaaaaaaattacgacgttttttggctaaaacaaggtccaaggttgaatgtcttcataaatacttatggagtaatttagcgaatcagtgttgtcactgtcttcgaggaaggtttgttgatgatttccttgtgcccccagttgggaatatgtagtggtagcttgtgaccttgaagg

SEQ ID NO: 40101 - DNA, 1156 bp, Cannabis sativa
  modified_base (989)..(1004): a, c, t, g, unknown or other
tttttttttttacgttacctgaacagcacagtcatggaaaatgtttctgagccaagagaaagcagtgttcttgtggcgcttgtataagagtctgacttgttctttgatgatatcttcagcttgaggacatgaatccttgtaaaagttcatgacaagacctgggtcttgctcattttgattatcagaggcagaagaggttttgatgagacatgaaagtgctgagaaagatagtaaagcgaagaagaagagagctttggaacccattttttctgaactctgctcagtaactgacctgcttctctctttggctacctacttcttaaataaggcaaataaggataagtttgacaattaaaaatgaaaaaagatggtggaacactacacactactaactataccaattttatattttaatatttgagcatttaacataaatataaaacatactagtactattgtagggtttataaattattactactgtacttaactaattaaaagtttatagtgaagaattatttaacatttataaagtgtcgctttatgatatatgttaataacactactaatatttgctttttcattttaacaaaaaaaaaaaaatatttgcttttaaaaaaattagtcatttttaatatcactataaggggtcatcttatattttattaattagtgttttttataataaatattaaattaaagaatattattattggtactaatagtatccactacttttttataagtgatattttacaattagttaacgatattttttaaaagatatttttttaattaaataggtttcgatacttatttacatcaataatgatataataatgagaaaactaataaacaccttttttttattgaaatattgattttaaattaaaccaataagtaagacaaatgctaaaggacaccagtaatacctagcacctttctatgtgtcaatatctctattggttcaattaagtatcgggtcccannnnnnnnnnnnnnnnaatttttagggagtatcgctaatctatcacaacgcgacatgtagagaaggtgctaagcaccactactacctaatagcaatgctctattaaattgatgtggcatgtagcagttttatttaatatttttactgactttgatgctttttgacttg

SEQ ID NO: 40102 - DNA, 1847 bp, Cannabis sativa
  modified_base (1620)..(1630): a, c, t, g, unknown or other
tttttttttttttttctaactaatatagttaagaaagaaattaaatatatttcaaagacttctctaagaatattttttaaaagacttgattgttcttttcaaatatctatacttaaaactttatttaatttttttaaaatataactattttcttcttgtgttgggacctatgtctttttaatttaatggactattaaatgcaaaacaaaccaaactaattaaaccttagcttgataggaagggacattccgaagagctttcctaccctcatgctatagttagattagataaatatatatatatatatatatataaatatttaataaaaatcatagagttttgaaaaatattaaatatgtgaatggaaatccttgcatacaactttgaaattgacggctgtaataataactgaagaagcatatttatttacaagtccaacagaagcgtaaatgcatgtaccatatactttgaatagttttaagtgtaataattacataattatggaaaaaaaattattttcaatctggtcaactccaacacatgcaaaaacttacttaaatgtctcactatttgttaatagagttatgggataggataggtaagttgattcaaatcacctatgccctcatttttttttttattttttgaaggaacctatgccctcattcttagaataatcaacttatttaaaataataatttacttttattctaccaaaaaacattatttatactttatacaaaatgtaattttgtgatatttttatatcaattttactattgattccaatacattattttaaatgttgatgcaaaatttaatatgttatttaatacttacttaataatttattaagaatataaaataataataataatacaaaattaaataataaatttaataataaaataataataataataataatacaagtcatttaatgtaatggaggatgttagttaaaatttaataataaaatattaaaataatggtaaatattaaaatataacatttattgtgatataataaattttgcatcatacaatattatgatgcaaatttggataactttaattatgtgagatttttgcattattaacactattagagtaaacttttaacaaaagaaactatattttgcattacatcacttatttgcatctctaatctctattgaattgaataggcgtaaaacaaaaagtaatgtttggtatgtagtatgagtccataatgtaaatatagtatcaggctcataaaattaattttaaatttaaataaatatgattatgtggaagttattagttagaatgagttgtaaacatttattaaggatagaaaataataattttaagatgaataataagattattattcttatacttttgttggaaataaaatttgggtgaattgcggcataaatacttaatattttaaattttatacacttaaatattttatttttatctttggaggcaaaaataccgaatattacaattctcttacaccgttactaacaattttgttaactcataaatatggacatatgaaaggcccagatgcattacatttatttattttattttaaaatttaatattaatatcaaaaactaaatgctactnnnnnnnnnnnaaaaaaaaaaaagagatgcaataccatatagctgagtaccagtacagtatatggaacataattatcgaattgaagtgccaatattatgtgaaaattgttatgagaactagtttttttgtttttttcttaaaataagtagcatttagtttctaatattaagaatattgagttttaaaataaaaaaaataaatgtaatgcatctgaaccctccacgtat

SEQ ID NO: 40103 - DNA, 1872 bp, Cannabis sativa
  modified_base (1833)..(1846): a, c, t, g, unknown or other
tacacaggtgtatacagtgatcattcaattgatatttaacggtaatatttaactggcgtgtcaaatttgcaaagaaaaataaacttaagggagtttcgctactaaaaaaaataaagaggttaaatgtataaaaattaaaatataaaagagtttcgcagcaaattactctattttttataattaaatgtttagctaaaagtagaacccctaaacaagtttaaaatcaaatttttgttactgaaaaaaacagaaagaaagaataacctaaaaaatcctccaacaataatgcacctaaaactttgtatagaacaattaagtaaatgaacaaaactatagtacaaagttccaatttcgggaatctcaatctcacaaagtaaaacagagaaaaaattctgtctttcttgttctggagccttctagcaagtacgcagttcttccttccatctaatgtgaatctggtccctctaatggggaaactcgtccaccttttgatgttaagtggtggtttaatgtgttttaatcctttttgttgttcaatttcctctgtttctctctctttttcgagcatttattgctctgggggttattattacattcctttccatctcattaatcctcttcagagtattaattgcttcagttctctattttcgtcatccctctctcttctccatcatctttttttgtcttctcctcatttattgcagatttctcaaatcttccctctgcgaaacacccttgaagattgtaatatggaggcagacgactgtgattccgaagcttcagcttatcttcatcattgtggctccaatggatgggactagggaagtgactaaggcggcgttgaggaaaatccttcgtggattatggttttttctatatatatccaaactcaggtattatttctgtcatctcttagtgttaatatttcctttagttgtctctgtctttgtagtgttttcttctacaaatatggatgaatttttaaatactgtgtctagtgccttagctttccctcttgatgagtctactgtctttacttatgagattggttcgtctagttcttctcatgctcctattagtcttatccttaagcttcatactattaggccttataatcgtccttctctgatgaaaaccctttctggtatgtggtcatcgcaatgtcaattcccggtttttgtctctgaacatgcagatggtatgttcttggtcactttgggctgtgagggtgataagggtagagtgttagatggtcagccctggcattttgctcagagcataactatttttgctgctcctgatagctctttccctcttacccctgataatttacactatgttcctttttgggttcaagtgtatggaatcccttttatgtgtaagtctcatgatctagctaggttcattgcaatggaagtgggtgatcttattgagattgataaggacaccattaaggagggaactggtccttatatgcgtcttcgcatccttctggatgttaacttgcctataaggaggggaatgaacatcaaattcattcgtatgggaagagagtttatcaaatggctggattttacgtatgaaagacttccagatttctgttttttcagtgggaagttagatcacactaagaggtattgtattgattttcttcaaaagtgtgatgagcttttatctgaacctttgtgcccttatactattctccttagaggcaaggagaaaatctctgacaaatctcagcctttccaataccctcatcctcccaccacaactatgatgaactaccaacctgtgaatctcaacttacccctgttggaaatattttaccannnnnnnnnnnnnntaccatgtatgtttcattaacatcct

SEQ ID NO: 40104 - DNA, 1225 bp, Cannabis sativa
aatgtcggagaagaccacattttttgcaccactctagcttttgaaaatttcctcatttcaatgtcaaagattcattataatatgaaaacgaggttacttagttaaaataattttttccttatattatgaccaatgtaaagaatgtaatttattatttttgttagtaattttttcaaataaaattaaatatatatttataagaagagaagaaatatcaatgtcaaacaacttttgtttttggcaattttatggtgttatttgagaattgagatagggatagtgtttggaactttggatatatacaatgaaaaggacaatttagaaggaagaagaaaccataacataaattatataaaggcccaattttataaaaccgcgtctgctcagttcacacatattatattatatgatatgataatgttttaatataatataatatataagatacaaattcttcttaaggaaaaagaaaaaaaagggaattaacgatacatcatatgccaacacaacgaaaaagtcttagtcaaataacacattaggcacaagaaatgaaaagaaaattgttataatatggatcatatggaagatgtttcttaagggtctcattttcttaccttcccatcttataaaattattcataattataacaaaaaaaatcaagaaaacttaaaacttaaaaacattggactaactatcttgttatgaggagacaacaaggatttgactcattcatttttgacatttttagattccacacccaaatttgaagcaaaaagaaaatggaaatatattttgtcatgggcatttgacaaaatgaaggaaaaacaacctcattttttgtaacttggtacatgcctaaattagttctaagttaatgaattggttttccaaataagtagcttaactaaaattttaccaaaattggaatatatattaactaagctatcctattttttattgattataatttatagtatgatttttccagcatcttcttttttaaacttgtaaaatgcagaagaagatgatattattgggtaccatgtttatgggtttctaatatagggcctttactacgtatcttaatggccttcttctgatctgggccctttagacggtctacaatctttatgggtttttaataaagggcctttacaaagtctacagtaatctagggcttttactggctatcataatgggcttcaatgttatatatttgttgtta

SEQ ID NO: 40105 - DNA, 1734 bp, Cannabis sativa
  modified_base (1644)..(1662): a, c, t, g, unknown or other
gtggaactgaacaagaataacttttaaaagttatctttttagcaagtgggttagacaaaattggtcttacgtgtaacaaaagtttaatgtccacttttgaaatcacattttggctacccgtacctaagatgtcaggtaaaggcctttactgaagagcgataggaggccatgctaaaaaataatgggtactagctcttttaggaattcctgtacggcgaaacattcgaggaaccactatacaagttagcgagtgagagcactaaacgagatttttttatccattatatatttttgtagaagaaccaactccaagttctcattgtacttgtcaagcttgtatgcacctttttttagtatcttgtaacttggtgcggacctttccagtttggtcaaaacatgcttactgtaggatctttgttgtcaaggaagattctttagagaactaagtctcttacaaagaatttccactctttgatttgttagtcagagtacctggcaactttttgctggcagacatgcaactttaagttgacttggtctcttctttcttccctttaataaagggattctactagcaagatgtggtttatttcttggtcagagtagaccaaaagtatgagagtagactattagtggatcaggctagccatggtacaaaccaggtggtcagccacatttagggagctttgcctggccagtttgatgaggctatggccgaccattctgtggaggtagtggtcggccaggttattgattccaaggtcggccagccttttagaggccaggtcgatgctacagttcgatcccatctacactcagttagaatttacccctggcaagattgttgtagagcctttatgcactcctatcattagctattcagcttttcactggtaacacatcttagaggtggtattgggatactacgtctatgtgttacactatcttgaattggacacctagtagctatcccccttatccctgctttctagcaaggttttgtttggaagaatactattatgggtgtcatccatatggatggttgttcaacatgtctatatttttaaaataggaatgcttagtgctttaaagaacaaagcgggtaacaagttttccttggcagtcaaggcactgctggttagttgcgggagttcatcggctattgtattttctatggggactttccttttagtcaaccgatgagcagacttaacaaatcttgaaattagcttaaataggccatcatctttttgcattgcactacgtattcaactaggacatgacctataactagatgagagtcatggtgtatgtctaggctttgagctctctcttcatgtgctagcttgaggccagcaatcaaagcttcatattcaatcacattgttagaagctttgaaattgacctttcttgcctcgtgcagccactgcccccagatgccctgagggccctgcctgcaccaggcaggtggtcaatgcaccttctaggttgagttatcttgcttgtgctctcgcttcttctctggatcttgctttcctcctggatcttgagagatttagggagatatgcttttatatttagccatgaagttgtcaagagcttggccttctatggccatgctaggtttgttggaaattattttannnnnnnnnnnnnnnnnnnacaagtatgttggattaacaacctcatatgaattctaaaacaatgaaaataaacacatataaagttagaaaa

SEQ ID NO: 40106 - DNA, 1722 bp, Cannabis sativa
  modified_base (69)..(83): a, c, t, g, unknown or other
aactcttatgtgtttaattttattattttggagatatttatatttaagatgttaatcaacatacttgtnnnnnnnnnnnnnnnctggtaaaatattcccaacacctttcctctcccatcatcgtgcaacacccacatcggtggcctttttttagtgacacagctcaactgtgaaacctataggtccaattatacttcaggcatcttttttttttctttctgaaatgtattgatctctccccttcttccttttctcaagtggatgaaggttcgtgcgacaagcttatgggttcatggtggatgaagcttctgggttcgtggtaaattgagcttcatagttcgtggtggaaggagcttcacagtttgtggccgaagaagcatttggactttgggtttgtctagtgatgttttttttttcttgtttaaatatgggtttgtgtgataaaatatatattttgtttcgtaaattttttgtaatattatgatatttgtttagtggtattaatctctaatagtgatattgtaatatgggacattctttaattttagatctggttttatgcttattttttttatgaacaagtttttctttttattttattaaattgtagagaaatttttgtaaagatagaaaattatttgttgagtttataaacattcatgacttctttgacataaggttttgtaatatacttttttatttttaatcccactctttataagagtttttatcccactggcatacatccagtttttattttaacaaaaacctagataaaaaagccctaaaagaaattaattaacaaaataatattaattttcattaattatcataattagaaaataacaatgataatttattgattaatttcttttttaaaactagaatttacaatacataaatttagacccgaaaaataaacaaaataaaatctaccactccaaccctttatacatatttcaaaggaattacaaacactacaagaaaaagcacttttgtaggcaagtttgtcgccggcaaaataaatatatcttggcgacatagtttttgtgacaacaatttgcatcagcaaaagatgtcggcaatgattcattagcataacaacttttctcaatgagttaacatgatgtgccgacaaaaatatttacatcgacgaactcagttgccagcataagttcattgtcgacaacttgttgtcgactgaggtgtctttgtaacgccttgatatttaggcgcgctacagtaattttccaattaacatactatcttgctaatcaagggttttcttagaaaatcgtgttaaattaaaacttcgattaaaattattaaacattacaagcttgtatatttacatagttgggatcccaagttaaactttttacaaatgtttcaaaaatactttcatatacatgtcgcacagcgacaacaaaatactatttaagatgtcacgagaccaaacactccacgtcgcgccgttctaacatgtacagtcaccatccaagcacggagctcaatcctgttcagcctttgccttttctttacctacacatgaaagtagaaactatgagtcaacaaactcagtaagaaaagtatataacaaataatataatatcgacatgtatctaggcgcccatacacctacccataaggcttaacagataagtaagaacgttctctactaaggtatgaccactgtaccacatatatgttgggttttgtgcc

SEQ ID NO: 40107 - DNA, 1300 bp, Cannabis sativa
tgtaattgttgcttaatgaggcaactcaattactgtcacatattaagattaccaattatcgtttgttacctattaagataaccagttatccattgttgtctaattagacaactatatataaatataccctacaatgaatttataaaataaaaattatatcacttatatggtaattttatatcataggacatggctcatactaggtacatcattcagttttcttacctgtatattcaaatgagtgtggtagccgattcgagtggaaaaaatttggtgctcgatagcctaactcacattagcaataacaacgataaatgtttacctactatatgtgtttctagatagctagcacactggccattacagaggcccattcactaagtccataggtcaactgtgcggcctatccgtcaaggatgggtccggtttcatgttcacttttcaataacaaattaagacaccgagtctcatatcaacaatcaacacttaacagaaaaaatggtgttaactgaagaagaataatctcaggggccatcgggaaaacagaatacaaaggggcatctgaatcacttactgtcccaaaaatcgacccgcatggcactcctctagcaagatcctgagaaatcaggtggtttgtccccttgtgttagaccttggaaagactcacagcaaaaaggaaatcacatgtttgggtgaacacccactattctgacattcattattccccacgatggctcaccaacttgtcattgtcaacggtacgaccatgtacggaaggcagctcaatccaaattgggtctcacctactcgacccaataactcaaattacattgtattttactctgttagtgggtcttttgtaccaaaaaatactctagtgtgtttggattagtccagcccatcaacaattcgtctatgaatatggcattatcccccatgcaaagggttagaatttatagtgtttaaaaacaagaaatatcataaacaccatagccaagagcttaataacagtaactcgtggactaaaactcattaatgcccaacctcataaaaatgtgtcttattttcttcttaatcatactttttttagcttaatatttattaatagtttttaaaaatctcagtaaacattacctaaacacactaattggtaattaaacttgaaatctaaacttttcctatcgataaacacgatgaaaataacttaaaaatatcaaaacacgtaaatcgaaaaaccttggaattcccttactggaaatccagatttacaaactgaaacctcaaaattacagaccaaccg

SEQ ID NO: 40108 - DNA, 3358 bp, Cannabis sativa
tgtcaccagtatgcattgccacgtcatggtgcaaaaaatgggataacatttgccccccaagtctacacgggacttctgaaggcccgcgtagacttcacttagtttaaatttgtgtctgaacgggtggcacgtgttcgatgcgcctgttggtgatccgatgtgattttgaccagaggtctcttcaatatccggctaataaatgctaattgatttgtaactcgaacctttttagaaatttacattcttttgatggttgcccttgtctaggttcttgattacttgatttcccaacgtttacttttgggggaaatcgaggcatttaaaattcgaaatgattacaactcttcactaatttgcttataaatagggcaaaaagtcctaataaaccacttttagcattttcttgtttagtaattttagagcaagaacacctttctctctcaaatccttcgaggaatttccaaaaagtgccgatcagcgtcatctaagcaacctcaaagctttaaacagtgagtaagttccccatctttttcttctttaacttttgaatctctaattttctgggttttcattgtagaaaattcaataatcttgaacttgttctaggaaaactgtagagaacctaggtttagaaatgtgaaacttcaattgtaattgaccatgtaacttggctgttgtgatattctgactttaatttcacgatattcggttcttactttgcccattcggggtttagtgaagattaacccttaatctaaggttttgaaaatctaggttatgaaccttaatcacgcgaaatttttccttttttgatcttttgattggacctgatcggtatgctttgtttgttttttattcgatatctcagccaaatactcatcttgtgtcttatcttttgtagatgaaccctggtaagttttggagaggagaacatcatatcgaccaggatcttctccaacttctgtacgaggaccaacctcgtctttgcgctagtccgtcctcatcaagcgacgaactttctaattcaagtttagaggattattgggaggtgagcagtgaaggtacaccttccccataactcgaggtgcaatatcatttctatcccgaccaaattacaggtgaaggctacggatgcttcatttcggaactcagaaaggggtggagacgatacttgccgtccagctagacatactttttctgggtagacgtagttgatcccatcctcgtgggccgtccaagtaccgatacctttggcattcctattgcaacttctgccataactgttgctacgcataccaaccaaatatcgtccagggataggatgatgactcgcacaaaacaaactatgcggagaattattgcgactgatcctcacgtggcttggcttgccacgatgctgagcgctgaacaggcccggcctgctgttgaggaagaggatagtgagggggacgtggaagtccaagagatagaggatcagggcaaggtccgtcctgatagtcccggtgaagccgaggaggagggagttgctcgaccattacgcttcggaggttacaatacaatgaagcaggggaaccagtgtccgaggtcggtgacgtcctggtggagggtgatgattacgtcaccgaggagtacgccgaggcggttcctcaaaggaggcaaggtgccttaggagctcggtgggtgtctcctccatccatagtaacccaggccaagttgaggagtttagagaaggatggatatctgggcggtgtcgagtgctttttcccttcttcaaatcaccgggcaactagtccaagacagggatactgtgcctggtcgggtgctcacaccaagcaggatgcaatgctgcccttgcttccgtatttaaaaaggattgcagactactaacatctctgcccgacctagttcacactaaagggcatcaaatacttatctaccttgttcatcctctatgcttcccaaggatagggtgagccgtctttgcacgacactaactagcttttcgacttgaagtcaactcccaaacagggcatgttggggtacttctacttctcccaattggacgagaaatggctgaagggtactgtggactccaatgtcaacaaaatagggcattatgtggacgagtactacttcgtgcagggcatggatatcatccacactcagttacagcagattcccttgtactgtcatcttcctttcacattgggactcagggagagggcacagaaaattctccaactgccagaagctattcagaatatcactttcttgaccactgaggccaactttgtgaagtacaagctcttcccataggattttgtgccaaagcctgtgaaggagaagaagaagaagaaggccaagctgaactgggctgatgatgttaagcaggagaaagatctcattctcattcaacaactcaagctcaagcgtgaggctaagttgaagggaggtgacggggccgagcagtatgcttaagaatattcagagcaggagtagtatgctcaagaatattcagcgtaggagaagccgagcaagaagaaaaagaaagcaccccaaccaagcgaacaccagtggaacacgctattaggattagggaacctggtaggcctgctcggccatccacccctacagagggaaaaggaaaattcgtcctggtggagcaagaagactcttcagatgatgatgtcccacctataattgttcgggaaaatgcccatgctcgcgtccagggtattttggcttgcatttacttctcttgtattatgcttttcacatatattatatcttcttctaactgcattattttatctgtgcagaattgtctcaaaagatgctccaggccttaaagaagagagtgggagacagtttgggcctatcccctctggccaagaagtctaaaggtagtgagactccgtccaaggagaaggagccaattgatgaggtcattgaccttttcgaggagcaacttgttgtggaccttccagttcagaaggtcttaaaatccaagagttccggaggagggagctcagacaggtctgaacaagctaggaccctttcaacaactgtggcactgagcacggaggccaagaagggtaaagacaaattccagtactatctgaaccgatcacttcctgaggtgagtgaccaactgtctggaacggacaatgagctatccttggagcttgtcttaggaggggtcttgaaggaagctactagggtaattatctcatctttttatctcattctcttatgtatagctcagactttaacattttttcgtacaggtcaatgtgaagatggcttatgcctattcctgagccaaattagctgctgccaagaaccttgccaccaccaa

SEQ ID NO: 40109 - DNA, 1396 bp, Cannabis sativa
  modified_base (703)..(704): a, c, t, g, unknown or other
aaaaattagactaaattttttagataccgaaacaagtaggggtttatcagtacatccgttttaatagtaaattataaataactatgacctcattataaatagaagagaaatactaaaatctaatggtcaaattattttcttagctaaatactagtgacctctaacaaaaaaaaatgcatatctattttttttttttaacaattttaacccattcaaaaaataactaaagaagtttatttgttataatttataaaattaatagttctatccctttattactagtctttttcgatccatttcattctttatttttaaaatagttttgtgattataattatgataaaaataaaaacaaataaaatggttgaattatgataaaaataaataaataagtatgggcgccgcttttcacttgagggagcaccattcatatcagtgataatatttttgttcttgttttttttttttctttttaatgatggatttacaaataaagtttataataaaaccttggacacttattataagcaaaaattatccatgaattacgataaaataagaaatatatttttcaatttgtttaaaaaatctatatattttctatattaataaggagtttttttatttttatacttcaaaacagtttttttttttgcatttttatagaattctacatacaaattcctattgcaactagcgctgnnacctaaattgcaacaaaaaatcatatagaaatccgtattgcaactagcgctgcaacctgcactctagaaaccaaagttaaaaaaataatatataaaataattttcctaataataattggtgtatatgtaaattaatttgtactagctagcttggactatgtcaacttcagaataaaatgcaataaaattaagaaaagacttaatttatttattgtaaataatattctacactttgtattgtattgtaagttgtcttcataggacgattcaagtagagtcaccttaattatatactttgatcaaacaaaaagtccatagttatcatatggattttgataattaattaataaatggtacgttaagccttgctgtaacgccgagaaaaatgaaaaatgttattcatcatcataataaatctgattttaaaaataataataaaaaaaaccacaacttgttttgtttactaaaaatccaacaaaaatagtattttctttcttatttatgtattttatatagctttatagtttcttcgttgtggtcatatatttggttgttgaattaacatatttaataaatttggttttgttaaattaaatttgattgtcaacgatgacatgccacgtctccatggaaaataatgtaagttttatgttttcttctttcaaatattcagtattctctacttttttttt

SEQ ID NO: 40110 - DNA, 1754 bp, Cannabis sativa
gttgcattgaagcagcaatgattagattttgatattaaataggaaattgaatattgagactgatttattgtttgtgaatttctcatgattagttagtatgtcaagaattgtaacttctggtgtagaactaatatcatttccaatataacattaacaagcctttgttcatgtgtactcattttggagattgaaagaaaatataacatttttgtgtaaatgccaactaaacttagatatgttttgaatatcttgaaaccaaaactagctattgatttatgaaaataacaatgttcaaaataattttgattaattggaatattaaggtaaaatatatagttgtctacacgaaaatcatcatttacttataagagcatcattaatgcatgcaacaacgattagtgttgtgttacctgcttgaccccacttaaaacttttttatcattttttttcaattaaactagtcttttgaaaaagaaataaataatggcaatactattgtgatgcactaatagagtaatctcatttttataataataataatctatcattgtttagaaaaaaaaaaaaagaaaaaaaaaagctaatcataatttttattcttctttgacatttcaaacaaagtcggccctaaaatatatggacctatggcgaattaaatttttgagtcatcactcttaaaattatataaaaaaattataaagataagtgtcatgagatttgaatccatgacattgtataaaatgtcatacaacacaactaattaagctatgaatatttattgtttacaatacatttaattttacttaaataaaagcctaataaaactttttatttttttattttggaccctcaaaaagtgtgagccctagatacaggactaaccctcctatgccagggtcggccttgctgccttggtatcaaatcatactcttaaacttttcacgttgacttctattcaatttcgtttaattttactaatatgtcgattgtccatattctaaattatgcctcttgaactttgatataaattgtactttcaaactttaacatgtaatgaatcgcgatcttaaattctcatccaagttaggcatccgttagtaaaattggacgaaagtttttgaattcaataatctcaatagttcgagaagaattttaccatctaaaaagttcaaagatacaatttggtacatgtcaaagttcggaagaaaaaaaagccaattaaatcatactaaacagcccataaatgaattttgttagggttatggtaactaattcgaatccaatgttttaaatttgaaaaaaaaaaaatggttgattgttctcaaaaataaaattaaaaatcactattctaattctcttctcaataaattcaatcctctactatatctaatgattggagctgttggtggttggtgatcttcacaaacgcgttgattaagattgttggatataaagatttcaactcttaatccaataatttcagattgttgatctaaaatattagaaattattagatataaggacttcagtccaatttcgttcaattttactactgctatgattgtgcatgtattaaatcgtgtctataaattttaacatcttctaaattttaacatatatcaaatgttgtgctctgtagacttttatttacgccatgcttttgttaataaagtgaagtagaattagacaaagttttcgaatccaataatttaaatagacataatttatttcgtgtcaaaatattccaatttgat

SEQ ID NO: 40111 - DNA, 1406 bp, Cannabis sativa
ccctaaaaaatactttttaaaatataaaggattttttaattgccttaagggtacgatcgtacttttctcatttaaaaattgcatgcttttatttttacaattcaaaaattggaggcaaatcattttaacatttaatgttctgacctttctctttccattagttcccactcattcgatctatctttattgtggtcaaacggttactaccttttgggtataaattttaaaattccttctcttttgtcatcttcacccacgaaatccttagaactcaaaaaaatctttgccaccttcctatctgaaattgcatgccatatttgtcttttacctacttctttcgaatttcatatgattatactcttcaatcctagaatcagaaaggttcagttctctcaaactaggactttttgtcaaaaatctcttcgagacctaggtcatcccatcaaactagtaagtgatttcccttttcattgacatcttttatatttttcatcttgatttctttatatgtgctttattttgcattgtttgttattttagtgagttttatatgaatgtttgagtaatctaggggtagagattttaaagttatgtgattcacaggtcctcgattttatttgtgctctgttttccaagaagttgggcattattctttatgatcatgtcccaatttaacctagaattttcactcctagagtcctcgtaatcaaactgtccttaattttaagctatattttttaatccatggcttgaatcgtctaatttagttgatattcccttagcaaggccaatattttttaccaccagtcactgttgctttttcatcaggtgacttagaatttgaactaatggctcataaagctcacaaatccaagatgcctcagaatccttctgttacgttccaagtttaactaattgaatctaggataaggtcgatttctccctatgtaggggatgttttaagatcttgttgaattagaaacaagaagggatgttgcatccgttcagtcgctcctgggggagtttagttgtttccccccagaacgtgtccttagagatgagggttgcagcaccagcgagtcctcataaataagagcttagagcgtggaacatattagggcaggagccgtactccccctaagggattattttaaagaattttacaactatctcagaattgcacctttccagcttgccccaaattcttacaggatccttgcctgtttgaagtcgttttaccacatttgaaagtgggagtgtccaactccccttgagattttatacttttattctataaaagcttgtcttgcgagggagaatggagtaggaagcttttactatttgtgattttaaaattttttaaaaatatttataattattttttaaaactaatattacgtggacca

SEQ ID NO: 40112 - DNA, 2483 bp, Cannabis sativa
  modified_base (1173)..(1175): a, c, t, g, unknown or other
ttgtgttgtcaacacagtagaaagcaatcaagattatgtgattgtataaattcctacgatttatcagtacactggatttatcaagcagggtcggttgctatggtgaatcaaatggaaccaatatatgaaaggttccaaaagtaggcacctcaagtttttctgcgaggaccagatgttatgaaagccaaacagtgggtaactgtaatcactcgaattttgaattttatgggagtcacctacaatgatagagttgcttgtgcaatgttccagttcctggaggatgccctagtttggtgggatatggtagctctcacccgagatatcaccaccattaactgggaagagttctagtagttatttaaggcaaaatactgtaatgaggtagttcgtagcacaaaaagaaagaaatttactcaactgactcataaggagaatatgtccattacagaatatacaactcagttcaataggttggccaggttggcctcaagaattgtgctaaacgactttagcaagaaataaaagtatctagatgggttgaaaaatcctaagatcaaacatgatctgatgattacaacagatgataccaccacttatgctgatatggtgggtaaggcactgcgagctgagggcgcagttgagtgcatccaggagtctcgagggattccagttgttggtggagccactgctcctcctacttttggtatggtaggggtggttatgcatcaaccattgatcagaagagaaaggcactgtctgcatctaatgacttgagtcagaacaagagggtctaagggaaccaagctcgtggcaaccgtcagggtagctttgaaacccgatacacttatccagggcggggatgtttctagtgtggtataactggacattatataaaagatttcctgcaactaaaaaaggaagagcaaaagacggaagcaaagtccgctccatcaagggtgtttgctcttacttaggctggcgtaaaagctagccccttggttgtttcaggtcagctttcggtgaaaaactcttatttctctattttgtttgactctgggaccactcattcatatgtggcagctagaataattgataagataagtagaacatttgatagttatgacaaagggtttggcatcctactacctggcgaagaattagttatctccaaannntgggttaggtctatgccgatcagacttaaggatagagagttgactgctgatatagtggaattgggtttagctgatttatacattatacttggaatggatttcttatctatgtactctacttgcattgactgtaagcggaagatggtgatcttccaacccgacggcgaggaacttacagaatggctcctgtggaacttaaagacttaaagattcaacttcaagagatgcttgacttagggtcttctcgatctagtgtatcaccctggggagctccggtgttgtttgttaaaaagaaagacgtgtcgctacgcatgtgtattgattatcaggaactaaacaagttgactatcaataataagtatcctttgcctaggattgaggatttgttcgattggcttcaagggaagatagtcttctctaagattgatctccaatcgggctatcatcagttgataattcgagaggaggagattccaaagactgccttttgcactaggtatggacattatgaatttttggttgtatctttttgactaaccaatgctctggcagctttcatagatctaatgaataagtttttcaaggatttcctcgatatatgtgttatagtatttatcgacgacatccttgtctactctcagtcataagtagagcatgagcagcatttatggatggttttacaatggttgcgagagcacaagctttatgccaaatttaaaaagtgtaaattttgactgtctcaagtgtcatttcttggacacattgtcagtaaggatgggatcatggttgatctgagtaagatcgaatccgttagggattggccgagaccaaaaatagtcgcagaagtcagaagttttctgggtttagctggctattgccatcagtttgttgaagggttttctaaaatcacaacgcctttaatagaactaactaaaaagaatcaacaatttatatggacagataagtgtgaaataagctttcaagaactgaagcaacaattgatcacagctccggtattagcactactgttggatcaggagaagttagtggtttattgtgatgcatacagacaggtttggggtgtgttttgatgcagtttgattgggtaatcgcttatacctcccatcaattaaaggaatatgaacaacgataccccactcatggcttaaagcttgttgcagtggtatttgccttaaaaatccagcaacactatctctgcgagaaaaagtgtgagatttacaccgatcacaaaagccttaaatatttccttactcagaaagatttaaacatgagacaaaggcagtggtt

SEQ ID NO: 40113 - DNA, 2264 bp, Cannabis sativa
ctttaagttcaatagagatagattaatctaggcaataaattaataaagtatataattcattcaacctaggttctattcttcatcataattaaagatacatttgccaatattagaaattacaatttctcacaacacttagaattctagactattaggtgaatagtaatcctaagattacaatagattaaaccaaaattaaatttagtgatcatctaaataagattaaagcattaatcatgacattgaacgtagaagaatagaagcattttgatataatagaaactagaaattaacatattcatcaatgaaactaaaaaaatcatgtctcgagttttgaaataatctttaactaaaaaggaactactcagaactaggcattataatcaaaatcataataaatattaagagtttaaggagaagaaaaataactatgatgtagaacgttcgaagtcggaatctctgtcttcttcttattctctctctctctctttgagtttctcttttaatttcgtagctcaaaagtgctaaaattcgtacactagaagtcctatttataacccttaaaaatatctcactaaaaaaaagataaatatacaaattttgccaagaaatatacaaatttgtcacatgattagtattttggtcgtaacttcttcaatacaacctaaaattagacgagtcaagttgttttggaaagttgagaacgagatctacaactttcatattgtactccaactccagttctgcctctgaggtcatcaaaatttgtaattaagttccaccttataaaaccgagcttgccggcttccactattttccaccaaaatatgctaccatctatcgaaatgactctaaatgtatatttagtttttaaaataacctaacaaattataatcaagctaattagtaatttaaagaatcaatttaagaatcttaatatataaattggtcatattaagaacataaatatgaactcataaattagttttttttttaataaaactcgttaatggggtaaaatacattgaatttgtgctttcttaagctattgggttgcgtaggtggggcccaattttaaagagtaatatgttgtacagtacttggtattattaacgatgacaactggtgtgtgcaccactgtggggaaagagaatgtcagattatgggtgcaatgcacaaacaggtaatcatcctttagccacgagccatcctggaatctgacagtggtacaggtcactagattccttagggattatgttagaagcgtacccttgggatatccatgttgggttcccaacattactttatccttagaatttaattacagttgaactatactttcaggagcttgcagatccaaattattcttggacatgctgtccaaatccgcatccattcgggcgatgagtcgtcttgttcatttgcatggactagttgatgggtcgagtactttagtgggccccctagaggagccacatctcacctctccagatatgtaaataacaaccatcaatttgattgatgaatcagaataagagaaagttatttgcttgatttccaagaatcgatatcaagataagaagtattctcattgatgtgtttacactatattagaatcataatattttatttgaaataacaaaaccactttgattaaaattttaattgtatgttggactcgtataaaaaaaattaaatgaaggtcaaaaattcataatttaagaaaaaataagaatggaaatcccatgagtttgtcactcccgttcttcaatctcaaattagtgtgaaactcacaaattttattctcgttgcttaaaaataattagagaattaaacaagataaccaaattcattgctcattctcattccctaatcccactaattaattgtaacaaatattgaaaaagtatacacaattttgccaaaaaaaaagggcttttagattagctagtatgctataaacgctcgcattaaaaactggcttgatagcagatagattagctcttctattattagttatccactcatgaaatgagactatctctaataggtatagtgtataaataaaaggataaaaaattagtaattacagatgagtgataaaataataaataaaaaaaataatatatattatagagtaaaatgtgatttttatatattttgtattaaatttaatatcacttttaatatatattaaatttagctaaaatttatttatatatgtatatatttataccattggagatactttgatcatagaaaga

SEQ ID NO: 40114 - DNA, 1366 bp, Cannabis sativa
ttgtcaaggtctggccaatggacggaaggatctaggccaaaggtcttgtcaagactagatccgtcgccaatggctactcccactgccgtctcagtgcgtcacgaggtagatcgtagactgacgttgcgagatcacgtcatgtcggaaacagagaggagaccgtcagtctcatcactgcccactggatttccagtcaagcctggtgtagcactgttggttggaggaggcaattagggcatgcgctttttggcaaagctcactgacagggatctctgtcattacgatgtaataccaaccctagagttacatcaaagaaagtaactcgtgccattaaaaaccagttagagaatctctactgaagcatcactcatcctactgggggtccgagtctttgctaaaaaagctactaagcgccttgccatttgttggaagaaacaggctgcccaagagatcctggggtgcatgcacgtgtctattggggcttttcggacttcaagagacgcatgcgtattgttttccatgcgtgacagatcattgggtgtatcgcatgtcttcaaccctccttctcggaatgaaaggactgcttgaagcctgctttactcccaatggctctttcaccctttgatattttcaagcgaagtctaaacatgaatttttatgcaacttctgccttccctcgcgaaatccgaagcttgcttcataaaaattcaacatgactctcgcatgcacattgtttttcgtgcaagaaagatcattgggggtacgatacgtcttcaaccctccttcttggaatagaaggactgcttaaagcctgtctcactccccgtgatgctttctctctgatattttcaagcaaagtctaagcttgaatttttatgcaacttcaaccttccctcgcaaaagctgaagcatgcatcataaaaattcaacatgactcctgcatgcacgttgttttttgtgcaagaaagatcactgggggtatgatacgtcttcaaccctccttcccagaatagaaggactacttgaaatctgtcttactctcaatgatgctttcactatgattttctcaagcgaagtataagcttgagtttttatgcaacttcagccttccctcgcgaaagccaaaacttcataaaaattcaacatgactctcacatgcacggtttttttcgtgcaagaaagatcactaggggtacgatacatttttaaccctccttctcaggatagaaggactacttgaactctgtcttactccccgtgacgctttccctctgatcttttcaagcaaagtctaagcttgatttttatgcaacttcagccttcctcgcggaagctgaagcttgcttcataaaaattcaacatgact

SEQ ID NO: 40115 - DNA, 1924 bp, Cannabis sativa
gcacttactaaaattttcaaaaaacaaggttatctaaatcccaaggatctaggctattggaattaatttctaaggaattcaatgaaataacttattaaaaaaaagtaaagtctaagcgttcagttgaaatcctaaaggttcaggttgttgttagaaccagaaccttagggatctgaaagtaaaactaacttagcaaaattcatgaggtatgtactaaatactatatgaatttaaaattaaaagtatgaaaatatccaaagaaaaattacattcttaaaagtcctacgattaaatcataaatagtgtctccgtattaatagaaaagggttaaaatttagttcataaaaatgaactatactttagctggatcattgggttctaaaccagagttgatagcttatcacccgagacctcggtgattggaacatcatcaattgaaacttggtctaaagatggaacctcgctagctagagtgtctctaaagatggaagagaagatcctcccagaatgtcctcatctgacgcaaccacttcaacatacttattattagtgtttactttagcaacatgctcttcagcttcaagttccaaaatctgagcatgagtgttgccttgtcgccctcagtcaaataattgaacacgtccttatttatttgtgataactactaaagattactcctcatgatgtttctcttctgtgatcataagtttctcctccaggctctcagcatagctttcaacttttacaacatcagcattggccttgtcaacttccttttgggcgagtttaggcttttccatctcctcttgggtgcacttctaagactcttccaaagcttatttttcctccttgagtttggatgaaacatcaccctcagtatgtttaagcttctccaaggtctcttattcagcaccttcaaccttctattggagattttggtgatgctttagtttcctctccaaggtggcataggcaatgatctggtcatttagggctcctgtttggatgtcatagtcttgggaagcagtgtctaaccgtttctctagatctttaactttattttgagtttcggttaccttttcctcaagagtagaaatgcaagaagtggcttgattgtaagaatccttgtatttatcagcatgctctttcttcgctttagcagaactcttgtagttggacacaacatcattgagagaagcttcaaccctttgtttgatcacagcttcggcctgagacttgtatcatttaaagctttaacggtttggtcatgtttagttgttaaagtctcaacctcataagataacttatcaaccaaggaagagcatctctccgccacaaaacttgcttgaaacaaaaaacacatgaaattaaacatacttcaaaaaatggacaaagaaatataatttaaccataatttaattaatttaccaaagttatttggttcttgaggttgttagccataatgaccggatctacactcaccattgcggcaaacttattagagcctagtctaccacatgtggtagcatttaggtccgagcctaaactgggttgaagcctctcagcaacctcttggcaattgtggaaggcaggaattggttcgttgaattttgtagcattagcaaattcactacttcacctagttgaaagagggttggcctttttctccatctcttcgtattcaaagatgatccttttgtgaagagctttgtcaacatctagttcagcacgaacttcttctggtaatgaaaaaggatagattggaaaagaaatgttacaaggaggaaggggaggcaagtttgtcttttctctgggtaattgggtggaagaagagtgttcaacctagtaaatttttcacttccatcaacatcagcactcttttgctcatgaacctccgagctctatctgttgggttttatgccct

SEQ ID NO: 40116 - DNA, 1655 bp, Cannabis sativa
agccatgcatcatcattcatcatgatggaataccatgcatccacgtgtatagttcattgtttagtaatgactggatgaaattacacgttatcatggttaattattttagaaatttgactaattatgagtacattaccctaaattgatacacccaacttttttttttttttttgaagaaaacctgatattcattaaaaaactcagcagatacaatgttcaggcaagaatggaaggtaaagaaccattccaaatacattcactgtctaatcctaatcaagccttagcaagattatgagctgatgtgttacaatctcttggaacatagatgacagacagattaggattgaacaacaatgaatttctaatggcattaataatatcacaaagaacagaattattacaaaaagaactggaaatttttgtaaccacactctggcaatctgatgcaatagtcgaaacagggagctggattgctgtcacccattcaatggctgcaaaaatggcttttgcttctgcaacttccggcgacacaacaccagaataaggaaccataaagccagctctaacatgtcttgcactatcaaaagccaccactccagaactatgcttcaagtttgaacagtctaaagcagcatccgtataaactatccactgaccagcagggggctggaagtctcgtctaattggcctcatggtagaaggagtcgaagccacctgtttagcattggcatctaaaaattcatgcaaatagttagctgcataatcaaaaatctggtacgaagaatgccctgttttttgatgaaaaatattatttctctgattccagatggaccaaataaaacagaacatcaaagccagatcagatttagtatgagcatccaaagcagcagtcataaacaaacaaaaagacctatccttattagtattataaaaagcaaaaaatttagaatatttccaagcttttttggcatgaggacatccaaggatatcatgttcaaccgtctccgattgcatctggcacactgggcaaacaggagtgggaataatatgcctgaaaaaaagagaggaagcgacaggaagggaatgagagatagcacgccaaataagatgtttaacttttggaggcacaacagaattccagattttggaccagaaagatttgcttgaaataaaagaggaagaggtaggcatgtcacgagattgaagagataggtggtaagcagatttgactgtgaaaatcccagttgcttctggcccccaaatcatagtgtcattgcaagtatggcctgatataggaacctgtaaaatatcctccaccaaagcattgtcaaaaaaattgtttaatttacctctatcccagcttctagaaggggaaataaaaaaagaaagaaatggtgagggagggctagacgatgaaaagtttttaaactgactgccagggagccaatgatcttcaagagtacgaatatccaaaccattacccaccttccaaataaggccctgtttaagcaaagcacatccccacagaatgcttctccaagaaaaagaaggtctatggccaggaactgcctccagaatggaagaattaggaaaatatcgagctttgaggactttacttaacaatgagtgagggtgttgcaagattctccatgctt

SEQ ID NO: 40117 - DNA, 3635 bp, Cannabis sativa
gatactggtgcaacacaccatatgtgtgcacacagttcttgttttagttctttctctaactctgtctatcccaaagaagttactctacctaatggccatacaatccctgttgccaacataggtactgttaatattaatcctcttctcaccttaactaatgtcctctttgttcctagtttcaaaataaatttgctctcaatttctgaactattggacagcaccctatttaccataaatattaacagaaatacctttgtaattcaggatccttctcagaatgtggagattgggatagctagaaagcatggcaaactctatcttcttcaacagaagtaccccattgttgctgcatctcaatgtttttttccatttaataaaaacaatgttgaccattggcacaatcgccttggccacccatctatgtacatttctaatgttgttaataaaaagattgatccatcttttgctactcctgcttctacttactgtcatatatgtcatttagcaaagcaaaaaaaattgcctttcattgctaatcacaactttgcaaataccatttttgacttaattcacatggacatttggggtccattccatataatcagcactgaaggatataaatacttccttacaatagttaatgataaatcaaggtatacttggacatatatgctcaaaaccaaatctgaggttcaaactataataccatcattttacaacatggtttgtactcaatattccaaaaatatcaaagctgtccgatcggacaatgccaaagaactcaatatgcattctttctatgcttctaaaggcatcatgcactatcattcttgcgttgaaagaccccaacaaaactctgtggtggaacgcaaacatcaatacatccttaacattgcaagggccttacgattccaatctcaccttcccttggtatattggccatatctcgtccaaacagccacatatcttctcaatagaaccccttctgccctactcaaaggtacaatttcctttgaattacttcacaacaaacaacctgtttatgaccacttaaggtcatttggatgtcttgcttatggctcaactctctcatccaaatgacataagttttcacctcgaagtcgagcttccatattcattggatacccttcgggaatgaaagcatatttgcttcttgacatagaaaccaaacacatttacatgaacatatatttcccttctcaactatcaacaatcatgctgaacttaacacatgtcttaatcaggctattttaccctgctctagaccaattacacagcaatctggtgctgtacgacagatatcaccaccaacaccttcaattcagcaaaaccgtgttgtacttcagcacaatactgatacaaatcagcataataatgctgcaactcagccaactactgatacaaatcagcacaataatgctgcaattcagcaaaaccgtgttgtacttcagcacaatattgatacacatcagcataataatgctgtaactcagccaactactgatacaaatcagcacaataatactgcaattcagcaacatatcgctgcacttcagccatctcctgatgcacatcagcgtactcatgctgaaagtcagccaaatctagcaaatcttcagcacaaacctgatgcaaatcagcatcccactgttgcaattcagcaacacatcgctacaattccaccaaataatgctgcgattcagcaaaatgatgctgtcccacaccaaaaatcacatcctacggctgccattctcaccagtagcagacctaaaaagaaaccaacacacttactagattatgtatgtcacgcataccactgctcatcctattgagccatacctttcttacataaaacttcatcccacttttcgggctgctgttcttgctgcctatactcaaattgagcccaaaaactatgttgaagcttctctttttcagcattggctcgaggctatggacaatgaaacccaagccttagaaaaaaatcacgcatggatcaatacaaaacttccccaggcaaaaaagctatcggttgcaaatgggtttataaagttaaatacaatgaacatggtgatgttgaacgattcaaagcccgtcttgttgccaaaggcttcaatcaaagacaaggcatcgatttttcccaaacttttgcccccgtggccaagttcaatacccttaaaatcttcttagcattggctgccatgtacaattggcatgttcaccaattggacattaacaatgcttttcttcatggggatcttcttgaggaagtctacatgcaacttccccctggatataaagcccctcccaacacggtgtgcaaactacaaaagagcatttatggccttaaacaagcttcccgataatggtactcgaaattaagtaccactcttctcaaagagggattcacccaatccatgtctgataactccttgtttatcaaacataattcccctcattttttggctatattgatttatgtcgatgacatcattgttgccagcaacaatgcttccaacattctcatgttcaccgaatccttagatcaaaaattcaaacttaagaaccttggcactctacgattcttccttggtcttgaaattggaagaacccaccaagacatctccatgtcccaaagacctttcacacttcagctgttaactgaaacgggttatttgggtgccaaacctgtttccaccccaatggaaacaaatctgaaactcagcaaagacaaaggcgagttactcaaagacccgacttcttaccgtagcctaattgggaaactaatatatctcaccatcactaggcccgacattacctatgcggttaatcacttaagtcaatttctctcttctccacaagtacttcatctgcatgccactcaacgcatccttcaatacctcaaaacaacccctggtcaaggattattttttcctgcaaaagctagccccaatatcacggcatatgctgaaactagtctctcttcagcaaacgttcaactgtccttcgttgctgatgccgattggggcagctgtcaagacacaaggaggtctgtttctggatattgcgtttttcttggaaactcacttatctcatggaaataaaaaaaacaacaggttgtctcccgttcttctgctgaagccgaatatagagccatggcaaacgtaacttctaagctcacttggatcaatgcccttctacgagattttggtgtcactccaaaccttcctaccaagatgtattgcgataacactgctgccattcacattagtgaaaatcctgtgtatcacgaacgcaccaaacattttaaaattgactgtcatttcattcgggaaaagatccaacaaggcctacttcaactaatgcatgtttcttcacaacagaacttagctgacatttttaccaaagctttactaccatctcacttcagtcaaattgtattcaagatgggtgttcttaacatttacactccatcttgaggggggctattagatatttgtattagatatttacttagccttaattctcgggttctgttgtattctgttattgattagttaggctgttaggctttgtttttctccttaaatcgactttgctcaggttgtatataa

SEQ ID NO: 40118 - DNA, 2129 bp, Cannabis sativa
aaatattagtaaatatgttattaaaatgtatgagtttttataattaagtttttttgcacattttttgtaatatattaatttttgttgtacattaatgaaaaaacccctttgcaaaattatgatattcaaaagaaaaaagtttataattgggattttacatagtaaaaagaaaattagatggttgcgatttaggtttcaattttagaaaataccttaagcagatggtagtaatatcttacaaggcttagtggtcttgaatgccgtgaacgacgactagcacgtcgaatgggtatgatgttttgtaatttgagttgtgatttgtgtttcagtttaggttgtgatatgaattttagtttgggaaatcattggtagcaaaactagagggagtggattagaaggttgtggatggaactagcagtgatgaatgattcgatggtgatttaggatgtaattaggattgcgatttgagtttcagttagagtgtgtactcttaaagtatataatctcatcaaagtaaaggaaagaagaaaactcaccgatgaagagaaagaaagagcaaggtagtgggttgcatatttgagtttcggttaggttgttatatgagtttagatagggatgcgaagatggagatgcacttttatggcgatctttgatggtggttccagatggtgatctccaatcgtagtctcatatggaagtctccaacggttgtctctaatgctaattctccaatggaagtctctgatggtggtctccaatagtggtctccatgttagagatatacacatcaatggaagaaaatcaagatatattacaactctattgtaatatgaaatacaaggactaataaagagattaaataaatgttacaacactaatatttttacactatatattttatatatattaagaaggtagaagaagaaataacacaatataatatagaatatataatataatatatgaagaagaagaatatcacacactcacaaccttgagtgcagattattagggatcaccatgacttgaaaaaggttttatcacatttgtccaaaacttatttcctctatctgtaagcactaagagaactctctggggaatagctttgggaattatcaaggcttgtagaaagtgcttgttaatagaaaactaggttaccaaataagcaccaaagatctctttttatagtgtttaggtgatcacacttagaattcaaacacaccatatctcataactataataggcacctaaatgagtgtaaaatggattaaatttggctgttacacgagctggaacagatctccaacgttcaaaacatttttcttaaaactgttgtacctggcgacatgtcgcctggcactacgcaacatgtcgcttggtgtatgtttcaggttgtgcttttgagtttcataactccctctcgaaccaaattcattccaaacattgttcaccttatttctttcacataaatgaatattaatctattttttaacaactatttcatcatagttttgaatcccaaattgtgtaataactctttcattacactaattatgtgtgattaacaaaagagttacaagtgataaattgtaattcctttacaagttacaatatatatatgttaaatacacatgttacataatttttttaccatttacttaatatatattactcacataataatatatattatcacatttaaatgtacacattatatttttaaataatataaacagggtcgtcttaaggtgatgagaggcctatggcgaaatttgaaacgaggccttttattttaataaaaattaaaaataaattttaattaagttttgacacaatattaattttaattcttttatctctatataataaatatttttttgcaacgtaagctaatttgatcaaagtaatatttaattactgaaaacatctatattgaagtgctacatattttagcacatttgaaagaaaaaaaaaaataatgtgtttaaattatatatatatttttttaaaaaatagataataaacctcaaattcaataaaagctccacttaccatttgtgctacacatttttcatgtaacttgttgagttaagtatttatatattatacgtttttatatgtatatatat

SEQ ID NO: 40119 - DNA, 3242 bp, Cannabis sativa
agcgtgtgatgccacgtcagagtgcaaaaattgggatagcatttgccccccaagtctgcacgggacttctgaagttgcgtggagacttcatacgagctgccttcacatttgaacgggtgacacatgttgggtgtgtctgttcgtgattcgatgtgagtctgatcaggcgtctcttccgttttgggctaattaatgctcttgacttaattaatgcctcgaaacacgatttccatcgcacgctttgcggttacacttgattactttttatttcccaatatttatttttggggggaaattgaaacgtctgagggatttcgaaatgattacctcttttcaccagattgcctataaataaggctggaacttcttcataatttactttcaccattttctccactaaacaaactcagagcaaaaaggaattttctccaagtctgccgtgagatttctatcagagccatccgagcaactttgtctggactacgtttaggcttcaaacagtgagtaagttttcaatcttctcctcttttaactttgcatttttaatttttaggtttccattgtagaaaatgccattattcttgacttgttgtataagatacatagaaaatctaggctcgaaactttgtagttttctctgtaatagtctgtacggcttcgtaatttatgacattttgccttaaatctcgcattgttcgtctttcaccttgctcattcgaagcttcgtgaaattttaacccttaatccaaagatctcaaacttctgggttttgactttattttttgtgcgtttttgcccttttaatctgttgggtggtcctgtcggcacttttacatgtttattatttgatatctcggccaaacactcatctcgtgtgttatcttttgtagatgaaccctggtgagttttggggaggcgaacaccatattgaccaggatttgcttcaacttctgtacgaggatcaacctcgtcttcatgccagtccgtcctcttcaagtgacggactttctaactcgagctttgaagattgggaagtgagtagtgatcgttctcctactccagaaccagtagtgcaacatcactcttactccgagcagatcacaggagaagggcacgaccgcttcatttgggaattgaagaagggttagaggcgttatcttcagtccaactggacatacattgtccagccaggtgttgccgatacccttcctgtcggccatccaagttctagtaacttcgacataccaatagttgtccatgtcgttactgttgcacgacacacacatcagtatccattcgggagaaggatgatggcccgcacaaagcagactatgcagaaagtcaacgcatctgaccctcacgtggcttagctcgccacgttgccaagcgccaagcaagatccgcccgttacggacgaggaggatcatgagaaggacattgaggtccaagagatagaggaacgggacaacgtccgtcctgatagcccttccgaagctaaggaggaaggagtggccgaacctccaaattttggagggtataatgagacctgggagccaatgtccgcagatgatgacatcttggtcgagggggaggactatgtcaccgaggagcttactgaagcagttcctcacaggaggcaaagtgccttaggtgccagatgggtaagccctccgtccaaaataagtgaggcatgcatgagggccttggataaggctaggtacctaggcagacttaagtgttacgtcccctctttgaaacatcgggcaactaacccatagaaagggttttgtgcctggtcgggcgctcacactaagcaaggggcgatgctgcctttgcactcgtactttaagagggtagcgtattatttttgcctttgtccgatccaattcactcccaagggcattaagtacttgtttgccctgttcgttctctacgccattcaaggatgggctgtgtcgtccccacacgagatcaactggctttttgacttgaagtctattcctaagcagagcaggtcggggtacttctacttctctcagccagacttcaagtggctgacgggcaccgtggacaagaatgttagcaagatctgggttttgttgatgagtattacttcatggaaggcatggataccagctatactcggtttcaacagatcccaatatactgtcgtccacccctcacgttggcacttatggacagggctcaggagattatccattttccggatgctgcttgaaatatcactttgttgacctcggaggacaactttgtgaactacaagctttatctggcagactttataccccagcctgtgaaggggaggaagaagaagtccagggttggccgggctgaaggagctgagcaagagaaggagctcattcaactcaagcgtgaggctaagttgaagggtgatgcaagagccaagcagtatgctcaggaatattctgagcaggaaaaggaggctcaggaatattcagagcaggagaggccgctcaagaaaaaggaaaccctcccaaccggccagaggcccattgaacatactatccggatcagagagcctgatctacctgctcggccatccacccctgtagaaggaaaggggaaatccatcttggaagagcaggaagattcttcggatgatgatgcttcgtccgtgcttgtttgggcaaatgctcttgccagcgtgcagagtactacatcttgcatttcttgattttaatgccttcatatattttatactttcttctgactatattgtttttattctgtgcagaaatgtctcagaaaatgattgaggctttgagaaagagagtggagggaagctcgaacttctcccctccggcgaagaaatccaaaggcggtgagactccgtaaaaagagaaggcaccaactagagaggtcattgatctttttgaggaacgacctgccgtggaccttcctgtcccgaaaattactatatctaaaggttcttgaggatggagttcggagaatctgagcaagcaaagggaggatccgggctgatcagaagcgggtctaaacaagttaaggctcctgccccacctctaatattgccccaggagacgaaaagaggcagagatatgatcacccactatgtgagtttgtcggtccctaaggtgaacaaaaagttggctggggcggacaatgacttcacgggtaagtcttttctaacatttccctttcacttctctttaactagtttggattgtaatgtcttcttt

SEQ ID NO: 40120 - DNA, 2298 bp, Cannabis sativa
  modified_base (27)..(48): a, c, t, g, unknown or other
attccatgtttatgatagcactcccannnnnnnnnnnnnnnnnnnnnncaaaatgtacatatcaccctgacctaaaagtagtcgagtggcatatatgatatatgtgttattagtcgtcggaatctttggatgaattagaaatcattttctgtatcatttggcttgtcatagataaatagagtgctcacaaaagttttagtttattaaaatccaacagaaactatcggcagtagaatctgatagtcttgtatgttgttaaaaagcaattagcagaaaaaaaaaattgacagatcgatgcgacgatggtgagggtgaagatggtgagggtgatgcgacgatggtgagggtgaagacggtgcgacggtgccgatttcaacaggttaatagaagcttctgggtttctctctcgcgctgtcgtcgactgaccgaattttttggtctctgtatccgagtagctgcccatgggttttgaatacccatttcgagactaaagtgagagaaaaagagtgagtcgagatcgagtttgtgagagagagagagccttagatcgggactgagtgagagagagaaaggagatgagagagagagagctgttattttgttatagttttcatctcttctttattgtgagatctctttgaatgaaatcctactcacactcaatctccaatggtaatttgttgggagatatgattgataacgttcttaaagtggatttggatgaaaataaaccagtatatcggggtggctttcttagatttctcattgatattaacatttacaccccactggtttctggtcggttcttggtctcgccctctataagttcggctggcgatggcactcggggtggcccgtcgtccgtcaagggcgtgggtggggccgaaggtcgtttgtcgtccagcgtgtttcgtggttcgagatggatgaagatagtgacaagtcgttttttgtctggacatggccatggtttgcaacaggtttgggtgcccaagtttttgccagccgagcgtgataggaggttttctggaattggtaataaggttggtctatttttgaatgatggggaaaagaattctgtgtctttacccaaatttgagttgacaaacccattggtctctaacgttatttgtactagggttgactcatgggtttgtgggccacatcaactacctttgaataaaattgcaaatgggcctatggagaggttgattgatgtgggtgggcctgagaagttggatttaaaggagaaagttgttgttggttgtaagaggggtaatgggcctgtgttgggagtgggagatatgtgcaattgggccagtgggtcaaaaggcactttggggccgaataagctaagtaatccaaagggtgttttggagagtagtgggccatgtgttttggttgggcctttgacttcttccaaccctgtcgtgaggcctggggttggtagtagtcaagaggttatatatagaggtgattttgtgagcccaatcaagtcaattattgtggttcgttttggtgggttttctcgagaagaagtaacctttatggggagagatgggcctctagtaaataagggtacttctatggataatttatggggccataaagccgaaccttggcaagatgaggagatggctttatcaaagttttttcaaacccaaggaaagttgctctatgatcttaaaaattttggggagatggacttatttgaaataaaaaagttgggaggtgacactggtgtgaagcccacctcggatactaatgagagaactacgccttttgagaaaaggaaatctgaaggttcggcttcgttttgttctcgacctcataaaatttttagagggcacccaaaaattgttagaggttttcagtgggatacaaaggagcgggactctgaatcccaggtggcttatgaagaattttctgaagagccatctgatgatatctccagtttcccgagctacatggaatttcgaggaaccatctgttgggtccgtttatgattgaggaagctggctccagcttgtctgtgcgctcgcaaacccctgtggaggagaatgtcatatctcctccacaggagccatgagaggcatcgcttggaactgtagagggttagggcagacctctacagttcttgaactgaagtccctgattagagctcgcacccctgactttgtcttcctatccgagcttaaagtggatgctacacctctggtacgtatgctaaaatctctccacttttattttaatattattgtgccgcctattggcatagctgggggaattctcttggct

SEQ ID NO: 40121 - DNA, 1691 bp, Cannabis sativa
  modified_base (150)..(150): a, c, t, g, unknown or other
  modified_base (227)..(237): a, c, t, g, unknown or other
  modified_base (583)..(593): a, c, t, g, unknown or other
aaaaaaaaaaaaaaagaaactacaaattctaacttctttcaaaagacttaaattaaaaaaagagttttcattgtttatcaaaataactcaaaaagaacttttttttaattctaaaaaccaagcttaaatttggtggcgtttggtaacacntttttaatcagttttttgtttttataattgaaaaagtgaaaatatttttttaaaaaatgttctataaaactgttttnnnnnnnnnnntttttaattgagaatcaaaattttaaaaacaaaagaaaattactttcaatatttttttaaacagttttttttttctcaatcaatattttggacttcgatcagactcggacccaaatcctcccacggccctagcacggaacccgtcctctgaccttaactcaaattcgaccccggacctagacccgacgtaaataaaatcaaaaaatgaaaatgaaaataaactttacagaagacacttttgttttctgtttttaaaattgaaaatcaaaagtggttacagaacacatttttgtttttaaaaaacaaaatttttaaaaacaaaatttttactttcattttgtgattnnnnnnnnnnnaaataaaagtgttaccaaacaacaccaattatcttacaaataataaatatcatatttctctacaacttaatgtactttaatgcatttgttctcacttgcttgataggactcaattgtattttcacactaaaacctttctaagaaattttcaaaaccgttctatgaaattgacacgtattcctactaattcacctttttctcagtgccattttaggttttatcttcttaatttttttttttttaatttttacacaagcagtttttttaaattcaggttcagctctgggctaatgttaggttattcttagtactaattttagattaagtttagtatatttttaatttagttctactcttgtttggagcaattctaccctttttatcttttatttttgcagatttaaaatagaagaatattagaaaatatcaaaggaataagatgaaaaaaaaagataaaaaaatctcacaaaaagatgatatataaaatagaaaaaattgtgcaagaacaccaccaaatctcctttattgattgagtaagaacatggtacaatacactcgagatcgattctctcaaagtttttatctctcatactcttacccaagattcttcttcatctacaaaatattcttcatacgaaatccgaacccagtctctctcttttctctgtacctctctctctacctctcaatctcttccttcaaaattacctctcgaaactcatctgttgatttccttctcaaatgataagtgttggtatttataggtggggatcaagatcccaaaatcagtggctgcaaatgctaaattgttaagttagttacgacttaacaaactccttgtaacaaaagtgtgttctgtaaagttcattttcattttcagtttttgattttatttaagtcggttaacagttaaaatatgtgaaaccagtttcgacctgtgaaaccagttttggcgctataaaaatcataacaaaatataaatattaattataaagttaactgaagctaatttcatcagacaatcaaataaaaaaaatacacacacacacaaaaatacaaaaaaaaaaaaaataccaatcacaaatataatcaaaacaa

SEQ ID NO: 40122 - DNA, 1381 bp, Cannabis sativa
gcattgttttgttcttgaaatttgcattaatgaaacattaatataactaaacaccttcttcccaatttttgttcatcaagccatgagaaaaacttatatgagacttgagaggagatgagattaaactcatatatgggtaaggaatgtacaactaaacttatgtttggtatgattttagtcaaaaaaatttatgattaagtgaatcacacttttataatttatttttcgagtaatctcaaactctttaaacactctgaactcctatcaagtctcaattaatacccaccccaataaaattaagtgatgtttatcttgaggtgaaaataatttgaaaaaaaaaatttaattaaaatttttaacctctgaattttaacatgcaccaaattatacccattgaatttttctaaccattaaaaattccctctaaattattaaattttttaaatttaagtacttttgccaaatttcattcaattttaccaattctatgattgtccatgtactaaattatttcctcaaaatatctaccaaatcatctcctcaaattttagcatgtaccaaattatgccctaaacttttatccatgttagaattttcttattaaaattgaaaaaaaatctttaaatccaacaatctcaataattaatatgaaatttttaacaaccttaatggtatatgccagaatttggaaaacaaaaatcctaatgagaaaaaaaaacacaaagacaagacaagaatttatttttttgctgaatattttgtttatttatttattgatgtgaaatgtccaaatgtttgccagtaattggtgcaagaaaatctagaacagcatagtctgcacattacaagacaaaagcccaaacagaaacactgtggtatggtgtgtatgaccaaccaagtctgaataaatcaaaatagaaacaaagaaagtaaaaaagaaaccaaagggcaatgtatgtagtttaaaacccaagtgttctttgctttgcccattttatcttcagaccaaattagtcacctgctaatcaaaaacaaactacatcaattttctcttgtctcaaaacaatggaaataataagagttattagcagcgaaatcccttatctttacttttctttacaaatttaaagtgtccattagatataaccgttaaatgccaactaactgacttcgaaattttactttcatgtatgcacaagtgtacataatagtcatctagttggtatttaacggtaatatttaattgacgcttcaaatttgcaaagaaaagtaaacttaagagagttttgcaactaaaagaaaagataaacaaattaagtgtataaaaattaaaacatagaagagttgcgctgctaattacacaaataatatttgttaggca

SEQ ID NO: 40123 - DNA, 1972 bp, Cannabis sativa
aactcaaaaaggaaattaaaaaatcaagcaaattaatatgtcatgttaataaaaggaaacgatcgacatatcagtataccgataaattagaatctgatctacctgttctctacattttgtgttgatcagatataaatcttatattatataccagatgatctatttcattttatggtgtataagattccaattatatatgctagttaagtctgagatctataaatattattagacaaacacagtagttttagttcttagatggtaacatgaaaatgatcaaattaaatcaaggatttatagaaagatttagtaataagaaataaaaaaaaaaaaaaaccttgatatcagggcgcaaatgattatgccacctctctcggcactgtttcccagctctcccaatcattttttcagctatctgagcccattttcttactccatattgcttcaccagtcgaatcagtttccttcacacacagaaaaaaaaaaataagaaagagagaaaccctaatataaattacagtagtccctatatataacatatggacaaaaagaatttaaggggaaaaaaagtgaaatgaaataaaaacaagacaatatatattgttacctgtcttcttcgtctgtccattgtccttttattaaagccgcagaagaagcttttttatgagctgatctctttcccaatatctctttacagctattattgatcatcatcatctccgcaacttctcgctttgaacacgtatcaatgttcataacaccttccaccacatcttcatcataatcctcgtcctcatgaacaaaaagcccttcaaagaaccttggttgatgatcttgttgattatgatgatgatcgggatcatgatcagcaccggctaaactactaatcatcggccaagaaaaatgaaccccagacgtaattgcaccataataattattatgatcaaccacactagtagtagtagtattactactgctcgaagaaaaatcccacaacccatttgtagataaggatgatgaaacaacgttggaaggagtattgttagtcaaaggaaggctttgactacttaagaaactttctatggttgtcaatggtggaagagctggcttatatgaaaagttagaaggttggtgatgaatactattattataataaggcttgtaacttctataattataccaagtaaaatcaccagaggaaaaaccagcaccaacaccagcagtaccacgtccaaattcttctttgttattctccatgggatgaagccttcaagagtgggatttgaccaaaatccaaagaggacttcagtattggctactaatttataagctagattaattttggactgaattttttggtgggagaatttggagttttatttttaagctgaaagagagaaaaaaactccatagtaataatttacaagagtgggcgttggagaagggagcttataccaagcctggtaataagccaaatggatcaatagccgtccatcttagttccaatccaacggttgagaattctcaccaatgtaactcctgagcttcctacattgcccaaaagtagaaacaattagggagagattagtgcgttcgttatgttttgccacaaatattatttaatcttctctctttttctaataaatggataaaattttgtaaaattatcattttggtggcaacgctgggatatattgtattcttttggcgccattgtattgtataaagtgaaaagactatactacccatgtgtaactaaccaaatttgtaagtgatgcgagggtgattttggctcatcgtgaacatcttattgatgattaaattaaattatgttaaagaagagaaatggtgtttgtaggttgtttctcaaattaattacaatttattgatgagaggcaaatttgggagagcatttagctttttttttttttttttggttggattgatactaaatgctagcccattgtgataa

SEQ ID NO: 40124 - DNA, 2571 bp, Cannabis sativa
  modified_base (2069)..(2070): a, c, t, g, unknown or other
ttttcactaagatatgacttgattgtgaagaaatagaattttagggcttatttgttaattaagagactttgtggagactttgatcattgtcctatgttggtttcggtttatccttaaattaagaatacccacaagccttttaggtattttaatttctggaaaaacttaaaccaatttaatgcaactgttagtgactattggaagacaaatgttaccggaactcccatgtttaatttggtttccaagctaaaaaggatgaaagttgggttgagagctcttattcaagatggaaaggggaatattgagacattggatagcatcgccttgaaggagtgtatttcggttcaagaagctcttcaaaaccatcatggtaatgaggagttattgaagaatgagaaagaggctagattgcgatacaatgagactcaccggaactacttactcttcttaagccaaaaagcgaagttagcttggatagagaatggtgatgataataccaaattttgtcatgctagtattcagaaaagaagagttcaaaacaccatatactcaatcaaagatatgagaggcaattgggtagaggagcaagataaagtgatacatgcctttcttgatttctaccagactctgcttggttcaaggaatgctagtagaaccaaggtgaacaagaagattgtgagagaaggggctattatttctgactttcaagctgccaaaatgattgaagattacatagaagcagatgttaagcatgctcttttctcaatcctaaatgaaaaatctcttggccctgatggttttaatagtgccttctttaaagacacttgggatataaccgggaaggatgtttcgaatgacgttatctctttcctcaattctggtaagctattgaaggaaattaatgttaccactattactcttgctcctaagactgtgtgccctgagtctgtgaatgattatagaccaattgcttgttgcaatgtgatctataaagtggcgacaaaaatgatttgcaacagattgagagaagtggatcctgacattatttctgaaaaccagtgtggttttatcaaaggaaggcaaattgttcacaacatcatggtgtgtcaagatatggttagaggctatgagaggaaagcggctaaatctgcttgtcttttcaaaactgatttgcagaaggcttatgatacagtggattgggagtttcttaaggaaatgctagaagctcttatgttttctaagaagtttgttgagcttattatggtttgtgtcacaacccctcgcttctcttttatggtgaatggttctttacatgggtatctccagtctaagaagggtcttcgtcaaggggacccaatgttgcaactcctctttgtgataggcatggagtacttatcaagaatcatggctaaaattgccaagatttgtgactttgcttgtcacccgagatgtaagagcttaaaacttaaccatttatgttttgcagatgacttgcttctcttttacaagggtgatttcaagtctgctcttctactacttaaaggctttcagttattttcgaacacttttgggctcaaagctaatgaagcaaaatcttttgtttatggagcaggtttggactctctttctttggataggactattgatatgtctagttttaaaaaaagctctttaccctataaatatcttggaatggcaattagctcaaaaagaatttctaaaggagactgttaaggtttggtggagaaaatgataaccagaatcaaaacttggagttcgaggaacctttcttatgcaggaagaatggtcctcatcatctctgtttgatgtatattaacacttattggtcccaaattgttattttaccaaaagttgtaattcaaaatattacacagatttgtcgtgcttatctttggaagggagtggacacgagaaatggtaatggaaatgttgcctaggatgatctttgtaagcctaagaaagaaggtggcttgggtttcaaagatataacgtttatagaatctttgtgctattggtaaacatgtgtgggctattactaccaagaaggnnaacctttgggtaaaatgggttaacaaggtgtatctcaaaaatcaaaattggtgggactaccaagtccctttagaggctagttggtatcagaaaagaatagttcaaaccaaggaatggataaaacaagtcttcacccaaattgactttagaaactatcagttttccattgctaatttgtatgccaagatgccttatggaagtaatgttagatggcgttatgatggcatttgggatagattttgcactcctaaacacaggttcataagttggctagccttgaagagtcgtttgactaccttggacaggcttagtcgatttaatcataccaactcttccttgtgtttgttgtgtggaagtggagtggagagtcattctcacctcttctttaaatgtatttatagcaatttggtgattcatcaagtgtggctttggattggtattactagccggaaaaaagagctccatgatgtcctaaagtggattcggaaggcaaaagtttct

SEQ ID NO: 40125 - DNA, 1260 bp, Cannabis sativa
  modified_base (868)..(877): a, c, t, g, unknown or other
ccccattcacttatttcctttttacttaataagtatattgagtctaccagttttttgaactaacaagtaactaatcactaatgtgagaataaaagagagaactactttatgacacttgttctgaactaggcttgacagttgacactgataattggctcctttacaaatggcattcaactagcaatagaagtagatatcatgggaagctattgaaccatgatctgggccttgagaggcattgaaaaagcggtgctggtaggtgaaccagcttgagtggtgatgatcttctcatatgttgagtttcttacctacggtttgtactatccctatcttaaaaagaagctaaataaaggtaaaatgagtggaaccgaaataataaaagctatggaatgaattaagttcttctgaattctacagtgttatccatttactaggccctttactacttcagttgcctttcatttaggtggagtataactacctctactaaattataaaaatattatagcccatgttcagtttctttgttgttttgcactgcactcaacaaaatattataaacagagaaaagaataatgagaaagcaagagatatattatgaaaacttggaaatataataggctctctttaaataagctgaagatcataacagaatattaaaattttatagtatgctcctaatatgaagtcttgtataagaaagaaattaacaacctgaaaataggacttgtctattgaccagttatttacatattttgttaggcacgtgttttagcaagtataatatgcgtttggtaatatttttttaattagttttttatttttaaaattgtaaaactaaaaatattttttaaaatcatgttctatnnnnnnnnnnttactttttaattttttaattaagaatctctaattttaaaaacaaaaaagattacttttatttttttttaaaacagtttttttaaatcaatattttagatttagatcccaacttagactttagaaaccgaaatagaactcggccctagactcaacttaaataaaatcaacaactaaaaaaataaaaataaaatttacagaacacatttttatttttttaaaaaaaaattgaaaaacaaaagtgattatagaacacatttttatttctcaaaaataaaaattttattttatttttttattacaaatttaaaaacaaaagtgttatcaaacgtcacctaattagtatagttgcgttttatataaatgagttcatttctaccaagt

SEQ ID NO: 40126 - DNA, 2520 bp, Cannabis sativa
aataataataacaataaaaatgatcgagcaatgttttataccaaaatcattaataggttcttctaactctagttaacaattagtatatcttattatgtccaaacattatctatgagatgttttccgaaaaaaaaaaaaacttaaatccacctaaacgatttttcaatataaaaaaaaatccatctaagtgatcagttcagacacaatcaatgcaatcatcactctagaaaactatatttactgatataaattcacatagcatcactaatcaagtaatcatcaatatccaactaaagtaatttcatgtgtcaaatcacgttggatctaagttctaaatcaatcatacctatcgaaatgaaatcctattaaggaaaaaattaatatcaagataacccaactgttaaaaagaaaagaaaaaaaaaaactggtacctgcttcagttccgtacgagaaagtgtagccatggagaaaaacttcgtggcgtcgttgccagtaatacggccatcaccgtctattatcaacgcacaaatgtattcgatttaattaacttcaaacgagttgcgagtttggtttgaacgacaaaaatgaagagaagaagaagaagtttgaatacctgaatctgctacgttgaaccactcctgatagaccttctgatgctctttagagcagggaactactgaattcgacccaatctccatgtgaaagtttcaccagaatccaagagttcctggattgatgattcagttttttttttttttattttctttttttgaaatagaaggaaagggggtttgcaaagagtaggggttaagtaaattttattaataaaccctctttttatgcatttttggcgctttaaacgaaaattttatatggccacaaggtaaatcaagtgtaaacgacgtcgtttgtagacaaattgccggtgggtctgggcgcttgatttctcattgggcccaatatggcaaagagtcaaagacactctgcgaaggtggagcccaacttttgtgaattcgggattcagggttatacgttgtgaaccagcctggtcactacatctttgaccatataaaacaaaaccgcgttttaaaaggtttttgttaacattcttccccatttgcccttcacagaaaggatgattacccaccatcaaagaatgttttcacttttcatcatattatgactttgtatttacggtttacaaaaataacataagatacattaatgaatatgacatcaatcagaattatgaatgtatgaatttgtacttaacattttactacagtatcttaatttactataatacctcataaaaaatgttgtgtggaagtaacatcgttcagaaaataattattttttatttggctatttagcatatttgtctctcaaattttaaaattgtactaaattgtattttttaaactttttattttgttaaaaaatttcttaaatgatttaaattattagatttaaatttttttgtctaagcccaattttattaacgtgttaattatctatgtacaaaatcatattttccaaattttaatgtgtaccaaatcgtacactcttaattaaaagttaattattttccaaataatgttactcctacacaacattttttattaggtgtgtcccattcatttatattttcagtatttgaaaagttataattatagttttctttttaatatgacagatttacattgctgataattagaatgaaaattttgaaataatttataatgctgaaaatattaatataaattgtattatactatacacatgtaaaatagaatgttttaagcttttattaactctatttcctgtattttagattattttatttttttcttcaaaaacacttaaataactataatattgtatacaatcatataaaaatggaattaaaactgtatttatttattagttaacatgatatatgtaactggcaaatggttatttttttttttaataaagatatgttcattaaaattaatcagtctcagctttaacaatgtcacacaagaaagaaagagcattaagctcattattcgtacaacctggcaaatggtttttttttttttttttttttttttttcgagtacaggcaaatggaattttttcaatattaattgagctggaagaaaatgcaaatctattaataaagtgcttagtaattgaaattaaataatttgatatctctaccactctacagagtagttacttcaaaagaaataaataaagaagtgaaatcataatagacaacgtacacaaaacctttggacattaatatatattaattagacaaacacaatttccaatcattcaaattccaaaagtgtatatatctatttatacaatataatcgagagaaaaatgagtcgtttgttggatttgctatagatttatatgcttggaaataaaagaaaatcatataatatagtcattcatcattcacgtaaaatcattctcctccagttggaaaacagcaacatatctgcattcagtagtagaaattat

SEQ ID NO: 40127 - DNA, 2619 bp, Cannabis sativa
aaaaataacaataattattaattaatttttatttccacttcaaatccaacttggaattggctttttgtgatggcatggattgggcatggccatcatttgaaaacaaagccaaacgtaaacccagaagttgacttgatgatgtagaattacacaatccaaatattttaggtaattatgctgagtcttttcaaaaaaaaaaaaaaaaaactaattatgctaactaaaaattaattatgttgagtcttttcaacttaatgaatttacttaacaatatttattataacataacttaaacatataaataagacagtaagtcaataaattaagtacgatttttgtgtcaaaaaagtttataaagagaacacgtataaattattattgagctacgcgtgattgttaattatggtcaactatattgtttttcttttttaagtgacaaatctgacttaatttaatctattgagaaaaaaaaattattagatgaaattgaatataaagatttaattattagtcaattcccctccctaaaggcaagaaaaataaattttcaataaatttaaaatatatttgattaattttttcttttttgtaaaagtataaaaaaaaattattttatggtctcacgttgtgattttgccaaaggcttaattttagattgagacagccttccacgcgcaatattcataatttcatataaatttagttgtgcataattttgtatttttattaataatatttcttttattctataaaatttcttgaattccacaaaatgcatgcttatagtttgatgataattatattatagaagtttttataacatgcatatgattgtaagagtttcaatgatattttattttacatatctatatacaaatatgataaataaaggaattattatataaaaaatataaattgacactttaggtatattatatatccataagctgtggataacatttatacattttatgtaattttaattactaaaatatcacctacactattacttacacaatcagacaatggttgtagagtggttgctgcatggttgtgtggttgttgcgtcaaacaaatgtttcaatcagacgatagttgtagggtggttgttgggtagttggtcgaaggttacatgagacgaagatttcaatcagatgaaataactgttagcaaaatatttatgcaactgttgtgaaacattaaaaatcagaacaatattttcacgtacgtataactctatctacatgtctctttatgatttaatatgaacaaattcaccattaaaaaattagaaaataacgaaaatacaccaggataaatattttactgtagtattgacgtaatttttttagactatacttagagttgtattgtttgggaacttcagttcaactttttgagatctacctttcatggatctgaacattgaagtcaggaccttgtccccaaccctagccttgacctcgatcttggacccgaacctaggccctgaccccagactcggactttagaccccgaacccccaaaccctgaccccagatcccaaacgctgcttaaataaaaacaaaaaaccaaaatgaaaagtaaaatttacataatacacttttatttttgtttttaaaattaaaaaataaaagtagttgcacaacacatttttagttttcaaaaataattttttttttaaaaaaaaacaaaaatttgactttcaattttgtgattaaaaattcaaacaaaaatattaccaaacgctacctaagagtgtgttctataacacttttttaatcagttttttgttttttaattataaaagtaaaattctttaaaaaaacatgttacagaaaactattttcactgtttaatttttaaattgagaatcaaaattttaaaaatttgaaaataaaaaaaagtctctttcaaattttttttaaacaatttgttttcattttcttaattatagtctacttgtattttttcatcaatattttggaccccgaccctgatcctattaggacccgaaccttggaccttgttataggacctcgacttgaaccccaggcctcgttacttgaaccccaacccggacttggacacgaacacgaatcgaaacccggacccaaacatagaccccgagcaaatgtcggaacccaaccttatacccagacctagatgcgaaccttggacctcgaaccccgatctcaatcctaaattttgacctcggaccccatactcgtacctagaccctgaccttggacccggtcctgaactccaaactcgaacccatacccgtactcagactttgactcacaccccgaacctatacttaaacttcaacccccgaacccaaatttagacctcgaacccgaccccaaccttggacctgaccccaaaccccaaccttggacttgaccccgaaccccgacccacactaacactttgactttggactcagaccttagccctgaactcgtaccgtacctactttctaccacctcagtttacttcaacctactcttggatattcatgaggaatataaggagccgactgagtttttctaaattgataaaatatataatattatttgaacttccattatttgttatttttattaccttatctat

SEQ ID NO: 40128 - DNA, 2938 bp, Cannabis sativa
tttttcaaaaacaaaatttttataaatgaaaattttactttcattttttgattaaaaaattaaaaaacaaaagtgttactaaacgacacctatataaatttggtgttgaatttgatatatcctaacaaataaaattaatatattatattgtagtaataaaattatatactataaattttttttaataaaaataaaattagtatattaatactaaaaaagtatataaaatactagtaaaattatagatactaccattaaaatatatatatatcatgctataagtattatatataataaaatagaaattaaaaattaacttaactaaatgatatattattgttaattcagaaattttctttggtgacgtggacatcaatgtttgacgcgtggcataaaggatgacatcacggagttgagtagacccgagtcatagcggtcaacctaggaggggatcctagccctgtgtcacgggctcacctttttaggcagcggaacacctgtgcgacaccttgacttctctaagcctctaactatctgagtaacaacaacctcattttttgcgcgactatgtgccttgtgcacacttctgtctctcgaacaactcccgtcgagtcatgctcgcaagaatgcatgagtgcattcatgcatcgaggctctctagctaagatactcgtactgtccataaatttccactaggataagcaaaatcccaacactgtcgctcacctactcactcatgaccaaggttgcatgtgtggcatgatgccaacaccaagctgacgtgccaacgcgtctaatcatgccccattcgagtccaaacagtcctcttcatcgcctaaggactctcatacgtccatggtccaatcctcaaagcaccatgcctccacgcatgttggcaggtcctcgagataagccaccaaactagtagcatacgttagacctctgtctctttctagcatggtgaatccattttatgcacgatgtaaacttttcccatgaatgactactcgtgtcatctcgtgttgagactcgtggccaaggcacaccacaacatctcttggaggtttaggcaacctctcgtgcaagcgacatactggcaaactaatgaaaacatactctaacctctggcagcattcttagatgcactaccaggccggcccaatagtgtccatgagtactccaactcatggtgacatatgagtcccctcgtggtctagtagtcccactgatcagtagtagttcacttagcacaaagttgccagggggcggtggagagctgacaccaggtactcccccctttaagagcattctaagattttagcattctaccataaacgtatatgattgttgctctataaatatatggtcatcaccatataccaaatcatagagtttctcaaatttgattgtgctactgtatttatagacccaaataaatggtgaataccaagtcttgtcccaatccgaacaatattgaagatattatgaaaatgccactatcgtacaaaccaagcactgacatgccaccaacatgcacaccagcatgcgtcaccactagaccaccacttggccaacttgtgggcaacacctagcttgtaacgtgccatccattctcccccacttcaacatatcgatgccctcatcgacggactgcaggcaaatcatcctgatctcgactcctaagcttactccaagcttcatctgaatcctaagtcttcacttgtccctctatctccgtagaaccaccctgttggtgacgatctcactcgcccactcttggacttgatcaaagaacctgtgccacttttgctatttgcaaaccaaccatacctaagggcaccaacagaacacacttccaccggagccaagtccctccgaaaaattcacatgccaactccatggtgtaccatcctcttatcgcatgataaaatttgttgcgtccctcctgggtgccaatgcagcaccaagtgtactcctgcacataatctctttgcaaagtactcaatattggccctctagtgctaccgcacacccacgaattcatgcaaaaggcccatctgacccaatacataagtgctcatctgaccttctttaatgtggtcaatgatctatcaatcaccctaaaccacaaattttccctttagcttctgctcgtgtcggctctccgacactgtatcacaagtccatctcctaaaatcaaccctgcatccactgatgactagctaaattcttacaaacttgataacacaatgtcttactcttaggatttgaagtcatcccaatccgctatctcccatcagcatatgttcttcgaaccatacaacttacagtgtcccacacaacaccaatgtttccattaacacaaaggacacacataacatgccacaaactagcttagtcttgatcttagcctacacccatgcataatacctatctataacttacaacaatcatgccagtttttacactaaacaacccatctgttgtaatgtttccctctgtattcacacacaaaaactgaaaaaagtaccctgattcttcaaacatatgaattagtgagctcccctacttcaacttggcaagaacttctctcttagaagaatacctctcaaggtatagctcgcaagctaatcacatatttacatatgctccctccattacaaatgtcaatttgataaaggtgttgaactaatgccccagtcattctgactctgtgccccttgagatttctatgttgctttagcaccttaggccaacattgtcatggtgttatcttagtacctaagtcctaccgacattcaccctagataactagcactgcttgtgtcttgagtcttcttgaatggctccagcagaactcaaggagcttaagttacagcttcaggggatgcttgatattgggtttattcgacccactgtatcgctctggggagctccg

SEQ ID NO: 40129 - DNA, 1205 bp, Cannabis sativa
tttggtgtttggttctcctattatttcttttttctgctttgatcatattttaattttgataaatggttgtcttttttattgttttgtaatttcaaaaatagtgattttatagcatcacattgtattaatgggagtaatagtcttcattttgagaggtttctttgcttagtgattaaatttgggagatttccaaattgttattaattctgactcatgttttatggatcgatctttcattaggtttgtaattgggatggttagttttgctacttcacaacagtagggcttatgggtctttatttagccgaaggagttgttaggattttctcactaattattgtaaacaacttaattagtcttttttttttttattactattctatatcttcatggactatgtccgatttgtttattaataaaaaaaattattttcctttcaaacaagcagaaatcttctttttacaaccaatgttttaatccaatatctcaaattatttactatatgaaaaaagtaataataaatctataataaaatttgccaatatatattttgttatataaaatacaaatttttataaatatatatttaccaacataaattttcataaagatcttcataattttaagcaaaaagatctctataattttaaacaacaattttccagacaattttttctcttcctaataaagcgaactaattaaaaacattaattatctaaaataagataattgatttataagaaatcaaaaatttataagattttttttgtttatctgtttaaatatatttgaggatattaaaactataaacatctatctttaattatgtaattaatatttaattttaattttgatgcatggtataaatacttaaatttaatttttgttgcaactataaaaattttaattagagatatacttctagcatcagtggttaaaattgaaaaaaaaagtgtgactaaatataaatcattattcttatgttatcacaaaaattatgactaaattaaaaattttgtaactaaaagtattagtcataaaaattataatttgttgtctctaaatgtatttttagccatataacacttgtgattacaaattagtgacaattgtatctaaatatatactactttttagtgacaagtaatttttgttgtgactaattaaaagtgatatatatatagttacaaaaaatttatgttgtg

SEQ ID NO: 40130 - DNA, 2417 bp, Cannabis sativa
  modified_base (44)..(44): a, c, t, g, unknown or other
  modified_base (2387)..(2391): a, c, t, g, unknown or other
cttagagaagtcaaggtgccgcacgggtgttccgctgcctgaanaggtgagcccgtgacaccaagcaatgagcaacttatttgcagattggtttacagaatacaaatcaccaaaagataaagccaaaagcaaatttcgaatatcttgaacaataagaccaaactgtgaacgcataaaatacctctctgaatcgcttggacacacaccaagctatatgtttccaacatgactctattccacgaatgagttgcaatctaactcaaaacttctttaatgcctattatctcagtaatttcgggttgaacacaaccaatctccctcttcttgaatgcttctaccatagcactatgatgattccgagctacacaacccacagcgccccacataaacaaaaaaactaacaagaaccaacaagaatcgaaccagaaaaactaaagggaaagattagagaaccatgtcaaaagacaagactaatggaaaacttaattagttccaacacataaacacgatcatatcatataaaatcaaataaagaaagtactccttataattctaaccccataaaacactaaatatggaattaaactaataaaaggggaattaataagtgaaacaaaaaattaacgaaaacaaacagaaatgttccaacacataagaggagactcgtacgttcaagatgacgaaaacgaacggaaacaaaccaatctcagacggtggtcgtcgttgatcggcggtggcggccgatgtgaaacgaacggaagggtcaaataatatattagttattaaacaagcaacacattttttaactttacttttatattttacttttttttttgggtaaggatctatatttcacatttaatagaattcaaatgtaattattttcccattcacgaaaatttctcatattcccctactccctttcatcttcgtctgtagaaatggaaaccagtagaaagaggtaaaaactagagaaaactattgtaagaaacaaaggaaatgcaatggaatcattgactctcttaatgagagtttctattatttatagagatagttcaacattacaaagaaaacaagaattgaaactaactaactttgacagttacaactgaaagtgaactaatctcaactaacaaataacagaatacacattattggttaacatcccccctcaaacgaaaaggggtagcatccatttgaagtctgctcttgagatataaaaattgatcagtggaaagagccttggtaagagcatcggcaatctgatccacagcagggacatatcgaacagagagttcgtttgcaatgatttgatcacagacaaagtgttgatcgatctcaatatgctttgagcgagcatggaacacaagattggtagccaaggcagctgcattttggttgtcaacccaaataataggaggttctgaaagtgagacttggagctcttacaaaaggaaagttaaccacttcaattcagctattatattggccaacgctcgaaactcactttcgacgttggatcgggcaacaacctgttccttctttacggaccaagagaccaagtttcccccaagaaaaaccacatacctgcctgtggaccgcctgtcatcgacgcaactagttcgattggcatcagagtaagcaatcaagtccatagtagctactggtcgaagaagcaatccatctaaaattgtgcctttgagataccttaaaagacgcttgcaagcctcccaatgaacaacagtcggagcatgtataaactgactgagtttgtttatgatgtatgcaacatcgggacgagtaagagtcagatattgtagaacaccaagtctactacggtacaaagttacaacgggaaatggttcaccagcagttagagacaattaggaggtggaacttgcttgattgggacaacttttagcaccatcaagttgtaactttactaagagttcaactatatacttactctaagacaagtgcattccagcttcatttccgtagatctcaataccaagaaagaaatgaaccggccccagatctttcaaagagaagcatgtgttgagatccatgataagcttggtgatgagttgattatttagtccagtaataagtatatcatcaacatatactaaaagaataaccaacatgtctcttgaaccataggtaaagagggaagtgtctgactgagaggctttgaatccccattgtagcagtgtgtgtttcaacttttcattccatgcccttggagcctgttttaacctatgcaacactttatgaagatggcaaacatgagttggtttagagggatcttcaaatcctctaggttatttcatgaagacagtctcatgtaagtctccctttaagaaggcattgttgggttttatgcnnnnnataaaactctttacaatctgattagt

SEQ ID NO: 40131 - DNA, 1624 bp, Cannabis sativa
  modified_base (260)..(260): a, c, t, g, unknown or other
ctaggttttaatatcaatttatattttttatgttataattccataacaatatggcaccgaagagtgtaagagtggacatccgatctaacccaatctttttttctccaatttaattagtaattagattttgtaaatcatcatctgatctgatctaattaaacctcaaaatcaaatataatccaatctaattactaattagattagattggttttctaattgaatatccaattacacacttaatttttaatattaacttaanaatatgaagaaaaatacgtaaaactaaatatcacaatttatttaagtttaatatttcataaaaatatcattaattgttacaagtgtaatgcaattaaaattttgaaataagtaaaacaacaatactactaagttataaagtagaacaaaacatcatcaaaacaaatacataaatcaaccaaatgttccaaattctacacgcaaaaaaaaaccactagaaatataattaaatgtaaatttttattgaataactaatcaaatcaaattagaattcaacttttaacattttatctaatccaactataattggatatccaaatttttttaatggattgattcggttcgattaaattagatgggatgttgtccacccgaacaaaatgctaggtactataagtattttttagcaattttctatataatttaattggtcatgactttactactactactgctgtcgccataattatatttatcttccttcctccacttaaagatgtctttttcgtgatgatgccatcagtggcgtcgtttaaatttaaatataattttaatttcacaaaatcaaaaataaggttctgacatgcatagcatactaaatataataatattgaaaagccagactcttgcaagttgtaatggctcatgtgaaagtattaatttatgagagtgattttctatacatacatttctttttcttatgtgaatttcttaaatcatgatgatattaagaaatatggatcattttaaaattaattgattaattaattagctgtaaaaagtatacgttgaacaaattaagcgaaatgtacacacgtcattattatttattttctccaaatataattaattaagtaataattttgtgcttttagttatctacactttgtcaacaaaaaattgttatctagatacacatagtatagtttatacaggtgatttcgttaaggataaataattaatgattttggaaatttggagccactcgttgataattataagtagactttatttattagtaaaatttattatattgtttataaatatataccggccactgctagctataagagagaggccaatataattttcctattatatatttatatatatatatatatatatttttgacattaattatatatatttgtatatttgtgtggaccatatggctgagacaatatcatacacatatcttatgtaccgtagctaatatattcttagataataaatggaatccaagattcgtatatatggccgcatgagttacacatataaatatatatatctataatatatatagggatatgattttgtcctgtactttcacggattgtaattcgtgatgtacgacaaccgtcagat

SEQ ID NO: 40132 - DNA, 2430 bp, Cannabis sativa
gcgtttgaattggatagcctgcttgtaattctgaggttcaaactcggctgtaactgcaagaatgaatgctttataagtctttgaaagtttagaataagaaagaaatttagagataggataagaggtgttagatttatcctgtagcagattgtagcattcaaaatcttgcaaatagctaggaggtttggaaactcttgttgatcttcttggtgcagcagcagtaggtgatgtagaaggttgctggtgctgtgttgtaggttgttcagcaatgttttcttgctggttttgagcacctggagcgtctgcatcagcagtaatactggtgttgtcgaaagtatcctgcaagcaagggttaggagagataacacaagtatcttcagctgggtaatcagtgatgtgtgtgtgagttatctcggagtgtggaagtacagtagttgtgaaaggatcaataatatgtggattagtattaagcctatgaaatgggaaaatagtttcatgaaagattacattccgtgacacaaatatttgtttggtgttcaagtcatacaacttatagcctttgatacctcttggataaccaaggaaaacacaagttcgtgcccgaggttcgaatttggtcctatgagaggtaatagtagaagcgaaagctagacatccaaaacatttgagatcactgtaatcaggaggcttaccaaataaaatctcataaggtgtccgtttttggaggttaggcgtaggagttcggttaattaagaaaacggcagtcaagaggcattcagtccaatattcgatgggaactttagattggaaaaataatgctcttgctacattaaggagatgctgatgttttctctcagcaacagcattttgctcgggtgtttcaatgcaggtaaagtcatgcaatatcccatgtttggcaaataattctttgaatgcaagttcgggagcattgtcagacctgaatctcttgaaaatgcaattgtattgagtttgcaaataaaaaataaagtcaggtataatagaaaacacatccgatttttgtttgaggagataaacccaagtaaatcttgagtgatcatcaactaaagtcaaaaaatatttatggttagaatgagaagtgatatgataaggcccccaaatatcacaatgtataagatcaaaaacatgagaagtaaaatttgcattattaggaaaaggtagcctattctgttttgcaagagggcaaatatagcaaggttcattactgtgcagattttttgtacaatgcaaaacattttgaagtaaatctaagtacttatttgacaagtgacccaaacgtttgtgccatatttcagcagatgtgagagcattgatggaaaaggttttggtgtctaagacatagagaccattatccgaatcacctttgccaatcatcttcttggtttgggattcctgtatatagaatttatcagcaaagaatttaacagaatggttgtcatctttagttaaacaactaactgagacaatattaaatttaaaaactggtgtgtacagaacatcacgaaggattaaatcttggttaagaaaaacattaccacttttgtttacaatgatgtgttcattgtttggaagaaccagcttagttggctttattgtgtgaacactttggaaagatttaatatcagaacaaatatgcctatttgcgccagaatcgacaatccaactatttatttcaggattgaaagaacaattggttaatacaatacctgatttacctgatgatggtcctggatcagtcggttgttgattgcaattttgagcagcaagaagtcccagcagctgctgatattgagttggggttaactgaggcaacactgtgttaatatctgcattatttgaactggtttcattcgaaccatgaaattgatttgcagcagcttctttcgattttccaggtttattatatccaggagggtagccatgtattttatagcatttttctatggtgtgtccatgcataatgcagtgtgtgcagaagggcctcccacgtttcggttgctgattttttgaagattcaggcttagatgtgttcttttcgccttgaaaggcaaaagccatactaccattcgggtctgaagttacattctgtcctcccttttgattttcttcctgtgaaactaagtgaaacgctctatttatttcaggtaaggggtccataacaagaatgttacctctgacttgagcaaagaagtcggacaatcccatgagaaacgacatgatgtactccatgttgtaatggtcctgcaacttcttgactccaccgcaagtgcagccattgcagtgcagctaggcctgaaattcgttagttgttcccaaacagtcttgagtcttgtgaagtacatactcacggtttggttttcttgctttaagttcatcaagtcttttctgaga

SEQ ID NO: 40133 - DNA, 1209 bp, Cannabis sativa
ttcataaatatcctaagtataggacggtataaccatatattgtactattgattatctaatgaattctcaaattttcaaggtacaatttttgaagtttttatattcttcgcatgtttatacttagaaaatttttagaaatttttattcatgattataaacatccaaatgttcatcactccatgctgtgagaattaatttaagggtgagcaaaatagccttgtgaagataccatggattcgctatcgcgcacctctagggtgaccaattctgctaactcttcaaccatcatgtctatctcatccgtcaatagcaagccccctatagccctggctataaggggtctcatcctcagacagtgagattagtataaagttgtcgctcttttctgactcagctgcgaaggccacctctccaaagtcctacctttggcagtttgataggttactcatctaaaagatagaagatctttttagtgtggtgcgggtgcgattttaacaagtaaagtgttctcacccgagttattaaatacaaagtaaaatttcatagaactggttgtatatctctaaagtggttgggtgtttcccaatatcctaagggtcatgtcgctacatgaacattaagtaacggggagacacgcaccacttcaagaatctagtcagtactgacaatgaataaaatgcaagaaaaatggaaactaactgcatgtctcaagaaatggctgggggtgccacagtatcccaagggacatgcgacgattacatggacattaagttagtgtgacacacccaccattttgagaactaagatagtttgcacatcaaaataaactaaggcaaaagatggcttaagagttaaaactctaaaaaaaatagggtcaaaaaggatagctctgggataagtattatatgcaaatattcgaggtgtttctcaagaaactcgtaaaaatttgaggtgttcatcttgaaactcacaaatattcgaggagttcttcttgaaactcacaataattcaagtttcaggcacatatttgctagaaaaataccatatttgcctaaactacagaaagcgattcgtacgtcctatcatttcatacattttctacccctaaaaacatagaatacatataaatactcaagggagagaaagtgattataggaaaaataaaacactaacctcgaaatgcagttcttcctaagtgatcttgcaagt

SEQ ID NO: 40134 - DNA, 1868 bp, Cannabis sativa
  modified_base (1545)..(1551): a, c, t, g, unknown or other
agttagggtgttacatattacctgggccactcccatctggtccattaactaagtaacgggggcccaccccaataactccttgcttgcccacgactttctcctcaactaaaggagaaatatggtgcacaagccccaccgcctgctctttacacgcaccaggcccagaagtagaatgggctggcccagtatcaacagctgagaccaaagggtgatggccctccaaacaagttttgaccaattcaaacttattcaaaatagcctccttaatcgaggcatagtctatattagataaaaggttattaactactatgttaggaatttccacagggacctttctagcatcctcaactccaacgatcggcataataccataagaggcaaccggtggtacacaacaaccaggctttgatatggagatccacatcgtagaacgagacgtaccgaaggccgaagggacacgactagttacaatcatgctacaatttgagccacgagtcacctggaaggacgacttcatggcaccgcaaaatccatcaccatcagtcaccgaatagagagaacgacgagatagagttgaccgagagaaattcaaagaaggccgacaaggttcgaagcagaccaaaaatagaacaaagaaataaatgaaatctagcaccatacactctcaccgcactctcacccaactcccacaaaacagtctcacaatacactactcaaacaccccacgacacaagggaaagagaaaacaaaaagcaaagaaacaaggcaaaaacatgggacataacaggaaccaggacaagacaaaaccagtgagacaaagagaaaagcactctcgccactctgcactcaaaacacacacaaacagaggccaaacggaaaaaccaacactagaaaaacagaccagggaaagggggtgacaaaaggaaaaagccagcaagaagaagaacagtagatgaccatccttccatattaatatataaatattaagaaaatattacccaagagaaaatggagaagagagtttctagacgtctctctctcggagatgaccctagccttacactataagcctataaagtcctattgatcttttaaactgtgtgtaattacattaatggagaatgatttgattattaagcttatggagtggatttttgttgaaatgcatatttattttgagataaacattgattgttgacatgcataaattgatttgaatgttagtaatataatgatttgattgcacacacacacacaaaattgagtttgaaaagtaatttatcttgagttgaaattctaatgattgaagagtttggattttcttggaattataagtggatgtataatttttgaaactaaaattattttcataaagaccgatttgtttaagtatcattcattttatcattggcttactcaaggacgagcaagagtcaagtgtgggggaatttgatgagtccagatttgtcttataaatatgatcaaattatctattaatattcttaaattgattctttaagtgattagtgtgattttaattttttnnnnnnntttaaagactattcatgcatttagagtcttttggagggatgttagcatattttggttgaaaatagtggaagttggcgagctcgattttacaagatagaacttaattataaatttagacaaccttagaggtagaactagacttggatctcaatatgaaagttttagatcttgttcttaactttccaaaatatcttgaattgtccaattctgagtaatatcgagagagttatgactaaaatactattaatcgtcgtagcaagaaatttctaaaaaaaagataaaaagatagcaaaaaaaaaaaaaagatagcttttcaa

SEQ ID NO: 40135 - DNA, 1347 bp, Cannabis sativa
ttagacagtgatgttgagcataaagtgaggttgtgggatgatcttgtttagctcaaattgatgagtacaaattcaaattcttatgagaaaatgacgagtgtaagtggttgtcattttatgataattgaaatttgaaatggtgattatttaacttttgtggtccattcgtatctaattcaaaattgaccattctggcctttttgttcttacaaattttcattaaagttatttaaaaagtatatggtaagttcgcacttaaaagataaggagtgggataacaaaagtattaattgctagtattcaattgtggtgggtctaaaccagaaggatcaaattggtataatgctcttttacatgctatcctttattaatggctttttctttcttctttttttttttcacattattattggcttattaaattaagaaggaaatgccaaaaaaaaaaaaaaatgaaaaatgtgtaagtttttctttttgaaaaaaataagcctttatagataaataaaattagacctcacctaaaaaaaattagaaagtcttttactatgactagtatagttatcaattctccatctaaagttagttcattttagagccttgacgactatgtcagtccaaaatgtactaattttcaacaacaatttcaacagctagcaagtaacaattgcttctccattaagagaatctgagaattgatatcgccttgtagtagcccaaactattttccccatatgtttttttgctaccgccgcaacacacatggcatcccttcctacatttacaccacaatttatccatttcaagggaggtagggatcgaccatccacaacaacatattcagaggaggaggaagagataagtcataatttgcataacaaagagtaatagaattaaattaatgtttcaagctatataatttattattgtgtactcttatcattttgagctctccatattgtgtcaacaacaatagaagcatattagaagacctcattaatgttgacttcttgctttttaagcccttacaagaacttcacccggtctcaaattcgtgtccacgaatcattaatgagtatgagggtcaaaggggatgatctccacaggtgataaaccaagttataatgacagaaaatgtacttcgttgattctttatcacatccacaaataaggcaaggggtatcttcaaattcaataggcatacactgatcaattaaggttcaaataggaagcgcattagagagaatgctccactaaagaactttatgaatcttactattccacaatctactccaaagtgaatgaatgacaacacaattgggagctctatcaagagcttagatcagt

SEQ ID NO: 40136 - DNA, 1804 bp, Cannabis sativa
gtgcttaagggtgataaggatttgatgagtatgtttgatgacatgagaaggaagaggtataggaaagttgaggtttatgtggatctatctgagacttttggaggggacagtcttgaattgacaattgttggtggccctcttcagaagacaacaacacaacaccctacaatagctgggcctaagttgaaaaaatgcataatagaagaacttcttgatgatgtagatgttaatgttgatgttcgagtaagtgtccaacctgaagactatgttatgagcaaggcatcacttaagaatcttgaggaggaactagtagataatttagaagctagtagtggtggttctaagcaacatgttgatgagtttttcaagtacatgccagatattaaacaagacagtgaagataatagtgtaggcagtgacttaagtgtacagatattagagaatttagataaaatttaaggtttatttggagaaggtggatctactgctgaggataacccaacagagacccaaacagaaaaggcccaaaacccaaccaaaattccaccaccccaattcaaaaaaaggccaaggcaaaccctaactaaaagtccaccacaaaccaaaaaaaaggccaaggcaaaccccaaccaaaagtccaccacaaactagaaaaaggccaaggcacgcacaaaccaaaagtccaccacaaaccagaaaaaaaaccaactcaaaaagtttctgaaaccctaccccaatcacctaccataacatccacccaaaccagaaaacaaccaacccaaaccccaagtgcaactccacctcagaccaaaaaaaagaccagcaaaacacccaccaaaataccatccaaacacccatccaaaccagaattaggacaccccaaaccagtgaccacattgcttcccaatcacccaccaaaacaccatcccaaacacccatccaaactagaaatagcacaccccaaaccagtgaccagattacttcctaatcaccctctaaaataccttccaaaacacccacccaaactagaaaaaatccacctcagacaagatgccatttcacttcccaatcacccaccaaaatacccacccaaaccaaaataaccacaccccaaccagatcccaaactgcatcccaatcacccacccaaactagaagaaccacaccccaaaccagatcttaaacactatcctagacaccaatccaaaccagaaaaagcacccctaaaacaagaacacaagctgtatcccaaacaccaatacaaaacaggaaaagaaaacaacaagaaacaaaagatcctgactttgaggaagaagaatatgctcaagacacacaagatgcagagcatgatgatgaaggcatagtagaccctagcaagtggtggggttcagtgaatgatttgtgcagtcaagctaaccatgaagaggatggtgaaggatatgtagaggaagatgatttgataagtttggtaagtgatggtgaagatggagtagtaattcgaaagagacccattcaatttgaccacaatttaggcctgaagaaattgtgttcaaattggggatggaatttcctattgttgagcacctaagagaggctttgaaagagtatctcatccagcaagagagcgagtataagtacatcaacaatgacaagttgagaattagagttatttgtaaaggagaaggatgtaagtgattattgtatgctcgacgtatgagagatgattgttctacatttagaattaacaagtttaaagatgatcacacctgtggaattatatgggagaataggctgctagattctga

SEQ ID NO: 40137 - DNA, 2299 bp, Cannabis sativa
ggatatcattttggctagagtgatttgtggcgagattgttggagtgtgaagtttccatattttttgctgaaggttgaccgtgttcttcccctgctccgatgttgactgactctggctgccaccccttcgttctcagccaccttaaaccaatattttggttatgtttttggaatttagcccgcataaaaaaatccccatacggtttgataatggtctcaataggttcatgataaagtcttctacaaaacttctctgaatgccaatcaaaccacaaatgtaacaaaaagttggcaccctttcgtatttgaacgacacccaaaataccgaaccatcagtcttagtgcattggaaccttcgacgtaatggtttttcaatgttaaaggtgactctcacctgaaggtaatccgtccaaactcctaaaaaaaattttggattcatttcaacaaaagaacccaggatattacctatgttttccacaaaactagatgtcatgcatcccggcctaacatcccagatttgcacccacatatcaagcttgtttagcgtcagacttcgtggctccaccccttctcccagccgttcaaagattaactgcatccgattaaatgtccaagggctcccttccactaccctttgaatatctacttcatggtagaattgaaatagataaagattaggctgtagaagttagacaaacatgcccattttaggttgccataaggcagccagattgttctgtataatctcaaagtcaattgttcgagatgataagaatttacccaccaaacaccatctcggatcaatgccatcatcctcatccgatccttcaactctaatacccccatcattctcatcttccactagtaatctgaatgtttcttcttcaacctccctagaactccaactacaagacgccattctagcaacacagaaatcgaattgaacaataacgaataacctttttggaaccgatcaagaaaaccaatcaaaaaactagagaaaacactatgtcaaaagacaagaccttaatctttatagaaatatttttaacaacaccgttatgtttttctttatttcaagtgatagtgaaaataactacttatttatgaacaacaaaagaaagagagaaattctattctcgttaatagtcaccattttgcctcttatatttcatttctaaaaaaacgaaaaaccaacatttcagaaaaatccactcgtcttctccttccttttcatcttcaccaccatgttgtcgtccccgcaccactgtgcggtcgtccccgcaccaccgtaccgtcgtccccgcaccaccatgttactcttcttcttccttttcatcttcaccattaaaaaatgtatgttttttttatatttttattggtttagattaagttatttttatgtttattagtttagatgatgaatttatattataagtttgggtaaaattaatgatgcttagaaagtgtttaatgaaatgtgtcttgaaaatataaagttgtatgtgattgtttgtgcaaaattttatttatttatataattatatgtgtgtatgtatatatatatatatatgtttgtgtgtatgagtatatatatatatgtatgagtatatataaagatatgtattatgaatatatatatttatatgtaaatttaggttattaaaattattagaattagttcatttaaaaaaaaaaaaaaactattaaaattaatagttagattagatttaaatttgtgtgtgtttgttttttatttttttttttggttaaatttttttgaaattgaataatattgtaaaattagtttatgttaatttgggagaaatctaatttagagtagagatattgtgggatttcatacaaaaatatgtatatatgaatatgtatatttgtataaaaaatatatattttttttgtttgagtatatatatgaatatgtatatgttgtttgtgttagtaaatatttatgtttatttatataaatatatattttcgtgtatatatatatatatatgaatatgtatatagcgtgtgagtatatatatttatatttgtgtatatgtaagtgttgcccctgattttgtccaatatacgtggaccaaccggacagggacacgtggatcagaacgtcttaatgcttgaattatttgctaagtctttgtgatataaggcagcatccgagacatgcctcccggagaaggcatgctgagccccatacgctcccggatgcttaagtaatactaaggcatctccgcgaggtgtcaggcttcccctgagtagtcaattcgcatttaatg

SEQ ID NO: 40138 - DNA, 2475 bp, Cannabis sativa
aactattttaatttaaaatataaaataaataataataaaattaaaaatatggttaaaatttataatattttaagattaaaatttttaaaataaaatatgtatataatttttctttttattttaatttaaagttaaaccaataaatttaaaaatatcaataatattttaagaattttaaatttaaattattttttttaaataaaatatctatataatttttatgtttaaatatatataataatattataaaattaataaagaatactctgtgaagtaatatggtattctgttaagttaacgtaaaaattcaaaaattatcgttaaaccaaaaattctattacatagtcacattttatatagaatagatatctatatatctatatttatctgtatctatatatataaataaagaacaacattaaagcagtgaagtggcttcatctccttcaaattttttattttctttaatttgtagttttttttttttaaaaaaaaattatttttataaatgaaactttacttttaataagaaaattcaaaaggcatactattgagtatttattatttatgatatatctagtaaatttttcatttataattagtggtaatggtaataattgttatattttcatagctatatatctaatacaaaatattatatattcatgtatatatcaattatatatagttataattaattattaataataatctatatacctatcaatcaatataaagaaaagtattaagaaatttcagtggcaatctaagttttcttttctattctttattttctctattttgtcattaatttaattttttaattatttttatcttaaaatttataatatgctattattaatggagtaactaacatttatattaatttattattaaaagagtaatttatgactacatactaatctaacatatatagtaatataaaactaatttacattaaaaactattggtattctttaacacaaaatatttaatctacatgaaattttattgttaatatatttattcaaattttatattctatactatttatggggggctcgcacgcgagccgtgtgtgcgtgataggaggcataacggggggacgtgagggggaggtgagggcgagacatgaggggctcacatgcgagcccatgggtgttcgcaatcgagccatgtgtgctagagggggccatgcgtgatgggaggcgtgataggtagatgtgaggggtttgcgtgcgagcccatgggagctcgcacgtgagtcgtgtgtgttggagagggtcgtgcgagatgtgagtgggagtagggagagctgtgcatgcaagtagggagtgtgggcgaggggtagtgacaaaccgtgagcatactttggagggatgcaggtgtagggaaggaagtgagggcatatggataagggtgaagttgagtgaaaactctggagacaacggcgtgtagaggaaggcatacacccacgccttctgaaacctttgagtgtcggggagtacaagtagcggtgacaacagacttgcagggtttgagaacccgaccaaaggtacaccatgaccactcacctaagcaggtggggactcccaaacctgtaattggggaccacgcgtctgcaattcaggaccacacacttgcagctcgtgatcaccctcctgcagtaggggaccactcatttataacctaggagcacaggcctacaatcggggaccacctgacatcagacaagagtacgaggcgcaaggccactccaggcacctgcaacccacagttcgaaagcgatatgttgatacattttgaccatgttgtacccttggccactagtgcctataggtacctgcatttcaaatgtgagtggggttggaagttcatttgttgtaactcataaagtaaagggaatagagagcatatcttcgatcattcattcatttcacttcttctctttatctcatctcttaatagttacatattttcagacaactaacttggttgacgagctctatccatcaacaagttgtttatgcaattttgagatatagtggcggtttaggttagattttactctaggttgttttttagaggttgttttaagttgaaattgtttgtttattgttagttttgctagtttgtttgtggaatgggtaagtttgaggttgtgagctcatacttggctcattaatggtggaattggattctagggttgtatgttgcttttattgcttgaactttgttgttgaatattattctaggtattctgaaaggtttggagaagttcgacctcgttttgatcaagatttggtttgtttggggttacctagtgcaaaccggttaatcggtttgacgagtagtgtaaaactggttaatcggttcagggataggtttcccgaacaagccattttttcaattcttgttatcttcagaaccttgtttagttatgcttagggtattgttataataattaccaatagt

SEQ ID NO: 40139 - DNA, 2609 bp, Cannabis sativa
ggataagtggattttcatctggaactccttctattaggaaatctgccaaagcatggcccttgatggatgttcttgggtaataagctctggcgagctgccccaattcgatagaccattttatcaaccttccagacacatatggtttgacaaaacttgccttaatggttgatcgattaacacctatatgggatgtgcttggaagtaaggcttcaatttgcgagatggatggtttaagcatagggcaagtttttcaagagggggatatctcgattctgcccccagtaaccttttacttacatagtaaacgagttgctagtgctttccctcttgtcgcaccaatgctacactgatcgcattttctgagacaactaagtagaggtataaagtttctccagttattggtttggccaaaactagaggtgttgataaatgtttctttatgcctctaaagggttcctcacactcgtctgtccattcaaattttttgttgcctcttaacacattgaataatggtaggaatttgttagttgatttcgagatgaatctgtttagtgcttccattctccctgttaaggcttggacttccttctgctttgtaggaaatggcatctctatcaaagccttaatttttcaagattcgcttcaattcccctcgcgttaactatgaatcctaaaaacttccccaaagagactccaaaggaacacttctttaggttaagtttcatgttgtactttttgagtatttcaaaacactccgctaggtcctttgtgtgatcttcacactttatcaactttaccaacatatcgtcgacgtagacttccatgttcttccctatttgtttttcgaacattccatttactagtcactgatatgttatcccagcattcttcaaaccaaatggcatgactttgtaccaataaagtcccatgttggttacgaaacttgtatgctcctgatctgggacatgcatcttgatctggttatatacaaaatatacgtccataaatgccatcagctcgtgtccaccagtcgcatccaccaactggtcgatccttgttagtggaaaacaatcctttggacatgctttatttagatctgagaagtcgatacaagttcttcaagtaccatttggcttcaggacaaggacagggttcaatattcacgagggatagaatgcctcgtgtataaagtcgttggttaataacttgtccatttcttccttaagtgccccttgtctttcagaatccaatggttgccttttttatctcttagctgggtaattagagttgatattcaaatggtgacaaatcactttagggtccatccctatcatatctgaatggctttaagaaaattgatcctagttcaccttcagaaaatttgttagttgctattttagtttttcatccaaatttttcccaagaaacacacatttattgggattttttagatctaaaacaacttcttctagttcctcgattggtttaaattggttccttttgtcttgaattcaagggtctagatcttcttcttgctcctcgtcttcctccgttatgactaccattgactaatggttggcccttttattctacaattttacacgatagcatttgcgagccaatagttggtcacctcacactacatccacacctgctggtgttagattgaactaactgcccctagtccaatcagtgtagggcgacccatcagtatgttataaactgatggtaggtcaactgttagaaaatcttgcatcaatgttgtggataatggtggctcgcctactgttaatgggagttcaatgatgccttgactcgtgacactatctccaataaatctacacaaatttaccatacaagattttaattttgcattttgcaatcccattttcctcaatgtatccttgtaaaggatatttatagagcttctgttgtccaccaatactctttttactcttttattggtgagctgaattgtaatgacgagaggatcgacgtgtggatacctcacgtgctttgtgtcttcctccaaaaatacaattggaggttcttcagtcttgactttcttagaagattccagagcaaaaactgatcgctcgttttttatttcactgacatatctcttttgggcattactgctttctccagcgagatgcgaccctcctgagatgaccaaaatgtcctctccttctacaggaggaggttgtaatctttggtttcttgggttattgggaggattcggttggttttgtccattaccttgttgtcttacatactgttggaaataaccgcgtgagataaggctctctatcttgtctttcaactgacgacattcttcggttgccctatgtccttatgaaatcggtagaatttcattggatcccttttgtatctcacatgtctcataagctcaggcttgcaaaatgcaaccctgtgctcattggcgagaaagatattttctcgagtttcattaagctcggtataaatagtgtgtattggcacatacttatcgtgctttttctatttcttcttatctttggctgattccctagagtcatcttttctcttggtgttagagccacctcgattgtcagcctttgtcgagacag

SEQ ID NO: 40140 - DNA, 4462 bp, Cannabis sativa
aatttacatcactttttggcacaccattggagcacactttttgttaaatgagctatattttagcttttcaccacttatttacacttccattgaagatgctcttagacacactttattagtatcttgcgttttgattttattttcataaacatattaatttcatgctcttgtatggcctgttggccttttacctttgaacactacttatttttggtcgcatgactttcatgttcttacttttggcctatgagcattatgtttttgaacattactattgtttagccccaagttagccttttatcatagatatgtaaccaaccagttggtccttaatcctggctatctttttattgccttgacatataagtgtcaggatttacttttctttatgccaagctgatgtatgcctacacttgacttagaggtaggtttagtagcttatactaaacattataatttctctaaataagttctccatgatagtttaattcattgtacggtatgggtaacccccaagtgagcacgcatgtggaactgaaaaaagaataactttaaaaagttaatcttgttagcaagtggtttagacacaatatatttgaactgaaacattatttttatttatcaattggtatttgttgttgtgcaacatacataaattgaatctccaagcttataaaataaaaagtttgcttttaaaagtcaagtggctactcctgcccgacatgccaggcagaggccatcgttgaagaacgatgggagaccatgccaagaggccatgggtactagctcttttaaactaactcttactaatgagttaataaaactactagtggagagtagcattcatataagctggtcactagtagtacttttagaggtgctcctcgttccaatatctaggcaggaaaactagctccatgttctcgttgtacctgcctagcttgtaggcttccttactcgttatctctgtaacttggtaggggccttcttagttgggtctgaaaactcctattttgggatctttggtgaataagaacaccctttgtagcaccaggtctcgtacaaagaatttcctttcattgacttgtttgttgaagtgtcttgcaatcttttcatggtaggcatgtagctttaggttggctgatctctcatttcttctacttcatcaaggaattctaccagcaagatgttgattatatcttggtcataggctgccctcctatgagacggtgacaccagctctacgggcaacatcgcttcatagccataagctaaagcgaatggagtttgccaggtggttgtcttctcgatggtcatgtgcgaccaaaggacctctgggagaaattctggccaattgccttttgcctctttaaggcactttttaaagtgtccttgagggtcttgttcaaagcttctacctgctcatttgcttgaggatgagacacaatagagaaggctttgatgatgtcgtgtttgttaaaaaaatcagtgaacatgtcactgtcaaaatgctttttgttgtttgacataatcttctatgggagttcgaaccaacatatgatgttcttgacaaaaaagtcaaggactttcttggaagttattgttgccaggggtttagcttcaacccacttggtaaagtagtctacaacaactacagcatactgcacccctctttttccctttgggagttgaccaatcagatttatttcccatacagtgaagggccatggagactgcatcatcgtgagctcaatgggtggagcttaaggtgtcttcgagaatctttggcacttgtcacattttttgacctagtccatcgaatcttcaatcattgttggccaaaagtacccatgttgaagtatcttcttatataggctttacccaccagcatgactaccacaaaaatcttcatgcacttctatcatcaaatgctcagcttctgtcttagtgacacaccttaagaacggcattgagacgctctgtctttacattactctgtcttggattaaatacctagcagcttatcttctcatatttttttgcctcatttttgttttcagacaaggcttcaatttggaggtaagctgcaataggtgtcatccaagttggactgtcatccaacatgtcaacttctttagggatggtaatgctatgttctttcaagaactgtgttggcaccaagttttccttatcagcaatggtgctgcttgccagatgggaaagtgcatctattatggctaatggttctctagggatctgccttattgtatagcctttgagccgacctagcaagtcttggatcttgctcaaataggccatcattctttcacctcgagttgtgtattcacctagaattgatttacgactagctgagaatcgttatatatgtccaagtggtcagcccgtacttcgtgcacagcttgaggctagtgatcagggcttcatatttaaccttgttgttagaggctttgaagccaaatttgattgctctatacagttgttgcccctaggtgttatgagggaaatgcctgtaccagacatttggtcagtgcagttcccatcaacatgtagtttccatgttgattctttaggtttttgctgctactcttgctctggcttcttctttggctcttacttttctcctaaatcttaagagattttaggaggtatgcttgtacatttagccacaaagtctgtaagggcttggccatttatggccattcttggttgatatgtgatatcaaatttgccgagttcaatgacccacttgagtagtcggccagatgcttcaggtttttgcaaatcttgttacaatggttggtcggtgtacacccttgttgggtgagcttgaaagtacgaccttatctttttggatgttaggagtaagttgtatgtcagcttctccataaatgggtatcaactttcagtgtcgatcagtctcttgctgatgtagtataatgggtgttgtagaccgccttattctcttattaagactacactcacaacatgttttggacagtcaagtacacgcccagctcttcattgtccagaggttttaataggacgagaagttgagcaagttgttttttcaactcttggaatgctttttcacactctcctgtccactcaaattttttatttcctctgggaatgttgaagaagagtacacatttgtctgtggatttggacacaaaaattcttagtgcagcaatatgtcctgtcaatctttgtacttccttgattattcaaggcgaattcatgtctaaaagggcttggatcttgtctaggtttgcttctattcccttggcatttactatgaagccaaggaattttcccaagcttactctaaaagaacatttgagggggttgagcttcatattgtaattacggaggatcttgtagcattcatctagatcctccacatgcccgcagcctttttggacttgactagcatgtcatccacatacacctccatattacgaccaataagatctttggacattttgttcacaagcctctgataggtagcccctgcatttttcagccataagggcatgactttgtagcagtataggcctaggtctagcatgaagcttttgtgctcttgatctggtgggtgcatcttgatttggttgtaacctaagtatgcatccatgaagcttaggatctcatggccaattgtagcatctaccaactggtcaatccttggaagcagaaagtagtcctttggacatgttttattcaggttggtgaaatctatgcacaccttccactttttgtttggtttgggcaccaacacggggttagatacctaaagtggataaaatgcttcggtgataaagttaggggccctcatccttttgacttcatctctcagggcttgggtgcgctctttatccagcaacctccttttctattgtacaggtcaaaaatttggatcaatgttaagagcatgggccatcacagaggggtctattctgaccatgtctccatgtgaccatgcaaagaggtccaagtttgcccttagaaattttatcagtactgattttatttttggtgctaaaccatttccaatcttcagtgttctcactggaaaagtgggatcaacctccacttctttcaattcttctacaggtccaaagctgtctgtaggatcaccaaaacgaggatctatgtcttcctccccgctttgggctggacttcattgctctttagcaggctcttcttcagagctcatggcaggcatcttctctttcttggctttggacaaggccaagttgtaacagtgataggcaattttttggtctcccctcaaacattctactccatgtcttgttgggaacttcaggcaaggtggtagatggatgttactattgggtttggtgccctaaataaaacccatttcaatataatcaaatttacaatttaataaagatcggaaatcattttatgttgcatggtt

SEQ ID NO: 40141 - DNA, 2926 bp, Cannabis sativa
taaactcataaatattcaaaatagtaaattatccccattgacaaacaaaataaactaagattaaaaaaataaaaattaatcacccaagaaagcggatattacaggcttgacagcttcccgagtggtagtattgtttctataatatgggtgcgaacgacatagtcttgaccttctccttcatcaggtactggaacttgctcccatgattgatacttggggatcttttatatgcataatccattgatttttttgtgagaaggccacaagccagtaaatttttatcatgaagaagaaaattcgttgcttgtaggccataaggaagattcatcaaaagctcatgacgcctttgaatggcagtagttgggattggtctttttagaaaggttgaaaaatataaatgcaaaagtaaatagaattgaatatcaagcataaaacttcaacaagaaaaatataataataataatcttttaataaatacttacgtattatcttgaaggtagtagtgttgattctaagacgtcgtttatgagcattctaagatgaatcgtgtttgaattaaaatgctagtcttataataattttgtaatcacccttcgattaaagaaaaattaaatcaagagtgattaactgacacgttagttaagaagacaaacattaattgcaaaagctcatgattaactttttattaggaagacaaaaactgtcataaaactcaagaaacttactcatacacaaaatataataaatgatgaatgtaattaaaaattctttttcaaaagaaaaatattttttaaggggcaattgttacgctcatatttcaagcatcaaatatgaacatgacacgtggatataagtctaaaaaattatgggtaactataaatgtaaggaatgagatatgtttctcaccttaggatatgctataattaatgatacgtttgtctcgcattgtattttataatatgattgtcaaataaaagtgataaaataaataaacacaatgattagcaaaataacaacatcataaagtttatctcggacttgaccgagataaacaagacaattatagaatacgaaaggataagcaactggaaagagtagataacgagttctttaagaacttgtaacttattgactcacatacttgtgagtatgttaaaagactaagggatatgagcaaaagacgattcatcttagaatgctcataaacgacgtgagagggctgaccctagtgagcacaaaagattcacttttaaatgctatcttaagacttatcttggacaaaaaaaaaagtgaggaaaacacctcaattagcatctcatatgcttagtcatttccaatattacagaaaaatatatgagggtatattttgagtatctcgccaaagaagctgccttcaagataagtacaaaaatgagttaccaatagttaattcatttattccagatgttgtaaatataaaacgtgagggctgtccacgtttcaaaaacggttatctctaagaccaaaatagaatgattatcattcttaaaaattctataagtaaggatagaacctactatgtaagtgatagataaatttttgggagaaaaaaactttaagaacttaattaagtatagaaaattcagagattattactttatatcgaatatcttgtaatcttaaatagctcaaaaacttaaaattaatatagactcatgaactatgtagatttagcaaaaaaatcacgtaaaaaattttgtattttattatctctattattaatagttacttcttaattttattcaaaatgtctcattattgttgacaaaattatgtgttaacatcctcctttactttttcatatttttttttacaattactaaattatttgtgtattttatagttttagttatatttatataacttttgaacaatattttacagataattatataaaaaaaattattaaatttaaatatatacttataaatattgaagttttttcatgtcttagtatagttttaattatagaattataatattcagtagtatataaaaatttaattgttatttaacttatttataattgataaattcatattattattaataataaattataagattttttaatatgtcgtgtcatattttttgaatttattgtgtgttgtatttttttagactagtttatttgtacttacgtgtcgtgctttttgtgtttttcgtgtgtcatgttgtgcttaaggatatattttttgtgtcgtgtcatgtcaattattagtatcatgtactgtcatgtctaaatctgtatttttttgtacctaatcgtgctcatactttttaggctaatgtcgatttcataccgtatttttagtatggataaatacttactattattctcagtcatcaagaaaagataataaaataattaatatatattttatatataaaaatgttgggactaacttttgtgtgcatctcgatttattagtgaggttaattcaaattccaactcgaccaattaattaggaatattcgcaacaaagtttaatttattttttgaaaggtgtttattgttatttatattatatatctagactaggtacaccaattatttgtttatttttcatatatataatgaatattttagactatataatattttagtggtacgttactccccatggatttcattaatttggttttggtgggcttcttcactgatccacgatttttgtcaactaattgagcacataattttgtccttgcctttccaatttcttattcaacacatccacttatcaatttcttattggaataataatattaataataattaattacacgtaatcagaataactaagaattgaactaaccatcatttccttgcatgtgctctcagcccctttcaagagctcatcagacatagatgagatttttttttttt

SEQ ID NO: 40142 - DNA, 1185 bp, Cannabis sativa
  modified_base (982)..(988): a, c, t, g, unknown or other
atccatgtcattttctaacttattgatttcataattaaaacagaagaaaaatatttttaacaaagttgattcaattcaaaaaaaaaaccattttaactaatttataataagaaagagtgaaactacagtttcaagacaaattttaatataagactttttaagttgaggttagatatttagccacaatcaaatttgttaattaattttttaaattaataaatttgttcttagaagtgaaaaaattgataacaaaaaaatgaaaattaattaaaagcatattagttggaaaattttaatttgttgtgattagttaaatatgtatttagtgacaaaaaaataattgctaacaatttatattttgttactattttttaatcacaagtaaatttttattaagactgttaaaaagttgttactaattaaaaggtatttttatttatagtgtaatctttattaggagcaataatattattaattactagtagtgtcgaacagactatattacaaaatagcacattgcatattaatacatgaaagttttttaagaaaatcacttgacatctcatttagccgaaacaacacatgacacttctaaatgtaacagaaagataatgtttgtaagtgtaaaatcaaaaacatcatatatatttgatcatacaagtttgggatgaagctcttgcaattaattcatgcaagtttggggttaattatatcttcatttagggtatgatgaccaaggtgtttgtggattcagattgcctcactattatcactgttatcagcaagtttggggttaataagtataaagtttattgttatatcttttgttcattgtcttagaactaatagttaaaagtgtagttcatgttcgggctaaatttactttagggtaaatagggatataagtactcaaagttttatgtttgtaagcggcataaacctaatgtttatttttagtggcataagtacccaatgtttgtannnnnnnaattttcttccagttttgtcagtataggctctattttgaatttattaaaagaacatttggaagtacctgatactatatatttctatctagacccgacgataaaaaatttaggcattatctgtgccatgtttaagacaatatcagagtctgcactgacaaaattagagaaaaattacagttttacaaacattgagtac

SEQ ID NO: 40143 - DNA, 1795 bp, Cannabis sativa
atataggaatcatacacaattttgtcaactgtggaagagagaagactatatgattggagtcttagtaggagtgagaaaacagataaatatgtttggccttttgaagttgattcaacaaaaccacctcaagatgaaccacctcaacaggtcttcttctcaaccctattttactttctttaattttaaataaaatcatgttgtttgtgatgtttcttttgtgaggataattggtatatgtttggaacttgaattttgaggaagagaaaaagtaaagaaatagaatttcattttcgaaatcgggaaagataaagagatggtgtttgtttggctttatatggtaaaaattacttttaaaaagaaaaacatagaattgcttttaaaacccaattgggagtgattggttaaattctttaaaaataattttttgaaaattgagttaaaaagaatacaaaattggaaaacatcaaaacattgttctacatattatagacattttttattattttgtcaaacatatttttttatatatttttttttgctcacatacccgaatcgagggcttggaccgagtccaaggctcaaggtatgggttcgggtttgagagcctgtgttgggtctggggttcaatgttcgtagacgggtctgggtttaggttcgagggcgacagtgttacatagtccagggtcaggtccgtgtacggggtacgaggtcaaaaccaagtacaagattcgagtccaatgttagggtttagggttgacgtccaagatcaggataaggtcagattcatgtcaaggcgtagaatattattttatttcagtgaaaaaaatttctaaaaacacaatttaaaaaaccattgactaaatgtatcttgtatttaaaaaattacaaaaattattttctgagcccatttccaaaaatagtaagaaaaaaaaaatattcccaaaattttagagtactttttgtaaatttttaaaatttgtccatttcttcttccttcaaaaaaaattccaagtaaagacttcactttaacaagttttagtttgaaaagggtcaaaaatagtgtcatttaattattaaaagaacatacatagatttaactctagcaatttttttctttctttctttgaaaaccacttcaatttaatctttttacccataagaaatatagaaagaaaacatatttttgttattttgttaatttaatgatattttgttgttgtgttttaatttggcaggagccagaggacattgggccaaccagagcagttggatatttcatattgggttgggtaatattgtccactgtcttgtctattgctcttaatcgataattaaatcacatcatcattcatttctgtataaatccatctttatttatcattatttatattgtaaaataattaataataatctgtataattttttttgacactataagatcatcacatgcaaaatttaatattttaattaaaagtaaaaaaattaataataactttatgattaatttaattattattttatgatgtatgataataaaaaataatataaataattaataactaatattataactaaattattctaataaaataataaaagtaaataataaaattattttacttcataacaaatattgtaataaatttacactatttttttttgtcaaatttatgtccccttcaaaacatattttttaactaaataaattgtattatagccttgcatcacttatttaaggtgccgtttggtaatacttttgttttttaattttttaatcacaaaatgaaagtaaact

SEQ ID NO: 40144 - DNA, 1152 bp, Cannabis sativa
ttttaataaaaatattatttaaatatttaaaacaaaaattaaaaagccatttaaatatataaaaattaaagaaaactagataaaaaaatcattttttgttgaagaaatataatgttaaaacacatttaaagtacaaaaatcattaaactaatatagtgaaattaattaaaacttttttaataaaaaaaatatacctccatcttcaccaaaccgaaaacccagaaattaatctgaccaaactccattgtcggacctctgcgaacatcccagacgaagctccatcacatttaccgacgtccacaaaccctgcttctcattgtctctttaaatctcgatcccatccctatcactctataataacaaaagggaaggggaaaaatacatatctcactttaatcatctctagagtgcggcgacgaggacttctaaggttaggctcgcgagggctcgaagaaggtctgtaatggcgaaagacgggatagaggatgtggctggaatctgggtgctttagatttggttatgcaattttgaaaaatcttttgtttgagttttcttattgtttctgtcagatctaatggctttaatatctaaaaaatatttcttatatttgaggcttcatcttgcacttgaattcgtctcctgaatcagatctggtgctacgaagagaacacttgaaacttccttagagatccaatgacggtcgggatcactcctccgagggcattccgaaacttcagcaaacgatcagagtcgacagtgtaccaacgactgaatgtctgatatgaattaatttatttgatttatggtatactcagttatttttttgtgttgtattatgcacatgaactgctagttatagatttgagtaattttagaatttattttttaaatttttgttttttagttatttgttgtatgtttttatttattaatgtggcttctgtaagttttcgtttctttgttttctgctgcatattgaaaaaggaaagaagaagagatgataatggtggaagatgaataggacgtacgatatacatttagtaatttaggtttttcttttctattgaataattagtaaaaaaaatttagaatgaataattagtaatttaggttgtaagaaaactttagttttaagttttacttttttaaata

SEQ ID NO: 40145 - DNA, 1151 bp, Cannabis sativa
ctccattgtttctaaatttgtcgactttagttgttctactatgttaaaagtcatggtgcaagcaacatctcttattttcgctgtgcatccttgactatttctcataactgattttttttcaagtacagtcttatgcatttgtctaatccgtctaatttttccatgtggtagtcaaactatctttctgtgtaatctttcactgttccaaagaatgaaaagttgtacttagtaggatgtgttttgaaggttgttttaaggctgttcaacttgtgatatccccattatgcgtgtgtattttctgtatatatttaccttgctgctttgattaggctctaatttctatcttaattagacactatttttctctgacgccatatgctctttttaattttttgaaaaactatttctaagattgctcatttttttgaatcaacaatagagaatgcaagaggcaatatgtgacctgttgcatcttctgtgcatggtgatagtaacgttccttcgtaagtagcttttgagaatgtatcctcgatcactattattggcctacatgttttaaaacattttatcgaagcatccaaagccataaaaacaaacaacatactaatttctcctgttgtgttcaaatcacaacagatccagggttattattttgaaccatgtgcacaaaacatggtatcaagctgtatgattccttagcgtttcttattatgtcatttatagtgtgctctttacttctacaagctttcatgtaattcatcttaattttgtacatgtgcttcaattcttcttttatatctagtggtgttgcttttatctttatattcagaaacatggatttgatgtatctcttatgaattttattgttctttatctttggtcttcatgtctaacatttccttggcaggtgtagatgtttgagaacctcctgattatgaatgtatttgttggtctattttttgatggtcaaagaaacaaattacaactttcgtaaacacacttcagactgtattctttagagcatgacttccgtaccttgaattggaagttgtttttgattcggtagtagctcagtaccctcttgagtgtttctatgcctttgtatgcctgtattttttcaactttatggtaaaatttatctgttatgagct

SEQ ID NO: 40146 - DNA, 1626 bp, Cannabis sativa
taatagcatacgaaatgaattggactggtcattcacgtgaagacatcagtaagcaatgattcattttctagtaccaaccagaactttccaaccacacaaattaatttttatgattctgtgtgaggaaggaaagtcaagttgttatgttgactacatgttaatatttaattataaaacactatacactaaatacgtggacagaaacacaaattttactttatttaattataaagacctaaagagcatactcaattgatgatattttttttttttttttgagagaaaacaagctgcagagagaaaacacaacaaagcacaagcagctacaaaaggaattagaaaaattctccgtgggcttcttcacgcaacctgagcgcctccttagcaagcgaatgggccgtggtgttgtattggcgaggtaagtgcaacaaggaagcatagggaagttagagaagaggagcctaatctgagaaacaagaccagaaagtgcagaatggtctttccaaacaccgttaaccttggaaactaaattctgatagtctgagaagatgaaattaggcttcaactgagaagcaatacaccaagagataccttgcgacagagcctggccctctgcaaaaataggagtggatgcaccaggcaataggcggttttgcgaagtaataattcgatgaggaccaatcttgaaagtgaaaccaatccccgttaagcatttgttatggtctaaagcagcatccacaaatagggctgaggaatcctcatgaaaaccctcaactgagcatgattgggggtggtgactaagctgttgagcgactggaactgatagaccctcaagattgattttttgagcatcatggtattcttgtaaataattaaagacaaactcttgtacattgttagtagcaaatgatcccttaaatagtaaagagtttcttgtgttccaaatgtgccaaattataccaacaaaaagaggaaaatcctgttttggaatggtttgcattgcttgaagatagaattcctgaatgtcagttcttcgatagtcatggtaaaaaattttaaatcttgaaagcttccaaatctgctttgctctggaacattccacaagggcatgagtgaccgattcaatgttattaccacaaacagagcaagaaggtgtagggattatttttttatgaaacagatttagggcacaaggcaaaatatggtggaaagctttccaagtgaaatgcttgatttttgggggaataggaagtgtccaaaaagttttccaccactgttgaaaagggtttgggttggatgaggaagagaaagcagaaatggcagcagaggaggctagatgataagcagatttgacagtaataaggccagaaggatgagaaccccaaataagagagtcaaccaaagttggatccaaaggaatttggaggatatgatccacctgataggagggaaaaagtgtttaagtttagaaacattccaagtaatatcagggttgatgaaaaaagaaacaaaagcattagaagggtcaatggggtgcagaagagtgggttgagaaacaccaggaatccaattagaagcagacagatgaacattattaccagcacctatcttccaaacaaaaccttt

SEQ ID NO: 40147 - DNA, 1153 bp, Cannabis sativa
aaaaaaaaacttcaaaataagtacaaatcacatatatatatatattaatttattgtattaactaaaacaataattaattagaaatcaacctgttgtaataggatacctaagaaaataactaactaaaaataaattagatcaaccctaaataaactaaacatataccctgaaattaagtaaatagcaaaaaaacaactaaaagctacaaaatttgatgccgaaatctgatgaagatgatgcatacatgtgtttgaagaatttggttgatgttattgagaatgctaaggaagaagctgtgaaaaaacaggctgaggatgaagaagctaagttaaaggataaagaggatgagaaggtgaagactgagaaagaaaagttagaaaaagagagtgagccaaaaactgataataaggaagtgaaagagaatggatcagtgtccacttagagtaagttttttggttttgattatgcaatgctgtgtggctggtttgtccaattttttattccatttatttaccctataaaatataaagtagattaaagctctgaattaatcagtttttgattgagccttaattttataaagttgttaatatcactgcatgaagtattgtgtattgatttgacattttaaattgttttgagctgtttgtacttttgggtacaaatataaatggttattattcatgatgatgtaattaaataaatcaaatgtgtacttctcatcaaaaccaaattaacaaactacaaatactttttataaaaaaaaaatacctgactaaatgattattattatttcaaacttccaaacaaactcaaatcctcttatttaacattcttcataatattattaaatctatatttaacttctcttttcataatctgtacaattaaattcttcattgcttgctgatttcaaaaagcttcattaggattttgctaaaaagcataaaccaaactcaatagtgttgcaaacacacttgtcttcgaaacttgctcatttttgttgagaatcatgcggttctatctcaaaaccaattggcaatgagtagagtagtacatgttctgatatatgactcaatacttttacatttaatccatgtgagacaatgttctccaataatttgtttatgtagatgagaatatgagattgtat

SEQ ID NO: 40148 - DNA, 1072 bp, Cannabis sativa
gcttgcttgagtgttttaggttcagtgatggtgagagattcaggtaaaggataattggtggataggtaggctttcggtttagtgattccatttttggatattgttgtcattgggtgatagtttgtggatggtgtaggggtttgtgagaatgaaggtggtgcttgggatatgggattggtggagtgggcagctgaaacattgggggcattgggttcatttatggtgacatctgggacagtgggggcattgggttcatttctggtggcatctggggcagtaggttcatgtggcggatgaatggttgcagctggagaatttatggttgcaggagcaggagacaaattgctgggatttcttgcagcaacaacactaacagtaggtgtaacagcatcagtaacacaagagttagttacaacattgtccagaggaggagtgtaaaatgaagttgtaggaaataaaatggagggtgattgttgtacctgttgatgtgctgatgcatgtttgttgggaaaatcatgctcattaaaaatgacattgcgagcaatatacgttctccccgttggacttctgcacaaatatcctttgtgctgcatcgaatagcccacgaatgtacacctttctgatataatctcgagtttatgagattgatatggtcttaggtgtggataacaagaacatccgaagggcttaagaaagctgtagtcaggctccttgtgaaataaacattcatatggtgagagatcgttaataacaggtgtaggaagccggttaatgacatatacagaatgttgaaaagctagccaccagtgtgttaagtcaagaccagattcagcaaggagagtgagtccagtttctgtgatgtgtcgatgctttctctcgaccctaccattttgctcatggtcatggggacaagggtgttgaaatgagatgccatgttaggtaagaaacttagcaaaaatcatgtactcacctccccagtccgattggacagttttaatgggaagttcaaactgtttttcaacaagctttttaaactctaggttgatagagaatgcctgagatttgactgtta

SEQ ID NO: 40149 - DNA, 1104 bp, Cannabis sativa
attaattaagttatggaaaccttatacaagaacatatatacatgcaccatgaattagaacaatttacttttgtcccaaacaaacacaataagcaatttggattggttgacttgtctgaacccaatttctaaacaataaggctttattaatttgctggtgtttattacagttgtttatacaaatgaattgcaaggtatatatagacatatctatgccactaacgctttaaccaacttaacggtcagctataagaataagttgacccggacaaaattaactaaagtaatagtctcagagttaaggacgcatctaccaattttccatctagaatgctactttacaaagttagaaatagatcaaattagtgtttaattgatcactatgactaggacttagctagtgatctgtagcaaagtgagataatgacttatctatgttgagcaacattggttagcatatcagttggattgtcttcaattgtaatcttggtcagcttcacagatccttcagcaatgatgtctctcataaaatacaacctgatgtcaatgtacttggttcatcatgaaagagctaactcttactgagatacagagaactttgactatcacaaaagatggttacaaatcttaatttgttgatgcctaactctcttatgataccttttagccatatgaattctttaacggtaccttccacacatgctatatgtactctgcttcaatagtagatagagcccctatagcttgcagattggttttccagcttttagtgcaaccactaagatgaaatcctatttgtgatcttctgtgtgtccgaatttccaacgtaatttgaatctatataaactcttttgttgacctcaaaaagtaatcaaccgacagcagaatttttatggatctgatgcttgttgcgtgttacacaaacataataaaaagttactaaacacacaaaattgttatagaggttcggcctcctatgatagcgggtaatgaactactcctattttacactactagaaaattaagttttagtaacacacattgagtaactctaaaagtgtatagtgacacttcaacgcgcgtcactaatgagagtgactggaaa

SEQ ID NO: 40150 - DNA, 2077 bp, Cannabis sativa
tcaaatatgggcattgctatttcttagcttgcatgtcacgaagaaaatccctacatatgtgggataaattcagagaataaaggcaataagcttagatttctaaatctctacattgtaatcatggaataaactagtttcctatttttattttttatagattaagagaaaccattcttcatataaatagtagtttaatatcactatttaaggacacgaaataattcggagagaaaacactcaagagtaaaatctcgatctaagagtgaattactcaaaggtcattgtaaaagcttttgagagagatcaaagcattcttactcactcttctcacaagttagtacaacaaaaataagagtaggctattaccaactccaagaggatgaacctctataaaatttggtatttctttacttttgatctttactttctattatttaattattcttatcgctttaatgaagactcactatcattggctaaaagtgaggtcaatattttggttcttttattgagagcaaagacacccaagttttttttttgtctcaagtcttttacaggacacaagatgatcgtgcaaactcgaagggggaatcaaactgatatagtcgatccaatggtgacaaatatgagcatgcagacacctgaaaatccaagagatccacctaagatggcccctggacaggttaatactcggccaccaatagtgggctatggagtgacttcctctctggctgggttcaccccaggcatgcaagaaactggaaacactagtatggcagttgagcacactactcctggaactggaatcccatccaccttaaatacttaaaggctggttggggatgatactaaaatacaaaatttgagagatgcattgaggttgatgcaaggccacagtaacgctcttcaccacgactaacaagatattcgagcagctataaatctttcgtttgatgaagaaagatgcaagttcgaggagtggagggatcgagagatggagataatgagagcctagcatgcagccattgacaactgttccaggcaagccaccgcaccaatctgaagagcttatcagatcaccgaccagcggctagtgactactgctaacattcctacggggtcacaaaatggattagaaaagtatttagctgatcacaccccacaaactcacatcggtggactgtccaatccaaggctaaaggttcaaattgtgggttaagtggtagataggtagatttcaccaaactgtcccttaggaaggaatggttagcttgataccctcactcagatagagatatcagaccaaccccttgcacaaaatggtcagacttaggggcccatcagcacatctgtatttgaccgactggctaccgtgcacgacctcataaatattctgaatcgtagaagagaattgtacaaataaaatgttcccctaccgtctagccgaataatgcatacaactatgtccctgtttaagttcaaagacatcctaatgaggcacatgtcgatccacaagcaggtcaagttgatccattagtacaacataaatagatcatcttaagagcctcatacaaggcctgactgacccaaaactcacaaatctcgagcttgatcagactagaggatcaccattctcactggagatcaattctcatgacctaatgcccaagttcaaaataccaacatggaaaatgtatacatgcaaagaagatcctttgtctcaccttaaatactttgagatgcaaatggacttacaatcggtgagaggtgttgtacgatgtagaattttcccatctactttggcaaaggttgcccagcagtggtacttcaaattatctccaaggaagttcaattcatggaattgcttcatatccgaattccatgcacagttttcctcttctcggcaactcccatctcacttagaagacatggtacaagtgaagcaaatactaggaaaacctttaagagcttacattgctttgggcttagatgcatatagggagcccatttaatttttataattaaaatggactaggttgctaaacaaaatgatcacttatgatagattttatttagg

SEQ ID NO: 40151 - DNA, 2005 bp, Cannabis sativa
tccacttctgacaccgcctcctcagagatctcacttggagactaggttgtacttttctcctcgggcgcaactgcttcatgccttaaccatttggttggagacttctggctgaaaccatcacccaaccttttattcagagcttgcagcaccttttaagacatatcttcacatgaataaaatgagaagatcaaaacaagtacggtataagaaaatgccaaagatttggatacaagttaaagtaccatgcacgtgggcatgagcattttcccaaacaatcaaagaaggagcatcatcgtatgaggaatcctcccgttcctattccccttggatgaattttccctttcctaccactagggcggatggttgagctacccttttaggatcatccctgatcctgatggactgctcaattggtatttggctactcgaaggagccttccttttcttcttcttcttacttggagtcttcggtccgagatcaatctctcctactgccttcacagcctttggtaaaaaattagctagatatagcttgtacttgataaagttagtgtcggtagccaagagagaaatgtttcgttcagtaagaggaaggttgagaattttttaagccctcttcttgagctccaatgtgaacgggggatggcagtaggacaaaatttgttgaaaaccggtgtaagtggtgtccatccccttgaaaaaataatactcatcaacgaagcctcctatcttcatcacctcggtggacgtggtgcccgtcaaccatgactactcaatctgagagaaatagaagtaccctgacctattctgcttggacttgactttaggtcgaacaaccagttggtgtcatggggggacgactcaccccatccttgtgaggcgtatagtacgcacaaggcggacaaatacttgaggcccttgggggtcaactgggtcggacttatgtgctaataatttgcaatcttcttaaaatatgggagcaagtgcagcattgcaccttgtttggtgtgaactcccaaccaagcacaataaccttctttagggtcagtagccaattgggggagggaaggaagcattcaacactccccaaaagaccatccttgaaaagattattcaacttcttcatggtcgccatagatggtggagaaatccatttatctcatggcagacctctcattctcaaaggaatagcctcggtgtattcctcaacaacgtactcctggctagcctccagaacatcgcttacctcaaatactggctctttttcatcattgtagccaccaaatggtagcatgggagctaccccttcttcctcatctccttcagcatcagaaggagtagcaggacggacctctcccaagtcttccacttcttggacttcgatgtccccaatagtatcctcctcttcagtagcaggatgggtctgttctgctttaggtagagtggcaacgcgaacaatatgtgggtcactcagtgaagattttcgtacaatctatttagtttgtgccatgatcttatgcttgggcagatcagaagtgtgcctggcaatggtcacaacaaaattggcaacaggtctgcctatagtggcagggtttggccggcccttgggcagggtgtcaaccacgtttggatggactttatacgtccagttagtaggaaggtaatgcctccaccctttcttgagttcctagatgaaacgatcgtatccttcaccttgaatttggtcgggataaaaatgatgttgcacctcgggctccggggaagatgtgttttcgctacttacttcccagtcttcaaagctagatttgaaagattgtcactagatgaagatgggctagcacgaagacaaagatgatccttgtatagaagttgaagcagaccctggtcgatatgatatttgcctccccaaaactcactagggttcatctacaaaaggtaggagacaagaaagtgagagttggtcagagcaacgaatgaaaaacaggttgaatatattgaccaggtt

SEQ ID NO: 40152 - DNA, 3104 bp, Cannabis sativa
aaaccgacgtgaattgtactttttgtagtagtgatcattcaataaatacattatgtcttcatgacttcttcttaacaatagctctccagttacctctgctctataatttacccaaatttttatttcatcattcaattcattgtgaaagaataaagtgagacagcccctgaaatagttgtgatgacatctcactgctaattcattaaacctccctgaagcagcgtagaatgacttattgtgttgttgaaaacaattcacaaggtaacctttgtgtagcattttttatgtaccttgcaagacaaactcatacaataaaaatattagcaaaacaaaaggataatcaaattagaataaacattaatcaaactgatattgataatttcaatccccgataacggtgccaaaaatttgttcggtaaattttaatacgcaagtatatgcaatcgaaataagtaatataatgataagtaaagtatcgtttccacgaagattgattatcaagtggcaattaattaattctttagttctaattgatgaataataatttttggataaagaataaataaaataacaaaataattaaaatttcgaaaaataacattaataaaaataaggattattacgatccccaactatcctttattttacttcataatgtaattattcaattttttttcttcctattcaattaataagttgagttaagaagtttataatctaattaagacttataaacccaatctatgtaaaaacttcctatatttctatgataaatttaatcacacaaatatcattaactaataagatcatacaaacaatctaggttctttcgtcctaaatcaatttacatccgtatcaatgagagcatattcaaatctcacatttcaaaattttaacttgaatttataaataacaattataaatggccagtaaataattgtaaaattaaaatagattgaatagaaattgaataaagagaataagaaaaaattgtatcatcacattaatccataaaataatctcaagtggttcacataataatccttaaaagaagttatccaataaaagacattctaaaaaaattgaatgaaaaatatgaaagatagagatggaagatctaagaacacggtttggagtccttcactggtgccttctgctccttgctcttcttcttcactcagaattcctctcaattttagaatggtgacaaagctttgtcgtcagccccctttaaatatagccaaaaattgatgtttcccatttttatatactaaggccgcggccttacaaacgatttcctcttttcttcgcagtttcccattttaagtttcctgctgttatatttattttgccattattatgtgttctggagagtttggtacgatttggggaagttttgaacatgtttcaaaattcgttgggttttctctagaaccggttaattggtttctcaggcaggacccaaaaaatagtttaccgttttagaaatctagtttgccagtttttgcaattttgggagccttagtttttgtgttttctcgatatttaggatattgtcatattatttatcgatagagaaacctttagttttaagtttaagtcactgaaaaagtgatttagcgtatcacttatcagttttacgtatgtcgtgacttaagagcctgtaaatcatctagcaacagttcctctcaggttgaacgatacacttgaatttagaatcaaggtaagactagtataataaatgcatatgtgcttacatatttagcgtgcatgtttatgaatacctactagataacatatcagtaatgacggtattagtgtacatagagttggactgaataccgacggatatatatttagcatagtacagattgacgctatcatattagtatgactagagtactgagtataggctgatattatggtcaatagtactgtcgtacgaacgttctagactcagtacacatgggatgtgagatacgattataatttatgtatggacgcctagttgtaatcagtttatgtttatgttatgattatacttttcttactgattttgtcgactcacatatattgtttatatgtgtaggtaaaggcaaagctaaagctaaatagctgtgagcaattttttgcttcacaactcatagttctagatttcgatagggataaccacatcagttcgaaagagaagggtaccgtggacgagcgaatgaagactgtacatattgaggcggttagacttggagtgttcaatcttcggaacagtaagctttattttgatagtcgctttactttaatctaccatcatattaggattacaattcacctaatagtttaggattctaagtgtttgtgacaaattgcaattttaattgtgatgaagaatagaacctaggttaaataaattatatgcttcattaatttgttgcctagattagtttatctccataaatctcaaagttttgtctaataagtttaataaattgcatgcttcgtggatttactgcttaggtaaaagagtttattattgagtgcttcaccttgattacatacaatagggaaattgagatgattgactgcttcagcgttatttgtgggattaatagtttgattggaaattgaaaaattacattctttaataggaattaggaatgattgttgagggtggcgaataacctttaactagcttctcatatcataatctaaatttttaatccatttgttttatttttatttctgctatattaatttcaatctcaaaactctctttcctaactcttgtcattaagttttgaataattgaataaacatagttttcgtgggttcgacccgtacttacttttatactgaaataattgaaagtattagaataaaaaaatatagtaaatttgatacagcatacgacacgcatcaacgtcggagttggatggtgtgaacgccagtttgggagatgtgttttttttttctttgtattttttagagagaaacaaatgtagaaaaaaaaataagaagatgaaaataaaaagaaaattctaaaaataaaaacaaaccttgttctcggggtcgttaatggcttctccctccttttcctcttcttcttgttt

SEQ ID NO: 40153 - DNA, 2251 bp, Cannabis sativa
tttaaggcaatatatttgttaaaagagctataaaaaaaatataataattaagtaagaattgttatacaaatatcccatccaaaataatatatattaataatattgagaaggagagaaaattgtatttttattttgtgcaataaaattgtaaaaaagaaatgcttaaataaataaaaactttgaaattaacgttatgtatataatatattattacttatgcattttataatctaaaagtaccagaaaatataaaaaaattataatctttctgatataaatgccaacttagtttacataacatcataattacatatagatatagatttttcaaaaaaaaaaacatcagatcgcttgagtacaatttaactactacaaaattggtctttggaggcggtttttaaggcctttcagcatcagttttgacaaaattcgctgctggtgttattccaagggacactacagcagttaaaaataaccgacgctgtaaggaccatatggagtcggttattaaataaccgcctccgtagggttcccatgacatcagttaatatgaaataacggactctgtagggaccctatagagtcatttattataaaatagccaactccgtagggaccctagggagtcggttattataaaataactgactctataagggcttcctatgatttttttttcacctttaaaattttgtgttttaacattattttttttatcaaaaatctaattttatttttttcatatatatacatataattttattattaatataagtaaattaaatagaaattatatacactaaaaattaaattgaaaagttaaataaatacacatttacattattttaagtgtttgtatataagttatccttttattaatattttatattttaaaatatgtgtttgtatttttatttaatattatttttataattttttaagttattttttgtataataattagtatattaattaataaataatatgtaatatcttaatttttatttaattttatattttcatacatttaaaatttataatatgggtttgtatttttttttaaaatatattaaatttatttttataattctttaagttatgctttatataatcattagtattttgaataataaataatgtgcaatcttttaatttgttgttttacttaaaagaaattaatagaattcttatgttaagtattagaatcaaatgatgtatttgttaatcttataaaagtaggttaaagaaatcatatacataattctactgaaattttagcagcataacgactataattgaacgtttctaaatatttaaagctattaataacagaatacaaatcaaaataatataaactaatctcaacaatatttagcaatacaaaaatttactatctatccgaccgcagtacatgtattcgcagtacctacttcaatgtggatgactatttaagatattcaaactcatctaacatgtatattattccacccatccacccgaccacagtacaatatatcacagaacctactaaattactacttagtaactaactatagtatactaaatataatatgtaactaactaatagtaactaattttactctaaattactaactatataataactagcactcctcacgcatcaattatttatccattaagaaaaataacaaaaaatcctaacaaacaactttaagagaaacttatatcaaataattttattctaattctactgaaattttgacaacataacaactataattgaatattcctaagaaatttaaagttattaataacaataaaaaacaatctaaaataagataaaaaaagtgatgataacttagatgatttctaatcatcatcgcatctcccattaatattttaattcgagttttctgagtcaagtgtgttctaggataatagaatattttagggttctagttctagaaacataattatctttactttaatttattttttatgatacatctttggtatgtttaaattttacgtgacattttattcatacttaggtattctaaaatattatatcaatctaatttgtgaggtttacgcgtcaaacgcctcgagacttgcaaaattaacaactagtaattagtatactatactaaattactaactagtaagtagaccaaattctatcgaaatttcagcagcataacgactataattgaatgttctgttaggttttatgctctaaataaaactccatttcaatgtaatctatttt

SEQ ID NO: 40154 - DNA, 2239 bp, Cannabis sativa
aggcatattttgagatgcttgaatgatgtgatagttatccttagttcattctttgaccatggagaatttctcttggtaattttactgaatatacacgagtggttcccgatgttctccaaggtgacacccgggtgatcactagtgcacatgggtgttagtggacttgcgggtgacacatgtacatgagatattgacttgcaaaattgtccaaatcttattttgggggcaaaataaggtcgatgctcaaagcaaaattgttgtttgaaggacataacattgagccctagtcaacctgggtgcctagtgtgcttgcacactggtgcttgggggctaacttgatactcgaacgatattttctcatgattccaagtctcatatcgtgtatttggagaaaaacaagaagaatgctcgagacagaatcacaattagattgacagaatcattaaaagtgtggctacatcaaccgaggcgtccagtgactggggtgatgttgggcgcccaactcttcaactggggcctatatgggtttgtttgcttctcaaaagcacttgtatctttctcgtgaataaaaataaaggaaattcctgaacaacttatctagaaagaagacttggagtgcacccaattgagatacatcaaccggggcacccactagggcctcgaggcatgcactaggcacctaggtaggggtcgacatctttaaaattagtttcattgatgctcaatcttttttttggtgaaagtgctccatggatttcagttttgtcaaatttgctcaggcaaaacttggtaaacaaaatcggtgctcaagttgaaatgttaacctgggcggccatagttgtgtatgggctcatttaggatgtttttaatgaaatatcatgtccttgtattgttccttgatggatttaagtaataagggtctaagtatgtccccgaaaacctaaaccctggccataacgcccccaaatcgactatatgtcaacttgggtgcccagatgccatttcatgtaggctcatctcctaagtctgaaacttagttgggtcatgtctctcatgtatcttagaataatggctacgaagaatgcccataagaagtttatgggaaccaaaactgatgcgagacggtgcacatgatttcaacctgggcgctaacactgatactggacccagattgagccttgggatgtccacatggcatccttagcttaatgattcatcattttaaggtcactaggacatgttcacttgaactttgtcgaaagatggtagctagaaacttcttcgcaagatcatagtgcctacctaggtgcctactagtgttaactagggcaccaacacagtttttagtgcccaagctaaccaccattagtctcggtggctggggcccaggtttttttcttcttgtcacgtgtcaaaagtgttgtccatgtcatcgagtcaaatttctaggtaaatacacatattctatttcatccactactcagaagatacaatagtagaagctgttgtagcaagttcattcaatctcgtagcttgagcactcaactattgtgtaaggtatgtaattacactactaacagccccttcaattgcaaagaacttgttatttccaaccactaataacaatttgatggcaagccatcgaataataaaaaagaatcaacaacgaaataaaacaaaataaaataaaatcatgtactgtagcaagttcattcaatctcgtagcttgagcactcaactattgtgtaaggtatgtaactacactactaacaacccctttaattgcaaagaacttgttattcctaaccactaataacaatttgatggcaagtcatcgaagaataaaaaagaatcaacaacgaaaaaaaacaaaacaaaataaaatcatgtcatacagacaagactcaaacacttaaaattatgtcacagaaacaagataaaaatgctcaaaactatgtcatagagacaagactaaaatactcaaaatcatatcacagagataagattaattacaacagtcaaaattaaattgtagtatcaaaatacaatcctaaccaagccatacctaagcccaaggaaggccggcaggcctggccagagaaaaaagacaacctccaatagctataaatttaggaacaaaaaactttgatttttccactgttatttacccttgagagtttatttatctaagttgatttatatatataatgtttttttatggatataatatgccaccatc

SEQ ID NO: 40155 - DNA, 1493 bp, Cannabis sativa
gtaaaaattacaatacctatttgtattagctcccaaatataaaatccaactaagttaacttttagattaataaagtaaatgactacttagtacttattagtagtttgtttattaataataataaagtaaataaaaattatttgaacctttaaagaacatgcatgactacgatcacgaccgtgagaattattgattttatatcgaaaaagataattgattgattaagggattttttataaaaaaaatatatatatatttacttaaaaaaagagttttatttgtaagtacatcccatttttataacaataatattttgttaaacttgtatgattaatataaaagtcatttcaaaattgtaaaatcaatttttctagcatgaatagatagaaacgtataacaaatttgttcataagatgatatccaagttactttaggtgtctcattttaacaaaaattaatctcagtgttatacaatttttttttaaaaaaataaaatacaaattatcatttaacaaatcaaaaaatcgaatcaataacttttacaaaacaaaattatttcattattcattattcaattttgtactataaaataatatggcaattttgtacaagagattgagaaactaaatcaacataataatacaaattaattagaagcataatttaacatacattataaacttgctaatttacttacaagaagtctaataattgactggccaagtacaatattacaaagacaaaacaccctatgatataaacaagattttataaacacatataattacattcatccttggcacttaaaacaaaacacataatagcaatagcccatgattggtcaccaaggaatgaaaatcaaaatgacttggttctcattagtggttagttataatagccaatatgttccatgagttgggttttaacatctactaactcaagtttgagtcttttaaactcactaagataattctttagtaactccacatcaaatcccatattttgcaatttgttcaattgctttattatggaatcaacagtatctgttgtagtagattcttcatgcaatttcgagatcatgtcaattacatatgcaaattttaccttattagtcaaagctataacttcaagctcaatttcatttttagctgccaaaaactgaaattgaggattctgtggcaatttcttgaacacttctaatgaatccacaaattcccagattgcagatcttctcacaatgggaagattttgaggacttccttgtacattgctaactgtcaatgaaaaataataatgaaaagaaaacaataccatgtcagaagaatttcaaatggaactattcaagttcaaataaatgataatttaaattactgcaccctcatgttttcgatttctgtctatttcacaaatggctccaatgttattttgatcaccctcctaaattcaaatcagaaaaattataataagtaaataaaaattgatgtaaattactt

SEQ ID NO: 40156 - DNA, 1572 bp, Cannabis sativa
gtctaaagtaggtgtaatattacttctacaaaatatgctatatagcttagttgtcacgttctattattgattaaaattaaaattaaataatacgttgttacttagtcaaaaattgaaaaagtgaaaaggtttgattgaataatatatcaaataattaataataaaattggatgattgattatagcaatgaatgcgttaaagttgatcaatgtgtatttgataaaaaattcaaataatcatcttacccagctaagtgcatgtttaaataaaaataaataaatgttataaagtagatcttaggaataataataataataattcataattaatcacgtgtaataaaaataaagtagaagattgggaaatcccttaaattttggtgtgtaattaaattaaatagtataatgtgattcttgtctaattaacaagtattatatatcattacgtgtcacatttgcaacatgaataccgattaaggataagaggataagataattgtaaacctatatattaattagctactcatattataatgatataataaatcaaccatttatatctccaaatgtaaattttgtaataataaattaaaatgagtcaatgttatatttcaaattttataattgtattttaatgtacaaaatacaaattaacccctaaaattaatataatcattaaatttttcttgaaattatataaaaaaaaattgtttaaataaagagaaatgttaaaaggtaccatgtcttaacttattcctagatattatataatttaatgtaatatttttaaaaaatatcactaattaaataatcattaagcgtcatctccacaaggtattgagcacctcagtagcaatgctcataaataaaatgttaaaaagtgtttaatcaattaaaaatattattttaaggtaaatgagtaaataaataagataacatatattgtggtgtaaatttggcgtgtgttatattttatgttaaatttagtcaaatttttaacatgtgtcaaatttaacacacattttacaccattaattgagcttcattttttataaataaactaaaataatactatttttataactcttcgttggagatgcgctctaagagccatagcacgaagttgaaaataaatactacaattactctagtattctaactagaaattttgagttagagtacttctcaacaccactattactttgtctatcactcaccttctcattctgaacaaagggtgttttttctattgtatcgtggtaattatcaatttattcattgatctgaaattaagaacttgcttgaactccggcttctcccaatccctcaaccaaaatataaatataaataaccaccctcacacctcacacgtgaaagaagatacctttgattctaaactattgacaaacattgtattaaatagtcataatacaaagttttgaaacaaatagtaaaatttgtaattgtaccctttaagcatattaatatgatgttcatacttagccaattaaccttgatttaatgatttttgatgaaatatttttactcatatttgagtcaattaagcttaagc

SEQ ID NO: 40157 - DNA, 2001 bp, Cannabis sativa
ttaaaaaaaataaaattattgaaaattgagctcaaggtcttatttgtacaattttaaaaaatacatagtctattttgtcatttaacaaaacagagagtccaattaacaaattttacaaacacatatttaccctaaaaatttcttcatgctttattactttaatattatttttcaatgaaatgctgatgttctttgtaacttcctttcataggttacaattgaccaaatttattttatcacacccaattttatttgtcacacttttaatcatttaacaacattgtatttaaattataaataatataacaaataaataataatcttttcttgtttcatattttctttgaggaaagtttccataatattttagctaggtcgttatttgcaagaaaagaacagcaacgacaaagcatacgattattaccttaaattcaacgtccatggcattgttatcccatgttctccatcctctttatcaatagtactaagtacttctcactcaacctacccattcaaatgaatctcacccacactttagggaatctacatcatcgactaaggtcagtttttgaagtcaaagtgacatgtcacgtaaaaatatgatatggcctgctttttcttcccactatgataattgccttcattagtcgagaaaactatcttgtttttttgtagagaatagtcaaattctactatgcaatgacacaaaagaagaaaaatattttctgcacaagtctatgcacttcttcagttcttctatttaattaagattatatcagaaacatttcaaatgtggaagctctgagccggtttatttaaaagtgtcaggtttgattatttctctatgaatctcccctcctcagattttagcctctgcccttctgtaaatttactcttcgcttttcctgttttattattttctctaatttcgaaactgagtttgtgtgtaaaaagttagattttcgtaccccacaaaaaaaaaaaatgtttacaaattcttttatgtgaaaataattgtactggcatgttttttttaaaaatggaaactttgttgttttctgcagttgttttaggcccttcccaaatcttgctctgttcacctctctgttaatatttttaaacattctagtacagacgcacagtttgaaagccatggaaagtaatgatgatgactacacaaaagatgggacggtcaattaccaaggaaagccggcaaataagaaaataactggaacttggaaggcctgcccttttattttaggcaagtacattaacaatccatttctattctagtactaactactagtggaatatattttaaaatggatgtactgatgcaatccttaattgtttcggtatctataagaatttttagtctaaatttttttataattgtgtacgttataattatttaagacatcatgtaaaattttgagaaatttagaataatttacagtatagaatttaatgtttaaaccgtctatttcacacgggtataaaataaaaaagtcacgcatataatagactctttgaacactgttttcgacgtgttaaatttttctgaatttatcaaaattttgtcagatgtcttaaatgactgtaatatatatatgaccataaaaaaatttgaactaagtaattttttagataccgatatagaaaaaggtgcatcaatacaccattttcctatactttatactcttcttggagatcaaatggttacttctgttacctttttgtcattaggaaatgagtgttgtgaaagattggcctactatgggatgagctccaatctggttctttatttcaagcatcgactgcatcagcacagtgctactgcctctagaaataacttgaattggagtggaacttgctacataacgcccttgattggagcatttatagccgattcatatctgggaagatacagaactattgccgttttctcaatcatctacgtaattgtaagttgaagtgactaagaaagttcattaatacttt

SEQ ID NO: 40158 - DNA, 5971 bp, Cannabis sativa
cttaactacaatcctcgtgggatcaacctcactcttagtgagtttactacttgtcacgatacgtgcacttgcgtgtgcaaaatatcacaacatctaatctgatgatatccagcccacaagttgagcttggaaaacaccgctgctgtaaccaactcatccaaaagctcatcaattgttggaataggaaaccggtccttgattgtgattccatttagtgctttatagtcgacacaaaaatgccacgtcccatcttttttttatcaacaacactaaagatgaatatgggctggtacttgattgaataataccacactctcccatctctttgaccatttgctcaataatgtccttctgaaaataggggcacctgtaaaggcgcacattaataggtgctgaactcggttgtaaatggatgcgttgatcaaattctttgtatggtggccacccttttggtttaggaaacacatcaaaatattcaattaacatgcctttacattgagggggcaaattagctttcatttgaggtgatggagccgacggtgactcgtaactatccatgacagtcattaaacgaaacaaacaacgaacctcaccctcccacagcagcgtcgcaaacttactataagataattgatgtgtttcatccttagaggctgctcatttgactatactcccctgccaagagaactccattgtcaattccttatgttcatggatgcaagggcccaaggtctgcagccactgcattccaagtatcacatccaaacctgaaataggaagcatatacaaatctaccataaaatgatgaccctgtaaaattaattccacttctttgcaaatttttgaacatagtagagaatggccattgcccatatataccttgaaccttttagtttcttcccacggtaattacaactgagccgcaagtgtttattgaataaaatttttcttgctgcccgtgtcaatcaagacttccaatgattctgcaccatgtttagcaaaaatacaaaaaattcgaggattagaggaatttgacaaagcattcaggctaacctcatcaagtggattgtcatctaattcatttgattccccaccattcgaaaatattaatccctcctcttcttcctccatgccacataaaaccataacttaatttttgcatttatggccaaagctatatttctcatcacaagtaaaacaaaggcccttatctctcctttcacgcagttcaataggtgagagacgtttaacaagaagagagttacctgttttagtgcaattagaattggagttaatcgatggggagccaacaccaataactgcactagccccttgaagcaatggcaacaaattttgaactaatttagaatcccaatcagctcgttgatttgatccccgagaacgcaggagcatatcatcattacgatattcgtacagttgtgccttagccatggcattggccagattggagggagtagcaatcgaaaattccttacgaatttctacctttaatccccccacaaaaaatgtaagaacatctgctctgggacaccagtaattcgtgtcattaattcttcaaaatcccctcgggattgagaaacccgccctgtttgcattagtttcgcaatatgatgtagtggatcatcataaatggaggctctgaatctcacttgcaatgcttggataaatgaatcctaatccataaaaccaccacccttttctatccattaaaaccaagtagatggagcaccatctaggtgaaaagccacgacagataatcgcattgcagggtcgactcgatgaagattaaagaacttagggatcttatatattcaatcatcaacctcggtttcatcaaatctaggcacgttaacccgaagagtgttgagaagggaattaacatctcggcaatcaagctcaacatcggaacgtcgattggttgctcgggtcgtgactggggttgcactactctcaccacctatgtcaggtgaaagaggaggtgataattgcgagagacgctcatcgagtaaggccttgagctcctccatatatatgtgatgcaactcgctgttccattttgagattgaaatccctggtcatgttctaaaacaattgtgcaatctcctcgtttttcatattgcaaggaagaagaagaagaaggcaatgaaagcaccagtattagattgggtccacttcgagacaggacaaatctccttaagcaatctcttacaatttcattcagcataaaaaaaaaaagttccacaaaaattacaattcaccttttataggtactaagaaaagattgagaaataacaataattaattaactaaaactctctttaattctctagtgtcattatgtaatccttcagccaacgtggcctagtgtgcttccttgtattctttgctctgcttcctcattttgtcttgctggtttcatctttgctgctgttggtgtctttttcaattgcttgtggtgatgggttattttctttttcccaactgctcactctctcatgaatggtcttagagtgcaagttaattgggcttgtcaaatgggccctagtaacatcacatgttattgaataggaagatgagagatcatgagagaaggattttgctgaatttgagatgtatgtaatctctttatgtggcttgtggatgttgttagttgtaatagtgttggttgattaatgaaagttttttcttgttgatcaaaagaaaaaaaatcatatttgctcacttttccaagatataaaaaatccatcaaaataaaaattctccaaatatataagtaatgaattttttttttttctgcgcgcggggatgaaaatataagttaacctttagctaaatcacttgaatgaaatattaatgtcggtcactacgggtagatgaggtagcagctgggcttaagaagtctaatttatttgccccatagccacttcacgtagcttttttctaatgctttaaatgctttagaagacaaacacaacatgtgtgatagtaatgtgttccctcttatttcttgcttatatatgtatgccacccataatgccctcccatcatattaattatagatcggatgattatgtagatcacattccatatattcctaatagcataataactcataacaatgagcacccaatattcgaataaacagaacggtcttcttatatcggtactcataacccggatcttggttttgtttttatagacaataaatatgcttccaatctaataaaggagtgagtcactgatcaattttgtaataaccatagttctatgactacgttttagcaacatttatttttatatatatgtccctagtttcatctactttttaaattatctaattgttgtctaccaatttgtctagtttgtaaaatttaatgtgaatttgactctttttagtaatttcaatcctgacacgtgtatgttgtacaatatagtcagtttatgagttaatgatctgaactaactcttccaacggacgaaaaccccaattttcttttttggttgtttcttgtgtcctctaaattttcaggaagaaaattaaaaacttgaagaaggaagcttgtgtaattcatgtaattaagaaccttattcttttaattcttagctgattttaactcgagtgaaaatgtttataatgttattaatctataatttttgttcttactacctatctagtaatcacttcagtagcaaaactacttccaaatttgatgcagatagttttgaattagatgcttgttacaataatttgatccgtacataagttgaacttttgtaccaaattagacttattccagcctaattaattccttcaatcaaggaattatttcatctaagttagacaagcttccctttttctctttttcattttttttttcttttgttgacttaaagtaaacagtacaaggggaacacaaaaccaaaattaagcaataagaagacaaaatccctttatactgatcgagaaaattcaaatacagaaccaattttcctgtttttttaaaaggtttatatatatttatataattaagaacaattacttaaaaagttaaaacaacacacaaataccaaatatacatattattacaaaagcatacaccacattaccatacaacagattcaaaaatttccacattacacccagctaaggccattaataaattataagcttatgggtttttgtgataatagacaataataaacaattcagtacttctttgtggcaaagcgattacacaaagccaaagcgttactagtgagttgagccacattaacaatttgtgccctgacagagctcttaatcttaccgttcatagatttaccagcaaagccatcgatacaagtgttgtcatcggtcaaggaagcactgacccaagtctggacattgctcatgtgccacatgaaatcctgacctttgtacttgcccatattcttcaactccttaaaagactcacccaatcggtccacactctcacccatttcatcaatacagtcagcaatggccttgtactcttttgtcttaagtcccttgaacttacccaattttagaacaaaccctttggctaacttggcgttgcttaggctgacgttcaaagcggttagcgccaattggtgtgggctgttttggatgttggaggaataggtagagagggttctgatgcagagcctgggatatgtggtcgaactacaagaccattttacaaaatttggggtggtggtcgttgctgggcttttgtaacctgtggctgtgactgcaccgcagataagaaaagctaggaaaagaagcaaggagttaataagcttagccatttttgttttggatacaaacagaggagaaatgagagtggttgttttttagttatgagagaagagaaagggtgtgaatttataggccaaatcgaactgagagattggattaaattaattggaaggaaggtgatatgtgtgtgaatgtgaaccgtgtgtgacatgtcacatcgtgttttgattaaaggctttttttttttttgctgagatctttgctaaatttcatggaatggagcttcgccactgctaggcacgtgacaatgtctcttcaggaataattaaagtcttcttttaaaataaattaaaattatttgaacgctgcgttaccgacgtacacggagtcgggtcagttttagaacttttagctaataatttaattaagcaattggataagcaggaaacatatggaggggaaaaaagaaagtaggatatattgttttttaaagaggctgtgaatttttaactctattggaatttgggtgactttccattatgtatatagttagtgttattgtacattttcgtacgcatgcatttgttcatataattaattaatttgctgataattaatgttttttattgtgaaatcgttgttgaaaattaatctgaactgcccaacttattcaatttggtattattggaatgggacccatatatatatataggtacaatgaaggaaaatgagtattgggctgaccatgttattacaatgtgttctaacacgacacacagtataaatatatgatttatactatcaaaattttatttatttgaaaaatatataaggtggattattagaaattgtgtggtgagcatggctctactcatgataatgttattgattataattgagattttttaaattatgttcaacaatatgtgaaaaagcaagggtagattaaagctttagtatgaggtacttttaccaaaagagatgtgataagtaaaaaataaaggaatgggtggcaataatagaggcgccacaacttaaaatgggccaaatctagtataaagaaaagtgtgcacttatctttttttttctttatggtaatcaaaaaaagaagtttgttagttttggtaatttgttatacattttcttttgtttatgggtagagttaatcttatacagtgcgtaaggattacc

SEQ ID NO: 40159 - DNA, 2457 bp, Cannabis sativa
actaaatatgagttttaccattggagatagcctaatagcctgagctatattttgcccacaattaatgttttttttttaagaaaatttatataaatattttattttaataatttttattttataaaaaatccatctttatttatactatttttttttccttttttatattcttacaaatcatacatataaaataattgttagactcgaaaataaccaatactagctcgctagattggcaagatgaataatgggtaagtaaataacatagagagatacacaaaattcataataatttactcctcgtgtcgagatgataatagagctacgtctattttgaattttttatttctcataaaaattacaagagaattaactaaaaaaagatgtcatatttctagagagataaagtagagagatgctctggcttcatggagacttagtagaatgtgaaaagtgagctagtggagatctccttttatagggaaggatgtccattcaaataataataaaaaatacaaaaaaaatgaaaaaaaattactttgggctaatcttggcaatggtgaaaattgactcttgatgaaaatcgttaatttttgagcttgaatctcgtctgttggattgttttcaggtagtttgtgaaaagattacaactatcttgggcatgaattttagacttgaatttttcagaattgtgatgtagatttgatacattacttgatatatctttgaaatagtttcgaaacacaagatgaatcgtgtcaatcagatcaatattgagggagttatgactatttaactgaaggttgttcaacatccagtgcaggttgacaacccagagactttgtaagtggaaaaatgtcacagacttgtatttttttatgcctaagtgatatgttgacatcacctaatcagattctttgtttttgtgaggttgttcaccggttcttggagatgttgctttttggtgaaatcaggtaaactcgaaactcactaattttttattttttatattccaccttgttagaagggtgaaatatcaaagtgtgaatttgacctgccataagtcgtagctctcgtttactacaaaaaaaaaaatagttgaatagtcaagacaaaatcagattctgataagcaaaacccagcgcactaggccacgcatcaacctaggcgctacatgcttcctgagtgacttttcggggctcgttttgatacttctaaggcatttgagattgggaacgaggtctcctaccctgtaaaaataagaagaatgcccagagcaaaatttgtgtttgaggatggaaacatgtgaactaggtttcatgtcaacttgggtgcaaggcctagtgatcatgtcaactagggcactaggaccctattttggctcccaaagatgctcgaaacacttttcgagaaaaaatattggaaatagcctaggttgaaaaaatgtcaacctaggcactgggcccagcatcagtgtcaacctgggcgctgggtctagcttttttctactggttggttccatttgattcttggaaacactcatatctcagttatttgttgaaacagagaatatgcccagaagacttcttggaataattgattggaaatagcccaggttgacattactaggcccaacacctaggtcaacctgggcgctggatttttattttgactccttgatgattccgtttgttccccgcactactaaaaaaactactatccacaatcgattctcaaatcatttttttggggactatcgctgttctacctgaaatttagctattcattagaagctaacacgtgtcctacaaaagaaatatgaatcaactcaaagaatatagtaattaaattttattactaaatgcaatttaaataactcatttcaattaattataaattgatagaaatattcaaactcactgccacataagcatatgcgagataagaataataactattaaactaatataattgatgagacaacatatccatctcgggataaacagagtatataatagaagcgtacaagatgagacatcaaggagcttgcggctcgttaatccacatacttgggaataaaagtttgtaactcatcgacctatatacatgagcagggagaaaataagtacattcaatcatcttgctttctacgcaacgtagtagtcatcttgctaatatcagtataaaatgagaattttgcgagaagaagcatgtctacacttaacattctttcctctaagaatgaataagaaggataactcatacttagcgagaaacaacctttttagtaagcattaccatttaaaggataaagacaatgagcgttgggtagttattatattttatcccatgtgcaaataaatgaaacatgaggaatgttcatgtttcattagcagttgtaagtgaatcgatcccaataaaaataattgccaacctatacacctataaataggagca

SEQ ID NO: 40160 - DNA, 950 bp, Cannabis sativa
tataaattcaaattaaatgataatattaattatttttgtattggcatttatcgacacccaattcaacatataatcccatctaatgtcgaatgaatcaattattattaaattgaattaatttctgtacctcattaactacttgaacaagtaattaatatatggcgaccagttattattatatgaatataaaatagatagcgcgctttgatgattatttatggggacccaatcattgttttcacactactgagaattcatacataggctttactaaatctctaaatatattatgtcaaaaacaaaatctttatctttcaaattaagatcaaagatacgagtacgaccactagagaatgatttcaatcgatactatgattgatatatatatatatatccaaataaaacaatatatatttagtgtatagtatacatcccatttgaaggtatatttttaataacatcaacaatttggagatttaattatatatttaatatttgcggtcgaatgtcaatttgtaagaatattggcaatataaattttcataaggacaataattaatgtatatatatatatatggatgtgaagcacatggtaaaattaaaagtagatagttgataaataataaagtgtactgaatattgaatagtcttctggattttttaaataaagagtaaatgtattatagtaagtcaagtcaaccatatcaattatcatattattcatatttagctgcattgcatggcgatgatgtcgtaatatagtttgtatttttatgattaagttctgttctatgttctttacttttcataagaattgctattagagcattttcagtcaaataaatgtttttaaaaatatttgatgatataaatatatttttagcatttattgaagtgaaaaaaaaatatttaaaataatatttttacttctcttttattattattattat

SEQ ID NO: 40161 - DNA, 1530 bp, Cannabis sativa
taaaaaggacatccaactataatgcaattgtttagaaactaaaatttaaaacaatatttctagttccgtagtgcgagatgaaagtaaatttacttttttcgttgtgattagttgtgaaaaaatttaggattgaaattttagaagacactgtaatgcaatagttattacattagctattgaagtgatacacatattttggattataaatgctttggcttgatcgggaacttacagactacattttatgaatctgtaaatttaatataggaaaattagttttataaaatttaaattgtacttgagggtttaatttttgttcaaaatcaatttctctgtagatttttaaccagtttgtagtggttgattttcttattgattttattcttcttctcaggtgacgtcgctagatttaatggtatttatattcgtcagccgtggttgattcatcattgtcgacctccttccatcgcatgaagggttcgaatttttgaagcgtgaatgtgcgacttgaaggatagtgtaagaggtatttgtatattttttttttattggattgtatattttttaattggctggaccagagtatatttgtagtattgctgtctttatttagctatatcagagaaaaaaaaattcttttttttaactatattaattgtttttgactcatcaatatatatatataaatgaaaggaatgaggcggtgacatgtcactctaaaatctctccaaagctatttttcttttttctccttgattctctaatttttaatattaatttttaatataaatatctatcgtaaatcaattattttttttagcaaaaatcacatagtaataaatcaatatatatatatataaaggaaaggaatgaagcggtgacatgtcactctaaaatctctccaaagctatttttcttttttctccttgattctctaatttttaatattttattagaatataaatttgtaaattgatatttactgttattttattaaatttttcataaaaatatttatcgtaaatcaattatttattttttagaaaaaaacacatagtaataaatataaactaaattaataatattaaattatttatatatatacgtattcataactatatatacgtgtgaagattttttttttctttgcaaaatataagaagagtggattttttttttagaaagaatatgttatcaatcaaatatgtgtgagattatatgtagacgaaacaggtgtgagattgtaaatcaaattttttttataatgcatattttttatataaagttgatgtcatcaatgtagttcctattaatatttttaaatttttaaacttaacacccaatttaacgttctgttagttgattaataaagtgccacatgtaaatatagtattagccaaactaataattcttttagaaaaaatgattttcaaaaacaaaaattaattaaaataaattcatattattcaaaaaaaaattatatacatattaaatgaaaaaaaaattaattatttattattttctatcttc

SEQ ID NO: 40162 - DNA, 1358 bp, Cannabis sativa
cacacacacacacacacacacctccaaggctctctctctttctcattggagatttgtctactgaatcatacattgtaattttaagagggctacttcaaatcccatcactatagtgatctgagtagtattatctcttggcattaatacaactaaaaggggagtagatcattacccgctaattcagggggccgaacctttataaaatttggtgtatcttttacttcattattcttattgtgtaacatgtggcaagcatcaacattaaatatgactctgttgttggttggcctaattatgagatcaacacatgttattgtaagtaatccaataactaagatttggatcagaaagagaagggtgaggtaacgcaccatcgatgaactgagtcttgttctttgctacaatggagattgaggcaacacacttccaagaaatgaagttttcttggccagtgagaggagttggaacaagaagatacctagggtgatcaccattattgagataataggggcttttgtgatcaacgggttaagatcgctcaatgcgagtgtaatttgaattatttgcatcgaatcctgatgtgggtcgatgaacaggttgtgaactagcgttttagctattgttgttgaaaacagagtcttgcgaaggagaagtaatcagagcaggacgttgctcaattggatcttgtggttgaggcaaggcttctagtggagtttcgatcggaccatccaccaaagttgtaggtggagatgggtcagtggaagatgagggactagtaaatcttgtatgcgccacgaatagagagagtataaggagttagttcacttccaataccataacagaaagagagaaatgattttatattgatggtaaaaaaatctgttacattgaagaggaagagagcctttttatatagtcaagtctcaagttgattaagttagttggaataactaactatccaactaatttatacacactgattctaatagtatagctaactactattgtaataattgcataaataaactgtgtcagtaatattgtcacaatatttaaattttgatcccattttgttgtgaaattaaaggctggtcatgaatattcactatagtaactagatgaattgcttgacacataagataaaaactaaaatataaaataatcacatatttcatgtgtagaatgagttgtttgtttgttactatctaatatataataagttgcttaaaaagaaaaaaaaaaatctttcatcgtatagttttaagaatattaaataagtatattgtatagattaattaataatgcattgtgtacattaggttttgcaatgcttgtatatatttgtattaagttttatt

SEQ ID NO: 40163 - DNA, 1440 bp, Cannabis sativa
  modified_base (31)..(46): a, c, t, g, unknown or other
aacacagggtccaatctgtaacttttgcaannnnnnnnnnnnnnnntggtatttaccctaaaaaaaattataattaaatataaattttattcgtacattatcattaaaaagtgtttgcttaaaagtcttaatcacaagaattataatttattgttactaaattcttttttagtcatgacacttgttgtgactaaattaaattagtgataactcgtatttaaatattatttagtaacaagtaatttttgttgtgactaaaagtaatatttagttataaaaatttatgttgtgattaaaaaattaccattaaaagtagtatttttggtaatgattacaaaattaagaatttataggtttttaaatatttttacggaccaaaaaaatatagactattgtttttcacaaaaatattaattatattatttgcatgctatttttatgtacttttgagggattttgtaaaataatgtaattaaaaaatctataaaagtattaatcctcataaaaattctttagtcacttttgttatccgtgtttctggaagggaataagcacgtggcatattcaagtcaaagataataaattgaagcccaatcatgggccgaaccgaggtaacggactggaaccacacaaagagatggcccacaagtgtaatgccctacttgtttaagcgcgatacaataaattataaattactgcgctaacttttgttaattaaaaggtttactaaaagacgtgtttaataaaaattttattaataaatacaaactttattaattatattttagaaaagttcacaaattttgggatcccaattcattttacgaaatgatgaaaatatattaattcaaaatgtcacctagcagccaatacaactgagcccatgttgtctcgaagaaccgaactttctgttgagaaaattatgcaaattttcttataaatcagattagtgagaataaactaacaacagaaataacacacacacatacaaatttgataacaatttttggtatgtctctaaatctactacaaatcttttactgaaactgagaaataaaaatacatagtgttttacaacactcttcacaacctacactccaattatactcaagatttttttttttcacaaaaattctctcaaaaacttttctctctctaagcctctagcttaagctattcttctttttgtgttgggatatatataaatgaaacttatgtgggtttatataggctttggacaaatgaaatgagtggtagaaattagtcaatagttatgcacctttcattactaatttgataacttaggcttcctaaaaataacaatggatgcgatccattccttttattttaattaagaaaggataatgttatttctttaacaatctcccacttgaagactggttttaaactgtcttaacactccacattatgtagcaaagc

SEQ ID NO: 40164 - DNA, 1659 bp, Cannabis sativa
  modified_base (47)..(62): a, c, t, g, unknown or other
atttcatcgttttagaaagttcatttttagggtgttaatcaacatannnnnnnnnnnnnnnnagatcctggtaaaataattttcaacaagataatcctctagcacaacgagaattcaaaagatgggtttcatggcgtccatagaagtagtcagcatgtgtctggacagccaacatcgtatcatgctcattaattaccaaatctacagatatcaaaatttaactcccaagatctcgcccacgaatcgtaactttccattatggaaaattagtaattgagtatcaagaattcaatgtgtctttattattgataaaagtacgtttgttcactcattcttaataaattattaaatgaattagtattgattttttaaagttctctatagatttgatgtgtctctaagtgagtagatttgtgcttaaaagataattttgtgatgcattaagacatttgagccaatttttgacaatatttttatcattttctgaaagagcttatgaaacccaaattatagagctcgttcccaacttttcgaaatattttaaatcatctcatttgaagttcggacacaaaagttatgcatgatttactgagcaaggttgaaacaataaaagagcgacaaaaaataccattttgcgatatagcaccaaaagtgtgggtactatagcatcgctcttgaaagaaacaagataaaaaggagaaaaaaagctaatgttagcacgcaactgatatcgagaagtcatgcaggcgctataacgttgtgtcttaggcgctatagcatcgtacgtgtggctttgaatttcaatctaattttaaattgattctttctatcatttaggcctaagaataacataaattgatttttggacaagtgaagagatacaaacaagtaactttgacaataaaaaacatattaaagagccagagagaagatattcaaggcaattatcatcaactatcatcattagaatcctttttttcttcttcacttttttcttttgtttagttattaattataaaaatgattattgtggctattatgttcgtgattaccaacaaacactctctctagatgttgaccttagaattcggccaaccgacagaggaggtttatttaatgttgattcttgccacgtgttacacaataagaataataagtaaataagacacaggattttatagaggtttggcctccttagttcacgggtaatgacctactccccctttggttgaattgaaactagagatagtactattcaaatcacaagtgttgaggaatctgttatagctctcttaagatcgcaatgtatgaatcaataggcaaatctccaatgagagagagagagccttggaggcgtatgagagagatagggaaggagagagcctttggtgcgtgtaacaaagaggagaagagagaattagggttttcacactaagagttgagagcttagggagcttggaggcttaatgacttaagattttagagataggctaatgatctatatatagtagggcttacatgcctaatatctttagaaataggtaaataaagccattatttacgtaattaattaatgaaatataaatgactaaattacctctcaaaaatagatattttccctctattgtcacgggctgttaaggcccagtccattgcttg

SEQ ID NO: 40165 - DNA, 1352 bp, Cannabis sativa
gtttattatttttactagagatgtatttttgtaaataaaaaagttcacagagtaaaattaaaaaaaattccgtgttgaagtaatatttgtaattttttttcaaatttttagtctatatttttacaaaattttcaaaaaattatgctttatatttattattaatttttttcaagtatttaagagtactcccatcaattgctctactttatttttaaaattttttgaagtccttatcaaacttccacaaagcaacaaccaattaaattttgtgattcttaatttcttaataattaactatttaactttttttaaccaacttagagagtaactttagaaaaataaattataagatatttaagtctaaatatgtgagtgagaaatttaaactattatatttttctccaaaaaaatattttatttgatatttatctaaaatttcctagatagaaagagattgatagtgacttaagctagcatttagcttttttgatcttcattttttagtaacttttttaaaactttttttggttttttgatgtattcgagttctaaagataacaatttgggttttggaacttgacctaataacctttataatgttctcaaatatgtactatgtgtgttcaatggttactattattttagttgtaattatcattttatgtgtactaattaatctttataaaaattaacaattcaatcaaaatttgcacaattttataactttttgttttgtcatgtatggttaatttctttttcttttgaacaaagctatacactaaaagagaaagtagaatgaatgaagagttactaaatgatgaaaaatataagagaagggtaagagagtaatagtcctttttgttgtttggtaagaaggagagtactgatacataattatttattgattatttaagatctttgtctcccgaactatgacttatcaataattgtgcccataaatttttctagcggtaaaaaatgatccccgaactattcacagtgttgtaaagtgatatttctgttaagttttcttgcacgtgtcaaacaaaataatgatgtgattgtttagacaattatcatattagcaccacgtgtacattaaaaaatcattaaactaaaatttaattaatgattaaaaaattatgtaaaactaaattaaaaaaataaattattttttctaaattaattttacacatgtggtgttaacgtggtactaatgtgacaatggtgtaaacaactatgtcatcattctattatttatgtgtgacaaaatttaaaagaatgactaatttacaacactgtgaatagttcaatgatcatttttaatgggctaaaaacttaatagggcacat

SEQ ID NO: 40166 - DNA, 1324 bp, Cannabis sativa
  modified_base (814)..(842): a, c, t, g, unknown or other
agagtttcaagcgtttctctgaaattaacttcgggtcttcaagtaaacgctttcaagacttcagtgttctgtttgggtatgaatgaagctgatgtttttcagatgccgtttaattacttggagtgcccatttgttccaaaataatatatctagtgctgagtgtgacttgctggttgaaaaaaatggtccatcacattccagtgtggggtctagacatctttcttatgctggtcgatccataatgctgtcttagttgctatccacttttattggactcaagtgatgattttaccaaagctcgtgttgccaaagattgatcaaatttgtagagttagagtggaaatgcttttgaacttcaaaaggatcgggttctataaattggaaagatgtttgtaagcctaaaaaacaatgagatttggggttccgtaatattgagaattggaacaaaggagccattgctaagcatgtgtaggtgttggcaactaagaagaacaatgtttaggttaagtggattcatgcattctatttaaaacattttttattggtggaactaccagcccactcaaaccaatagctggtattggaggtcgataattcaagtgcgtgaattggtgaagaattgttacacgaaggatcaatttgaagcgcttcatttctccatcaatcaagtttgtaaaaatcttttctcctacccctcttcatctatttggtatgcttctttgatttggtctaggtttagcgtctccaaacattgttttattacttggatagatgttggaatatattatactagaatttagatttactaacaagnnnnnnnnnnnnnnnnnnnnnnnnnnnnntctaaaataatagaatttaaacacatataaagtttaaataaccttacattgattgcatcgaaatatgatgattcctcccactcagatctttaacccttgtttctttctgtcccagagtattatcaaaatttgagtccaactctccttcaggtgtttgaattcttcatagtcttacacactatgattgagtagtactatacttgctatgagtgggcatgcactcactcactaaggctcaaaaatttatgaagaacaatataagatatttcgaaaatagaagaagaagaaggaatggaggtctcaaaactctagttgtctgaaagaatgtaaactaggtttaaagcattaggttaaagttattggataatgagatcatcattttccttttatactatttcacttaggattaggattaaattatatggaataaaaaatgataaaataatatcaaattaaaccttatagttgccgggcatgtagat

SEQ ID NO: 40167 - DNA, 1516 bp, Cannabis sativa
  modified_base (59)..(60): a, c, t, g, unknown or other
aaatatagtgtaattactaaactgtgtaattactaccctagtaattaccctacctagtnnttacacagttacttccaaacactaaattaaaaacatgcaataacaaatttaaaataataacggctaaaaaattattaaatttacaccgcttaaaaactcaaaattttaaatacttatactataaatatcccataatataattacctcaagtctatgcttttatacactaacattaaattcgattcttagatctaaaataaaattggatttttgttaagaaagctttatatccaatttgcactgtcttcttcacatcacaaccaatattcaaaaatggttcaccatttcaggttaccataataccattagctcttgctcaataataatatatagtgtaataagtcatgtttaattgtatgtctcaatgatcttcaacgtgtcaagaatttaatatatatatacttttaaatgcaacacacaatgttagggggacaagccaaatcatggtctgtatttgaaaagcaataaatacaaaatatatatatatatgaatggtctatattttacaatccacacacaatgactattaaatttcattagattacactttcttgcaaaaacacagaaaaagacttcccaccacaccatgtcaccacctaccttaatacaaatattattgtataactttttcattatacaatctcaagtctaatgaaggtttagtaactagtgatcagtagtgacactgtgggtcttttgtagcaatcaaaacgtattaatgcagagtccaaagttgtggggggagcttcctttacttcaatcacaaactttaaagtgtaatattattattagtacaatttaatgtaaaaaattatttaattattttactataatgaagattataaaaaatcactaatccaacgtgggcatggacggactaggcgtaaggcccatttagctcaggagtccaaaaaaaaaaaatcttttaacattacacttttttttttattaatttcaaaaaataccataatttttttaaataagagtttaaaaatatttttcttaggatcatttcacaaatacacaaaaaaaattacaaaaatacggttgtacgaaattttaattatttttacattttttatgattttatttacagaaaatacggtcttttaaaatatttttatgttgtacaattcttaatttattgttgattttttgttatttgtatattattttttggtgttgttttgatattatttgtatattattttcatgttacttttatatagttttcttattttttttatatattacttttatagaaaaccgtaaaaatatatatataaaaaataaacgtaaaaatgtcaaaaatttacaaaaaaaaaatagtaatttctgtaattatctcattttttttataaccattaaattttaaggtcaggcgtcaccttataatgatgctagacatcttgataccccaaaaaaacactcgccaataattggcggggaattggta

SEQ ID NO: 40168 - DNA, 2146 bp, Cannabis sativa
ttttttttttttttttagtgttttgtctattttttattttaagtttgttttattatttttttatatagtcgaaattggttttataggttttgttatgattttgtatgagtttataagttttgttatgattttttatatggtagaaataggtttcacagggttcaaaattagttttcacacttatattttatttttagactttttttttgtgtattatttgttattttgattatatttgtgagcaattttttttgtgtgtgtgcttttttttttttttacatttggttgactaatgaaacttgttttagttatctttacagtttatcatttatgttttgttatgattttttatagggtcaaaacttggtttcatggtgttcaccaatttgaaaaatagtttcacaggattcatagtttttgagagttttgtaatgaagttgctccatattatgatgttattgtattttttattttaagttttttattatattgtttctagattcaaaactcgtttttatacttatattttgttcttggatttttgttgtgcattgtgcattattttaattatatttttgagttttttaattttttttgtgtgtttttttattaggttgactggtaaactggtttcaattatcttctttatttattgtaatatgttttgttatgattttattactagggttcacaagtttgaaactaatttgtgtttacctaattaaactttaaattttatttcttcttttgttattttaggaaactaatttcactttgtaaaattttaaactagctgataagtgaaattgatttctgataatttaattttcgaagctatttgttgaaagaaataatgtgtaatatttttttttactaactcaattttgtgtttcaattttttttattgctcagttgttttatgtctatttaattttttacgtaattggtttctctatttaaatttttaattggttgttaatgtaactgattttttttgtgttagaattttaattatttattcaatgtaactggtttctttttattcgatattcaattggttgtataacgtatgtaaaaaaatggttgtttaatggaactagcttctttgtgtcaaaaattttatctggttagttaatgcaagttgtttaaatgatttaagtattcccttatggtgatatgcttttttcttttttaattaattagtttttctgctttaatatatcattttattattttaagtttcttatatttttgttttaatgattaattaattgtattaagtaactagtttttatattttgttttaattttagttatttaggtaattggtttatgtgagttaatttttaatatagttatttcacgtaattagtttttctatattaaatttttgctaagttgtttaatgtaacgagtttttgttatttagtttataagttataattaaaaattattttatggtatatatatttttttttaagtaattgatttttgtaattgatatatattttcattactgtaggttgtatatatttgttcactttttagtcgattgtaatatataactagttatgtattaaattattatttttgttataatacgtgtatggttctaagatttagtttttaatttgattaatctacacaactagtttcttggtatcatatttttaactaactgataaatattactgatttttcattgtcaaattcaaagctccaactccgatgcaactctaacgtccaacatcggtgacaacttcgatgtctaactataatgacttttttgacaatgatagctattttgtcgaatgttctcattctattttctcaaaaatttgtaattggttttaattttagtctcttgattttagttttagtagtgagttggtgatcaagtcttagagcttctaagaagcacgtaaaatttatatatgaaatttggtatttgtaactagttttttttttgtttagaatccaatttttgattatataaaattaattggtttattaatttaatgtattaataaaattattttagtatgaattcagcttctgtaaaaaaaaacttcagttgagataattttttttttatttcagtgttttattttttttttaaaaaaaaaaaagaaaaagaaaagtaaaa

SEQ ID NO: 40169 - DNA, 1429 bp, Cannabis sativa
tctgttactggttagttaagttgttaggctttgttttcctattaaccgactttgctcaagttgtatataaacctcttggctcttgtaaactcattcagtgaacattgaataatagagactctgttttcttctcttcacaaattctctgtttctcatagcatccaaacataatttaaaagtttttttttttggctaactccaaaacaatttaacagctcccttccaaaaaataaattaacagttagatattataaaatatttagcaactaaaactgataaagattactgtccaaaaataatgtataaatcaatatgcatatatttaattacctctaagtaagttgaaatttgtttgtagttcaatcttccatcaaacaccaaaagatcactgattgaatactcactttattcacttcacctattgtcatacaaaataagcaaaaaataattattcaattaaaaataaaaagcaaatacaaaataaatataatgtctaaaaataataaataaaatacacggatttaataaaaaaaataattaggtataataacaaagttattaaaatttaaatattcattatttaagttatttaatattaacataagaatacattaaaattcataattatttttagtataaagacctactttctctgttctgaatacatacataaataaaacaatattactaacctatgattgtaatgaaacttatatattcatgagcaaaaacacaaattaaagtgaaagaacctgtcaataataccaaatcaaataataataaatatgcaaagtaaccaaaattatacatctttactttaatcacatacagtaaataataaagagttagtgaaattacccaagccatgtgatttatggtcacttcatcaattggttcacacttgctcacgttgacttgaccacatataagataacaattgtctgaaacaaccaattttaatgttttcttttttaaacaaaaaaaaaacaattgtattgctatattcttacatttttaattgaaaaaaaaatatatatatatatataatatggtttagtagagatagtaaaaaggagtaaaagaaaaaaatgtaccttctaatggttagtagaggaattagtcttccaagaatccaaacacaaattattaaaggctagatctctctccttcaaaaataataaaaaaaaattctaacaatgactgcaaacaaaataaaaaccaattttttttttcttctttaacaataaaaaccaaaatccttcattttcgaaaagatccgttttttttttttttttgaatgaaattaaacaaaaacttactaaattacaagccaaaatcctatatctgcaaacagaggaaaggtttttttttaaaaaatggaattaaacaaaagcttactaaacagaggaaaggtttttttttttttttt

SEQ ID NO: 40170 - DNA, 3798 bp, Cannabis sativa
acgatctgcaaatagggcggctcactgcattgcgagacggtcttattttatgtcagattgtatttatgatgagctttctgctccatctgatttacttttaattgtaaaggatgatagtttttcaagttgattaataaaattcccctttttttaaaaaaaaaaaaaggtagttcattttcagtctgatctctcctgagttgacttattaattttccttcataaaaaaaaacacaataggtaaattttaaggagtaattaacatttacactccgtgaattataacattattagattaggtcccctatataggactttgatcaaattgtcaacaaatagtgtatactaaggagcaaaattcaattttaataacattttgattaccaagttttaaaaatacttttgttccttagtaataacctaaatctattttttttttaaattatgagaggattaattacaaaagttttttcttgccatatataatggcaatttttcttattttaatgttttgaaagtaaatcttccatatatttgaagaaatcaaaaacattttaataaaacattatacggataaaaaacccaaatataagatttaacaaaaagacggccacatatttatacagaactcacatttagagtttctaaacattataaacataaatataagcgtacgaatcctccaccactatcataaatctaaataagtttagttttcaaaaaattcaaaaaaagtgacaaaaataacatttaaggattaaataattaaaaataataaaagaaactaaaagaaaatataacactttaaaatttaaatgtagttgttcatcgacaatcaactagacaactcaattctcaatgatattaaaacccaaaagtttaaacaaaaaaaaacaataataggaaaacaaaagtcgacatcaaaagctaaaccaaccttgaaaaacaaggctagtaaaacttgcaatgctaacccatataattgtccgcatattaaagcaaaacgaaatcgaaaaaggcaaagacaccagaaacaaaactagcctaactataaaaagctccttcctaaacagtaacacttcacttcttcttggcggcggacttggtcaccttggcacctgatgggtccttcttctccacagccttgatgactccaacagccacggtctgacgcatgtccctcacggcgaaacgaccgagtggtgggtactcggagaaagtctcaacaaccatgggcttggtgggaaccatcttaataataccggcatctccgttcttcaaaaacttgggctccttctcgagctcctttcctgaacgcctgtcgatcttggtttgaagttcggcgaacttaacagcaatgtgagaggtgtggcaatccagcactggtgcgtaaccgttaccgatctgaccagggtggttcatgatgatgacttgggatgtgaagttggcagcttcctttgcggggtcatccttggagtttgaggcgacgaaacctctcttgagatccttgacagcaacattcttgacattgaatccgacattgtcaccaggaagagcctcgagaagagcctcgtggtgcatctcaacggacttgacctcagtagtcagaccagttgggccgaaggtgataaccataccgggcttgatgacaccagtctcaacacgtcccactggcacagttccaataccaccgatcttgtaaacatcctgaaggggtagacggaggggcttgtctgtgggcctcttgggctcgttgatgttgtcaagagcctcgagaagagttggtcccttgtaccagtcaaggttggtagacctctcaatcatgttgtcaccctcgaaaccagagatggggacgaaggcaattttgtcggggttgtatccaaccttcttcaagtatgaagaaacctccttgacgatttcatcgtacctagccttagagtacttgggggtggtggcatccatctacaagaatcaaacaagagaaacatttagaacaaacaatcaatcaataaattgaacaattatagattaaagtttcaagtattgaccttgttacaacagcaaatcatctgcttcacaccaagagtgaaagcaagcaaagcatgctcacgagtctgtccatccttggaaataccagcctcaaaacctccagtggtagagtcaataatgaggacagcacaatcagcctgggaggtaccagtaatcatgttcttgataaagtcacgatgtcctggggcatcgatgacagtgcagtagtacttggtggtctcaaacttccacaaggcaatatcaatggtaataccacgctcacgctcagccttaagcttgtccaacacccatgcgtacttgaatgaccttttgttcatctcagcagcctccttctcgaacctctcgatcacacgcttgtcaatacctccaagcttatagatcaaatgaccagtggtggtcgactttcctgagtcgacatggccaataaccacgatgttgatatgaaccttttcttttcccattctgaaaagctgaaaagtacatatcaccaaataaaacagcttatcaataactaaaccctaaaaaacaacatacaaccacagaaatgtaacaatcaaagactaaaactcagtcccttagatgttcaatagatctgtgatcatttccacaaatcattacaggtctgtaggctcatcactgtcactacactaacaatcaatatcatttccaaaaatacaatatgaactatatagatctatatttttaaaaacatgtagttgctcatccagtagactaccataatcacaaaacaaaattatggaatatattttaaaaaaaaataagcaacacagaactctagcttctagggaacgagtcatatgggaatgaagtaatcctcaatgaccagatagcgaagcgttacataacaacatgttaaacacaaagctaaatcattttcaacatacaacacagatctaacctacgatttactttcatcgtaaagtaaaccagatctataaagattcagcttaaacctaatcatcaaacgaaaatatactttcatcaaaaatattcatgtatctataaacacttcaaactcatttagaagtgaagaagattcgattatcgcatacaaaaaagctcaaaacaagatagaaaattcacatgaaagatacataacaatactacgtaaagattcaaatacaaaaacaaaagattagagaaaagagagagagatctatacctcgaagtgaagatgaagaattagagtctctcgccgacttgggttgtgagaagcgagagaaagcagaggatgatgaatgagcgaagtttgagaatttaaaggagaactttagtgcccttcgactgtggctagggtttctttctcaaccgttagataattagggatctgatccaacggtggatattatgtattgctaagtatgtagcagggctttgtatctcacacgccgtaacgtgcgcatcatcttgttggcgtcttcgttagcatattctttttcctttattgaccaaaatacccttcattttcattttatttaggtttactttttctcttttttttttttctttttttctttaaaaataaattaatagatgaaattgctatgataaataatgaaaaatataatcaacatgacattctctttatttctttttcaatcaaaaatattagttgtttggataaatattattgtagacctattattttttattttgttaaataataaaatagactctatattttccaaaagggtaaattgcgacataaatacctaatgtttcagattttat

SEQ ID NO: 40171 - DNA, 1540 bp, Cannabis sativa
  modified_base (1493)..(1509): a, c, t, g, unknown or other
tatttttataaatatttgtatgtggactgtataaatgtttaatgggccggcccaaagtatttttgtaattttttttccttttttgtatttttttgtttttttcccttgtatttattcctttttttttttacaagtagatacacaaataaattgtatatattcttaaaaaaaaaaatcactcactaatatctgatacaaaaaaaaaaaataattaatatttttttcttttaaacttttctcaaaatatactaataccccttaaattatataacttttacataaacatgtccattttattaggttcgtttcttttattgaaaaaattaactttaaaaattatggtggcatttaataacatgtttattttttaatttttttaattcttaaaagtgaaagtaaattttcttttttcatttttgcaaaaccaaaaaaaaatgttctacaattatttttatttttaaattttaaaaataaaaaataaaaatataatctgttcattctatgtttattttttgttttcatttaaatgagggataataaactgaggtgagagaatgtaagtccaagttcgaggtttatggtctagggtctaggttcgattcggttcgggttcgagtgccgaattgcgtacgggtctaggttcgcatccagagttcatgttttgagtccgtgttcggatccgtgtccaggtcggggccgggatccgagtcaggtctagggtttgggattggggtcgcaattcgagtttaggtctggagttgggatctaggttcgggtccgaagccagggtccaagcctagggccataattaagaaaaaaaaccgtttatttattgttttcaaaagtttcaaaattttgattgccattttaaaaattaaaaagtaaaaaccattttattgaacatgttttttgaaaatattttaatttttttaattaaaaaaccaaaaacttaattaaaaaaagtgatacaactcacattttcaattgatcttttgttttttgtttttttttttttttttgaaaaactttattgaccatgaaacattaaaaagaaattattaaaaatttaaatgaataaaaaaattttaaattcacttaagtaaacctaatttattttaaaaaaatatattcaatttttatgatattctgaaacacatatcttaaacaaaaaattaacaaaaattatataaaataaaataaatattctaaacaaactaaaattttgtcaaaaaaaatcaaacttatttatatttacaagctaaaaaactaaaaatatatattaaaaatccaataagattgtaaattattaaaaaatagaaaactaaaccaaaaaaaaaaatatattatgcttatcaaagtaaatttatgtttttggagaaaaaagatattttttaaaaaaaaaacaattcttaattagtttcaaaattctattttgtttttaatcttaattgctcaatatatatatatatatattctatataaaatgtggctannnnnnnnnnnnnnnnntttatgagaaattattgggtgaatttttttt

SEQ ID NO: 40172 - DNA, 1201 bp, Cannabis sativa
accagtagaaggtattgcagcagaggagtttccaacagttgcagcagtaggggaaaggttgcttgaattggtagccgcctgtgaaagttgtgctctatgaaattgatgaatatacagatcagcaaaggagcaaataacaccagcaggttttggtttcgatccatgaatttccttatttcgttcagtccaaatgcaccacataagacatagaattttttcaaactctgcattctgttgtaccagggctatagatgaaaaaatctcaaagccattcattcgatagagattaggatcaggattaaaaacatggtataaggaccaaactggatgagctcgagtacaatgaaacaatgcatgaccagtggactctctcaagcaattgcaaagagaccaagtagcagtaggagagattttcctatgcatcagattaaccgcagtgggaaacgcatcattaataaccctccaagcaaaaatcttaacttttttgggtatgttaagagaccacattcgattccaccaactgtgattagagttagaagtggaggtatcatgaattttctctaattgcgcagccaactgataacgagacttcacagtataaaaaccagaatcagagtgatgccaaatcaaccgatcctctcttggattaggactaatcgaaatagagaggatacgatcgatatcaatttgtccaaaatgctgccttaataaattaagatcccaacgtctatcaggagatatatagtattcaactgtaaagtccaaatctccactataagtataaggccgaaaagttgtattcccagacagccacggatctgaaacacatttaacagagttccctaagcctattttccatcgcaacccttttatcaaaagctcacgaccatcacagatgctttgccatgtgagagatggcaaagttccctttgaggctttgagaaaagtcccgttcttaaaataacgagctttcaacacacgagctaaaagagagtggggatcatccaatattctccaagcctgtttggctaagagagcttgattgaaatggagaaaagaacggaatcccataccaccttcagctttagattgacaaagcaaattccaatttttccaatgaatcttagacttattagtactagaaccccaccaaaaattagccatcatcgattcaagctggcgacagaacttctttggaaga

SEQ ID NO: 40173 - DNA, 1437 bp, Cannabis sativa
gtaatgatatatgtacgagcattgttattaaatatcagcagtgtttaatattatgcgaataatttattgggctccattcatttattttgttgggtttaaactctcacagttttattttgggcgcacttatattctaggaaaatcttatctatttttctgatgtagaacttgggttgatatcccaacatagttagcgatattctataaaaattattacattaaattatttgagacacatatttaattacactaatagtgatataatatgggtgaatattaaatagtattttattcattatatattttttaaatttaatcacattacaattatatttagtgatatgtcattgtgattaaacttgacaaagaaattctattaattaccataccaaaaaagaagattgttatgctatatatagttatgacatataatatctattgagtaatttttttcatgattattttttaagatatattgtagcattaaaacatatattttgtcactttgtagttttggtgaataaatggttattaacttagtatacctcaagtaaaatataaaaaatttaaagttaatttttgttagaagaaaaaatatatattaaatgaagagtaataataataatatgtgtactaagatattatacacaataatataactatttattaacaaggtcagtccttaggtactacaaaattaaattttagggtcctatataaatatttaaattgttataagtacaataattttaatattttagtgtagtggtaaaaaatttaaaactcttgagagcttcaaaattcaatactccataattacataattaaatatttctaaacaaaaatgtaaaagtaaatgttggaagagatcaattgtgaaaattacactctctacaactatactaaaaattattttattacatttttttattatttaatattttatttatatgtaataatttttttcataattttagggtctgagtgtgcacgggttcgaggcgcacgtctgactcgtctcactttagggtcgaactaattttttctttttcttttttaaaatagtaacatcattgtatgtaatatttaaatgcacatatcattacttgttaaattgatctaacaagacagggattggaattctcatggatagcccattgtatggttttaatgcagtgcatctcctctatattactactcttcttctgccatgaatcatgtgcttgcattcaatattcattatcaaatatatagctctctttattatttctctgttggtttaatttctttttcttcttcttaatagtaataaatcactaaaaaagataaaacctttaaggaagaggagggaccaaacacactaatgaggtcatcacttttttttaaaaacatttttttttagttattatataaaaagatctcaagcatgcatgattg

SEQ ID NO: 40174 - DNA, 2634 bp, Cannabis sativa
taaaaaataataaattttgtattagatcacacttatttcagacccaatcttgtttaaagagcattgtactcatgtataaatgacgatgattcttgaagcaggaagcctcataaagggagttgatatgtagaagttaaggttataatttgataaaatgtatggggttactattgggggtatcaatccaagttttatattggaagaataagcaaaaattgtcttagatataagtgttttaccttctctactagtattgaaactttcagaaaattgtctaaaaataagatcgtgagagcttagcgaacaatattatactaatgtgtgagctaaggtgagttggcgacccgataaggtggaagtacggggcccaacaagtagtatcagagccaaagattgagaatattgagatagtaggttgcaattgcgatgtgtgggaaaagccctcaatgtgataacttcgcaattgaagatttacattgtgccttgtatcgaaagtctacctaatattgaaatagtcagttgatgtgtctcgttgatgattacggtggtacaagatggagatcggtgttaggacctatgttgaaagtcttcctgacaaaagtgatggtcaggcggcaagttctgttggtgatagcagtgacataaagtagtttcgatggacgggaggtcacgagtatgtggtccttagtttgaggggaggattgttggggtatcaacccaagtcccacattagaagaataagtaaaagttgtcttggatataaatgttccaccttctccattagtataagaccttttaggaaggtgtcaaaaacgaaaccatgagggcttaggcccaaaacgaacaatatcataccaatgtgggagtcaaggtgaggtagcggtccaacaaggtggaagaacgagacccaacagttacatctcaaatcaattaggaatgagatgagtagcctattgggactaactctaatacactcttcttacatttgggtctggaaagtatgggtataacgaaaggataatttcaaaaaacacagagtttttaaatttttcacagtttttagatttgatttacataaaataggatcttttcctgtatttttatattgtattcttgtcattttgttgttgatttttcgctactttatatattattttttatgttgttttgatgttgttctcttattactttcatgtagttttcttacatttttatagaataatataaaaatatatataaaaaattttgaactgacttttaaaagaccacaaggtcatacgtgatatttgaaagaatcccacaaggtcaaatcaaacaatttgtgagtgtacacatcggaaattttgtgaattttaaaacaggtcagagacccaaacactggaaagtgacacacattggttaaaaggtttcaaatagacgttaaatgggagatagccaaagctttttgtttgattttgatatatactatgttaaaattgtaagatgaatgagattgtatctcaaaatcagttagctacaaaaagagtagccaactgagactaactctaataattatggaagccaagaagatatgtagaagactagaagcaattccggatcccttaattattcattacttatttgcgaaatttaaatagatattgagtccataaaaatataaatatagcagatctgctagttataataactgggatattgattgatatattttgtgaggcactaatgaataaaattatggattacattctaagattatcccaagaagataagccacaaatatttgtatggaagaacaaaaccaggttatttattatgtggaaaagaatatatatattgaaactaacatattcaataatggtaccaaagggatttggaaattcatttggcacctctcttaggagaaccctgtttgcagagaggcttaatttaacaacaaacttggttcttattgcaggtggagtgtgtgtattatgtgtagtggagattatacaaattctttactcaagggaatgatatatcatatgaatattaagggatataatgccccccaatcacataatctgatatacatatatattataatgtggtgttagagttactaaaaaatgccaaataacaatagtatatagatatatagatttataagtatgatatacactacacatggtagccgtatgtatatttcaaagctttgattcataatttgggtatggccttatattatatgggtttatctatttgtctatctagatcgtaatccaaaagtatcaatcccaatgaagaaggcatcacactcgaaatgtcaagccacacctaacattcacagtgcgcctactttgttgattaaaggattgtctttttagttggagattcttttcagttttccagacagcaattattggtaggattgcgttgggtttaaaatgcatgtagggatactagttgaaagaatctttttaaattctttatttttggtctcaggctctcagctttggagagttagaaagagtatttgaaccaaatggaaattatctttctcatactaaaattttattgtctaatttttctcaaatatctctctcatacacatttatttcaatagggaaatttgattttctatacttagaaaatcaa

SEQ ID NO: 40175 - DNA, 1355 bp, Cannabis sativa
ttttttagtttaaaaggttttggtttaataataatttttttttaattttttaagtatataaaatcaaaattcctttttgtaatgtctatcataataaccacgtattgtaattgttcagtcctataaataggtgaatccccttccatttaaaggaggttgggttgattagaataatgttcacctttgtaattttttttcaaaattttagttgtaattttttcaataaaaaaaacatggtatttaacttttcaaatattttttcaaaagtataccaaatcactttgctcatatttttaattggacctaaattccttagttttgaggtaatccatggatgagaagtttgaaagggtacacaaagtcttctttgggagctcacaattgaagtcattcctataataaataagccctctatagtactagtttgagttgaaataatgagaaaatgtaaaacaaatgaaagggaaattcaaaaaattaagtttagcattttatttttattttgtgtaaaaattttcaattttgtttgttagtcatttaacaccatcatttccttcaaagaaaaatttccttttatattgtaaattttgtatagatatttttataatgatgtatagctttcaagactagtcacatggcaaacaaatttgacaagtattatatattttagaataatggccaagccaactcttctttttaatagaagtaaaaaggtaattttcttgtttacaataatgtacccaaaacaaacaaatatgtttagaaatatatatatatatatatatattgtaaattattaaaagatactaatgatatttaacacttttatcgatattatataattattggtaaaataaattattattaagttttttataatttaataaaatattttttaatgaataccaactgtggaacatcacatataaaaaatgttagatactactagtgcctaatatagcgatactcatatatttatatatataacacttctcattatttattgatggttattaaataaatttaacaataaatattgatttttaaaatattaaaccattagattttgatctaaaaaaaaataataaaagaattttttttatttttatgttttatatagctacttaagtttaaaaatatcaaaatacattttctttatagtatatcaaaaatatatttataaacaaaatatttaaatcaaaatcaacaaattttttaattttttttttttttgcagaaacttttttatatatatatatttataaatttgactaccaactttaataacttattctaataccatctttttttttcaactaaatgtaaaaaatttcttccaaaaatttttcaatgtc

SEQ ID NO: 40176 - DNA, 2480 bp, Cannabis sativa
gacttcggagtgagagtgaggaatagacttttgatttacattttggtttttagtttacttataatttttgactgtttgtttgtgtggactgttggtacctgtgagattttttggtttgttactgggtacttataacgcgatacattagtattgaacactttaaaatacatacataataacaatgctcgttttggattggtgttattcttattcaattaattagtgttgtgatgtctcgcttagaggccaaaacaacaacaataataataactaattatgcaatcatctagactttatattcttagatataaaaaaattattttattttactttttgagaagaataaaagcattaatatttaaataaccaacattaaacatatgatttaaattttaatttaaatatttattggtatgtattatagccgtacccaaaaataaaaataaaaatagataatattatataaaactaaaatatgaagcaacaaatgatcacttgcaagaaacaataacagttctagtaagtagtaaccattgccacaagttggaaatacaatacaaattatactccatctgttttgtcctcaaactaataaattaaatattaagttttacatattttaatataatatttattataaaaaaataactaactatttataactaataacaatgtttgtatcttaaggaaaactatgcttctaagttagagattaatgttacctataaaaacaagattatttcacccccattaatatgaacaaatcatctaataataaaagcttaattattacatatatatttgtctttccaaactaattaattactcccttctcaatccaagaaattaaatttttggttgttaataattaagaagtggtattttagttgtggtggatggatcaaagtggagaaattttcattggtgattgtgagaaaatgaagaacaaagaaattttaagcaaacgagttaaaccgattctatttcgagaagaagaagaagatgatgttaatactcttgctgaagctttcataaagaactttcgtaaccagctaaagattcagcgtgaagaatcattcaaacgtttccatgaaatgataggtcgaggtgtttaacaaagaaaaattatttgattattggattttcttgataatatgatcaataatttctatatttctttttctagtgttgaaaaatatatgtaagtatgcttatcaatttaatctgtttgaaaaagcaactctcaatatcttatattaacaattatcaatttgttaatatttgttgggaaaataatatacattaatttaatataaaagtggaatattttttatgggagaaatactaaaggttgtctagtaatcttatgaagtgtaatattgttattgatgtaatttaatattgggtttcacttattttagtttagtaaaaatattgctatcgggtaccagtacctaacactttttttagtattaggtggtgccctattggttagtaatatttcctaaaagctattttcttaagttatatgagacccgatacttaattacatcagtagtatgataccgaagaggatactaggcttcagcggtatcttttagcaattctcatttaataaaaattataaagaaccgctaatcaattataaaacgtcatatcgtataagtataggcactttagtaccccatagccagactcccactatctttttggggattatttgtatctaacatatgattacattaatgaagtattaatttgctcaaaatgattatgttgtttattttttttaagaaaatgattatgttgtcaaatgagacattgtgacttaaaaatggctaaagattattattaggagaaaatggccttcttgtgggatttgttttagtctcacgtggacaatgcatgtgggaatttattttaacaatttctatctaaatccgatcatatgcactgttttgatgttgtcttagttgtttgagagtcttagctcgaatccattaggagtttaaccaacttgtgtatatctccaataagcttaagcaaagcttaaacttattgagggacacaacttttgtatccatgtctgctgaatttacttcaggaggcactttatctattttgatctgcccttgtgtaacctcgtctttgataaaaattgatactttaactccatgtgtttagtcctatcgtggaatacagagttttgcataggtagatactcccatagccaacacaagtttttgttcttctccaatgtttagaatatattttgctttaaatatgtgattttttgcttcttagattacataggcaaaccatatatttatttaatatatatattttagaaggaacttgatttttctatcacaatgttattaagttgatcacaaactgatgagataggaaattgtattaaggaaccttttttctttcggtcttttctagtaaactaatttgccattaaaagttaccatata

SEQ ID NO: 40177 - DNA, 2928 bp, Cannabis sativa
  modified_base (81)..(89): a, c, t, g, unknown or other
tactgggaaggatgtattccacctttacactgtctttggcttacgtggacataccacatcacactacaagaaatgtcactnnnnnnnnnacatttttgtgctggcaaaagttggttttgcgctggtataatagaatttacttatgatgtgttggcaaaagggggttgacaaatcaatgttggtataaaacttttgccagcataaaatgaaaagcgctggcaaaaatgacttttcccagcgcttaaatgtgctggtaaaagttagattttaaccactacaaatatatgctagtaaaactttaacctttttggcagcgtagtttgcaaatatatgtgctatcacaaatcaatgttggtataaaactcaatatatatgtgctatctcagccctacagattaaaacaagtattttaactcatgcaatacgaaaaatggttactaaaatgacctaaagatctagtatatagggtagttgaagggtgtgaatagccaacggtttgaaaactctaaggtgcgtaaaagatactatagtggtacttaacactacgtaaggtgtcatattaatatgagtgtaattaaaaatatgatgtcacacaatttaaattaataactatagtatgaaatattactaactatttgcaaaataccacacatgccaaatagcattaatggtcatttattagttatgccgtttgaaaatttttaaacatggctttatagctaatagtctcccagtggccaacagaaccttattaaccaacctttttttaatatttgaaaggaaaagaaacttaattaattaactaacgttataaaacttactattaatttagacttaaattaatatagtacaaaagttaccaaactctaattaaagctaataatatactaataatatattatatatagatcacaaagtattattggtgatttcacaaacaaatattcaagccctatcataactctctacatggagttccaacaaataccctctttccaagtccttctcttttcagtttttatgtttattgtggtaagcatactcttgaagagagctcaaacaagcaataactcagcttcaaaactacccccaggtccatggagactaccctttctggggaacttgcaccaacttttgggcccttttcctcatcacacactcagagacttagcccaaaaacatggaccattcatgtacctcaaaataggacaagttccaaccatagtagtttcatcacccgagtatgcgaaagaagtcatgaaaacccatgatatttcttttgcatcaagacccaaaactcttgttgcaaaaacagtgtcatatgattctactgacatttcatttgctccatatggagagtattggagagagcttagaaagatttgcttacaagagcttctaagcccatctagggttaaaactttttatcccattagagaagaggaggcctttaatattgtaaaagatatagcttcaaaagttggctcacctatcaatcttagtaaaatgaccagaagattgtcttatagcatcacatctagggctgcctttggcaacaaaagcaacgatcatgatgaattcatatcaattatggaggaaattgttaaattgtctggagggtttgcgtttggagatgtgtttccatctttgagctttcttgattggtataattttagtaaatttaatcattataaactaagggcagcaataatagtggaaagaatcatcaagttacatacagatcaagacaaggagatcaagtcatcaacaaagaaaagtggagaagaggaagacttggttgatgttcttttgaagtttcataagagtgaagatcatcataagttcacattaactagggacaatcttaaagccatcattttcgtaagctctatatacatcgtcaacttgttgtatatatagatattattatcaatttttgtgaaaattaattaacattcttaattggtgacaaaattttcagaacatatttggagcggggagtgacacatcagcaacaactatagactgggctatggcagaaatgatgagaaatccaagagtgatgaaaaaagctcaagatgaggttagacaagtctttgacgaaaaaggattagtcgatgaatcttcaatcaatgagatgaaatacttaaaatcagttgttaaagaaactctaaggttgcatcctccagttgccatgttaattccaagagaaagtagagaaaagtgtgagattaatggttatgaaatacctacaaaaactcgtataattgtaaatgcatgggcaataggaagagattctaaacattggattgaacctgagagttttgtgccagagagatttgttgatagctctattgatttcaagggaaataattttgagtatatcccatttggttccggaaggagaatatgtcccggtatatcatttggtctcatcaatgttgagcttcctctagcatttttgctataccattttgattggaacctccccaatggattgaaaaatgaacagttggacatgacagagagatttggtattacaatctgtagaaaaaaggatttgtacgtaattccttccaagtatgatccaccttctatggtcatagcacataagatataaagtaaagtaatctgccataggttgctttctcttcttttttattgtggttgaactatgttacttacacttttacatgtctactgaaataaaccaaaaagcatattggagatctagtaactttgtaatattaagtaaatttgtattagctgaaataattatatcaataaattatttactgaatagaagtaatattacatactattttttcaagatagttaggccttgtgtacttatcagtatatattgtaagctctcttacaaacttaataataagacaatctcttgttcaattctctctctctctctct

SEQ ID NO: 40178 - DNA, 2318 bp, Cannabis sativa
ctttaaatgtaaaaatataaaatttttacaaaaatagtactttatgtaattatctccttaataaaactgactattttattatggtcctaattgcataatcgacattatatcacgcatatggttatccacatgtgttaaaatcgacactgtgtgagcaacacttaattatgtaagtccaattaaaatattctaacattttttcacttggactacataattacactaatatgtgctcactaagtaatagtgtcaatacacagaaatctcaagaaacaataatgtctataaaactaattatgcatcatattatatcgacaagatataaatgtaacacataatgagaaatttgatattcatataacacaacgataactactgatctgaatccactcgatcatagcaccgagactaagtcactagctcgcatcaacaagtgtgcacacacaacatcaaagagttatctagaatatacatgtattcaacaaccaatcgaaattactaacatgcctatcatacatgaaaacaatggctcccactgatcaaatacatctttggctcccaacaattcaaataaaaaataacttcttagtacatacgtttaggtaagtcgtgtcagtgtagtcattgacatgttatttgtaagtgcgtgttatgatactaataaagaaaccccgcaactttctcaccacatatggaatattatcactattaatggagcaataatactcctcatgtttcgagagaaagatatgatggtcatatttatcacttaagttcagtaatttcacaaaagaaagtacccttaacactgtaatgaaatatcgcagttataatgtatagttaatgtcttcgtaacacgccacacactcttcctttataaacgaggaagctctaagtgtccacacaacacctaaccacaaaataactcctcttaccattatactacatgtacgagataggaagttgtaggtgttcattttgattcgacacttaattacaaaatacgttctcctagaatcatgaatgcttataagtagagttaataatccatccaacctttctaatcaatatcactaaaaccaactactatatttcacgatgttggtttgtcaattgctaacacatccttggtaccataatgatgataagttaagtaccaatccaacatgcatgtaaccgatatcgcgataggaatgcgtatacttgagtaagctctaggctaccttcaataagtatatatgtgagataatctcaaatttgatctctcgtcattactaatatacatggactttaggccgttcataacacatcacactttagattatttaaagattctcaacgaaatcgaaacattaatcacaactatagttagtcgatgcaaattatgagacaatttgatctaccgttgatctcatcacgaaaaatctaaatatttagaccatataaagtttatcaaggattcttaatctaacatatattatcaaataacgacttatttttgtctccaaaatagatcagaatcataaaatatgagcaatgtactatatgaagtaacagtataaacatattattattcccactattttctcatatattgttgactaataataatgtttcgaattgaccattttcagagttacagtaatcattattgatgtcctacctcaaaatagatttaatcaattgaactcaggtgtccatgttagttaccttctcaaggcttattgttcaataatggtacaaaataaataaattcattattagagattagctatagactttaattcaccttaatttgacaatcaaatagtttattcttaacataaacatgttggaaattattttatcatgattttaatttattattcatgtatattgattataaattataatcttacattctaaatatgaataatcttataataataatcaataaatatatatatataaagttaagaaaaccttacattggttataacaataaataaatacatataaagttaagaaaattttacattggttgcagtggaataataacgactcattccattcagttcttttgacccttgatcctttttgttgcaaagtatgattaagaactgaatctagattctttttctccttcgattgtgttcatcacaatctttctcactatactgagtattaccttaaattatgtgggcaattctcaacaccaagattacatgaatttgagagaaaaaaaccttagagaattcgaaaatacactataaaataaagaataatctgattttttttgacaaaagatgagtgagtcaaaagttgtgaatcaaaggctt

SEQ ID NO: 40179 - DNA, 1285 bp, Cannabis sativa
aagtagtagtaggaatgctactgttatctttactagtacatatcatggcagttggattacaagcataaaccatagagttcttagatgcagccatatctggtttttgagtagagtcagcaagcacatacagcccttctttaagcattcccttgagtagcaccttcccagtttgtttgtccttgacaaagcaatatgttttatgaaattcaagaaacacattattgtcacgagttagttgtgaaacactaaccaaatttttcgtaatcgaaggaacatgaagaacagaatgcagattaaggggtattgaatgaacagatgaaaaagtactggaaccaatgtgagaaattgataatttcttaccgtctcctatagccacaccctctgagccattgtaagggacagcagtgtcaaggttttctgtaccagatttaatgtgatttgtagctccggtgtcgacaaaccatcctgaatcatctccaaagtcaagtaagaaggatgttgcatatgcttgaggatcgtaatcaaactcatgttcggtgacaaaggcatgaggaggattagatgagtttgatggctaagtggaagtgccttgtttagatggagcccagtttttatcgaagcggaagtggcacacaggggcggtgtggccaaacctcaggcacaattgacactgaatcctgttgttctgcatatttccacaaaaagcagctcgattgccattcttgaacccttgtggtggcctgtagggttcgttcttgaacctgaaaatgccacattagcctgtagcttcatgttgagatcagtaacactattatgatgctccagtcgattttcatgcgagagaagaagggcctgcacttcttcaggggtaagagtatcacttcgcgcggtgatgcccgacaccacagagtcgaattccggtctaagaccgttgagtaattgaagaataaaatcttgatcagggattgaggatccaacaatggcaagggagtccgtaattgattgcaaggagtctgtataatcagcaatggagaggccaccttttctgactgtagagagctggcttttgagttgaagaagcttggcctttgattgactggcgaacctttgttcaagcgcacgccaaaccgagtgtgacgatgtaaaattggttacggaagcgaggactccttcagtaatgaggagcgaatccaagagagcaggagctgatcttgacgtttccattgagtaaaagcaggattaggagcaccagtgatcaatgtaacagggggaggaatccctgtga

SEQ ID NO: 40180 - DNA, 1319 bp, Cannabis sativa
ggtaaaataattcccaacatacactgggtcagacaaaggcaaaagtaatccgcaacccttttgaagcacaggtgcaaaggtaccatcgcccctgtcttagtgtgagcaaccgagcaagcacaaaaccctttctctgggttagttgctcggtattttgaagaggacacgtaacactccagtctgcccaagtacccagccttatctaaggccctcatacgtgcctcacttattttggacggagggctcaccaatctggcacctaaagcactttgcctcttgtggggaactgcttcagtaagctcctcggtggcatagtcctccccctcgaccaagacgtcaccctccgcggacactcgctccccggcctcgttataccctctaaaatttggaggttaagccactccttcctcctcagccttggaagggctaccaggacaaacgtcattctgctcctccatttcctggacctcaatgtccccctcatggtcttcctcctccatggcgggcagatcctacttggcacttggcaacgtggcgagctgagccacgtgagggtcaaatgtgttgactttccacattgtctgctttgtgcgggccatcatccttctcctgcaaaggtattgatgtgtgtgtcgtgcaatagtaacggcgggacagctattgggatgccgaagttaccagaacttggactgccaacaggaagggtacactacaagaatgcccacttttgccagcgctatttagtacttgcgccggcaaatgtccacctatgccggcgcagttgttgacttgcgctggcataggtggtcaactttgttttcccacctccacctattgcctgcgcttagtttcactgacaataggtaataatgtcggcgaattccactaattgcgcttgcaaaagttgccacctaaccccccaaaggtgggaaacttttgccaaaaggtgggaaacttttgtcgacgcaattacctgcgccggcaaaattattatttattttttatttattatttacttttgcgggcgtcaaactgcgctagaaaaattcgtggaaaaaagggcggtcaattttccgtcgcagtaaaaaaacgtgcgcgtaaaagtaggtgggacttttttccggcgcacttacgtgcgctggcaaaacaatgaatcgtttgaccattggacacttgcatcaggggttggcttttgccgacgcatttatgtatatcacaagcctgaatgggataggttctttacccttttagaaatggagtgacaaggtggagtaggacacattttcaactttaatttaaattgtgtgttttcatattgt

SEQ ID NO: 40181 - DNA, 2898 bp, Cannabis sativa
tatgtatgttttattaaatttaatggtcttttatatatttatatataactataaaagtgttttaagtttttttttttttttttgaaaatgaaagtcatcatttattaaacgaataactccgttaccaaactcggtaacagctcaaccggaacaatgtccaaattgaaaatgcgatcagggtgagatatagaggcccttacaaaggaatgagccgctacatttgctgatcgttttacaaaataaaaagaaacattacgcaaaatactaagtaaatccttacaatcactaacaactttgtcaaacaatgaaagcataaccacagagctacggataggtatgtttaagtttatatatttatatataattaggtatgtttataaataattaggtgagtgtaaaaaaaaaattgacaaagttgaccaggtcaattcgcctaacccgaacccaccaatccaccaactcgtgaacccaaaaacagttaactcgcaatatgtgaacagcccaggtctgggtacaattttttcaacctgaaacctgcgaactcaaaacccgatcaacctactcgatgttcagtagtcctatcacctatgtctaggcccaaccctatgcaaaccttgtgtgcacataaccaaacactctaaaagtaaataaaaaaaccatccatccaaataaatcatagcataaaaagaaaagttaaagcctactccaagactttaggtcattaaaagttatatcaagtagtagttagataacttaatgttattgaatacttggtttcatataccaatacaaaacactttagacccacaactacatatttttcttctagttcatcaaaacaccttaaatattcaaatttaaataaacaaagcaagatgcaaacttattatcaccataataatagctctattttttcacagctttgaaactggaaatttagggaaaatttctggtgagaatttctgtgctgcagtaagactacccttaaccttcactaatcccctgcattaattttaaaaaaatatatgaaaaatacaaacaaaaaaaaaaaaaattaaaaaataataaataaataaattgagagatgtaattaataattaaaccaacctcatgaaagcaacttggggattcaattttctgagtgcaattctcataaaatcatcttccttgaatgaaaatgttacatctggcttttcttctccttccaattttccttaaatttcaccaaaatcaaagagtgctactttataaaattaaattattttgcaaaatgggattaaaaataatggtttatttcctcattacaaagggagttttttaagtaagaacatcacttttgttactttttagggatatttttttcaattattattagtatttagaaaaattataataaaactttgttttatatgatgatataaattgtagttatagcaagatttccactaatttttgttggaatagaataattgtgtgcaaactaactttttttccgtattttagaaaatccaaatgagtacgtacaactaactgtttgaacactgttttcaatctaaaatttctaaaagactgtccaagtattgaaaattgaaaatgctcgcaccgtaaagacaaaagagtgatggcctaattaagaattttcttatatattgatctcgtttcgctaagcttctttaagtttttttctagcttctaaaatttaacaagttcatttaaaaagactcttaagaagttgttttctaaattaaataatttctaatttattcacatttttaataaatatccaaacttttgaaaatgacttttcattttaaaaaaaagatctttacataattgttatccaaaaaaaaaaacttacaacttttattgcaaacaaaaccttctaaacccaaaataacaacaaaacaataaaaagggttttctcacaaaatataaaaaccaaccaattatacatttatgctataactttatcattcccaaatcaaaaaaaaaaaaaaaaaaaacaaaaaaagaactaacctttgaagacattcctattcttaaaatcaataatataagagctctcatcaaccccaatcttctgcaaaaaccccccaaaaaccatataatcaaaaattaggtcaaaatttccccttttgaaaaaacaataaaattaagtgtaaagataagacctttggtgcaagattgagctggaaaacgagattgactttgttgcagagctgtttaccctcttgggtttcgaaatgttgtttcatcaaatcgaacaaagtctctggctttatctgaagagaggtcgccattgtcttctccgatgagaaatttgagttgttgttgttgttgttgttagtgtagtttaatgaatatgagccttaccgtactggatcattatcatcatgatcctttccctaccctataaagatgggattttttttggttggtttatcattaaattcaatcacaacaactttataagtttatacctacttgcttttattgagttttgttaagattagtatggtgatatggaaaagggaaaagaccatgcaccaatgtcatatgtaattaatttttgttggtacactagtattattaagagtattttttggtataaatagttaagtttaatttcctatgtaaattgatatttaaatttaatttttatggtaataatatttaaattatatttttgaaatttttgtaggtatctgatggttaagtgtcaagttaataatcacgtgagcaaatttagtggatggtagaagaaaaatatcgtgccacgtgtgcactgtgtccagtccaacatggcacttaacacctaaaacggaaagggtaaattactaacaaaatacgagtattaagggttttaccgtccaaatttgagttttggggttaagtgaa

SEQ ID NO: 40182 - DNA, 2700 bp, Cannabis sativa
  modified_base (2643)..(2656): a, c, t, g, unknown or other
gagaaattataactctaatatccacttttgataatgggacccataattaaataaattcataaataactataaaaatatcactaattagtgctaattgctttactaatccatattataaatgcggtcattacatacaaactcagttcatgactgagactaaagcatccataaaaaatttttgaaacagaagtggggaaactgtctaatatactgcatgagagaccttaagagaactttctaagcaatacagaggtaaatcctaaagaaaactgtagtgcaatcactctaagaagttggaaagagttagaagagccagtcaagaaacctattcctgcaccaaagatcaagattgagaatgatggtttagaggaagataagacaactgagaaccttgagaaaaagcagccgccaattaattatgaccaccacatcaaaattcaatctcttcaacaactttaaaagaagaaacttgataagcaatttttgaagtttcttgatattttctagaagcttcacattaacataccttttgtcgaggtacttgaaaaaattttcaggttatgtgaagttcataaaggaaatcttatcaaagaaaaagagattggaagactatgagactgtagcacttactgaggagtgcaatactatccttcaaaagaaactatccccaaagcttaaagatccaggtagttttaatattccatgctttataagaggcttagttaaaacaaaggccttgtgtgattttggggctagtgtgaatttaatgcctctatcagtctttcaaagcataaattaagagaaattcttcctacaactgtctcgttacaaatggaaaatcactctgttacgcatcctaggggaatgattgaggatgtcttggtcaaggcaggtaaattcatctttcctactgatttcattattcttgacatggaggaagatgaaaatatcccaattatactagggaggccattcttagccatagggagagcgatgatcgatatacaaaagagagaattgaagttgcgagtgcaaaatgaagaggaaatatttaatgtttttgcagcaaatgatattcccacttgttgtagagttaatgtggtggatgatggtctgagagtaaaaaggagaaagaagaagacaaagaaacaaccccattctgttcagagtcttaaaaaggccaagcgacctgtagtaaacaaggatgagagaattcaggtggatcacctaaatgagctagttcaaaggctaatggtgagccccaccatggagaactttttcaccgatctgacacagtacatatagtaccaatggctaccaccaccaacagctttgccatactgatgtggcacgtatctcaagtaagttttttctctctatttttatagtcacattagggacaatctaaatttttagtttggcagtagagggacttacttttttaattttttttagttatttctaattttattagtgtttgtttgttaagccattgtttttgtctatattgcattattttttcttgtaaaatgaaaattgctaataactgtgtgcttgttgcaattattttcaagtttaatttaaaaagttctgatgagaaatttttaatatgtttcacaaatacaatagaggcatgatagtttgaattcgatagaacttgcattgtttggcctttgaggtgaaatccttgatgacttatgttttgaaaaataatttaggaaatttctttggaacgtttgtgccattcaagccaacatattttgacctatttattattttcctttgtcctaactatatcatgagctttgaaataagtttgggggaaaattataattagggtaccgtgttttgagaaagcttaaaattattgagagagattgtttttaatatattgcaatccttttcttaaaaaaaagaaaaaagttaggagaataagatagttctgtagtaaaagttaggtgcttagaatgtaaaaatcttatggtatagttgaacctaaatgatattttcatctacctttacctaagcctaatgttataaccttttaaagtccttttgattccaaagcatttgttgttgagattagtagagaagtttaaatgatacaagcatattaaaaaattggtttatgaatttgtttggattaagttgagcatattttgtagagtctaagtattggggtcatttgtaagtcatattatttatttccctttgaactttaaaattgaactttgaggcaggtgtacagaaaatctggttaaaaattgtaattaagattttagagaaaagacattgtagtatatatggcaattataatgaccgcatgattaaaatatggattagtagggaaattagcattacttacctgttcttatgattatatgtgaatatttatgttgtgggctttattttctaaaaatgggcattagagttataatttctcaattctggagattttattaaactttatgggatcgtttggatccctgtataagggcttcgcattgtatttaattataagattaccatgtttgggtgggaccttgtattctacatccctaatttttaatacaatctaacctgtattattatataccgaataaaaagagtgtataaggttgtatttgttgggttttgtgcccnnnnnnnnnnnnnnttcaatataatcagatttacttagtaaagatcagaaatcacttt

SEQ ID NO: 40183 - DNA, 1545 bp, Cannabis sativa
  modified_base (360)..(363): a, c, t, g, unknown or other
aattaaaaagtaaaaacagttttatagaacatgttttggaaatttttttttactttttcacttttaaaaacaaaaaactaattaaaaaagtgttaccaaacgccatcttagtttttacgtattttttcttttttgatatttttaagtaaaaattgaaatttaggtgtataattggatatccaattaaaaaatcgatttgaggtctaattggattggatcagatgatgattttccaaattcaatttctaattagattgaatcggatgagaaaaaaaagttggattagatcgaataacatgtatataacatgtgtatttatataacatgtatataacatgtgtatttatatatatatatatnnnnatatatatatatatatttttaacgtcaactctaaattccttttcagaaaaaaaaaacgtcaactctaaattaataatttagaaaatatttatttttcattaatatattcgttatctatatttgaattttaaaatatgtgtaatttgtataataaaatcatgaggaattaaagtatggttatgtagatgagtttagcaaattattgcgagggctccactgctaattaatgaatgtcctactaagagttcctaaccacaaaatcttaaacatatttgttctcaaaacgtctctctatctcatctaagactaaagtggttcatgcatttgatggtttaattttcaaattattataataataataagagaaattattaaaaatacatttttaatatttacttacaatttatgatttaaagtttctttttataaagatacgcttataaaattttaacattacaaaaatatacttttcttgacaaaaaaaaaataataataactaaaaaataataagaaatcagtctcacgacaattataaatcaaatataaataaactataaaataataaaaaaaaaattagaaaaacaacttgatgacaatataatacaactatacataaattataaaacaaccaaacaacaatttattatttttattgaaaaggtattttgtatataaaaaagttcaaagcgtaaaaatacaagaaaaaaactttgtgttgaagtatttttatagttttttttttttaatttttaatttattatgtaatttttttaataatattaatactactaataataataagagatgggcataagatctgatttaattcactttgttataattgcacttttttttacgtatgttataattacacttgttatacttgatttttcgaaaaattaaaaaagttagtcccacaactttaacaaagacgtacaaatatcaaataagttaaagcatcttatttgagagtcccataacacttttagaaaagtcatgaaaacacatctaaccagccatttggtatcaggaccaacatccaagtgtgcccaacttagagtttatgagctcgcacaagagttttcgttctagagacctcaattcgacaatgaaattaacaaggacttgacttatttaggcataaaatgactagaacttgaacataaagtcaagaatgcacaa

SEQ ID NO: 40184 - DNA, 3413 bp, Cannabis sativa
  modified_base (2642)..(2656): a, c, t, g, unknown or other
atatatatgtaagtacctattatatgtagggttagatattttagttaattaattaattatttgaatataaatctaataaaaaattaatttttattaaaaaagagagaattaaggagagaatagatagaagtatttgagatgattttagaacgtcacatcacccttttatacttctccagggaaaaaaattcccaattttatatcttaatttattaattttttaacaaaaatttatctggaaaaaataattacactcctcacaacttaaatcctggactctgtgtatcgatcactagttacaagaaaaatattaaaaaatgggaattaaattaaaatgataagaatgaaaattttgttgttatcataagaaccaaataaataaaatgtgtagtttccaaaatttatgatggacttgcaaaacttaatagaatttcgaaattaccaaacaacagaagaccggcccaattaaaaactatttcctaactaaatgaaatcaatggactatttcgatagagttagggaaacctatttttgtcacttacagaaattaattaagaattaaatagtagggagaaaaagagatgtgggattggtctaaaagcgtggcaatatggtcaaatcggtaagaagaaaacaaaatatcaagttccatacagaacatggcagcgcgtaggattccttagagtcattgatgacgtggtaaactctgagtagtatgggcatcatgtgatcatcacgtgacttttaatctcaactcatcagatatcatgttgcatacagtttggggcctttgggcgttgtacgcatcgtcatgcccaaaaaaaaaaataaaaaataaatggactcccaacaccatatcattaggtggaagagggagtctttacaatactgtctaactaaccttgttgacactgtacgagtttggaagagatgactaagtacgaaaaataggatccaatacgaaaaatatatacttaaatacgacataatatgataaatctgaatagcactatacgtacatgaatatactagctcaaaaaacacgatacaacaagcacaaaaaaacaccaccagatacattagaaaatcctatgataaaaataatatatttaaattataaataaattaaaataataataaaatttagatattataattttataattaaaattattagaaaaatataaaattaaaattatatattaattaaaaaattgagtattcataagtatttccctaaattttaacaaaggtgtatgatgttacgtggtacgagaatacctgagaccaagttaataaggaatatgtaatgtcattatctcccaagagccacattctatggataggggtaagaataaataatcaccccgtaggtatgttctatgtatggtgggagatagagcgatcgctctctcgcatgagtgaagtgactaccccagagaagtgatggatatgtaccctaagggaggttagacagtcacaacccccgagggtagatcattcactcaagggcaataattattgagattttgtgccctaaataaaacccaatataatcaaatttactaattaataaaagatcagaaatcattttatattgcatcgttcacatgattactttcatgattataggtttaatgtataaattttattaaattctaaacatatagttattcatgattatagttgttatacccaaaattcggctgaaggatacgtgtcaagataaagggaatgtgaatcggtgtaatagctttttatggaataactcattaattacgtaagtattagagtatatttgtaacccgctgactgtaaagtgttaggcgaggaatcaatgtacaaactggtacttagtgtattactgagaaaccatatgtcgctaaatatgaatagcgaggcaccggagaaagtgacacataccaactataaaagtccttagcttgcaatgagcaaactaagtgtaaacgtcggatcggctcaaagaacaagtatgcgagatggccatctcgctatgggaagacttcttatagcttcatccaactcacaagagcgaggctcacaaccctggcgagtgagaagatttctttatatataatcgcgatcgacacaagacatacattgtcgacctcggaaggaagaatggccccagctcgctattgggatcactataatcaagtttctgtcgagacatctccagatttaacttttaaagacgtgtttaatacacgatagttttgactcagtaaaagcgagaaaatcacagctatataatttttaaatcataaaacacatttacactacataatatgtaattaaatcccacaattttagggatgattgctgtaaaattatttcgatcaactttgtaattaactgccactatgtaattataaaaagtggcagacaagctcaaaaaagggacgaaaaaatcttatacaagagaggccctaaagagaaaacacaattaaaaatctgaataagattgactcgggactatgcagaattttaactgcataaccacgtaacaaatcctgtgttcatatattatatttctatagctattattttttctgtgtgaaattattaccgtgaggatcgaatttggttaacgaaaatctgtgttaacagtttggtgcttnnnnnnnnnnnnnnngtgaaaaagctcagaaaaaatcctcccttcttttgaagaaaaacaacatcctacatagctgaaaatccagaaaatgttaacaccccacaggctccgaaagatttaccaatccgcagtccagaaggaccacccgttccaggaggattcaacctgagggtggccctagtacgcggaccacacgttctcggagaactcaacccgacgttggtcctagtacgtggacaacacgctcgaggagaactcagcgtgggaatgatcagaatcccggaacgagggatgaagaactcaatcgtggaggtgccaaatctgtgagagaaagaacttatgaaacggaaagtcgttgcctgagacaccgtctggaagaggcatagcgtaggaatgttgagttagaacgtgaggcagtctcgaccagggcaacacatgggatgaacgctcaaaattaacctgaacctagagtgagaagaccacgagacagacctcgtggctcatgaaccaggagacaggaaaaggcccgggaagaacaacccggggaaaatgagacaccccctgaaaatcaggatgaacaacctgatgggtgacaaccagaaattgatgaatgagaaatccctcatgaaaatgagcatgatcttgggactcaatcgggagaacggagatcacctgctaaaaataacaaatgttcttcccaaacccatagagcgaggactcgtacataccctgatgggagaaacacgacaaaccgctctcgggaggaaagaac

SEQ ID NO: 40185 - DNA, 1755 bp, Cannabis sativa
ttagtattctatacaccactgaaagaaataattaaccaattatataattgagaaattacctttttgcatgaaagtttgatcatataaatatatataagaaagaaaaatactaaaaaaaaaatattgttagtgcttagcactcttctatgtattaatattgctattaatctaattaaatattgaatctcatataatttaatagattaacttttaaggaatcactactcactagctgctaatagcgaagcgagatgtgattaaattgctttgaattatttcattcttttgttgatttatctctactccttaatatatataaataaataaagccaaactttgtgagtccaccatcatttattaagaaacaattaaaataaatgatatttaatgggtctgcctacaaatttgagtctttttcttggtaaaaggcagatatgccaatcctcttaatgattttcttaatatattttggagtgaatgttattttatttaaagacgactatcaattcttttataataattcacctaattccttggtcgattattatatataactaaataattagctagtaattttataatctgattgtgaaattcattatgaatatatatcattattttgccctttaaatcgtgtatttctttcgatcttcttcatgttttttaaatatgtgtctttctacttgttttaggggaaaacaaaaaagataagttgaaaaatatatattttttatatctattaataaaaaaaactcttatattatatttaattaaaatctatccacttttatgagtggattgcttaatatattcttgtcctctacttaagtgtagtacatgatttacattaatataaggggtataatgaggatattatctatgaaagtgaatatatcttaaagaatataaaaataaaagtaaaaattaaaatagataaagtaaagtaagtatacaatacaatttcctccggtttaaaatgatattggtttgatgggctttgatgttcaaataagagtgttttcatgttagctagatgttgcattcaaaggtctatatatatatttatttaataacccttaaaacattacaaatgtagaaattgagcctgtattgatctagacaccataccttattttccacccatcttagcacacctattttggacttgactttcaataatcttggatgctaattctcctcaattgtaattaccaacagataacatctttcaattatctcattattcattattaaagtaactaattaatcattcatctttattaattgagccttaaaatttaataatcacaactaacccaaagcattagagaattaattagcatatatttcaaattaagtacgacccacactacagctccactaaatattgtgacgttttatataataatatatatgaaaggaaatatttttaaagtgttaagcataaggataacatattttgatgggattttgatgaaaatattagattttggataaaaaagtttacaattttattgtcacacggatttttttttttacaaaaatactgtctttttataaattaatcgtaaaacaacaaaacaaaacaattaaaacaacagtagaacaactataaaacaattgtgaaaatttaacacaatatacattataaaacttatacagtatttttgaaaaaaaatttaccccacagtaaaaaaatgaaaaaatttaaaatttcaatacgtgatatagaaaaccttatttttattggtgtag

SEQ ID NO: 40186 - DNA, 4092 bp, Cannabis sativa
  modified_base (3145)..(3145): a, c, t, g, unknown or other
ttctaattcaaacccctatatgaaaccaattattttgaaacttaaaacgaaataaaaccataccttaaactctccttcttcaaggatttcctatcttactactactggagcttagatcgctaagtttcgaattaaaaattgaagaaaatacatataggaggagaatgttttattgagaagcaactagagtgttacacttatgtataagagccatcattccgtgggtataagggtccaatggaggcttgaagtgaggacattatcagggtaatgtataaaagaacgtcagggagagtagtggtatcattaaggtaaagaagattacctggattacttatagtgatacggtaatgatggaaagtgcttatataattgactggatagtcaatatggtatatacggataccactgaattaaacaatgatggaagtgtatactcacctaggatggggaaaaacttacaaattgagatacaataatttaatggacatgtattcgagtaattggtgaatgttagatcacaaagtaggttgtttattaaataatggactacataattgagggtaaaatagattttagagtgattaaccaagtatgaaaataaggatgaatgcaagaaagcaatataatagcatacgaatcatggagtgaaacattaatggtaatgatgggaaaagtgtacgaaagtcttaaatgttgatgaattagtatcatcaacaggagacacactataagttggcatatggtagttcatgccaaggtattgtcagtaaaacagagaatatacttgaggtacatatattcatggatgtgtttggaaagatttttaagacttctacaaaatactgaaatgaactctgagatcaaagaatgatctctgattaattgttatcagtaatgttgcctctactgtaaagattacattaaattcactttataactgtggttaactgtaagtgatcgagaaatttaaaagttgtgtcaattcaaaggaaattaatgcaagttacaataagtagggatgatcaggattcaagttgataataattaaggtggagattcctcatggttaagtgaacaaaatggatgaggaattgtaaaaggctaataaaaggagtaatggaaattgaatataattaacgaaaaaatagaagtaagaaaatacaattatggtctctttagtttaaattctcattgcttaaaaaattaaaaataattacttaggagatttttaaatgataaaagctcataaagtagatgtcaaatgtaaatgtggtaatggaacattggatacggaagtgaaagaggagaatgaatcatacagtaatttttattttggtaagaaataagttgtatttgatgttttgattatcatttgatatgtattgtatgacctaatttatccatgtttattacttttctatttagctatataaataaattagtacataatggtctgttttattctcatttttgttacaatataaattagtacatgtcatttaatttgtatttattttacactatttgaattgttttttttttttatcttatattagttattttattttatttttctacatttatttttaaataaattttattttcattgttagattaagctagtttttgttattattattattttttattttttcaagttttggaagatctcactcatactttttatatatttctttgtataatttgagatatagttttattatttgagatttggatttaaaattttagatttaaatttttattttttggtgtttaaacaaatgttcatattatttgtctgatattgtattattttttcattaattaaaggattgatttgatattgtatttatttttggtcagaattgtttggtttcatatttattttaatttaatttttaaaatatttttgcttcagttcataaccaaggcaaaaaaataaagaaaaaaaaatcagtatttacgtctacggctataacgtcgttacaccaaccgaaataaatactttaaaggtcgcttaaaaatcgaaccaaaaagccatttttgtagtagtgtatatttagtgagtgttactatagtttccattgataatatcaattcaagtgattagccctctttgtgtcagttcgtaattagcttttgtcaaattaccattttagcctcctaattacttctttatcctttagtaccgttaattcactagtgaatataatttagatccaacctaaatttgtacacaactttttagttccagaattataacacttaaagggaaccaatattcaatctgttaagaaagtcaagattctataattgtaaatcatgttccagtcctctacattattagcttcccaacagaagttgtaagaatcatcttttttgagaaattttaacgagtgaatcaaaaaaactaataacatgaacatgagttcaagattactcgagattcaggcctattgatcatcattgtgatatgtattatgtctttatagtaaatgacatgtttgataaagataatttcattacatatcagtctatgtcatatataatctctattatatacaatagcttcacttagatgtcttcctacattagcaattcgaatcgagatttgttatttcgaataacgagcatcagtgaatcgtactatagcaaccgttgatgaaagaatccttaactttaatacgtggctgaatattttatttatggccaataatcttaattttctatacaatacaagccacagcctcatatatgaataacaaattttttatatttgtatatgttgcctcagatttttcccaaaatacatggcaacggctgcatgtggcacgtggatttcaagaacacctcacccatgaaaaattggctaagtcatgaatagataggaaagtgcatcttaaggagtgagcctcagagaggagcataaggcacgcctttattctccgggagctagaaatataacaacgcatctccgagagaagaagagctcgttcgaacagtcatttcacatttaatgcggcatgagagaaacgtatcagaacccccataaaaggatttgacagatggcgtaagcctcttttacggtgattacatgataatcaacgagtctagtgacggctccattatgaagaatcacatnaatcaaggaaggataaagattactttcacctaatcgctaatatacctacaacataggtcatgtatgtcttattgtatatgtaataggaatttgtgtccctaaggggctgacacttaaagacaagtgatccctttctagtgatccttacaaaactctataaataccccaaaaatagatgggaaagggtcgatcgatcgattgaggaatcaaaaggagtaaagaagagagagagagattcaccaagaatattctctgtataagaactctcataaataataaagactcgtgcactacggctcattaatgcctgaaccacgtaaaaatcacctacattaattattccgtagctctcctcattatatcatttcattggttgccaaaaaccttggtcaatattttggtacttttattgagagctgaaggaagcatcgttaaaaagacaatagttaaagagtcagaggaacaatggtggagggtcgaaacaatacatgttagccccgtcctccctaggatgcttaaaacccagaaggcgaagaaagtggcctcacaagtaaatgtgggctctgaggaacgagatgaggcgaatgatgaggaatatgaagaaaacttcgaagggtacgacacatacgacgaaggtagctatattgaattgctggtcctgaggcaaaaggcggctgatgatgaagccgaacttgccacccaaaaagagtagaataagacgatgcaagaggtaatggtcgccatgcaaaaagccatggaaacagcggggatacatatacaccccaaggccatcctagcgcgacccgaggaaacaccagatgaatcctcaccaagtactcagaagcccaagaccagggaaccaagccctataaggtacccttctgaggaaaaccttgcaaaaaatccaacttcgatcccagggagaaagaagaaggcgtaggatccgc

SEQ ID NO: 40187 - DNA, 2311 bp, Cannabis sativa
cacgtacaaatctcttgtgtcaagtgtttttaattttatgcaattatttttatattctgtctattttgttttgtcgctgcaaaactggtctctaccgtaacagaattacattctgcttcttcagacgtatacattttcattttttcgtatatattattgacatttgtaagaactcaatttttcaataaccacataaaaattatttgtgtctttcttactctttctcttttaattatttaatttctttagttctaattatttacaattggttttccaaaaatatcgattaataaatatcagtaactgaattcggttgtagatatttatttatttaaatattaaatatgatttaattaaagatttttaactactataaatagaagcttgatttgagaaatcagaatactttttgacactataattttagaaattaagaggagaaaagaaaaacagttttttctcttaaccgttcttgctcatatgttgagaactcaataagaaaaatatatacattttatcctaatagcccacactatttgttgtgtgtggtggatcgatttagaaaatattggtgtgagtccaattgtattatcctcatgatctggattaagggatacaacatacgagaagtttcaagggatacaacatacgagaagtttcaaggatacgctaatagtcttcaagaggtatatattctaaactagtacgtattttatgttttgatttattatatacacatgtggagatccattaggatatagtacaatgagaattagcaatacgaaactcttccgctgcgtatccgatttattaccataaaaccaacatatagtacaatcccaaaatggtgtttcaatacacccttatctatttcggcacccaaaattttttttaaccatttgttttttatgaacgtgtacttgtagttatttagcaccacctataaatttttagaaaattgtacaagaaaaatcagtcatgcatgtaacaaaatatttaaacattatttttttttgtaaattattcaaaaaaaattgaaaatttacagattgtcctaaataattattgcgtatacaatcatgtaaaataatagactaaacaagtctcctaaatgtcaaaacaaataaaagtgtatcgaacatcctttttagaaagtgtattatagattttcgttattgtttatagatagggatattggcggctaaaccacctgaactttacagtttgttacacttaaccacaaaaactgaatttttggcggctaaactacctaaaccctggttctgttttgctctgcacacctctgtctaaaaatcaccattaggtgccaggtggactgtccacgtgtacacacgtgtacacgtggcaaatttttagtggtctacgtaatattaattttaaagaataattataaacattaaaaaatcaagaaaaagaaattaaaaatatattttttatttttttttctttttccttttcttttttttttctttcttttttccttcttctttcttcttcgtttttctacagaaaacccagccctaactcccagccctctctgaccccccctaacccgaccctccatctccgcccagccccagatttgatgaccggagttggtgactcgcgtgaagacaagcgatacaccatacttgttgtagcactctatggcatccccatctctgatgctcccccaggctcagcaataacaccaattccattatcacacgcttcttccacagcatctttccaagctgatccaaaaaacaacaacaaatatcattttcctcagtaagggtggcaacttacatttttgtcttgtgatttacttactataactatatttagttttaagtttagcactaagatcaatcattacttaaatctttctaattaatctaaacctgttagatgaaaagaatgtgtcattactaaatgggaagaaagcatcactagccaaagatgctcccttgacctcatctcttgctttcttcaaagctatccttaaactctctcgacgatttggctgcccgcttcccattcccagcatacagttgttctgcccaatgacaaaaatacaaaaatttgtgaaggattgaaaatgaattaaacagttggtgactagcaattaattagaactatttacttctctttgtattctctcactcctttttcttttcctttttttttaatcaaaacaaaatcctttggaactcatctttatcatccctaaaatctgggtccacagagggcaaagtatttcattttctcttgttcggatccaaatgaaaagatgagaaatcttttaaaa

SEQ ID NO: 40188 - DNA, 1390 bp, Cannabis sativa
aagaggtgattgaatgcttctgaatttgttgaaccatgtttttgttgctcttgccaaggtcattgggaacaacatgcatttcagattcccacttacctggcttgtcctcattaatatgttgaaatcactaatgtggactcccgggtcaataattctatcatattatgtcatggtaggcatcttgaacccttagggtaaggcaatgccaggatgtgtgaagcaaaaggctcaggttcctcatcagattcgtatcccccgactttcccttggtcattcaacaactagtgaatttgttgttccattgttgtgattcgtgggtcgtttatcacgggatcaagaacattaggattagctggtggaggcgcatttgcattatactggggtgcgtataatccttattgtggaggaatgttatatgtttcctgataaggagcctccctttgtgcataccccctattcaaatggtctctcaaattaggctatcaccttttattcagatggtcctcgagatttgggttccttgcgtcacgtgggggatgttgaggatgttcctcatagtatggaggacgagcattgtcttgaatgctcatagactggctccttgattcagagtggtaactctccccatgaaactaactattctctgttattgaggccctcaaggtgaaggcccttactgggcacacaattgtgttggggtaatttaagatcttgacaagtaactattgtgccatggtgaaagaagttgtacatgttatggtccaatctcccttgatgccagtcccaaaggggcgtagttatgataggatatggtgcatcatttagaccgcccacgtctcctaggttgaggtccctatcgagcatggtatctcgagagttctctcgcctaccttgagggggtcgtggcaagtcttgacttggaaggcaactagaaggtgtctccctttgtcgtgacctccctctcggagctggttgatgtggtggtgcattagcacgtggaggctcaagatgccttattggtgatgggggaaactagattagtgaaggagggttctgaacatgatcttttcccccctcatcaacacaaatatccctaagagtagaagacacttgagatggcgggacaacattattgcatgttgtgctcctcgcctcatgggagcctccccgtgggggatgtgcagcattatcttgagaggcagtaggtccttgtgcatccctcctagtttgttgttgtgtaggaggggtgtattgttcctcctgttctcacaactaggggttgttacccgttgtcattgttgtgatggaagtctgtcactcctcccgccatgggtgttgtgttgggttttatgccctaaattaaactccatttcaatgtaatccattttat

SEQ ID NO: 40189 - DNA, 1698 bp, Cannabis sativa
cctaaatatgcatatacagaaacaatgaatttaaacacgtaaaaattgatatttctcacattgagttgcaacgaaatattatgtctcattctgttctaacattaacattttattcatttctgtctcaaagtttcaaacaagtgtagaacatagatcttttttctcagggtcggccctgaattttagtgggttataggaaaaaaattattttttggtcggcccttatttaaaaaaaaatgtgatatttttcaaaattagtaaaaaaatatatatttttaaaagaaaaaaaaaacattttttgggctcttgggctaggtgggccttaggcatcggcctagcccacctatgtccagagctagacttgtcttttgtttgactgaatctgaatataaaaatgagaagactacaatcttcaacaatttcttagctatcaaattgagcagtgtataacttgtatcttttttctctaaatataaaattgagaagagcacaatcttcaacaatttcttggctatcaaattgagtagtgtggggtaggagtatctccaacccacacaccaaatttgatgttacactatcattaaatttggtgtaaaaaactatttttactccaaccataactaaaaattacactaaaaaattattccttattattacattaatttttgaataaataaaagaaaatattatactaatttactaaaatcttctacattgaattgttgtaatacattttatctctaaaggttcatatatctatgttattgcttttatgtttgatatgtttggagtgcttaattttaatttttaaatgtatctttaagtttgtaatgtctttattatgtcttattgattatactttaataaaatacgtgtactcttgattaataagaatgtgatgtctagtgtatttaattttaattttagtgtgtgtttaaatttgtaatatttttattgtgcgatatttttttttaaaaaaaatgcaagaatgtaataattttttacttaaatcataactgaaaataataataatttattgcatcacatttaaatttacacacaataaattaaaaggtgtttctacaatatacctctttaaataaaagagtcacacatacaacataattgtaatgtacacgactataaaaaaaaattagactaacaaatctcttgaatacctatataaatagggtacatcaatgcaccagaaaaatgtgcattgtaaaattttcttaaattaaattcttaatttcataaatacaattaataataaacataaattaaaaaaataatatatatatatatctatatataaaaatgaatgcattactacagtgccacgacatatatgccgtgcactgcagtcacaaggcaaatatagggtgaaagtgggagtctcctcggagacatattgtgcatcatatattgattatgcaatctctttggagttgctctgatactcaatacacaaaggtttgatctcttggttatatgtggatagaaactatgactctttaaaaaaattaacaaaccgttcaacccgaataaattgcccaacccaaaccgagcgaataaactgacaaaaaatacgactcgaataactttacgaaaaattcaaatcgcgcaatgaatatattgggcggtttgaatattattctaacccacccaaataatccgaataaaccaatttacatattt

SEQ ID NO: 40190 - DNA, 2689 bp, Cannabis sativa
aacttgaagacaattcctaatatgaacaaatacaaaaaatgtaaacagttttgtcatagaacttttagatcggattataattaaattttattttgataaaaaatcaattctggttcctatttgtaccattttagaaaatacatggtccattttatcatttaacaaaacaaaaatttaacaaaacaaaagatctacaaaacaaaagatctaattaataaaagatctaattaataacttctaattaataacttttcacagggtccaaaataatatttacgctatatttatacctattattaattttttgacaaaatacaaatttaaaattttaaattttaaatataacgagtgaaaacataataattaaaatacaagtttaaaatagtataaaccattgaacaaaaacataagtatatttacataaaaaaatttatgtatatagagatattaatcaaacatataataatgatctaaatactaaaatttatacatgtagaaggtaaagccagagaaaacatagaagctaaaagcaagaacaaaggcatcaaatgaatttgaaaagcattaccctaaacagggcaggaaagcctttatttatagttaaaatattacaaccaagacacttaacagaaagttgttaaaactgacagcaataacagaaagaattaacaactaatacaacagaaaatatgactaagtgatatcactagtaattaggttgttaacatcccccctcaaacgaaaaggagtgtctaacatcttgagtttggacctaagatagtgatatctatctgttgagagaggcttgattaaggcattagcaacttggacataccgaatggacagttgcttagttactacaagatccctcacaaagtgtagatcaatttcaatatgttttgaccgagcatgaaacaccgggttagcagcaatggctgctgcactttgattgtcaacccacaatattggacaatgatgagagttgatatgaagctcagacagaagagagaccagccatttgatttcagcaatcgcattagctaaggctctgatttcactttcactactggaccgagccacaacctgctgctttttagcagaccaagacaccaaatttccaccaaaaaacatgacatagccccctgtacttcgtctatcatctacagaggatgcccagtccgcatctgaatagccttctaaacttaaagtagaagctggtgtaagatgtaacccaagatgaatggtgcctttgagatatctcatgagccgtttgcaggcttcccaatgaatgttggtaggtgcatgaatgaattgactcagcttgttaataatgaaagcaacatcaggtcttctgagggtgagatactgtaaagcacccaaagtgcttctgtagagagttgtatcttgaaacggctctccttcagcaagtgatagcttgaccgatgagcttgtgggattaggacatggtttttcaccttccatgttaagtcgaataagcaaattggttatgtatttggtttgtgaaagatacataccagacaaatcatgatgtatctctatgccaagaaagtaatgaactggacctaaatcctttagagaaaaggatttgttgagatcggaaataagctgagagatgagagaagtatttggtccagttattaaaaaatcatcaacatacacaaggagtatgatcagtgtgttacccgacccatatatgaacattgaggtatccgactttgatgcagtgaatccccattccagaagcttgtcttttaatgtttgattctaagcacgaggatcctgctttaagccataaagagctttgtgtagttgacagacatgagatggttttgtagagtcaacaaagccttctggttggctcataaacacagtttcatggagctctccattaaggaaagcattagagacatccagttgtttcacaatccaattaagagacacagctaaagtgagaatgattcttacagatgctggttttactacaggagagaaagtttgctcataatctatgtctggtgtttgtagatatcctttagccacaagtctggattttagtctatcaagaaaaccatctgcatttagcttgattctgtgtatcaatttatttccaatgacagtcatgtgaggagaatatggaaccaaagtccaagtgcctgccttctttagaacatcaaactcttgattcatagcattaaaccacctaggatttttaagggcagtagctgtactcttgggttcaaagggaatgagagactcaggtagagggaatttggtagcactataagcttttggtttccttatcccacttaaggatctagtctgcatattgtgtgttcttatagcaggggcagtagaaggagctactgtgggatggacattaagaggagaaagtggttcagttatatgctcatttgtgggaatgggacatgagggagcagtggcattcaatgatacgggtaagggaatggtatttgtgtcatgaggtgggataggtgagtcatttgtagttggtggtctactatctaatgtgatggtacggggtgttgtggttaatgtgtctatgttggtagtgggaatagtgtttgtcttttgtgatagaataggtggaggtatagtgtcaatgttggtagtagctgtgtctatagttgtgtaacgtcctcgcttcaag

SEQ ID NO: 40191 - DNA, 1297 bp, Cannabis sativa
  modified_base (807)..(807): a, c, t, g, unknown or other
taagcaaatataatggatgatgttaatgttctgaatgaatctattgatgccttgaatggcaagttatgtgttatggagagtagacaggattttgctaatgctactttatactatttgtgtagctttattgatgggaagagagttaaaatgcccgaaacacttaaaactgtcgcccccttatcgcgtggtttgctcacattttcgggggcttcgagccttgtgggattgaaagacattgcagattctttatctggtgtactgaagatggtgttgagaacaagttggagaagtcattgagaaactcaataaggttggtagcaactagaattgggtgttgagtacttatcatttcaagaattatgtagggaatatggattgaggaaatatagtgtgtatagtaagattaatctatgggggagttgttttattgttctaatacgtagttttatgctttttattaacttgctactgcggttttcttccgccacaagtgaggcttgtcaataattttgagtagggatcagtctaagtaagctcggccctgaactttagtgagctatagaaaaaaaaaaacagaattttatttagaaaaaaatatagtatttttaaaattaataaaacaaatatgtaattttaaaaagaaattcttttttgaaggttaggtgggccttaggtacaggcttagtttgcctattcttagggtcgtgcctgagtttacgacagagaaaattacattgtatacatactttatttttttcattttaatttttacctttatttttatatttttaagatatactcactttnatagatgatgtccccattataccattatactcttaggttaatgtaaattatatgctaaacttaagtggaaggtaaagatatattggacaatccactcacaaaatggatacattttaatgaaatataatatgaaagtgtttttgattagtggatacagaaaagagatattccttaacttattcatgtaatttttttcctcatagttgtaagatttattattcaaaaaatgtgttaagagaaaccgaattacataatgtgtgctaagacaggctaggcgtgtacttagggtttaccaaattcagggctaaaaaaaactccttcataaaatacacatatttttatattaattttcgaaaatatcattttttttaaaaaaaaaaattgggcccaattaaaaaatgggtaagttgaaaaatgacacttttattaatcaattaatcaaatttacctctaattttatatttatttggaacatacctctttttatgtg

SEQ ID NO: 40192 - DNA, 1062 bp, Cannabis sativa
cggtaagaatatattattatcccaccttttaacattttatgcaattatgccctatcctgttggaaacatataaagtaatttaaaaagaacaaaattttgtacttgagaattaaataaatatttgtcaaatctataaaggagaattcttttcagtgctatagtcaatttctccgttttgagagattattccaagtgtttaagttgaagctagtcccatatttaataaattattataattggtgagacagaattttaaacagaaatatgtacatatatctatttttaaagctaaatccaaactaaccacagatgtacgatgtttataattttatttttaacactgaatttactattacattttttggaaatttttccagcacagtaaactctttttgaagtataaaagtaaaattattgactgataatatgatttaaataatttacatcacaataattataggtaaaagactaactagtgtcttttcacccgagacgtattaattaaaatactataattaattaaaaatatgaaggtttgaatttatacgtttttatttctgattatttaaacttgaatcaacaatttttgtttatattattcaagtttggattaaatggcattaattttatatagtatttatatatgtgggtatatggtggcagatgttgggagacatttatggtggttttggtggcgtattcagcatgggcatacccatttcaggtggcattccttggttcatatccgaagaaaccactctacattgcagatagtgtagttgatctcttcttcgcaaccgacatcgttttgactttctttgttgcttatattgaccccaccactcatttactcgttcgtcactttaaaaaaattgctaccaggtattttaatctctctctctcctctcttctatctattttctctttttttaaattttattcaagtaagtaaacttatttctacagcagcccctaaattatatatcttttagtaagttggttcttaatttttattagagaattttacattgacgatgtatgaaaattaaataccaaaaataa

SEQ ID NO: 40193 - DNA, 1186 bp, Cannabis sativa
ggttgggtgtgtgagtgtgtgggaaggggaggggatcaaatcactaatgtattaaaaaagatagggaagatataaagaggattaaatttcatctctcggttgtagtggcatatgctaacattttcatttctatttttgtgcaaaccccttatacatgtcatgctctcacaagcattactatttcaacggattatcatattaagtcttaggagtacatatttattttctatttttctatgtatccatggttttcctccaccttaagtgaggatattcatttaatttgggtggggatacaagtgatctctttccctttttcaatataaatatatatatatattaaataaaaaaaaactttaatttgctcatagttattactcatatttttcacctcaaccatcacagctcacaagattgcactatcaaggtctgggaaacatcacaaggaaagctaatacgtgaattgaaggtacttacataataagcattggttttcatcattccactttcgatatctatggtattatagtagttactatatgtgactagttattttctgagttttgtttggtcatattctcttggtaaatataaaaaaggtatgtttttatttttaaataattattattaaaatttcataaaatgaaaactttcaatgcttacgcttttttattcccccctttctctctctctctctatacttttttttatctattttctcccctaattgatgcttacttggctttgtgacattcttcaagggccatggacactgggttaactctcttgctttgagtactgagtatgttctgcgaacaggagcttttgatcacactagtaaaaggtattcatctccggaagaaatgaagaaggtaaatttctcattttggttctcagttctcactctagttggaactgtaattctttttgatctttcaataaaatttcttcttcttctcctcttttctatgtgttgtgacccgggttgagactgggttgtaaaagtttgaaaatcttttatctccttacattatacaaaatagctacccataacctgatcttatctcaaagaatatatgtaaattgctggatagtccttcaaaagaacttctatttcctttgatagggaatttcttctctatcatagataatttttgatttctgaaataaacaagacaaattctct

SEQ ID NO: 40194 - DNA, 1422 bp, Cannabis sativa
  modified_base (34)..(35): a, c, t, g, unknown or other
  modified_base (438)..(439): a, c, t, g, unknown or other
  modified_base (909)..(910): a, c, t, g, unknown or other
aataacctttaactagtttctcatatcgtattcnntatttaaacttgttttctttttaatttttatcattactattctgatcatcaaaactccacttttcctaattcttgttactgatttgtaaataattaaataaatatagtcctcgtgtgatcgacccttacttacgattatactcaaataattggaagtattgcaaataaaaatgtagtaaatttgttgtggcttacgacacgcatcaactatcgaccattaatatcagcctatactcagaacgctaatcatactctagcagtactgatttgatagcatcgatcagtatctgagccaaacatatatctattggtacccaatataactctacatatactgatactgatattgatgtaatctagcaggcttaataaatatgtacgctaaacatgtaaacacatatgnntatcattatactaattttacctcacttctgaattcaggtgtgctagccaacttgaatggaactactgcttgacaatttacaggccccttgagttggaaactctctaatcctgctaaaatattcagaatctagttgaaaatcttccaaccctagttggttgcttaagtgcttgagaaagaaagagataaagaagaaagtttaaatgatttttctctatttttggctaaaaggaaataaactatgtattatctaacttaatcttagataattacaacaacactaaactatttctaacatattctattaaaggacaaaataataaattggaaaaagaccattttgccccttgactataacaaaaggccacttaccacctaggggtatattggtcatttccaaaaccacgaatattcccgacattctcaatgtctatctatattgccccgctaaaactaaaatactaaaatgtnnttctattggccaaacaccgcgttcaaatattgtcgagcacaaaacatgaaaaacgtaaaatttcatatatggcgtaaataatacattctaaatttaaataaatcttcgtataatcataaatcataattaataatctaattttataattaagccctaattatttgctaattccaaacaaagaaaattaagtagtctttacacgtctccatgcacccatgggaagtattaattctgttggccataaagacctcaggtgaagtacctacaccaatcacctcattcatcatggaagtattttcgagtgtggagtatttcattgatcttcaccctctgaatctcatactcttcactttagtggaagagctttcgggttcttcccctatgtctgactgttggccctttccctttgcaaggtcatggggtggtctagagtcattagacttgtgaagaaccccacgaaggagatttatttcccacattgtttgaattgtttcgagtagaattacggatgg

SEQ ID NO: 40195 - DNA, 1856 bp, Cannabis sativa
  modified_base (1387)..(1394): a, c, t, g, unknown or other
tgaaattctctcaatgaaagcaccaattgttagataatagtcctcttcgagacaggacaaatctcttaaaatgcacagtgccaaactccatttgaaccaaagttctatttactcattccatatctcacaataactacacaattacatatttatagtcattcacatcctttttaaattactaataagtccctacactattttatagtgtaacaaaaccaatctggacggtatgttttgtttggatcatttgttcctttgatcattatgcatataaaaggctagtcatttatgttaaaatgagtgtataatattaattattgtcttttctctttgttttgaatcttttattggatatgttatttcgaatttttctatggaattaggggtttagccgttataattgataatttgataggacttgcgtttaaaacccacttatattattattattattattattataattttttttagttattttaattataattttttttagttattgtgtattgtatggaagttctattgaatttatatgttaatatttttggaactgattactttaattagaactactgattttgagttattatatgttatttatttttaatcaatttgttgtagaactgattctgttttagtttatatatcagtgttttttggaattgattcactcttattttattattttttaattataaccgatttttatgttattgtgtgttatttgttgttagtcattttattgtgaaaccagttttatttaaatttatatcacagttggttttttatataagtcattttagaaagaaaaaaaaattgaattatttattttaaaaactggttttcaatttaattaattcaaggaactagtttataatttagttatttcaggaactgatattttatttagttaattcaagtaaccggtttttgatttatttattttattttaactagtttttgtatgtaagtttttatcttaatttctttacgaaactagtttctataactagttgataaatataactgtcttcgttatattatattttgagttattgtgtgttattatttattttatttattttgttatggaactagttctgtttatatttatgccttagtatttttggaattgttcccaccttaatttttttaaaaaaattataaccgattttatgaggtattatgtgttattcgtttttactcattttgttgcggaactagttttatttttaatttatattttagtgttttaggaactgatttcctttttgttttttaattgtaattggtttgagttattgcgtataacttatttttattcattatgttatagatccatttctattttaattatattcagtttgagttattttgtgttatnnnnnnnnattcattataacattgttatagaaggagttctactttaattataactggtttgagttattttgtgtttatttttattcattatgttataaaattggtttaagttattctgtgttattagtttttatttattatgttatagaatcggttctatttttaattatagtcgatttgaattattgcgtgtttcttatttttattcattatgttataaaattggttttattgtaatttatccacagtttgagttaaatagtgttatttatttatattcattatgttataaaatcggttatatttttatttaaatatgaaacatctacttcttgtgatttttccagtgatttttctgacaacaatgatttttttggtgacaataactttttcgtcgactttttcggcgacaataacttttctgttgacttttgcagtatcggtggcttttttggcgccggtgacttttc

SEQ ID NO: 40196 - DNA, 2324 bp, Cannabis sativa
tggacgaatgtctgaatttttccacataatctttagcaaatatggcagtttgcttcccattagatcttgtactgccatgtaaagatttatttctactcgaccatatggcccataaagtgcaaatgatttgctcaaaatccctttgtgaatgtagagtagaaaggtagaaaatataatcaccattaaacatttgttgcgccttggtagagtccatgatgaaaccaacatgtttccatacagcctttgcgtgagggcagctaaagagagcatgcccgatggactcccaagcacaagagcacatcgaacaagcagctgaatcaagtactttccgcttatgcaatgctgcagcagttgggagagcattatacataatcttccatgcaaatttttttatcttggacggtaatgataagtgctaaaaggttttccaccaagaactatgtaaatttgaagtgaaagaattttgttgctcatccaaagttgcagccaaatgaaatccggacttcaaagtgtactcatccgatgttgtgtggtgccatattagacggtcagctgtaggaaaaaaactcaaaggaatggagattattctatcaatgtcaatctgactgaagtagttgtgaagaacaataatgttccattccctttgatctgtgatgaagctagcaaccggctgggatgggggccccgtgtaagtaattggacgaaactccatataacccggaatccatttttcaagaccactttgtatgtgaaagccatttcctaccttatatcgaaggcctttagcaagtagttcccgtccccaatgtatgctttgccatgtaagagatggggaattaccaagtcttgcttctaaaaaagagttgcgaggaaagtatcggctcttaagaattctgctaaaaaaggaagagggcatatcaaagattctccaagcttgttttgcaagtagcgcttgattgtaatggacgaaagaacgaaaccctattcctccttcaaatttcgacttgcaaagtaagttccatcttttccaatgtattttagagccatccttgtttgaaccccaccaaaagtttgccatcatgctttcaaggtgttgacaaaaggtctttgttaatcgaaagcagctcattgcataagttggtatagattgaaccactgccttcaacagaacctctttaccaccaactgaaaacaatttttcattccaagcatgcatcaacttccaaatttgttctttgatgtggctgaacaaagccttcttgtcacgacccgaataagaaggaaacccaaggtatcttcatggcactcactaattggcatgtgaagtggtttgctgaaaaaataattgcgctgccattggagtggaagatgtagattatcagtaattcaagcatattgtttgacatattagcgatgttggatagtttttccttcaaagtttgttgaatttattgcatctgacgtcttagcaattgtgtttgcctttgttaggagacatttttttttttcagtgatttaggatcattgttaaaagatgtaacaagcatgttatctggatttcccaaagtgtctctgatctatatatatcagtcggctaatgtagctgcatatgaattagttgtgcatgctcttcggataggtaaacaacttgtttgactagagactgtctatttttattatttaaaatatatagtcctttagcctgtatgacattatttaattattaatgatattggtcattgcttgaaaaataaaatataactgtttttcccaaaataaaaattaaataaataaacaaaaataaataaataaatctactcttggttttttttttttttttaattttcttatttaaaataaacaaacaaacaaaagattttttttttcttttattactagtaattttaataaattactgttttttttttcttttactactagtaattttaataaattactgtttttctatattatatcgttgaccagaaatttgtagacatccgttaatatttgctttgctttgaccggttatttagtttggatcaaaattaaaatttggattatggattttattttaattttaaatccaacctttatgtttattattacacgcgaccaagaatgattcacggtaattgtttgaactttattgtaacaaacctattattttaaattaataaaaaattgaaaaaattatttctttatcataatatttatgttaataaaatgaaatgagccctttcaaaaaaaaaaaaaaaaaaaaatctgacaactattgagaaaataaattgaactataattttaattataattggatcgtaatt

SEQ ID NO: 40197 - DNA, 1522 bp, Cannabis sativa
ttttcaaaatcggtaaaaaaaaaagtatagttttaaaagaggaaaaaaaaaatttgggcccctgggctgggtgggccctaggcacaggcctagcttgcctatgcccagggctgggcctggtagggcacctcgagatcctataatagcgtaaactaggtatacgaccactccatagttctacaggtgtcttggagatctaggattttctggaggtgatcgatgtccatgttgatttcagatttaaaatttttggaagaaaccattttgggaaggtctcatgtagagatcgtatttttgaaaaaagaaatatttattttatatattttttttatttttgtacttggaggtaaaaaaaaaataaagtttagatgtaataaaagtataaggaaaaaaaccgcttattttatcaattcttttatatttatatattaaccccttcaaagttattttattacattttggccccttccacggtttctgcacatattgtaagtttctcaatctttatatttaaatatgcgcacacataataatgaaaagttattatgatggagctatttaagaaccattaattaattggccaattagctttgttgtataggataaataattttcttatatttcttgaaagaagaatctattacttgtaattaatttattaattagataagggctatgtagtctcacatgtccactttattatgttgaattattttctcgccctgattatatgctcattaattttaattatgttagcttatgttttcaatcaatttgaaatataaatatgaatgtaatgaatatatataaatatatatatataataactattaactagtcaagaattttgcactctttgattgtactttactcattaaaaagaagccgcaatatgccaaaatatatttcacgggtaaagaatatggtggttaagtgggaccaatatatacaataatcagtaattgaccgaaaaccattattttagaaagtattttcctcaccacacatgcagtacttatgtgcataaatataatgaagggaatttataattaatatatacttagatcagctggctccatgtcatctctacagatgattctgctcaaaatttattacaatgctctaaatatttatggtaattttaggaacatacaaaaatatatagtagaatgtaattgaacgtacgtgcatgcacgcacgtgccgtatatgtaagtatagatactgtcccctttgtattgctacacttgtttacgtgatgacactggaagtgaaaaataattatcatcatgaacaggtaatggtatacataagaacgtataacatagctcggttatagtaacaaatgtacgacaatgataataatcttaaaaggattttattcacgcatatatatatattaattatttaatatttatatagacgagaagtttttgttattatttccatttttattagttggtgtttttacaattttactagcacttcgtttctttttctttttactaacaaaactgtttttt

SEQ ID NO: 40198 - DNA, 1463 bp, Cannabis sativa
ataaaattagcccaccacttaatccttgggcctccactacaaacacaccttcaaagcccaatagctggcccaccacagtaacacggtttttatcacattttgtctcacataaaataagaaaattgggtttcttttgagaaattaccacttttaggaaatgaatagctcgttggttcccaagctcccaggtccagcttagattcattaattcttggcgggcctggacaccaaaaacccgcaccaaatgagttttttggaccctccaacactactgggcccatatcatgaccatcttttattccactatcctcctttgaaaaagtcttccttcttttactctccaaaatgactaattcatcctcctcattaatttctttttcatttgcttctgtttgaccacgtgtaatacatggagatatatccatcaaattgtcaccatcacttgccgtatatatatatttgatgatataacattaactccacccataatttctgaatcaacaattatctttccttttccatttcgtatcaattcctcatcctcctccatagattggtcattgacattactatcttgctccctcaacccacctcctccctgagaacccgaggaacccccagcagacgacgaactatcacagagccattttgctctgatagtatgctgacgacggtgtcgtgactctgctttcatctcaagcccataatgctttgtaatcaagtgtgcaggggttgtaaaatttgtgtcacataatttctctgagtgccccagtaccccacgaatgaaacaaaatgttgaaagatcttcatacttaaattgtgcatagcactctgttccattctgcaattgcaacttcttcctgcgtttcaatgggagatccacccggactgtaactctcacacgaaagtaatccctccacaaccccataaaattatttttatctaattccataaaggaaccaatatagtttcccaattgtttcaccacattctcagatttaaagccagcaactaatccatgtatctgcacccagaaatctagcttgttgaatatcaccttccttggatcatcaccctctttgagccgtgcaaatatcaaagggaccctgtcaaatgtccaagggctgccttcgatcaccctcgccacatcgaactcatggaaaaacttgaacaggtaaaggttaggatcaagctccttcacacctagtcccctgccaggcctccacagggacgccattttatgttgcattgccaaaaaatccaacgatcggtctgtcaagaaatgaccaataatacaccatcaggcatcaaactcaggaagctcttgatctccattatcgaataataagccttcatcttcctcatcatctaacgagatctgcgcataccctcttcttacttctttatccattatgagacaacaatatataccttatatctcacaaccactaaccaggatcaac

SEQ ID NO: 40199 - DNA, 1752 bp, Cannabis sativa
ttgtaattggatcgatcgattctcattggactggattgatttatgcacaccctatctctctctatatataaatgaatgtgtcctttttttgaacaacttaaagaaaaaaaaaatatacacaatacccgaggaagagttgtcaaagtagaagtgtatattgtcaagaaaaaattttggggtgttaattattaataattattatataatttaatttttttacatatttaatatatacaaaaatagataattttcttttggaaccttcttgtttataaatgaatgtgtccttttttgagcatcttagaaaaaataaataagatattcttttcttgtctttgtcttgtagttaaaaagaatacttactttgcgtaagaaaaaaaaaaaagaacacttactttttttataaaattcttattttattactgtttagaaaagaaaaaaaacccttgttttgtagctatacctatcaaattttagttctatggagaaattacttcttcttttgtttttaattttatccttgttttttttttctttttcaaacttttaaattttactaaaatataattacaagtcacctctaatttctctaaaaatataaactctttttttttctctcttttttgttttattttctttaatttaaataaaacaaaaaaatcattacaagtttttgtaaattgttatgctgaacaaaactttttttaaataaactcaaaacttctattttttttttccagcaaaaatacccctaatggcatgagaagaggcatcaaggaaattttgggtattgatactcctgatggtgttataaattatctgggtctaccccttttcagatctagacaaaaggattctgactttaacttcatacttgacaacctcacttctaaactgcaaggctggaaggcaaagactttgtcaaaggcgggacgggctacccttataaaatcagtggggttgtctctacctatatatgctatgcaaactacaaaactctctaatcgcctcattaatataatcgatggtttggttcgagatttttagtggggcttcgagaaaggaaaccatggccttcatcttagagcttgggataaactttgtcttcctaaatctcttaatggactaggatttcgaaaaacaaaagaaatgaacctcacttttttggccaagtgggggtggaaaattctgaatgggtgtcaatcgttatgatgcaagattttggaagcaaagtacttaaatgggaaggattttctcagttgcagatataaagactcttattcttgattttggaaaaatgttgtgaaagccaatgcaattttgagaaaaggggcttgtaaattggtggcaaatggcagagatactagtatttggagggatccttggattcctcattgtagaggtttcatcccgaaaccaaatggtaatgtgttaccagataatcagtgtgtggatgatctcctgctgacaagtggggattgggattgccataagctaaaccgtcttttcgttttgggagactgtttctgcaatcataaaaggtggtaggtcctcgggacagggtaaagataagtagatttggaccttggaaagtaatgggcagttctcgtgtaaattggcttacctgaccaggccttggaaagggctcctcattgtactgttgctccaacgctttgaaataaactttggaataacaaaatcttagagcgtcacaaagttctatgatggtgtatcctttctaatgcgctccct

SEQ ID NO: 40200 - DNA, 1853 bp, Cannabis sativa
aatttgaaagatacatttatcattatttttattagttttaacttaatatttattcaagccctcacttaaatttctggcttcgtcactgtaagcaggtcaagtctagccattcatggacatgccgaagtcgattaattatggcacctctattgtcgggaaacgacctcttcaccaaagacgatagacgaagactgattggacaaagcagactgtccaacaagcagtaagagaaaatctaaggcaacgatgaactttttctttttgatttttttaaatgaagaagaagaatttagatcgaagaaaaattagagaaaaattacattttgttttattataaatttatttttaatatttttttataataattaataatccacaatcgttaacgaattgacacgtaatttaacagagacttaacttatatactcatataaaataatataaatttaattaagaatattccattaaataatggtatgttctcttaaagttaatagaaaaattaaaaaaaaaataacgttaaaccaaaaataaaaacgttaaaaaaaaagtcacttaataatttctcacaaaccaagaattctgttatatagctacattttatatagaatagatatatatatatatgatattttttaagtttgactaatttatatggtattttttttttaagtatttttatagtatttgatatatatgttatatatgtgtaaattaagttttcaaatctaatatttttatttgtttaggcagttttatttgttactgttgttggaaaagtcgtctgagtttgctgccggcactggaaaaatcaccaaagtagctatccgtactgaaaaagtcgtcggagttacagttgatgacggaaaagtcgtttgaattggcattaatgaagaagccgatttcttgatgaaaaactactatcttggtgattttttcagcgactatgccaattccaacgacttttccgacaccggcagctactccggcgaattttttagcaccgacagcaaacttcgaaaaagtcgtcggaatttgcatagctgccggaaaaatcaccaagaaaactagtttcttggcatagttgacagcgaaccagtttcttgatgaagaaaccagttttttagtaattttttctgtaattttctgacgacaatgccaattctgacgacttttctggctccgacagcaactccgacgacttttttgacaccagcatctactctagcgatttttctggtgacgacagcaaactcaagaaaagtcgttggaattggtattatcgtgagaaaaatcactaagaaacttggtttctttaacaagaaatatttcttgatgaagaaaccagtttcttggtagtttttccggtgatttttctggcgataatgtaaattccaataactttttcggcgccagtaacaactccggcgatcactatagttttaattgttttttttttaaaaaaataaatatgaaagaaattttagtattttttttttatatagtaattcaatctcatcccatatatgttaagtttttattttaaataccatattttttttatttagtttccttatcatatttatctaaactagctttatttttcccatatttatgtaaatacccaattattttattattaaatagttatgattaactgtgtatccccaatttcaaacctaaaactttataatcacttttaattagtgacaactttttagtcacaacaaaaaaaaaaaattatgatttaatatgacttttagtcacaacaaaaaaattacttgtgactaaacataatatagtatttagttacaagatactactaatttagttttagtcacaacaagtattgt

SEQ ID NO: 40201 - DNA, 2149 bp, Cannabis sativa
aactgtcggctatagtcgagaatgtatgttacagtttaaaattgttgcctatactaaaggtgacagttttagaatgtggcttataggatagtcgacagtattaaactgttgctatagtggatttgcccaaaaaaatcattgcctttattctcctcaaaaccaatatgggatttttatttggccttaagatctctgaatagtcgagatctatgacgatatgtgaaataaaaaaatctcaaaaatacataaatctcaaaataaaaaaaaaataataaagaagttacaagaaagagtggatgagagagagaagactgatcggtgctcgtggtggctcgtggtcgcgcatctgtctttggacgagagagagattgagagagagagagagaggagtgtcagtggttctcgtggtggagctcgtggccgtggccgaccatggtggagcttgaacgagattttatctatggtggacctcgtgaaagagaaagtaagggagcgagagacgagagacgagagacgagtgatggagctcgtggaccgtcgtctatgagaaaaagagagggagaactctataaagagagagagagaccgacatttaaaaaatgtatagatttgaaaaaaaaaatagatttaaaatacgttatattggagcgagaaaaaacgcattatttgaaaaaatttagatttgaactaattgctaacggttaaaaaccgaggtctataacactataggcaacaattttaaacgaaggcctatactatagcccacggtttttaaccgttagtaattctctattaaaaaatttgcaatttttaaggcacgcttaaaaaccttaggaaattacactataggcaacggttttaaacggtggcctatagtataggccacgatttttaaccgtcggcagttctcctttaaaaaaaaaaaaattgtaatttttaaagcacgcttagaaaccgtcgagaatatatcacgagtatttaaaattgtgagaaatacccaatttttcttgacaattttaaacactcacttaattttacccatgttccccccgaaaaaagtatttttaagaccgatagtagtttttgtagtagtaattgggcctgaaagtcgagcattagctcatgcaactacataaattttataaataaagttattgttgaatgagctgaagtttcatttagttgcgcgttacgtggtgtaacaatgtaggagcaagtgcactagcttcaaatcatgtatttcataaccaaacataatacatagaaatcgatattcattatatgcgagagtgagatagtactacaaaagatgttggaggtaaggtacatcccttctcatgatcatttaatttagttgattgtcttacaaaaggaatgtcacactctcactttgagtttctagaggatgttaagaatcaaccaactcagcaagcctcatcagcataccaagtcagcaccaatgctatcctaagaatcccctacattggttttagaatattgtttcacgattataataaaaatagtatagagtttgttgtgcaataggtcgtgtggttccaacaatttttgatgtgatcattaggagattatagttataatatttttcttgttttctgtgtaaaaatcttcatctataaatgaaccatattcaccatatcattatttaccttcatactctctattttatcttaattaccattaaaaatagatattaatagcattgatttgcataacataagtattatggcatatatatatcgatccctaataatttaaaataataattggcacacatgtaaaattgctctttatatattttgaaattggacactagctatatatactcactcatgtgtatttgttttcttatttatcatgactcattggatatttgaaagtgcactcattaatggtcatgacacttatattttggaaagggcaagaagcaactggttattattaataataataatgatgtatttgataattaatgttattattttcgaagacaatcaactgaaagaaaggtgcccttttcttgaatatacaataataatttagcaaagagactcttgccataacaattatgagggtgtgtatagtatagcattgtttttatcgagtacaattgtgtttagtaatttttaga

SEQ ID NO: 40202 - DNA, 1274 bp, Cannabis sativa
aaaagcaagactgtaaataaatacataaaaaaatgattaatgaaagaatgtaccataatctatctctactagggtgtcgtttaattatgatactggctatatagtaatgaactaaaatataacttagaagatgataggattttaggtgtttgaccatcttacacaccctgacccaagatcattgaaattcatatttatatatctgttctattttgaggtggtcagttttggaaatatctaaacacaatttattacatatccatttataaattccttgcaaatagtgcatttatttttgagctaatttgaggtgtgtgattttattttataggtgtatcaaagagatgaaggtttctatactttattttggggtatttcataattttctgaatatttagacagttggaacaaaaataagattcctacgactaagaaatcctacaaggaacatacatggcaaaatatcaaaacacaacatatgaaaaaatccagaaagtcattgttatagttgttacatgggtaagtaagtcagaggacgtcgtcgtgtctgtcagccgtcgttagagatggaagtgagtcgccgtcagagatcggagtcagccgtcgtcagagtgagagagaaaacgggagtaaacataaaggagtcgaagtttcaaactgaagaaatcgggaatgaattttttagggatttaggttttttctttttaatatctgaaatcgggtcgggttgagcccaacccgaagtaatatgtgtcgggccgggccaggcctagagcccgataaaaactcgagataatagtgccaaagtcgccccgtcgggctgggggcccaactcggcccgtgaaaatggcccaaattgccattcctaccacctccattaacaacttgatcaacaataactcgataaagaacatgataaagggcacgatatcacgtgaagaaatatagagacaaaatgaagggataagggaggatagaaggctgaacaaaggaagacacaaaggaaaggactagaagaagacaaggaaaacaagggagatagtaggaaaggataaggcagggtagagagcacagaagcaaaggtttagagcggaaagaatggataaggaagggggtaaaaaaatgaaaaggtttgggcataagagaaaaacagtagatgatcacttttctgtcccatatagacatatggtgcaaatacttaccatattcactaattgaaattatgggcttgtttggaacgccgtatcaggtcgtattatattaaattgtatttt

SEQ ID NO: 40203 - DNA, 2142 bp, Cannabis sativa
catttgaatcacatgggtaagtctagaaccttttacttagtgggataaatatttgagataaatagaataccgggtttaagcggggttgtaattttggaccattttacccctaggctgaatattgtttatgttttatgtgcaagggtatgttaggtatttggtaagaagggtatgtggctgaatatttgggtgacacctagtctttttatttttatttttagcctagtttaattaatttaggcgtttatcaagttgaagaaaaatgtcaatacaagaaaaaaagtagaataacactagaacgtctctttctttctttgttcggcttccacaagaccagaaggaaacccaatctagcttctatttttctggatttctacaagaatttaagtgttctcaagttgaggtattccctagtagctcttaccttgtaattatttatgttttaattgattatgtttaagtaattttgaattgaagtggctgtttaggttaggttcgccctagggtgttttcagaagctgttttaagttgaatttaactaatttttgttggattttctggtttgtttgtggaatgggcaagtttgagattgtgagctcatacttggctcattaatggtagaattggattcatgagttgtatgatgcttttactgcttggaatatattgtttgaggttgttataggtgttgtggaaggtttggtaagttttggatacgaatcggacaagggtttgaatttgtttgggttacctggtgcagactggttaaccggtttcacaggccctgtgaaaccggttaaccagatcgaaaccggtttcccaaattttttgtgttgtcgattcatgttatttctagtgtcttagttggttatttccttggtttttggggtattgttttaatagtgaacaatagtagaacccttagttggggtttgggattcccatattagggttttgtaatgttatttacccatatgcgtgaatgtggcttagggcatccatccagcacgaggttttctgttcagatcgaccaactcgcttgaatttgaaaacgaggcaagaatagtatcaaacgtattgtatatgcgaatgtatgtatgtgtggtatatatacatgctttgttgtgattgtatatgatttgggtggtatcataacggcgcaaccattgtgttggttcatcaatacaggtatcgcactggttaagagtggtactcaccctaaaaagtattaattgacgctatcatagcggcacaaccattgtgtcggttcaacagtacatgtatcgtacaggttaagagtgatatcatggccaattatacttttgggtagtatttatgctatcatagcggtgcgaacatagtgccggtcccgcagtgcgatcatagtgctggtagtgggtgatatcatggacagtagtaccaattgttaagaatgttcttaagtcatctggtaagtcttgtggataggtgtatgggcgcctagacataagtcgtgactatatgatttgttgtatgcttttcagtctgagtctgttgactcacatatgctacttccatgtgtaggtaagggaaaggcaaaagctgaacatgagtgagcaccggtcttggatgaagattgtacatgtcagggcaatgcggcctggagtgttcggtctcagtacatctggggtttttattttgtagtcacggtgcgacctgacttttgtatttggaatattttgtaaaaagttttactacgggatcccgacttatgtaaataactctataaaagtttattaagtttaatagttgaatcaaaagttttaatttaacaagattttcaaggaaaaccctttgattagaaaaggaagcatgttaattggaaaatcactgtagcgcgcctaatcatcaaggcgttacactacatgtcctcaatcttggcttacgtggacatgccacgtgaggaagaaaaaaattgggataatattttctccttaagtttttgttcaaacatctggtcggaagggacttcctcattctcgtcttgtttgtagtagcctctgtcaaacaaccttctctagccaagtattagctttttgcatggcatgcttttagatcttctctctccatatatgccccatcttctcttctttgacatctctt

SEQ ID NO: 40204 - DNA, 2157 bp, Cannabis sativa
atagaagagaaaatgctaactttaaagacctgaaacataggcttaatataacctaacaaaaattaaaggagagaaagatgaggaacttactcactgtatgaagctttggtgttgttcagatgaagctattcgaatccttctgctagaatcacatgacaaattcgagagagaaaactcttttttgctctgaagttgcttagtgagaaaagtggtaaaagtaatttatgaaaaatttcaaccctatttttaagccaacttgtgaaagggtataatcaattcaaaacctcagacgcttcgattttcccccaaaaattaaatattgggaaatcaaaaccaatcaagtgtcaaagaagggtaaccgtcaaaagcgtgcaaaagaaaggcgtgtctcgaagtacgaattaataagagcattaattagcataaaactgaagagactcctagtcagaatcacattgaatcacgaacaaacgcattcaacacgtgtcacccactcagaagtgtgatcggctcaggtgaagtctacacgcaacttcggaagtcccgtacaaactaggggcagatgttatcccattttttgcactatgacgtggcaacacatgctggtgacacgtggacctgattccccatatatgtccgagagatgctgcgagcaagccgtagcatatacctacacggacgatgtcttctccgccgagcagtggataatccgggcagcgcatcaacacttagcaattccagaatttaaatcgtgaagcacaaaagcaatccctataaatttgggatcgaatcaccaagatatggaaatttgtccaaataccacaatctgtgtattctaaatatgtaatatatgttcttactgattatagatattgtaaggaaaaggaaaatcttccctcaagcatgtatccctataaatagtgatccattctcactggtaaaggggtcgaaagaattactttagagagatctaagagagcatactcagagatttcattgtaagagctttaagagaggaaaaattgtattctttgttcttgagttaatacaaatcaatgggagtaggctattgtcaaactgaatggggccgaacctctttaaaaaccttgtgttctttacttatttgcttatattatacgtaaactgtatttcttattgcttattattaagactcattgtcgttggctaaaagcgagatcaacactcatgtttaaaaaagtccaacaagaatttaataacaatacattatagtccaacacatcacagtacgactaaattaaaaattcatttttaaccttggtagttgtaagtgtttctgttgtgccccttggcaccgcactcgccacaatttcgtggtatcataatcctttcaccattacaaacagtttggtttgacttaattcttccaaccttttgcttcttaggtcgccctactggttgcttctaaacaggcactccaactatcatgttctctatatcatcaggaaattcctactcatcctcatcaccaactggcataatacttcgttgctgagctgcagcacatgcatgaggacaaggaaactttaagcactagtacaagctccaagaccaagtctgttcctgcaagtacactatgccaccggtcttaactattcctccagggtgaacctgcactgtgtaaggtccacatgtgtcaacgttcaaatactgagattttttaaattgcaatgccaagtcctcttccaattctggtgctagggtcttcgtccacttttcagctttttctttttgtgtagcaaaccactgttggactttggacctcaggaatgctacagcagcagtaatcagaaagtatgactgaactcatttttcaaatctaatttcctcaagatattgtgcaaccgcagcattcattgcccgaatgttctcaaattctcagtgaaactatgattttgaatacgtgtaggcacacgtgtaaatgtgattcgtgaagacatcagtcttgaacatgtggttgacgctcaaataatgtggtggtagcagacactgtgctgtgcatcaaggaacacgatctccaaagcatgaacaatgctttgatgcctatccaacacaaaggctaagttctcaacatcaccaatcgtttctttcaactttctcgtaaaataggtccaagaa

SEQ ID NO: 40205 - DNA, 1090 bp, Cannabis sativa
ctataaatacatattgtctcatcacaattgtatacttttattaaccagataaataaatttgtttatgatttagagatttaaagaggaagacttagttgatagtattgtactattaaattgcgatatttttaatggatcaatcaggtatgaatacataattattatcaattattattgtactctatattatatacaaatttgtatcctagttcatttgattttctaacagttttgctttagatatgattttagattattagttatagactttctcttgttagagattttggggtttgtatccttatttttttttaccttccatcgagggacgaatgtacagaagagttatgaggggccttcgcccccactgatttttttcttcaatttttgtggttataattttgtagttttttgtattcttctttacaaatttatttaatgactctctttaaattttatttctacattttggccctcatattccctccctaccttccgttcctatttccatttatagtggtatggtactttaaaatgactgtgattacgattggacatgtgtacctcattttgttagtctattggctttgttgtcgtttgcttatccttgtcgagattgatttgcttttgcttatcgatgaactttgtaataattttattctttaattttttgttgaatgaaagtttagatctttttctaaaaaaattatatttgtttactaaaatagataatataaataatccacttaatgtatttatttattaatttattttttttacttattttttaaatttaaactaattaattaataaaatgtaactgtcacggcaatagactagtaattttttagacagaagatacaaaagtctacaattattaggggcacatttgtttttctaaaaaggaagggttgtattttgtttaagggtaaatatcattatctaacttatgttttgtaaaaattactgattgaactttttattttgtaagataagaaattagaccttatatttttttaaaataattttaaatagtattatgaactgatttttgtcaaaataaaacttcataattgttggaaattatttt

SEQ ID NO: 40206 - DNA, 2520 bp, Cannabis sativa
  modified_base (951)..(951): a, c, t, g, unknown or other
ctttctcagcttcttgcttgaggcaggtaatctcctgttgggcgttgtctcttttctcacacacaaccttgcattgggacattaatttgtgagcctcgccctccagatactcgagccgcacagagagtaatcgattagaagcaaaagaaggaaaagaagcatggagaattgcaaacgaatgagtataaaagaggtataaaaagataatataattatattaactaagttgacataccatgaagtgacagtccaaggtccttgaaagcatctcctttgggctcctaagattgagaaaatttgaatctgggggaaggagagtttgaagtttgtaccaacaagcgaccccatatgcctgggcaaatttagacccagcttccccaactgcgactgaaaggatctcgatggcctgactcaaagaagcagcagcgggggtcacctcgagatgaggaaaattggcgtcaagaacaattggaggaggaacttgttcttggatctcgttgtctaaaacctcgagattgataggctcgaccggtgatttcttcttatgagcagtggttttcctttgcctcttaggaggaaccacttcggcactagcaaggacttcagcgttgggtatccttttcttccccttgcggtccggaatgtcttcgtaactcatgtctgcaaaacaagacgaggcgttacaatcattataaaaaaattgattaaaaaggggaggaatataattttccacctaagggatttaccaattcactagaaggtacgctatcactagatgaaggggtagaatgaccataataatcgctaaaatccctacagcctgtaattttgaatatatcaaaaggctcgatcggttctaaatcccagctcgcatcaatgtgacctgccttatctttcatagtaccgtattgcccggctataccataaaatgactcgtgacagttgatctgnacatggaatctagggtaccaactgtgaaacttatgagcaatgcagtccacgagaatggaatttcaagtataaaaattaagacgggagtcttggaaggtaactaatgtattatgctcagccttaagtactgtaggtgaccagccacattgattacctcgggatgctccttcaccggatgctcgaggggtagtgctttgaaggtattgtgcttgggccaagcggtcccaggcctagaagtatacttgggaatcttgtaattgcaagtgtattctttgtcagcgagaaggcccgtcaatcgcaagtttacttcattcaaaaggaatttacatgatcgaagaccgtaagggagagtcatcaggcgcctgtgcctactaaccatctcgggggtaggaataggactcgtcagaagagctatcagaacaaacaaaacattagtcaagtacttgaaaaaggaagactgatgtaaatagataagaagagaacaatcgcttacagagtttgcgaaatgtggttgtgccaatgggggagagactagaggtccagaagaagttgtccttgacagacaccttatttggcaagtctacaataacttttggctcactagcgtcagtaccaagatagaaaaagcctattgcggagttcttcctcgatggaacagccttgactgagtaaagatactcaatctctacaggtgtgggacaaccccaattcataaatttgtacaagactttcaacctagcgagaatcctgtaggagatgggagtcaactggaatggggcaacgctaatgggatttatatagtctttgaagtagtctcgaagagggaggatggcccctgcacaaatatgctcaaggctccaggcgccaatactagttgtaccactactgctagtctcaccattggaaactgggttacgactggcaaagcgtgcagggggtagcaactaaattcaccctctcttactgacctaacctgacatgattgcccaagtgcaattccataggtcttcaacatgtcgcccgtatagcctgagatagatcgcaccttcgattctattaactcagcctcgaaggtgatgctgggatcctgaggagttttagacatacgtggcttgggaggcataatttcgaaatccaagtcacctagttcaaagtaattctgacgttgggtaaaaacaaaggctttgccataggaataaaggacacctaggtggttctggccaggctgcttctcgaaagaatcggcgtttgccttcgaatatttcttgcaagaagcgcctgtagcgactagagatatcttcctatttggttctcactatgtgttccctaaccctaacatcgtttagctctaatttggaggtgggttttgagggattgggttcatatgggatggccaattctgtaggaagctcagactataaaacttcttgacaataaattcctgaaccagagtgggacattactaccagcaaaaaacgttgcaatccctggagagaattttatcaaaccagaaggtaatgagttggagatcttaaaacaaccaacatattgcctgaatcctagtatgaa

SEQ ID NO: 40207 - DNA, 1027 bp, Cannabis sativa
ttaccatatgcaattcttgcctctaagtatttccgtacggttaaaatcattttgaaataaaataaaatcaaaataagggctgttttgctttagcaaaataaagtcatttgaaaattatatttcatgtagttgagatttatttattttgaagtaaaatgatactatatactatagctactattacgttgtatagtagctggtattgatgctaaaaattagctcaacaacaaactaatattacgacataaaattctttataccatatataatctaattgaataataattttttgttagtttacacaatctcctttctacatgaatattctcttgttctctaatctcagttcaaaagggtttcgatgatgtatttcaatgaaattttgatttgtctgatgtgagtaagaatacgtgtatctttttgaatgatggggtctcctatttataggtagcaataactgttggtccttcgtgcgtcttttgttcggattggcctacgtggattcgttcctcatgcgtttttactgttggttctccttatccaagctcttcatatactctgtctcacaatcaatccagctctgctctactttcttatctagctctgctcttctagttctacattttttctttttaagtgagacagtacatttaattattcatgccatatcactttattattttttcaatcaacttataataaataaaattacctttttattcctaagattttttttatcatacacaattttctctcgattctcagtttttgggctcgtgagtgatttagttcagctcagatatcgttgaaccggttacccaaaataattctcatacgtgtcattaataagtcgtaactgatttaatgggcatgtcatttcaaatttttggaaaattgtccgtgccctttcttattaccctgattttttcatttaagtttgttatctgtgttttcggatagaggacacgtgaaattccaagatggtttcagttcaattgttctaggtggatatccattagggaagtca

SEQ ID NO: 40208 - DNA, 1514 bp, Cannabis sativa
  modified_base (1405)..(1423): a, c, t, g, unknown or other
atcatcatcattaccattgtccatcctttccatgaaagcaacacatttttcaaaaggatgtccaattactccacactcaaagcaaaattccggtagacgctcgtatctaaaatcaatccaaaaatcatccttaatacggggcaaactaatcattcgtcctctagggagcggtttgttaaccaagagcttaacacggattcgaagaaaggggccccatccctcatcaagggactcctcatgaacatctacatattcactaatgatattccccaaagccttggcaagagttttggatttgctaagaaagggtaggcgatacacttgaacccaaaagcaagtagagttgaaagtattggctgaagcattttttcagagcatctggtgtgcagaaaaccacaaggtgattttgaaagtgccatggttccttattcatgaccctgaattgatctccttcacagccgaatgtgaccttaaaatactcatccctgtattcagtgattgtgacaggaaaacgacccctccaatggtcagacatttggttgataaatgttggcttgcggacataattgtgggtgatgactctagcaaggagagtaggagttgggatggtagtggtggaagggattacatcatcatggagaaggaagaccgaacgttcttcaacagttaatttcagagtggaatccatagagtgtaagagagggtcgatgtcggaagtcattacgacgggcggctggtgcaaacagagggaaggaagggggaagaaagggcggtactgaaaggaaaactgccaatatcacgggagggaaaggaagaaatttgaaaaagtagttaaaatgctaaaaactgttagaatcgcataaactgctacagacccaacaacaggcacttgctcctttcaaaaattaagtatagccaattttaattaaagaaaaaaaagtataactttatagaaataaatgatcattatacaagcatgcactcccaacaatttatttttttaaaaattcccaattagattttgttttgcccaagattctcagttgacttgagatgggtctctcgccgcataatttaaatagcaatagtatacatttttcatatttaatttacaataataatattattattactacttaatcagaagcatttgacatttttcgattttatttttattattttttttttgtattttaaaataacttttttggttatatactaatagtatttgacaaaaaactaattagttacttttatataaaaaaaattcatttttaaatcatataatttgaaataaattttgattacctctaaaacttatttgtatacatcatagtatacttcaaaaaattgctatttttaatgataactttttagtcccaacataattttttttgtgattaannnnnnnnnnnnnnnnnnnaaaatgttacttttgactaaaacataatatttagttacaagttgtcactaatctagtttaagacacaacaagcattgtgactaaaaataca

SEQ ID NO: 40209 - DNA, 1257 bp, Cannabis sativa
gatgagccagagggctggagattaagctgtgcgcgtgagccgtaaagaatgatggcagctctgtcgtaggcacgtgcggcatcttcggcggtggcgaacgtgcctagccatttcctggttcgtttccttggctcacggatctcggctacccattttccccagcttcgttgcctcactcctctgtaacggaatttattattgtctgggccacctttgcctttgcttttggtgggttcttttttggcagtagtatcgccggtgggcacagcttttgcaggagaagtagtagtagtggtgtggagatggggaccggattgggatgagggtgaggaagaagaggagtccataagggttaagattggggtgaattttaaaggtgagagaagtagtaaggtagtgtgtgtgtgggtgtgggaactgggaaaggattgagtgagaccgcgtgggcgcttcgttcagtgctgtttgattagtcgaaatacagcaactctagaggttgattttgaataacattgctgttaatggtgcaaatgggcggtgcctctctgataatatttgttttatttttttatttttctttctcactgagacaaatgaaagagaaagcgagtgattgctgtgcagtcaagaaaactgactttgctcagtttgtgtatatataagtcttaaattgctatggggtttttggaatttgtaacattcaaactttctattatatattcttcttcttcttcttctttttttttaaaaaaaaaacagaaaaatagtgaacttatttttttccaagaaaagacttaattacggacttggatcctctgtcaaaatttgctgtccaattttctgtcaaaccaattaaaaaaggccatgtcatttaattaattaacctcaacaattaatcatttaacaacttctattccttccgttactgttttttattaattaatattatatattctaatggttacttactataataaatgctgaaatttattaacatatagatctgttctatgagtaaaagctgagaatttttcaaatattttctcaaaaataatttgtatatctaatttgaaaaaaaaaaaaaaattgtattaattatactttttattaataaaaacaacatattatatatacatatattaaatacatatataataataataatctaaataaattttactcttattgttttttaggggaattacctcaaatactgtttttttaactttttttttttaatttacggtttgagtttct

SEQ ID NO: 40210 - DNA, 1151 bp, Cannabis sativa
tgtttctttatagataattgaatggtaaagattacattgaaatagagttttatttagggcacaaagcccaacaaccctaccaacactagtgtgttagaggtagtgcatatgataaagaggttaggaagtacaaactaaccctaccaatactagtacgatagatgtactgagtgcatatggtaaagaggttaatagtgcttcagggggtatgagataattgtactcttttcaataacgttcaagactcgtacgtgttggacgagtgatgattactttgaaattgggtgtatgggttcctaagttacgaaggtaggtcatatgttatatttttatgggcaggtcatatcttataattttataattttcttactgagtttgtcgactcacaaatatgtgcttcatgtgtaggtaaaggcaaggcaaaaactgattgagcagtgagtctggagctccatgaagattgtacgtatcaggacggttagacctggagggttcaaatcttcaggacatcatgggctcagtttaattagtcgttggacgaaacttttgatacagtatattttggttgtatttgtaaaattaattgggatccccaagtttgtaactttgtatattaatattataacttagggagctaatacaacaggtattgtacattttacttattgatacgtataatcatttatagccattgatttaattaaatggtatattaattcttaaaaactacactataattaatatttcttttatttataattaattttaaatattaataattagatccaacgaacaatactccaaagttaactccaaacctataatttttcttacttatttaccttataactttttaaaattttaattaattattttttaattttgaatttatatattaattttattttctagtcaatagtaattatagctgaaagagtagaaaatattcaagttatttaatcataaaataactaatacaatcaataatataatcatagtgtaaatggtaaaattctcttacatcaactataatgtcataagttcaatcatttgtaaagacatgctttttattatttttaatttaagtttttaaattaattgaataatttgattttttttcaaacaaaaatttaaatttcttcaatattttt

SEQ ID NO: 40211 - DNA, 1503 bp, Cannabis sativa
tattaagggcaaaaagtgaaatttgcctttgaaatttgaatctctctccctcaatattaaagaaaaaactctataatataaatatctaatgttgccatatttttataaacttaccaaaaaaaaaaaaatttacccctaaataaatgaatgacaaacatcctaattataaaacactaaaaagaattgaaaaagtatcactatctaaataaaataataaaacatacttaaatcatataaacagagtaggtaaaatccaaattggtcttcttcgatccattttaatgattgcatcaaaatcgaaattaataatttttgtgcactttctagtttccatattgtaaacacccaaatcgtaaggcccattataattttctctaggatctttgtcatgagtaaagtaaatacaattcttttggcacccaggaaaatgtgaagcctgaacagaaatacaagtattatcacctaaaaacaaggcctcatcacccaaatttgtcatcttctcaaatttttggtcatcagatcttaatttgaaaaccataaaatacttggttaaatgaaaagcctcgacttttcgaaacctcttaacaataaaatagtctcccgtaaatgattcaactaaatattttgaataagaaaaaggttttccatcaatctcaagttcttcatagggttggagtttaaggttgttcttgtagaacataatatcattcaatttaaactttgttggcaccttactatgtgggatttcaaaacctgtccataaagaatctttggaaaccttacaacttgttatatttatagtagaacaacaatcactctgtgttccacatataactgatactttaaaattttggggattggattggtctggtgtacatattgccatcttcctaattagatattcacgaggaaagaaatcacttaaacctgaatctgcagtagtttcaaacaatggtggaagttcaataactgttgtattattattattattattctcctttttattttgtctttgtgcaaagggtttatacagtgttaaattgaagttttcatcttgactaagtaactatccttgagatgaaccacaaatatttggaggaagtattaattttgatgataagaatttgttattcaacacatcatacacactccattcatctttattatcactttctgtgttaggaaccaaaagcaatggtacttgatgctcacttaatttcacaactcgatttttgttgtcttttgctatagagtgccacgaacaacatgtattactgaatgccaaacagtcctttagagtatataaattttgaaaaactatgtctaagaggtgacttggcaaacctgcccaatctgaccaaaaagaaaatcaaaaaagacattactaattctacctagtacgtctccagcaaaaaaaaaaattctacctagtacgtccaaaggacaagaatatattgtaaatacatagacataaacacataatcatttaaccaaaagaatatc

SEQ ID NO: 40212 - DNA, 2804 bp, Cannabis sativa
aatcacgatttccattcccctaggctgtaaatccctagggtctgcgtggcacttcttgacgaggtgcctggtcatctggttgttcatcttcaggtgcatccccaatttccctaagttgctcctcctaagtgttttggtggttttcctaagccttttcctaccacttggttcatgaattgcgaggtctgcctcgtcgcctcctcactcaagaatcaggttggttttttgtgttattttcctgtgctgccttggctggagctgcatcccgttccaactcagcgttttgctggtttgcctcttccaaacatcgacggagttgacaattttctaactcaaccaacggtacatatctggtggggtcataggcaccctcactcgttgtggaattgggttcttcattcctagtttctgggttttggtcactgtcacgttggctacttctcgaacatgttgaccgtgtagattttgttgttcgtgaattaaggggcctctgggagcccactggctcttttccagagcaatgagtagtatcttcaggatgagtgttgtcattttccccattatcagccatggagaaaaaaatttctttttgtttggagggattttttttgagcttttttcacgtaggctctcaatgaaagcaccaaactgttaatgcaaatttttgttaacgataatgagcctattttcattataagtttagcacaaaaattatagaaatctaagaaaaatgatagaaacaaaaataacaccaagtttttacatggttttgcagtttactctacatagtccacaagtcaatcttattgagacttttctgatacaaaactaggaatcttcacaatcagtgtattcttttttctctcaaggattttccatcccttttttcgtacattctgcccctatttataataacataggttggcagttaattacaatcaaatttgaatctcacaatgatatcatcccgaaattgtgggctacaatgatgcttcacgtaaataaatacagttattatttgaaaatcacacaactatgatttataccgtttttaaagggtcaacactgatgtggattaagacacgctgcaaagcgtatctcgctggggcgtctcgcttggtacatgaataacctggtttattcataagtcttccaacaatggcatgagaactagtgtactaagcaaacttaagggcttctctttgcccataaggcctcgcagactggacaataatgtcttgggggttctcaataacaacaataaccctggtagcaagctggagtttaccaggagcatgccttcctatagcgagatggatgtctcagtatccattatcaatgtatattatgcgctaagtattttatcagccaactcgccttgtcaacacatctatacatattgcgaggtagatgccttgctatgtattatcgatgtcatccatgcgattacgtcttctgatgctaaatggtttttcgtgaatacgtaaatcaatagttcgtacatccttgtcttgctaaagactgtgcggtctacgagttataaatataccctattgaattatgcatttaaagagttattccatttaatatttattaatataattgacattatattttctggttcatagttcctaagattgacacgtgttctgaagtacctgtcgaatttccgatataacattaatttatttaattttagatcaacataaattagaataatttttccaattttattttattttattttaatgtaattcaaaaatgtatttttcaaatgtattggattttaaatttaattagagatacatattcatagaaaattaaatttgagttgaaaattaattatttaattaatttttgaccattttaaattaagtaattttgataatatttattggaaaattaatactatggatggaaaataaaattttattctaaaaccttcctcgaatataatttataaatattaaattataatttatatttagagttatctaaattattaattttaattaaataaatatattaaattaaaataaatatattaaaatatgtatcaaatgaaaatacaatcccttaaaataatgaactttagttataaggatattcgatctgcattattggtcttacatggttaacattttaataggatctcgagacgctagacttcgtcccccagatagatggtcttacattgaacatttaacaccataaagatcttgaaagagaagtattttgtatgttttcgtctctattagactctcccacacggtgactacttagagataaatttacaaagtatgaaacagtggtgagagctcataagatagaatggcattgactctcgcctaaaaggaacaattccagattcttatcttgattgaataaaacgttgctagaatggtatccagtttagattagctgactactctattcaattgatcatatctttgactctcgcctaaacgagacagtgtatcactttattggaatccttagaaattatttaagatgtgcttattttatattttcacatgtctttattacatgctaaatgtatgataatttctaaatgagtataaatttatattgaatcattttgttttctgttattaattgttgtagtttcaatttcgaatcttcattgttggtctaacttagttttttgttttcaatgggacaaatctcaaaggattgccatcaattagacaaacataatagtgttagatatcgacagctatgtgtttgtaaatgcaacatctagttgtacatccaaagatgatagtgttgggaattattttacc

SEQ ID NO: 40213 - DNA, 1942 bp, Cannabis sativa
gtatgctttgtttatctcaccttaagataggtcatgttggaggacctaaaatcttgattggtcattgtttcatatataatgggtttgttatttttcatattttgattagaagattattatagcaaataattcatccatccattattatttattacatgcatactatacaccattttaattttattatattaatatacaacacactaatatttatatataataatatttgtataatagatacattattttattggaacaatcatgtaagcattagctaactacccaaattaattaatgtatatttaactgccttttctttgaagccacaaattaaaaagagaagatattatatatattagaaaactatagatataattaattcgtatatatgattttttgtttgataactatgtatataaattaatatatttaattaattgatattgtgtgtcttaactatcagtttcgatgcacgtttttggcaattttaacatgtatggttaataatattgtttctttttgtgcaataatataatagttgaattatatttactattatatatatatttcaaataaaagaataaaaatactaaatatataggagatgttaggtcagttataatatatgtgaatatttatatgatccatttgcctatatacttgttttttagtgtacgtactcaacgaattaatgtagatatgatataacaataaaaaaaatggaagaaatgctaaaaaagtttgacaaaataaataaaaaagaaatttggatttgatttgagtttacaaattgcatttcaattcataacacgtcaacttgttatttgttcaacaaacagtacggaacctcttgtttttttttttttttcattattaattttccacatcttttaaaattgacacatttatttatggataaatgatttaataaattcatgtcataaattaaaattcaaattaaaagtatatactaggacgacaataaattaaatgaaaatcaagattgttttagcaaaaaaaaaaaatgaaaatcaagattgtatgaaatctataaatgtctttcaagttttgtttgtttgatcaattttagggtcctacaataataagtttttccttttccttcttttttttttttttcttttttgtcgatggaatatattaatgactcattatttacgttttttttattgtttttttttttttaaaagtaaatgaaaatttcaattaataagtaatttaaatgtgcataaattgattcaatttaatcataattggttgccaaatattaaatatttaattgtgatctgatcaaatttaatatgttatactatgaaatagtgtagggccttattagtaatttccaacatgatattattttgaatatccaattggattggatctaattttcgatgaggtgtctaaaaatttaatataattcaatatatattcaatcaaactcattagtattttcatttaatttgagtaattagattttatgttgttatacttaaaatatatatacatttatgaaaattaagattaaaattttactcttttttaatcaaataaatattggatccaaaaaattaaatagattcgatgcaaagcaatttaaaaaataataagtctaaaatattggattaataaatctgaatcattaatacaatagatatatatacataaaatacatctaattgatagaatgaatccaatctattagatgttggccgattgactaaatgcaaggtcggttcttggctaaggtgaactaggttcgcgtctagggtccaccaatcttaattaggggcccaaataaaaatatatatttaaaaaaaaaattaaaaatacaatttattcttataataagggtctaatttttttctatagatctatttcaactcaaggtcaactttgatatgatgacttaatttaattgaatcag

SEQ ID NO: 40214 - DNA, 1563 bp, Cannabis sativa
actaacagtacgaactccagacaaaacactacgagtcccagatgcaactggaatgcaacaggacataatttgtcacaacagaaaataatggttcttacagtagttattgttgttgattttttttttctttggtaaatactattttaaaagttatattttataaaagttattgattgaaccttttattttgttaaataataattcaaattttatattttttttaaaatagtacaaaatatatagactctaaacttaatttttatcaactagctagagatttttttgttcatttgattggagttttgtaattagttttatacttaatgaaattcaattgatttacccaaaaaaaaaaaacgtctttaagatttcaataattaatagcaaaatattataatagttattaaattaaattatacaagatccgatacttaattatatcaataacgatatacactttttataatactagatactactggtacatttatctattaatataatttacatattttaatttaataattataaaaaaaaattacaactaatatgcataatcaaatcaagaaataatttgcaataataagattaacaattcaaaaaaaaaaattggagatagtacagtgatgaacagagtatctaaaactagatacaattacaacaataaaacaataaaattaacaccaagatatatactgattcaagtcctataaatagatgtgatcgatgactctactctagttctaaaacaccactgaaattttagcaaaaccttgcgcttttgctgtagcaaagttcctgtaaaattttaacaaaaccttgcactttctctattaagcctttttctttaccaaaatttaaataaaacttattaattttcactaataactctaaattacccaaaagaacataaaaatacaaaataatatatattctcacaaaataggagaaaaagaactaaatataagtaaaatacacacacaaattaagctttaaaaaaaagacaaataactatttattcaagagttatcagtgaccaaagcttggacgatggggtcagggatgacaacatcaaacgggcgacgatgtcatacaatcaactgtccagcaggaaaaaagaatgatgaagattttgtgggatgaaagagaatgggagagaataagacgcggtcggggtcaccaatagtacgggggaaagcagcgctaaaaatttcaaaaggagagagcaatatttttcttttttctaaaaatttttagggtaaaatgaaggagaatgggtcgagcttagaatttcatggcgataagtataagaggcgacatttctgcccctaaatgccgcctctaatgctttgacttgtgatattttcagtcgcccctaatattacgggtggaaaaaatcccacccaaaatcaacgatataattttctatttttggagcgacaaaagccgcccctaatacctaatttattgcccctaaaagttttaggggcgaaatttgtcaccactaaagatgtacgaaataaaaaaaatatatatcagattttcaaagggaaagcacatcaa

SEQ ID NO: 40215 - DNA, 1742 bp, Cannabis sativa
  modified_base (1572)..(1587): a, c, t, g, unknown or other
ggatcaccaattccagatcaagattttgttcttcagctggtaaacggtcttggactagagttcgactctgtgatttcgggcatcaccacgcgcagtgactttcttactcctaaggaagtgcaggatctccttatttcacacaaaagttgcctggagcatcacaacttcgttactgatctaatcatgaagctacaagccaatgtggctttctcaggatgaagaactaacccttacagaccaccacaaggctccaatattggaaatcgaggaggtttttattgaagtaatcagaacaataggcctcagtgccaattgtgcctacgatttggccacactgccactgtgtgccattatcgctttgacaagaactgggctcctcccaaaccaagcacaactagtcagcccactaacacatctaatccttcccctcgtgctcttgtcatagaacatgaatttgactatgatcctcaggcttatgctacattcttcttgcctgattttggagatgattcaggctggttcgtggacactagtgctgcaacgacattacttctggtacagacaattttgacagttctgttccttacactagctcacagggtgcggatgtaggagacggtaagaaattgtcaatttctcatattcgagcactttatcttctattcattccataccacttagtttaaattcaatgcttcatgttccttcaattgccaaaaatttagttagagtttctcaactaactcgtgacaataatgtgtttcttgaatttcacaaaacatgttgctttgtcaaggaccaacaaactgagaaagttctactcaaggcaatgcttaaagaagggatgtatgtgcttgctgataatgcccaagaaccagatgtggctaaatcaagaaagtctatggtttatgcttgtaatcccactgctacaatctgtactaatcaagataacagtagccttgtaaacacaactactacttgtaatcttgagtcaagtaataaaaatgttgatctttcacattgtcgtcctactgtttatctttcttgcaagcaatctaatgtaaatacctggcatcagaaacttggacacccttctaaacatgttttaggcaaaattttgcaccaagtctcttcatctggttctctcaatcaattagaattttgtaaggcctgtccaattgggaaaaagccataaactacccttccctatttccacttcaagagcttcccaacctttggaagttattcacacagatttatggggcccctcctacatcaaatccaaagatggctattaatattatgttcacttcctagatgatcacagcaaatttacttggatctatcctatcaccctccaatcccaagctttttaaatctttattaaatgcaaaagcatgatagagaagtagtttaatttttctattaaaagagttcaggtagattggggaggggaatatcgaccctttgccaagtttctcacagatcaaggaattgaatttacacatccttgtcccaaaacaagtgaacaaaataggagggcagagcgtaaacatcgacatataacagagnnnnnnnnnnnnnnnnttgcacaatcggggttagattttaaatattggtggcatgcatttcatacatcaacctttctaataataggctcccaaatccagtgctacaggagcaatctcctctagaatgtctacttggccaaatccctaattacaaaattcttaaaccatttg

SEQ ID NO: 40216 - DNA, 1198 bp, Cannabis sativa
gtatccatgtaaaattaatagcccaggatacaagtaagaaaatttcagaaaaccatataacatctttatcaaagtctaaaacatactttgttaggaaatggggagttgtgttggcctctcgtgccacatagctaacagtagctagggagagaaaataacaaactattagtatttgtcacaaagccctataaatggatatttgtactggtagaatagttaaaactgtctaccaaaactttacaatcagtttctatgtaatcaatgctaagtgaattctcaatacaccatttaagagcttattgaagagaaagtgtttccatcagaagaggagaaaaagctcttgtccaagaaagagacgcagcggcaagaatgactccattacaatctcgtaccataaatcatagacctattttgcaagctttgagatcttgtgatgcatcagtgtttaatttcaaatggacaggtggtggcgactcccactgggggctaggaaggctagcccgatgtgccaaggaagatgtaggggtctgagtatgaatcttgtattgttgtatgtaagtcgttgttcggtttaaaatcacttgtgggttggaaactttttgatgatataattgttcattcctgcagtgccataatttccataacaaataaagaaaaaattagaaatcgctactcaagaaagtgttagagacaagatgcaacatatcaacagtagaaaagatgttatatttaataatatattcaaataagggagttaattttcataccttctggacagttaaacaaccaaaaagagcatgtgctatagtctcctccgtcctctagtagggttggtagactggattgtggatgattcgttggtgttgaagcttagatccagtgggaagagcatcatgatagaccctccaaaccaagtgtttggtcttggagggaattagtaatagccaaaaagatttccaccaattatgttggggagatgaatctgaggggaaggttcttggtgggtgtttagggcatgagcatggtggtaacctgagttgaccatgtaatttccatgaggtgtgaagggccagtaaattaagtctggtgtgagtgttggggagggggatggagagaatggcatggcaaatgtcgtgggggaaaaggttgtgaagctagttaatatctcaggctccactatcagtgataagagtggata

SEQ ID NO: 40217 - DNA, 1914 bp, Cannabis sativa
tgcgaataacaaggggaaacacagcattgggtgcctattttggcttttggcaaggatggttttggagatgcgcggcacaatccgcgctgggcacaaatgggatgttatggtaaggactaaacattttttttaataagtttaatttcaaagttaatacaagtcttgcctttttaaaacatatttgctttggattgattcttgtttccatttgcaggtagatttattcttctatagggagcctgaggaggctaaaacagaggaggaagaggaagccattgttggagcagactatggagttaccgattatgcaacttctggccttgctggcctctctgctgagcaatggcctagccaaatagccgatgctccttggcccgctgaagtctcaggtgctattccagctgttccggctgtgggctggactactgaagcaggttagtatactggtgtttgttctttactgcgttaagttttgttttaatttactgctaaaagggtagttttttaaaactactatattatctttgccgatgtttttttagctgcagtacctttggctgcggaaggatgggatgttgcaattccacctgctcaattgcctgccgaaactgctcctacaggctgggaatgagatgtctgctgcctttcataacttcttcatatcattgcaaaccatagtttaagatagagatttatttgttatccttccagttttggacatgaatttttgcttaagttttcagactgttgagttcttctgtactacttttagagtgatatttgaaaatattttcaagcttttatgttgaacgaaggctcatagtagatacaaattttgatcatattgcaatttcacgataattgttgtttctctatctatgatgattgaaattgtggatggatgcctttgtgattatcttactttctcttttttatagaagaatttgatttgattgctgctaagaattttatggttaggtttctcaattattttttctgatatatcctactaaaatattgcttataaggtttagtcatttctttggttcaagtttgtgtatcttgatggtgctcatgttctccaagttctgtaatatcttgtcagatgaacacttttggcattgtagggattgagagagaaggcagagagagataggagggtagggagctgatgggaggttcgcttgagccattagtgtttgggctgtcgtctcatcgaggctttgggatttgggctctcggtctagggttgtcagttggggttgtcggtctaggatcatcggtgggggttgggtggtggtgataatggtagttgttgtggttgaaggaggaaggaagaaattggggttcgatggttccgtaagctaaaagagaaagaagaagaaaaaaaaaaaaaaaaaaattggaatttttcttattaatttttttttaataatttttagataatcaaaattatataggccgaccttacaaaaaaatttatatagactaatgaaaatatgttatgagcacacttgtatatattagtagtccactttgacacttaaaagataaaaatagaccaaaaaaaagtggagatcaaaacataattgaagtttggagagtttcgttcctaaaaattcacatgggattgatcgtaccaaatcttaaagttcatatagtttagctgcaaattacccatcttgatttatttactaagttttgcgcctagttttagtgtagcagtaacttaaaattgtaatttattgattaaattggtctagttgtgtataattgagaatactaataatttatgagggtcgtactgtattaaataataaataatactaatatcatgttgtaattttggggataagatgaatgaggttacatcccaaaaccaattggcaatgggaggagtagcccattcatctt

SEQ ID NO: 40218 - DNA, 2445 bp, Cannabis sativa
catttttattataaaaagacttaaaaagtatggaggtgattctcctagtaatttcaaagaaaaagaaagcaaaagttctttgctttattggcaagtgaaagttattcgtatgtgtttactagctttttgtatgtaggttcaattttcatgcaaaagcttttcattagtaaatgataaatattaaaataacaaaggtaactaattacattaaaagtaaagaatttttttcattaaaaaaaattattatctatcataaaaacatacagagatacccaaaaaaattcaacaataaaaccttaatatagaaaaaaaaaaaaaaaaaatctaacttgtgaattctcatcctatccaaaaaaaaaatattttaaaaaaaaattattagtattgttaatttagattttcgttaacattaaatgaagccttgtaaataaaaaccgactgttatagttaataagtatatataaaacactgagaattttatgtggttttgtaaataaaatttatatactccatgaatcattattatttctgagtatttcctaataatatgtttagattgtaagagaattattataaatattcactcaatcttgccgaatttttctttcccaaaataatacatctctttcctcataggttctgttcttatttataggtttttaggaatgacagatattctctttcgatcttattgaggtaatcgttcatgaagtgaggacaatccccacgtctcatatttacgacatgtggataaaataaaataattgttgataactgctttttgatcttatcaggaaatagtcttttgctaccgaggtaacatattctaactatggctcgcgtttttctatcgatgttcaggaataactggtcacgttctgcgagacattggttaagatgattgtcctcattgttgtcttttttggtgattactgtgctagttttttaggaactccgagagtggttgctcctgaatctttcaacatactcacaagtatgtaggtcaatgagttgcaagtttttaaggaactcattatctatcatttccaacgatacaatttcagcctgtatttttttggaacctcatagttagtttccgagaagatctcaaaatatcgtcacctcacaatactgtgttttatcaatgttgttactgagacatagtgcgagacaggtatctatttatgaccacttaccccgaagccagatatctattgtatataataatcttttttaatgttcaaccttattattcaggtgtcgtatccatatttatggctcaaaatatgggcatgacaattgtcccttaaaaaattctttatggagttggaagagttttttaaacaaccaaagctggaacaatttggtctttctcttaccagtaatgagtacatccttttggcaatttaactttcaccgagaaaggtaaactaattattaattaaatattttttcatctgacgggctttttaccaatctctttgtatttcctagaaatgtcctcagccgtttaatccaatttgaaacctaatcaaaagttctccatcttttaatataagaaagattttttccatagcctttttttttacctcatttgaaatacaaaaccagagaaaaaatacccatctttattcaaatgactattgcatgcccagtttttctttgacttattttttttatgtgatcaataccattttttccaacctcattctcgttatatttcagacccttcttaccagagattcctagtgagaaaccatcatcgtttttagaagaacccaaaacctggtaagtatctaatctttaccctaaattttcttttcgttattttttttatcgatttttgatatgttcatgcatcattttcgcctaaaatagataaggtagttttattttagtaatgtttttccttgaattatcaaaaatttctaaattcctaaaatatttcttttttgtggaaagaatactcattcttggttcgaaactttggaagtttgagtttttagaataggaaaacccaaaattgttgccttacctttcaaatcacgattggaacatccaaaaacgatattaaaaataaacgacgagaaaattatgttgtttaatgaaaaacttgaccgagaagaaatttctgctcgatttaaacgttttatagacgaggttgctggtgggaaacgtcattttttgcgagaggcaacttggtcaaagtctcctagtttaactaagtatcccttggcaagacctttatttttacccgaggttaccattgctttttctccaagtaaactaaaatttgacatcatgtcttccaaagagtgtaagtctaaactaccctagaatcccacagtccaatttgaggctcagttgattgaatctaaagtcaggtcaattgccctgtatgtgggtccatttttaaggtcttatggcatcaagaatgagaatgga

SEQ ID NO: 40219 - DNA, 3764 bp, Cannabis sativa
taggcgtgcccatggctaaccgttggatgggatgaccttaggcattcctattgccacgtgtcacaatcccaatttatgagggctattggtatttaagccaactaatatgaaatgatttccttcttttccctctcattttcgttttctctcttcatccgaaacttcaaagacagaaaccctctttcagattgatctctgctattaccctttttgaatcttcaaagttcctgaaacgatcgaaactattcacaggggaatcgtcaaactttcaaggttagttttcgagactatctacgaattttcgtttctgattttgagaaacctgtattttcgaatttttttaggaatagaaaatgcatgtttatttgtagggagtacacataggaccttatttttctgttagagcttggtaattcccagaagagaattgacttgaattttgtataaccgtgaattctaggaagaatactttgaatattcgcgtctttttacttgctattttgaatattcgcaagtattgagatgaatatcgtgaatactcacatgtatacttccttaggaattctggaggtttggtcactctgaccattatttagaacttagggttttctttatattctctgtgtatttttgtgtgggaatgctggttaggtcttccaaatggtgggtgtgtcaccgtagcccaatgttcatgcgtatgatcgcatgtcccttgaggtactgtgatacccccagccatttgtgacgtatagctagctttctcttttcttttacaattgtgtgtttcgactagtaggttttctcgaaacagagaagagtttctgttagcccaatggttatgagagaaaggcatatcccttaggatacaggagactcctcagctgtttcttgtggtatgccactagttggatatgcggggtatgttcgcaggttgtaattggttagacttctcaaaacggtgggtgttccccagtaactccacggtcatgcttaagaacgcatgccccttgggtcactgggtaactcccagccgttttttaagatattctactagtcgcacataagcgatttacactttgggagggttggcttgatttctcgatatggtgggtgtatcttaataccctaatgaccatgtaactacatggacattaggttattgaaggacacctaaccatttcttgagaggccgaaccaattttcccaagaaatcctatttttagtgcgggtgaggtcacttgtgttgtttttcgcactttcaccacgctgaaaagatcttctatctttcaaatgagcgatttgtcggatagcaagatgctcgtctctagaggtgatgccttcgatggcgaccaggaccaggaggatagtttcattctgactttgatctctgagacagaaactccaattgccataactgcagagttaggtctgctgtcctctgtggatatagaaagagtggttcaggagctcgttgaaccggggacaatcgagatccgagatagcgagtccacggtgtctgctcgtgaacatcttgttcactctaggcatgctcctgatgttgaagtcgaagagatgggagaggattgggaggctcctgatcgcgagtgagatgaggaggatgatgttgagggaagtggaaccgattcagtggataacacacaactgagtgagcccttctcatgcgaggacttggtctcacgagtcgctgaatccggcctcactacctttacgaggttgaattcgctacgacttagcaccatgcatccccgctctactcagagaccccacctttcctttaccaaccccacaataatccccacagaggatgtggttgtctctatacccattcttcgatttggagtatcgattccctttcatctattcattgccgctattcttaagcggtatgacgtatcccccttctaactaaccccaaatagctatcgcatagctcttgggttttatgcgatgtacatggagtacgtgcatagggagccttcaattgaggatttaaactatttttatgatataaagaatgtgggcctccacaacggtatctattgcttcagcaaatgggccacttctgaaattaatggggtagaaggaatggtttccaatatgggagattggaaatctaaatggttctgtgtttaaagtaccaggaattagaaccgattttaatcgtcgacctagtacgttgcatattttagcacttagttaataatcgtgttaccttatgatatcgactaacatgttctttcttattgatcgcagatagaccgcctcgacctgtactggacccagctcgcaaagaagtcgctgaagttctcagtagtctccatgttcaagttgtatatatacgagttattgtttatttttaacttatcttttcttgtcctcgcagaaatgactttcctggagcaagctcctgtgctcaatcgcaagtcgaagactggaacagcaacgacttctcctgtcgttcctcagaagaggaagagtgacgtcatagttactcatgccgctgactcgtccaagaagcaggtgaagccttcgcatgacaaggggaagaaggtcatgattggcccggctgttaaggcccgtgattttttgactctgcagggcaagtttgtgagcgacaagtttgtgtcaaatgtggaagcaatccctaccgagaaagtgatgtcgctaggggcggaacaaaccatgcaattcatgatcgtgtttttgagggcattcgtcgcaggttccaaagaagttgatcttttgaagaaacaggtcgtccagcttcaggaaagcaacaagaagctgaagcaggacgcgattgccaaggataacgaactcgagaacctctggaagtccaaagagcaggttgaacttggagccaaactttctcaatcgaaggtcgaggagttgtctcacgatttggaggttgagaaggagaatggaaagaagcagtacgaccaagcagtctccgactacatatacacaactctatccaagttgccaaactttgacttctcgatccttggagcagaggcggctgagatggaaaaagctcttcgtgctatgtcacctactcagaccgaagggagtgggggaaatctttttcctaaggacgcagaggctgcgaatactgaagaggttgttgatgagactgctagcaaggtcgtagatgggtccactactccaactgctcccaccgctccaaatgcttgacttatttaacttttatttctttaactatcaaactctttaagcggcacatgggtactcgcgttttgtacttggacaaattttactttactttctttttgtacttcaaacaacacatatcccttcgaggatatttatttttgctattatgtatgctttttgcggtacatgggtactcgcgtattctaaaatcttaatcgcagtttgattttccaattacatcttggtgtaataatactaaaaaatgcttaggcaaaattttttttgaaatggcgagaaatcaataactcttattataaaaaatcgatagtacatagtaggaaaatcaatagtacaaagtaggctatataccccctatacttagaacatttatacaaataaattgactaagtataaatacacggcgagtactattgatacattgcaagtacaactaataataaaacttcagactttcaccattatgagctctccggatcgcagtaccatcgagttctacaagctgataagttgcatggccaattttttcagcgataaggtatggtccttcc

SEQ ID NO: 40220 - DNA, 1487 bp, Cannabis sativa
  modified_base (1418)..(1431): a, c, t, g, unknown or other
agttacaaggatgatagtaaaagtttatgaaggtttttacggcaatcatgctaggggtaaatccttttaaagaaaatactcaaacaaggatatttttggcctacgatgatcgaatatttaatggactatgtcaaaaaaatgtgacaagttccaaaggttctcaaagatcccaagggctctaccatatgagctcatacaaatgcagtttccatttgatataagggggatagatttatcaggaaactacccaaggggaaggaggagtacaacacgccgtagtcgttgtcgattattttacaaaatagattgaagctgaacccctagctactataacttcaaagaaagtcctaaactttgttgttaaaaatatcatttgtcgaaacggtctcccacagaagattatgtcaaacaatggtaaacagtttgatagtgatacattcactaatttttgcgattgtcacaacattatattaaaagcttctccacagttgctcacccacaatcaaatggaatagtagaagctgtaaataaaacctagttagcttttaggacaagtgggacattgttagggtttatgtcctcaaaagcttgtaaagatatttttttattattaaataaagagtttaacatttgatatatgtgtgaatgttaagttattaatatttattattaaataatttatattatatatcagaaaattccttattcatatatgaggttgtggcttgtagctgtatagagaagtaagaccatttagctatgaataaaacagtcagtaacatattaaagttatagaatctttaatcaacagttactagtacagttcattgatgcctgtttgtcgatacaaataatcttggttcagattataaatgtagtatgacatcaaattaaaagtgttgtatataatagagattatatatgacaacgaccgatatgaatgaagcaatctttattaacatgtcttttatcgtaaaaacctatttcataatgatgatcaatagtagatcgacctaaatcctgagttgtcatgaatttttgctcatgttattagtttctttgattcactcgttaaagtttctcaaagaagatgattcttaaaacttctattttgggaatctaataatatggatggctgggaacatgatttaaaattatagaatcttgactttcctaacatatcgaatgttagttcatttcaagtgttaattctagaattagaatattgtgcacaaatttagatgagatctaatttatacttctactagtgaattaattggaataaaggataaagaagtatttagaatggtaaaacaataatttgaccaaaactaattacgaaacaacacatggagggctaatcactggaattgattatattaatcaacactgtagttaaactcaataaatataattcnnnnnnnnnnnnnngttcaattccatatttatagtggagtaaccatggaattaataaacaaggattattt

SEQ ID NO: 40221 - DNA, 2730 bp, Cannabis sativa
gaggtcttattctaattttaaaaagtaagcccctaacaaaaaaaattataaattacaaataatattgttacataattaagcacctaaaaattcaaataattttattaaaattgtcattttttccaatacaacttcaagatatcaacattctattcactgtttagttatcaaatattatgggaaaaaaaattaaaagggcgttaagtaaggaaaaaaattatattgcttttttttttttttaatttggcatgatagaatgcttggttcaaaaaaaaaattgaaaagtaatatattgagcctttttaagttttgagccatgtggattagcacttcttgcacaggtacatggttggccttgggtattgtatattgtagaagagcaccttagagagaataatcgccaaatcgaaactgatagattggtagagcaccttgcaaggattcaccatcactcaaattttgagctaaaatcgataaaaatcaaccacttgatcttcaaagtaaagtggcaaaaacccactttccctctctaaatttctcctcttatttctctccctttttctttctttttcttggtcgatagttcttgttctctatgacacacactattagcttctattttgttttttgtttttttttttctttatattacaaatgagatgctacccttattttggtccaagacccatcaaaggggcggacccaacaaatctcccctatctgcctcagttagtgggctcagctaagcccgctcttcgcttacaagctttaagcttgtccttaggtaaagtctatgtcagcatatcataaccattcttactagtatgcatatttttaagtgtaattctttcatttcaagcacatcacgaatcagtgatatctaacatcaatatgcttaaatcttaaataaaatgttgaattcttggagaggtgaatgacactctgtctgtcacagtagacaatatatctttcttgctcaaagctccattcttgtagaaactttttcatccataaaacctccttacaagcttcaattataattatatattcaaattatgtaatagacaaagcaacacatttttgtaactttgattgccataaaacaactccccctgcaaatatcatcaagaatcctaaagtgaatttcctgaaatcacaatcatcagccatgtatgcatctgtgtagcaataaagcataggttcaccactgccaaagcataattacaacctagaagtagctcgtagacatctcaatatcaatttcactgattctcattgatccttaccaggattagagaggaattggttaacaactccaactacatgagcaatatttggcatcgtacataccatagcatacatcaaatcacccactgcagacgattaaggtattgaagccatttattgtttatccttcttacttgtaggacattgtttggagcttagcttgaaaatgacatgcaagtggagaacaaattgctttagctttgctcatgttaaatctttcaataacttttccaacataagtttcttaagatagccaaaattttccattctctctgtcacgagaaatcctcattccaagtatttgttttgtcaatcctaagtctttaatagcaaaggacatacttaactcttcctttaactttttaatcattatgacatcacaaccagtaggagaataatgaaatcatcattagaaaacttctttgtaaacacacaatgatcaaaaatagttctagtatatccatgactcaacacgaaggaatcaaacttcttgtaccattgtctaggtgcctatttgagtccatataaactttttctaagattgcacacaatattctcttttctttgactttgaaacttctagctcctccatgtaaatttattatttcaagtcaccatgaagaaatgcagttttcacatcaagttattctacatctaaagtcaagcgaccagctaaaccaagaacaactctaatagataatatttttacaataagaaaaaatatttcttcaacattaatacatttcttctcgctaaatcctttcacaatcaatcatgccttataccgttttaagttattatttttagtcttatatcaataaacccatttgttattaaatttatgtacaagtttttttctttctttcttgagtttatagtttgaaattagcttaatatacctatattggctattaatctataaatattcattaatacagtttaatcaaacatatatattctaaaaagtaatgaacacacaagcttaaaataaaaagagaaataagaaaaaataaagtccaaagtgatatttatggtgtgtttatttacacataattagaatgactaagaataagattgactattaattagattaataaatcggaattacaaacaatttttacctgcaagaattataatttaattaagcagtattttcattgatgtgtttacaattattttataatcagtattatactattttaaatttcaaaaatacccttaattaaaattttttatatataaatttttgtataagaaatatataataaaataaaggtaaaattaataattcataatttaagaaagaatgagagtgacaaacccatgtgttttgggaattatcactctaaattctcaattttaaattgatgtaggatgacataattcactctaattttctcaaacaagttgatctaatcaattatttattcacattctctaatt

SEQ ID NO: 40222 - DNA, 2108 bp, Cannabis sativa
gaacaaagtaacaaagagggtgctgcttcgagaagtgcttaaggatggtctgtatcaactcgagtcacctcaatatcaactcagttttccagtttccaactcaataaaaatagtgtcatctcagtccaagtcttgttttctgtctagttctatggttaactctaagaatcatgtaaatcaatcaagaactaataaggttttatcttcaaaaattgatgtgtggcataggagattaggccacccatcttcttgtattttgagtcaagtgttagagtcaagtaatagagtcaagtaatgtaaaagtttctaagaatgaagggtaatctttctatgatgcctgtcaatttggcaaggctcatgctcttccctttaaattgtctcaatctcatgccactgctcctttagatctcatacacactgacttgtggggccctgccccaatccagtctaacaccaatcatagatattatgtgcatttcattgatgactttagtagattgacctggctgtatcccttaaaattcaaatctgatgcacttaatgctttcctttaatttaaggctcttgttgagaacaagtttgaaaggaaaattaagtgtcttagaactgattggggaggtgagtatcaacctttcacaaccttagttaaggaacaaggaatagaatttcaacactcatgccctcacacctcatcacaaaatggtcgagctgaaagaaagcatcgacacattgttgaaatgggattgacactacttgctcaagctagtatgcccctgaaatactagtttgatacttttgctatagttgtgtacctcataaacaggcttcccacacctgccttgaaccatgtctcatcctttgaaattctattcaacactaaacccaagtataagtttttgaaaacctttggttgtgcctgttttccctgcatcaggccatatcagtcccataaatttcaattttgttcacttaaatgtgtgaacttaagctatagtgatgctcataaagggtatatgtgtcttacaataactaggaaaatctatatcactgaaaatattgtgtttaatgaacttgaattcccatgtaagtctaggttcctcaacaattatcaaactccatcaccagttttcatacaaagctcaacttggtccacattgcctctgtctttgactcatgacaccattccacataatcttgcagatcatccttcacaagttgcaccagaagcacaccatggttccccagctcatgcaccttactcttctatttctagttatggctcaggttttgagggggaaatacctactgatactgatggtggtaatctttttggtgatccatttgttcaaaatcctgaacctcatgactctagttctagttcaagtggaagctcacattctgctgctgactctccataaatgtttgatgctagtcctcaaacctcagcacatcaagtgcaacctgctattacctctcatccaatgataacacatgaaaaagctagaatatttaaagctaagatcctcttaagtcagagtctctagcaacttgatcatgaagaacccctaagtgttcactactacaaaaatggtttttctcgacgtttttaaacagttatttaaagtattcccgttgatttttataagcgtcgcctatacgaccattgcaaaatgggtaaaataggcaacggttaaaaactggtgctaatgtggacttcccgacggtttaaaactgttgcctataacaaggtataggcgacagtttaaactgtgccttatactatagacgatgatattaaacccccattttttctcctgcattagttttataattttacctaaattaaaataaaacaaataattaattttattacaataacaattaacttaaaacacattaaatttatacaataacaaaataaatatatataataaataaataaatgtatttatactgagctcgaagagagagagggagacgaacgagaaatggtggtcgtctaacgtatgagacagcgatgagagggacaccaacgggatatggtggtggtctgacgtatgtgacggagaggaggggtgggtggagatcgatggacgagagagacaaga

SEQ ID NO: 40223 - DNA, 1631 bp, Cannabis sativa
  modified_base (1560)..(1561): a, c, t, g, unknown or other
taattatagttatttttaaaaattctgatcaatgggcccattacaaaattatctatatataatatagggtatttgtgtcataaatacacttaaagttacattgatatttctaccatcacaaaatcaatcataaacatagcattgttattaaattattttagtgtattattaattggacaccatctaatatgacatttttcaaaccaattataattaataaagttggaaaaatttcaaaacaaattatgagttcaacaacttgtcaccacacgccataacttatcataaacacacaaggggcaaaatggtcatttcactcccattccaccaaaaaaataaaataaaaatggttcaacaaacttaaaaaacagttccaaaataacactaataaaagccgaagtgttgtttctttggtctttttctctcacaatgagagatggccaagttaagaaatcttccaatcatcacattctttctttacacatgtctctccatcgttcgattcaacgatggagcgagcaatcgccaccgtctgcaaccgcagacagtggcgagtagtggtgttgggacaaaaggagagaagaatttggttttgaatggtgatggaatttttaagattgctatgtttgcagatcttcattttggagagaactcatggagtgattgggccccacttcaagatgtgggttcaattggagtcatgtctaatgttattgatcatgaaaatccaggtaaataaatattattgttatcaattttaattgataatttgcctcaattaatttaatttttttttttgtgaatttattttagtacatagtgcatgtgaatttataatgtaaattaaagtgattattgtttgttagattggatgggtgatgattccaactttagttgttttttttggcttatgtaaaacattgttggatagaaaattatcttcttaggcgattcattttgttcatccaaaaattcgaggaatttttagttttctgattttttaaagcaaagtttagaaatatgtataaaatattatatggaaaaaattaaaaaaatatatatatggaaaaaataatttaggtaaccagttactcttgccttaaagtgataaccaattaccttcttagaataaccagtaccttatacttatttttttttttcaatttttattataatataactctctcttttttttttaacaaaaataaatatatttgaaaacttgtagtttttacttaaactaaacaaaatggtgacatgcaatatgttatttttgaaagaacgttactattagatattttaagtatagggataattaaaaaaaaaaaaacacaaaattagcagaagaaattacaaaaataaaatacggtatgtacggagtttttaatatttttacggttttttttaattttttttacataaaataaggtattttggtgtattttaatgttatattcttattattttgtcatttgtatattatgttttatgttattttgatgttattttcttgttgttttttttggtatttttatagaataccgtaaaaatgtaaaaaannaaaaaaaaactttgaacgtaaaaataggggtgttcatataatcttcaatccgtagtttcaaaccccaact

SEQ ID NO: 40224 - DNA, 1458 bp, Cannabis sativa
atatttaaaatttcataaaattatatttttatttatttatttatttttttttttgttgtttttgtgcatttgtgaaattatccgtaatattaaaaggtgtcttgaataatacattgaattctgtgattagtagtacaattgaattcaaagcgcgcataattttatgtgacgtactcaattgttatccaaaaaaatgatttatcctctttttctttagtggcaaatgtgtcgcattgttatcactcataattatgactacgacttctatgattagtactatcctaaatatggttgctttctcattactttataaaatgtcctatcttcatcatgtatttatcagtagtacttctcaatttgtttaattatatactattattatttattataattagatataattaattttaaacataaataacattttgtatagatcatatcaacttaaattatgttatccaacaaaaaatgttcttagcgccacaaggattttcatgttcaagatatatgaagaagaaatcgttagccacactccagacaaatagccatcgatatacctttatcactaacaagaagcattccacaaaactctagcgtacaactatacttgttatctctcaattaaaaatctgaagtagtgatacttggattttgatatatctgaagtattatacttggattttgattaaagatatatagagtaaaccactaaggtggtatttggttgtgagaaatgaagatataggaatagaaatgcaaatgggaataggaataggaataggaatggaatggaatgcaataaaatttaaaatgaatacaaaaaattaataaaaaacattaaattttatctcttgttatattagaatgatatttcattcatttttaaaatgaaatagtcattctagcaaaatagtggaaaaaggaatagaatgaaaattgtttcctttattggatgaatgatatttcatccaataatttaaaatgcaactaaataaaggaatagaatgaaaattgtttcctttctatttcattctattttattacctccaatcaatagtatattgctaattgttgttgacaaattttttaaatgaaattaaatatatatatatatataaacaattttcgatgttaagaaaataacattagttaaacatgagaaaatttttatttatttagtttcaatattatacttactatgttattgagataatgaacttaaaacgtttccggtaaaataaagttataaatttttttaaaaaattagtaaaaataatatactaatttatatataatttagaacacaataataattaaataatatgaatagtctttctctctaagtttctaaatcaaaagatagttttatttatctaattatcaaaaatatataattataatgagacaatacgtattcatagagttgggaaaagaacttagctacataaccctaataag

SEQ ID NO: 40225 - DNA, 2893 bp, Cannabis sativa
tgtattcttcattcaagaaaacaccttatgaggagaaagttacaaaggaaaaccgcaaatattgaagttttttaccattaaatattgtgctatatttacaacgcaatatattaagaaaattgtattttatacccattttaatttgttttaatttttatctttaagatgtactcactttcatatatgatttttctattatactttttagattaatgtaaattatgtactgaacttaataaaaagtgaaagtatattgggcaacccactcacaaaagtagatagatttaaaatatcatatgcgagtattttttattaatgggtgcaaaaaaaaaaaagatattcctcaacttatctctaatatataagaccacttctaatatatggagtaaaaaatatgctaaatttgacacaaaatatcaataaatattatatttgacacactttttgtatgctctaatgcataacaataaattaaaatgtaaattgacataaaaattaatgataagtaataaattaaatatatattttttaaaaaaataatgacaatattataattaaaaaagtatattaaagtaagtaattaatgttaaatgataataatataaataaaaatgtgcattaaatacgtgttaaatttgatataatactatatcttgttttaaatttggcctatttaacgtgatgatcaaaatcattcatgattaataatacaacaattcacaattaggtggaacctccttgaactaggatagctcatcgtctaatcgaagagtatgttttgccaaaccatgagttatcgaattcttatcgtaagcaacatgagacaaaactgttatcagaaatttagacaataaagctataacatcctctaacaacacccaaactcattaaaaaatactctttctttgttgatagttgttagcagagaaagcaaatttaaataaacctctctaattgggattctgtacgaatgagtccaattgagtcctaccaaaagagccaagatttcaacttgtaatactgaaatactacgtgaaaaaaaaaaataaaacacaaaaaaaaaaaaatggtattagaagacacaatcttttaactaaaataataggctaaattcgattaaaacaaccgaatgaatcaaactaaaaacttaactacaaaaaagagaacgaaaccccaactaaaaatctaaggaaaactaaccaaatatattacccttttactagtatcgtcaaactaagaactcaaagaagaaaattttaaacaaagcataaacaactcaaaataaaacagtaaaatcaagaaaatatgtaacaagtaaaatatgacacaagttttaacacaaaagaatattttataaaaatatcaaaataaaaatattataccacttatttggtattctattgaagatgctctcggaacacgctgcaagaatgcatgcagctttaagagaagttataaactatttcaaagtagtccatgaaagaaaagaatgaggtcattgataagtagagtgaaaaatgctcccacactaacacaataaataagataaaaaacaataaatgaaattgataaagagattttttttttttaattgagtgacaagtataatctttcaaactattttaatatagttactattataccattatgatcacaaatgtatttaattattaattagaatgagatagaaacgtatggcatattttctaacacttttttttaatgattattttattttttaattaaaaaagtaaaaatattttaaaaaagtatgttctataaaataatttttaatttttaatttttaaaattagaatcaaagtattaaaaaatttaaaaatacttccagtacttctttaaatatttttgttaatcatagttaatttatattttttttcattaatattttgaatctctagttcgatcccaaccttggacctcgccttccagcccggatctcggacaccaaccccctaccatggcccaacctagaccccaaacctgaaactgaacttggactcagaaaactaaccccaaacccaatccttacatagatcagaactaaacctgaatcccaacccgggcctgaattccacccctagctcctaaaacttggaacttacacccgcacccagtccttggacctcgaccttggccctcgaaactctgatgccaaacctcgatctattttctctcaccttaatttttcattctttgcttaaataaataattgataataacataaaaaaggaaatttataaaacatgttttcgtttttatttttaaaataaaaaaaatagaaacagtaaacacatttttaaataacacaaaaaatctactttcatttttgtgaattaaaaaatgattgtatttatcaaacagaatattcattgatggttactaaaataatttaactataaatattaattataaaaatattaaaacagtaaattttgatcgaataacaaataacaaaaagaaaattttgaattttttatatttaatttagctacttaattaatatatatatatatatataaatatctctctttacactatataaaaattaaactcaacctttttttatttatttattttttgctgaataactttttttcaaccgatggaacaaactcagctcatataatataaaaatgagatattttttaattatgtagaaaaactaagcataaaaattcaaattctcttaataattctcattcatggatgatttccattaagaatgcactcatatatatataggacaaaactatacttctgttggtaataccggattgtatccttaaacatcatatgttgtatcaatgcacttagtactgttggaaaattgttgtgctccaatagaaatattaaaccaacaagattacaactc

SEQ ID NO: 40226 - DNA, 1927 bp, Cannabis sativa
caggcgataatgatccttagtccatgagtaaatagtattagcctctttgggcaagtgtttaggtattacaagtgtttacagtaagggtttctctattcctcttgtttctcttgggagaaaactctttagaaattttagcagagtgtttgtaagtgaaaattgttcaccctttgttcaaagaaaatagaagtatttataggcacacatgggataaagggcataccctttaccgatctagggtttcgtaccccacactctgctaaggctggtactactcaagagtgatcttaccggcagaaccttcttcatcgtgtggcacacagttgcagtgagggtattcgtacaaactaggacacacgtcatgcaaaggtctctcctttgcaaagtactctctaaccaggtcgttgggaaaaaagcatgtctgaaggtgcatatgcgcactatcatggcctggtacggtggacaaaatctgatcttgtgtcaaaagaagatatcaccgtctatagagcaatccgtgtatgatgctgacgtggccatgctctgcgaggctgctattgcgctccaggttcatcacttaaggaagttcttcctgggagtcatccgtttcaactaccttccgggtctggtagacgtctcttactttatgaataattttgactaatccttttcactgctatatttttccctccaatcgtgccacatgtcttatgcatgaaaacttggataatttaccttcaagctttcgagactttttgaatcacaggaggttgttatctttcccagtactgatcattgacacgtgttgatgatttaagtcgcggatacacctctgcacaagctgtactctaccgagggtaaatacgacatctacctcctcttgcgtgatgattataacaaagagaagaaacagaaggaatcttggatgatcaagcatggcaatctggacctactccttcaagcagtttgtaataccagtaaccttcatcaagattctatcaaaaaactgaagaaggaagctgaacgacgaccggcgaatggtgtgaaagcatacatttccctggctgctatacaaagaatgagagagactgttcctcagaccattcaatgtgctcttgctaaagaagccaaggcgacaactaaggcagagaaatactgccttcgttccttggagatggcttacgccatggtcctttttgatttattgaaggttgatcctactgtaccctgacttcttggtgagaaagagagggaagaggctacaagaagagtgctttccttgaagcgtgacacatatcttcaagactttccccttactattgagagtgacgaggagtcagacgatggagtcttaagtcctcaaggcctcgtagaagctcaggcgccctctggggagactgaaaaggggtctatctaagatgcagttgagcctaatttgaatcttccaaaaaagccagttagtgactcaatccaagtcgagtcaacagtccattctctcactcaagaccagtaggggtcacttccgctcttcattatctatctctttttttaagataattttagcttctctttttgcagagttgtttttatttttgcttgctctgcgaggctgcttatgacaatcatcttttgtgcaagaacaacttaatttgccttttgcgaggcactgttatagaccttcatgttttgctcacttttacttcttagttttaagttttatgcgtcggcctgttagatgattttaagggctgttttcttatattgtttagaagcatgtggttccaacggctactaattcaatccttagatttcacgtgacccacaaccctgttgaccaaaagtcatccactcatttattttgatgataaacaaatatttgattattatttgttactaatcttttcttgatcattttgcaagcaagttcaca

SEQ ID NO: 40227 - DNA, 1750 bp, Cannabis sativa
catcccaggttaattgtgaacctaggcattttacccagcaccaactcaacctagacgttaggcccaccaccaggtcaacctaggtgttgggccctatttctagggactcgagtttgtggttttctccccgagtttacttgaatctttgttattttttatgacggtgaagatgcccagagcactttttgcgaaattaaattagaaatagctcaagttaacaaaatgtcaacatgggcgcatggcaagtcccaggtgtcaacttgggcgatgtttcccccttctaccccttcgaaaattctgttaggtgctttttaatgatatggtacgtttatctttttttttctcattttaatctcttaaaattacttttttaccccaatattattcttatttcttatagttagttttgttaatatatatatatatatattaatttaatagaaaataaaatcttgataatcattttttttttcaataaaattctaagtctacaagaccaaaataaaattagaggtgagaaatttatttattaatatacaagacagatggaggactcggaatgacaaggtccataacaactctttgggtagcttgatatattatattgactctatcttttgttgctacgcagattatggttcctgtttgttcaagtcccttcaagatgatggtagttctgcttagtcgcccccgccggaggattgagtcaaaattaactgcgacgtcagagtcggtggtgattccatgtgtgctgtggcgattgcgagggatcatacggagtcaattttgtgggtggcgacaaacaagcttcactttgctgactctctcatcggggaagcggcagcttgtttgttagctctggagacgacgacctcaatgcatcatccttttgttgtggtggagagtgattctgagagtgttatcaggaacctaaaaggtgttgaatccttaaggggattgagaactatacaagacaatccaaacttctctctacttttatgacttgttgtaatttttcttttatttctagaaattttaattttacagctcataatatggctaaatgggcggttgccaacaatattaacggcatgaaagaggtatctactatcccaaattctatcttttgtaatgaccatgaggtctataatatataaacaattttattaaaaaaaaatttatatatatatatttatatatatacgagacagatgccctctaagcccaaagaagacaaaaaaaaaggtgaaaaacctatccctttacaaacaaacaaaaaaaaaatcacacccaatcaaattgtgaagagatattttaaaaagcactagtgtctaagaagtatagattggagcaatttattatattattttgtataataatttgatttaataacaattatcagaagaaagcaccactcacaaagcattatgagtcaaattaatagtagatcaggttagtgtttttttttttgggagtagataaggttagttaaattaatatagcatggaatatttatttataaccacatccggacaactcatgtagacctatatcgccaaagccacagccacaaccacccatagccatattagaactggctgactaacaacataaccgcgttaataaaaaaaaaaatactaacaacataaaaacatatttgtattgttttctattttttattttaaaaaattacttttagaaataagaataaaaaataatttttgaactttttaaaaacaaatcatgtttg

SEQ ID NO: 40228 - DNA, 1899 bp, Cannabis sativa
tttcgagatgtcccgttttcacatccacctaaatttatatgccttgaatgcacattattcatttaatttatataagtcaataatacaaataaatattggttgaattcagcaattatatattacgaaatgaaatttgaaatatatatgacatttcttatgaatatatatatataaatcttatacagcttgatcttctgaccatttatttttataattaattgtcatatatataagaattggcagtagggttctggctaggaatttgtgttggatagatgaagaagatgcatatgttgtcctacgtacgtactgctagtctgctacatacgctctcaatttctgtctccatgacacaagacaataataacaaaaagtggattatattacccatattatatttatatattgccactatatataatatattaaaaaagtattaaatgtacatctccaatgctgatcatatatatatattcatacattgtaaaatatttctttatatatgtagaacgtagtcgatgtacgtaaattttggattttgatatatacattaatgatctagtgcggtgatgaatagtattggtttggttatattagaagtacaaatctttattattttgagaacaattcactaaattataattaataaccctatgtagggatctattaatcgacctcatgttatagtcatatattgtgggtatttttttagtgtggtgaatatatagggatctattaattgactaataccaatccgaaaagaagaaaagacacaatgtttggatgtagtgcatgtgatcattaatgaaaatattaatggtttggctgccattaatattatgtgctaaagtaaaattaactaaagcagtttttgccaactatataccctagtagatagttgtctattttaacattaacgctaacatatatacctctagtaacatattcacgaagatatatacctgtatattaacatatgatgtataatcaccaatttttttctcctaaaattaaaaaaggcatatagagagactcacttattcacaatcacatgcttaatatttttgtaaactgtttctctaatggtaaacttgtatatatatatatatatgctggtcagtggtcacatttagctccattcacacattattaaatcacattttttatttataatattattatttaatattaatttaatacattcatttttaattatattattattattatgttttaaaaaattcatcatttattaattatcattaataacaccaaactataacccattatagggttctagtaatgggataaatgtatactgtgattaaatctagcaaaaaaattatcattaataataattattttttatatcattttgtaacctaatttgttattttagattggattagagcacacaaatacaaaaattgtattagttaataaatatttacttatttttttggttacatcatgtaactgcgaagtgtaaaatttaaacagtggcttgtcttgtatgcatgagtcatgacattaatatttgggtttagaatagtatgatatgtcacatataaaaagcaatttatttaataaagtccttatcatcattttatagagaaagagagacccaccatccatgttgggtcatgaatgatcgagaatatggaattaatttcatgatcaacagagccctttcagacgagggcaaaaggcttcttctctcttggtagcctagtctagactgcagatatatgcaagaaaattttatgcgaagtaactaaaattatagaggaaaagtaacgttattttcattgggaaatttacacccactactgattttttccattttattacatttatactgtgccacgctggaaacaacatttgtactgtttttttttt

SEQ ID NO: 40229 - DNA, 2916 bp, Cannabis sativa
  modified_base (1897)..(1898): a, c, t, g, unknown or other
acagtaagtttataatatattttccactgtcaatatcggtcagtctgatgtatagttgatacatctaatactagtttactttactaatatcaagaataagacattctacttatccaagtgtaagtaaaatatccatgtcgaaatatttttttttattttttttcatagcgatatttattatagttacaatatcatccctgtaaattcttaataaattcataatagtttatagtacaaaaaataaaatttataatattacagtactattcttgttcaaaaaatttctaatatattttgaatactatgcgtgttcaaaatttttaaaaattttataaaaataatattgtaactataactataaaaaagatatattaattctaatatatatatatattgtaataaaatgttacggtagcactcccaagaaaacaaaaaggattgaaaggagcctattgtagcataccacgcctttatatatgtgaagaatttttaaaagtgaaacccatgattatctgtgtctaacaaattaatctatctaaagaaacatgtaataatattatgaaatagtatttatataatagatgagtatactgtatacccatccacagaataatattactttcatacctaatagttatttgtcttttagtcatctgacataataactagctaatacagcatataattgtgaataccttctatttatttacttcattctatctctctctcttgttaaaatctttttatggttaagtatatattctcaaaggataattcaatcttttctgttaattatttgatatttttaaaactttttaaaaattattctattaaattatgtgagatttaatatttaattaattaataaaaatattgaaatataaaaaaatactaaacattaatattaccttttaacttcttatctatcgttcaattcaatatatataaggaacgttgtgaaagtttttccaactaatagagaagtcattcatactgctacagaaatatatatctatatatatttttaaaattaacaagaactaaataaaacaattattaattatggaccactacttgtcttggccaattaagtaagacaaacagtccctatctattcaagtcaatatattattgcaacagagcaatatttatgatataaaatataccagtactacactgcgagaatcacatggttgctttgtatatatatctgactgtatctacatgtatacaatatacatgtatttaatcacaatataatatgtttagaggtactagacaatacaagtagataacacatatacaacacaagcatttcaatgaagtttccaatctttcaaaagtgttccatgaaaagaccaagacttttcgataagaagatcacaataaataagaaaatggataagaagaaaaaacgttggtgtgtatacatttattattcgaattaatgacaccaaaatagactcatgatatgaatatatgattaaagaagaagaaaagaaacctgggtgaaagtgtgaagcaataattaattacttcctacttttcaagagaagttgataattagtagagttttctgaatagaaattaatcaacgctgttatcaaatgtttttggtaataatttgcggcataacctttttgaatagtcaggttttgtaactaattctcaatttttaaattttggtggtaaaacttcctaaactcgtgttctgttagcagtttaacattttcatccatttctagctgttaacgtggaatatctacgtgtacacagtgtacacgttgtacaattttattagtccacgtaaataaatatctaaaaaaaataaaaaaaaaattaattatttaaaaaagaaaaaataaaaaaaataaaaaaatttctttttctttaaaanntaaaaaaacaattttaaaaaaattaaaattaaaaaaaaaaccttaatttcctaattccctctttctcttcttctcgttctctctctcattgccctaccctagccgccatccccgtcgaagccacaccatcaccatccaccacaactggtgactacgaccaccaccaccaaccctcacaacttcccatcatcaccaccactgtcgaaacaaatgcagaccatcaccaccatcgaaaaaaccctaattttgaaacctaattcgcaccctctccttctcaaccgcatctcccacctataattacaccaaccctaccatttggaatctcaatcttcttactcgaaccctgaaatccatacgaaactggtatcgaagattgcgaagacaaagaaccttgttgtcccttataatctgcatataactctcacaaaatcacaacttgaccaatctaaaatacaaaaacaacaacaaaaacaaagaaagaagaccaaccacttggagaatcaaagccattgccgccattctcaaccctagggcgcttagtatcgagaggagaagccccaacctagcaccagcactagcgttattgaacaagcgagcggcgatctcctgcgctcgttgcttggctaactggatctcttcgaccggtggaggaacgttgttgtaggagtctcgggagaggaagaagtgattggggcagagaatccagtgggtcgacgaggcggttgtggagtggtttgttcttcgtatttgcgtttgttattggtgacagagtctggaccagaagagtactgaccaggaaaagaaaaagaaaaagaaaaagaaataggaaaagattatgaggaaagaaaaagaaatttttacttttcttatttttgaaataattaattttttattttttcaaatatttttttacgtggaccaataaaattgtgccacgtgtatgctgtgtaaacgtgaacattccattatggcagttaacaactaaaaatagataaaaatattaaactgctaatagaac

SEQ ID NO: 40230 - DNA, 1050 bp, Cannabis sativa
gaagacatcaagaaaactaatatataatacctatagaaatttatgatactccccaaaacaataagcaacacataattgggcataagaattaatatttttattattaattttgatattacaagatggggatgcccaaatcttttgtgccataaagaaaaagaattattttgttcagacaaaatacaaaaattacaatattatttttgcatattagacacaaaagtgatatattagctagaggatggctgcttggtgagaagtaagaatgttgagttaattaaagtcaaacttgaagggacctttgtcaagtttcccaatatgcaaaatcttcaaggtaacttgatccttgacaacatagtgaaatgggtgaaattcaaaaagaaataccattcacttgaaaaaattgggaaacacttaacacaagagtctaagaatgaaagggagaaagaaaagtggattgaccaatattttgaatttgcaaacttgtgtcattatccatgtgaacatacttttttccaagataagtgttgttggaagctcaaattcgctcatttggtgtgagatattcgtggctgctgagtctggatacagctaaggtcattttaccatttttggagaagcataataaacttacatctcttcaatattggcattggcattgcttgagaaattatgaaatgactcctgaaaagaactagcattactggactgcgtgtccaaatttgtgaccatcggttacagtatagccgacgctgtaaaaccattgcctattttttttaaaagcatctcgtttcaattttgtagttgttttaaattatcaggaatactaaacgatagttcaagaatattcaactatagtagacagttttaaacactcacttttattagcgatgttacttgaaaaaaaaaaaaaaatcaatttaaggatcaacaaaaatagtactttttattaatcaatatttaaggttattattattaataaataatatagtttcatgttatatctttatatattaaaagtggctatctaacggcatttcttggtttaac

SEQ ID NO: 40231 - DNA, 1345 bp, Cannabis sativa
  modified_base (1163)..(1163): a, c, t, g, unknown or other
ccaaaataacatcccaacaatgttcaattatacatcattacacaaacctattgatccttatttagaggaggtcacttcaaaggttgagttctgagttttttttgacctgttccacaatgtatttgttgtgagaatttattgtctatgccacatgacattccattcaattttttcattaaatagtccaaaaaatgggtataacaaagaacaaaataccatatgttcacttatcataaattaaaaataaaaaaatttagagatcattaaaatttttgattctgttcttataaaaattttagaagtgagatttttgttacatttggttgcagaattaagaatgatattgaaaactaatcaggttacaattttaataacaacatgagctctataagttcaaatacacattgactttgagttaattattattaaagagaagttaagagtaataagatgtctataaaacatataataacaaattccatgttttcggatccacatcattaaggatcacttaaagatttttaagagcttcttgaatttttgggaggtgagtcccatgtactcaccaacatcattctgtgataattaaaagcttcagttttcagtagcaaaaaaaaaagttgacacatatttgtggtttagttttgtagaaagtgtacctttgacacacatatttatactatcacaacttccttaaaatataagaattggtacaaagagaagtgaataaagctagaggaaggacaaatttacttgtactaaaattctctcaaaattatgtaaaataagaaagaatattgattctttaactaaataaattttactatattcttctcgtgcctttatatcctttatatacatttaattctcataatatttatttaagttcttttttgaagttctctaaatttaagttaattaaacgaagttctgtactcaacaataatatatatttagataaatcacggttttatcttatacacataaattctaaactctttttaatagtgagacataaattgtttgttgatgacaagacttaatatacgtataaaacttcagttcaaaattataatatatctattctatataaaatatttctatataacaaaattcttatttataaaaaattattaggagacttttttttttaaataaaaaanataacaaattattagatgttgacccacaagagtcataacaaattattagatgttgacctataaaggtagttagttcaacctaaatataattaattcatctaaagtgttgcaattaataataaatttgtttttatttttttataaaaaattattttcaaattttgatatttaaaattagttaa

SEQ ID NO: 40232 - DNA, 2348 bp, Cannabis sativa
agctccacgtgtcatccttatctaagtccgtattttgggcaaaatcaagggcaacaaagaccattgataaatctatagaaaacttatgatatgatttcaaaactggtattattaccgtacctcacttgtatatattcgctacaacatttaacttcgttgttattacagtatctcaattatagtcgccaattctacttttagttgtaactaaccttactaataagtttgctctgtacatcaaacatataagccaattagttaactacccactttttacaaataagtatattattttattataaattcatcacttgtgtattcccaaatacgttagcagatgaattactcaatagattctgaatctcaaagaaatttctaagcatagtcatacacaactaaaataaataaatgaacgttaaaaagataaataaataaataaatttctttcttaattaaaattaaataccaaagtacaataaatatattcaaattggaattgtgttttgaaataatatatgaaaaaactaaggttgttaagatagtttaaatatttaagtaaatattttgttctttaattattaattaaataaaatttaaattatgttggttgaagtctatcaaagatacttttaagaaaataattagtttttttttaggtgacatttggtaatattttatttttaaattttttaatcacaaaaataaaagtaatttttttttattttttttttaaaataataaatgtgttctacaactatttttgtttttattaacgcaaattttcattaactaaaaataagcccttacgtaataaatttgtcacaaaagtaataagaaataatatatatatatatataacactagatatttttacatagttttgcagttaaatctgcatactccacaagtctatcttatttgtgatattttttgaattcaagatacaatatgtaattgataatatatctttttctctctaaaattctccgtccctttttctgtagaatctacccctatttatagaaatataggttggctgttatttatatttgggatcaatttgaaatgtaaccgctcatgaaacatgaataattcttacattttatttaaatgcatgtgggataatacagaataattgcttaactattttttattcttatccttatagagggttaatgctgatttgaacaattgtatctcgcttaattccgagttattatccttgactatcataatgtggaaaaaacgctaagtgttagcagataattcgcctcgtcaagtttttttatttagaattgcgaggtagctgtctcgctatttgtaatccaaggttgctttgtacgactgtattgactcctttgaataaatgaattatcttctttgactatgtactccgaggcaggtatgtgtctcgtcaatataagttttaatagtcttttatccttatctcccttaagactatgtactcagcgagttatagatattttctattaatcttttatttagcgaattattttttttcttcatattaaatgatataatttcattatatcaggtggttcatatttgacaggaagatacgtgtcactttctgaagtgaagctgaattttgggtataacaattgccccttaaaaggttcttttttttaataaaaagagcttttaaatgatcaccagagtatttttgtcttaatctcagtttaaaaaatggcatcctttgagttttggcagtttatgatttcgaggcacatcattagcattaaatgtccatcttttccaattctcccttgttcccatcctttagatctttattctttcaatctagcgatatcattcttaaagtataaaactcaagtgaaaacatttatttgccatttttgcctttcaaatctttaagctcttctacaaaagatcatctttatttttcatcaccttgcatgccctcattatccttgacctattttatgcgtatttcatcacatttcatttttaatcttagaaattctcagagtccatcatcacattcgtcacgatcccaatcgcgaagttactcactgcccaaaaatcttcagaaatatagtaagtggtttatttcttactctctgttattccctttttcctgagttggtacttttatttttgcgtccaattgcatcttcttttactgtgtttggtttaagtatttttttattttatattttgggtaatttctagggctttaaggagtgaacttaggtttatttcaaaattagttatgttgctaattctattttaattaggttaaactagtataattagcctaatacaattatttaattaaggcaaatgggccttcacaattgaggttg

SEQ ID NO: 40233 - DNA, 1889 bp, Cannabis sativa
tataaaaataaaaaaattcctaaaaaaatagagagtaaactaaaacagcccttattacaaatattatgctacatatatttgggtgatttcacaatgctcatccttaaaaaagatgcaccgatacactctttatcttttttggcattcagaagaattttataatttaatttttttcacaatcgtgtacgttataaatatttaagacacacgtctaatagactgtttgaactataatatttttagcgtattaaatttctcaaaaagtctcaaaattttacaagatatcttaataaataactacaacatacacgattataaaaaaaattagactaaaaaattctctcaaatactaaaataaataaaaatacaatccctatttccctattaaaagtattgtaatttattttttttaaaaaaaaatgttttctataaataataaatatttaaatttgtataataaattctaattccaaattccttcttagggcaccagctgttgctagctgtctctaatccccacccccatgtgacccaccacccctcttcatcctccaaaacctttttttatacccaaaataaataaataaattacataattaattaaataaaataaaaccttacataacattattatttattatttattatttattatttcttcatatccatttatttatttataaaaaaaaaaaccatttatatgatcatatatcttcttcttcttctcttctcatcccaatcccctaaaccatttctgtttagacagtttttattgttatatttctctctctaaaaaaaacctatatatacacatatatagagagagaattgtgtgaaaaattgaaaatcactaataaaaaaaataaattaaatttattattatggcacaattaccaccaaaaataccccaaaattgggccaataattcttttcatcctcacaatcaacaaccctattgggtcgacgagtttcttgatttcacggcggcgcgtagaggagcccaccgccggtcagccagcagcgattccatcgcctttctcgaatcgacgacaaccgaagaatttaatgccaattctactcgtaattctgctgcattgatcatgatgcaaagctccttcgataaattagatgatgaacagctcatgtcaatgttttccgatgagttttccggcgccggcgccggcgccggtgacggagtagtttgttctaatccttccacgtccaattctgacgatagggatagtaataataatgatgagaagttgccacagaagctgaaatctgaaccggaggaggttgaggaggagggttgtagcgaaggtgatgagcacgcgccgccgttgaattcttcttctaatgctgtttcgtctggggatactgtattcgaccccaaaagggtaaaaaggtaattgcattgcatggatttattcttaattttgtttgaatatgattgattttatatagtttttttttagtttaatttttttgtgttaataatatttaaaatatatgttttttaaaatgtgcaaaggaagaaaaaattatcataattaaattgtaaataatattcatgagaaaaacaatgtaaattaaatgaattattttacaaatacacaaaaaataaataataaaaaagttatgaagatatgcttgtatagaattttaaataatttttatgattttaattaaataaaatatgtatttttatgttatattatagttaatttattgttacctaatttttttttttataaaataccgtaaaaatataaaaaaaataatctcaaaaataaaaaaaaaaaattaaaaaaagatagtactttatttaattattcttaaattaaattaaatatatttaaatttataatttcagaatatgtaaattaaat

SEQ ID NO: 40234 - DNA, 1900 bp, Cannabis sativa
ttctatttatccacaaattataaacaactgtaaccactacaatagagataacatcagaaagcaaattactatccttgaaccaatccaaactagccaatgctgaaactaaagtggccaacaagtacacccaagttaatttgaaacaccttgaacaactctcagagagaagctgcactcaaaaaataaatgaggatttttgaagaacctgctcacaaataacttacataaggcataaatgagagcccaaatggatgttgcaagtcaacaatttgtctttagttagcaaatatctattcatctgcttgccacaaaatgaatctatatttaggtacattgagcctacatcaaataactttggtgtaagtcaccatgcattacaagccttgaacatgccattacaacatgcattggaaatatcacttggcaaaaataactttctaacattgaccaactttttaagaataagatgaaaaatcctaatcttttaaataaatattatgtaaccatttagcctaaagaagtattgggaaaacatgtttaataggatcgattttactttttttacctataaatattaatttcttataacatcaatatcatgaatagagtatataatattttgttaaactcgtaattttttttttggtgacgtggacatcaatgtttgacacgtgacaaaaaaagataacatctcggagttgagtagtcccgagtcataacagtcaacttgggaggggcccctagccccacgcccaagttgactctaataactctgaaatggtagtttgtattcccataagtcattttcaactcactaaattttagtattatataccatgaagacatggagcaaaaaaattccaagtctcgggagctgaaaatatacgaatcaacacctcaaaaatcagcctgggcacctagggtttcacccagcacccaggttgacaaccctaactagagtttcaatttttgggaccgtcttagtgcaaatgagtcaaactttgtattgggacatgaactagacataccacaaatatatttaaggcatcaaaatcagattcagaaaactttcatttttgagcacccgaataacactggtgcccaggcaccctactgcccaggttgacaatctatcaatctgggccacttccaaacatcagatcaaaaattcaactcatgcatcttcattgtcttcgtcaaaaatgggaaaaagtgctttcaaggaagaaacaccccatcgtgggtgccaaaatcagtagggttgtacgttagtcaatttgaccgatttatactacatattttttaacccaatgtaaaggccgggttacaaatgcaaagataaatgaaattagtactacaaactacagttttaaatcatagaatatattatatataatagaagtaaggtgtgaaaaaaaatagaaaaccactagtcggattgggcgggttatttcggtttaattgggcgggttggacttatttttaactcacccaattaactgattgggcggtttataattttgtaggatttttttagtttgtatttttcgtcgacttttctagtttggtttggacgatttacgaaaatttatgtatagccttaataataaggagcgagcgcccaggttgacattttgtcaacttgggccaattccaagaaatttttctaaaaagtattccgagcatattcaccgtttttaacagattcaactattttcaccgcccagattaactaaatcagtttctcaaaaaagtgttccgaaaatttttttagtcatcagaaataacaaaaaacaagcaaatttgagaaaaaaaccacaatcctaagagcatcaaaactgaggcgaggttgacaaaataaaaaatatataataatataaagattttaattaattacaaa

SEQ ID NO: 40235 - DNA, 3363 bp, Cannabis sativa
aataacatttccattctcatcaacataagaggttatacggttttccatcttccttttcttcaaactcgcatggaaaaatgaagtattctcatcacctttttgcaaccaattaatcttgcttcgttgtttaagaaagcttaaatacattttttcttgcattataaacctttcagcagcttggttttctccaaattgcatctcagaactactcgggttctcttgagcttggagtttgcctatttcaagttggctcctagcttcttgatatgacctaccgacatctccaatagactcccaattgaacttcttaagcttgtgtttgagcctcattagtttataataaatccccctcaatccagtagcttgcatcggcatcccccaattggtcttgacaatctctggaaactctacatggttggtctagaaattgtaaaacctaaagggtttcgtcccaatattctcagaagcactcattgacaccacacaagagcaatgatctgatatgacttcccacttgaaccgagccacagaattaggaaacatatcagtcaaagcttcattagcaagagcatggtctatgcgagaataaattctgagcaagccttcttggttattaatccaagtgtagtttgaacctattgtcttgatggcctccacattggcactatcttgccaggaagacgagtcggcaatgtcagccaaggttatttgattacctcctgtgcgatcatcaagatagaatccaacattgaaatccccttgaatgagccaaggcttgaccagaaatcgaagcttcaaaagctccctccacaactctttcctctcttccatagtgttccaaccatacacaaaagtaacacaaaacgcatccttttgtctagaaagtttcacaaaacaatgaacaaattgagaactttcagctatcacaattactctcgcatacttcctccgccagattatcaataaccttccttctatggtgttgctagtaaagtaatcccaatttttaaatttattatccgtcatggcagccactttatttcctttaagctttttttcaagtaaagccccaactccaattttattcatactacagaaatctacaaccttatcctgattttccaacttattaatacccctaacattccgacaagcaatattgcaactatccattagcaagtaaaatagtacctgtgtccccttcaaaaaccttcctagtatcctgatagtgaccatcagcttcctgtagaatatcaaaaaaatgttccgtgacttatttgattttttgttcgcatcagttcccttttcagtcaccttattagcccttgctgaaatcaatttctttggtctcacccactcatcttgtgtcccaccctcctattttttctcctccttagaatcggctacctttgaatggtcactagttgaagttgataccgaagtattaactatttttgattaagccagatcctgacctttgcctttcttatccttctcttcttttcgacaatccgccatgatatggccatagcccgaacaattcttacacttaacagagagccattcgtactctactctttactcaactagctggccatgttcattcaggtaaggaatcgtgcgcgaggtggatcatccgtaatgtccatttcaacaagaactcttgcgaattgaactcgggtgcaatctttagtatgttggtccaccataatcggttttccaatcgtactaactaaagcactcaagttattatttccccaatattgcaacccaagatcgtggaggctaatccaaagcggtacagtatgaattagtttcaccgtgttcaagttcgtcgaccatggcctaacaataactggtttcttgccaaattgaatcacccccgtttccagcaccttgtcttttgtagcttcatcattgaattttaccataaccaatcccattgtcattctaacaattttcattatacctagatgtccccagatgcgcttgataaacccctcaaagactgccatcggagggttagctccaagaaccatatagacaactaccgatttccagttttctgcctgtctaaccacctcctcaggatctatacgagctatcctgactccattcctcactatcggctctgtatacatcagcttcaaatccctggaaaaaacccacccctttgataatgaggaccaatgattcttcgctgaagctaagaattgatcctgttccgcccctaactcattctcatcctcttttgcccaatactgaaagagatctcttactctgtttctgtgttaagattagccaacccaaccccatttaaatggaggggaaagctcctagttataggtaggagataacacttacagtcgttcaatcgtaatgagactgttacaatattttacatattaattgtattgattacaacatttataaaatagatgtaatatttttcatgattgcactttgaatgctcgaccaatttataatgatcaatatatttgcacttttttcagttgttactgcggtttcattaaatatgcgaggtgtgtctttcttgatacatcgagatctatttagataatattgagaggtccttttggtactactagtcccattttaaagaatattgggagccatgagttcactatagtgaagtccttctcgtacggggtaaattatcccaataacacatgccactagttcttcagtatagcctgttctgtgttggagaacttaaaatagtctgaacccacatttatcgattatcgtgatgccttgttatgttgagcgtcgtattttagattggttatctaaactcataggttttgataagatcatcgtacaataataatgtgaacctcttggggttcttatcgatgtgtgaacctgtcggggtttgcattgatgcacgaacctagcggggttcttatctatgcataaatctattagggttcttattagtgtatgaatcttgcgaggttcaaattggttgcatgaatttcttggagtttgcattgatgtatggacttagctgtgatcgaataaacacatgaacctcttggggtttgcattgatttatgaacttccgcgagttcttcttaatccacggaacgcctgcgactatatgggtcgcgtattggacatttgtgtactgacaacatagaatttgttggttttggtcgaattgtcacacacattagtcattttgacctgacgcttgtaaagatgttgtctttacataggccgcggaggaaaaacaatgggtcatcgcatataatcgatatatgtggcgactgtgctaacttctctctatatgtcctacttttattctctttactatgctacgcatagtgtgcaactagg

SEQ ID NO: 40236 - DNA, 2531 bp, Cannabis sativa
  modified_base (40)..(47): a, c, t, g, unknown or other
aaccgctcttccgatctacatacttgtgagtagatctaannnnnnnntaaaataatttccaacaccaccagcattgggggccgttcgaggatctcaagctcaacaatagccccttatgtccttcatgtggccgaccaaccatcagtaggagtccccatggccggtcagactcctctagtagtccctatggccggccagaggaagcactccctcctcaaggggagcgagtcacccaaagatcaatttttaactggcgaggatggtggaaacacccaaaataataatttgagaagtgaagttaatcacttcaaatagttagatccaccaaactctagaaataggtgcgatctactccatgtcaacgcacaaactccaccaggcaagcagagaagtatgcgtgacaattagggctggccgaccatttacaagcaccagactcagggctagccagccgtataccttctcccaaggtatgctggccaggctctggccaatttgagcctgcaactcaatcaaagaaggctaatcaaccaagcccatgcagtaatagatccttttgtgcaagcacagttggatcaattacgagacatgcttaagggcctagctggtccaaaaccttcagaacacgagctagacagggctaggggatcaccattctcaacatacatcaatgccttgcccttgcccaaattcaagatgccggcttggaagatgtacacaggaagagaagaccctttagtacacctgaagtactttgagatccaattaaatttcctacaagtatatagagatgtgcgatgccgaatctttctggcaactctagctgaaataacccaacaatgtatttcaagctagccccaagaagatttaattcttgggaagagctctctcgagaattctacatttagttctttgcttcaagataaatacttgcctgacttgaggatcttgtcgaaataaagcaaagaaaagatgaaccctttaaggactacattcaacgattcatgactgaggccatcaaggtcacatgcctaacagaataaggccgatatacggccataatcggaaacatcctatcattgagtgacttctggaaagatatcaggaagatctcaatgaacaacatggaggagttccttgagcaagcggatgccttcataaagtcggaagaagctgtccggcaagcccagacaagagggcaggacaatgacgaacgaacacagggcttcatagtgccctaaacactgtccagcatgccgaccaacgcagacgatctctatcagttctcaaacaatgagaatggtggaggcaagcacaacaacaatggctctgaccaacataatggcaagagaaaaaaaattcaacaatccttttatgccatgaagtccaaggaagaaggaggagaagtgtgtatgcttaactcttctattaaagcgaggcatgactagacgtcccagcagggcgagttagcaacaggcagtcagaaggctggcctccatcccagaaggttggcctccatcttcgaagtctggcccctgcctccaaaggctggcatctgtcccagaaggctggcctccatctccaaagtctggcctccacctccgaaggctagcctccatctccgaaggttagtctccatctttggccagacgtacaggtaggtaccacaaccatattttataaatctatggtaggacacttaggggtcgacattggcagaccccatattgcaggcaagaccaataaagccagagagcgctatgctcaaacactccgtcacgagcccaaaagctacttcttgccaggcaaaggacgaggctctaattaaccaaagcttggagagcccacgatctctttcttaaaaaggagatcctgcccaagagaatttcctgcacaactaccccctggtcattactgcatagattggaaatataactgtagtaaggtacatggtggacaatggagcttttctcaacattcttttcaaaattaacacatgaaaagatgaggctccaactcgctgacttggcaccctgcaatcaagtgacgtatggcctctttggctgaagtagcacactcatcgagtatatcagattacccctctctgctggagaaatccaaccaccagaactctaatggcgcagttcttcatactcgacgttccctcggctttcaatgccatgataggctgaccagccctatacaacttgagagcataacatccatgtaccaccgtgcctgaaattccgtgtaaggcagaagtaagtgttgaaagaagaccaataatctgcttgtcactgttgtaacttggccttgtgatgcactatttttactgcaagcggatagtgttgttataacaaagctttaatactaaaaaggttgtcgaacccactaggattgattattaaattttactaattattatacttttcaattttatactttaattagataacacaaagtaaattataagaaacaaataataagtaaaatagaaaaataaatagacaaacaacaatttttaatcagaa

SEQ ID NO: 40237 - DNA, 1985 bp, Cannabis sativa
  modified_base (1120)..(1123): a, c, t, g, unknown or other
tcatgatattattttgtattatttcaaaaaatattaggtctaaattattatttaacaaaataaaatgtttaattaataacttttacaaagtaatccaaaataataattttgcattatgtacgtgtgtttttcttgtattgagagcaatgctctttcgttaaatttaacaaccaattcattttttttttacaaattatttattttagaggaatttgcggcgaaacttttatgttttaatttttatacgcttaacttctttattgttttttggtgacaaaactcccttaaatgttttttttcttttttgtaaatttaaggtttcagttagatattaccgttaaatatcaactggattactactgtatcgacttcgagattttactgttacttacatacacagtgtatacagtggtcattcagttaattgatatttaacggtaatatttaactggtatgtcaaatttataataaaaaaataaacttaaggaagttttactacaaaaataaaaataaaagaattaagtgtaaaaaattaaatcgtaatggtatttcgccctaaattactcttttattttattatactttgtctatttgaaagcaatctagtaaaatagttgaaagttcaagaatgattaataggttacattttataaaagatcaattataaaaggtggtttgtgtttcctattggttggtccaattacatgggtagccgcaatgagttacaaggataagaagtttggtcaaatacaaaaaattatttgcttctactaagtacaagtaaaaaggaaaatatatatagtcaaaatatttgaattcaacttgctaaaaaattaattatttgaataaatggccatttaattagtttttttccccttatcatccgttgctttcttgaatatactttaggttatgtactttaaattgtcaagaatataaaatggtaagtattgaagaaagattttgttagtggcttagtgaaaattgaattaagggtaaatattattttaaattctgtgttttgcaaaagttattaattggatcttctattttgttaaatgataaaatagaccatgtatttttttgtacaaataggacattgaactgattttttgtcaannnnaaatttaataataatctgatttaacaatgttatgataaaacgatttatattttttgtatctgttcgtattagaaaattgtcttaaatttagttatcttaaaaaatcaaattgttaaaaattgagctcagtgtcctatttttatcattttggaaaatataagatctattttgtcatttaacaaaacagtgtatccaattagtaacttttgcaaaacacatagtccaaaatggtatttatccttaaattaatttgtattcttatctggtttaattttcaaaatgttaaactcttaatatatattttttttaatacaacttataaaaaagaatagcaatttgtttggtataatatattttttttctttatatacatgtgtatatatcatctaaaacttttgttatttattttccaaattgtttaattagacctacttggagtaacagaatctaaattaattaaacaataattttttttcaaaaaagaaaatagtatttgagtactaaatattttaatatgccgaaaatgctgacagcatatattgatagaagagttttaatttaataaaaatcaaacatttggagtctgttataacgacttttgaccatactaacccaatacaaaccaaattattttattttctcaggcagatcagaatatatataagcttgagtttccaattactttatttaattaattcaatcagttcattaattaattaatatttttgttattaacaatgcaaacacaatacgtctgttatttaatttattataattaattatctcttgccgactatagaggctcgtgtcatgcttaattgtgcttctaattattacttttaaaaagttaataataataata

SEQ ID NO: 40238 - DNA, 2477 bp, Cannabis sativa
cgttacactattagtgttatacttgtgcaagaagaagaaaacatccagctcccggtctactacgtaagcaaaagattgttgggtgcagaatccaaatatccaatgatcgagaaattgacattttgattactaaccacgtctcaaaagctaagaccatacttccaagcccatgccaaaaaagtacgaatgaattatcccctctgtcaggtgcttcaaaaactagagtcctccggtaggttgctaaaataggccatagaacttagccagtttgatatccagggtcagccactggtatccatcaagggtgaagcccttgctgatttcataatagagtgttctagcttaaatgatcttccgaaagacccagttttggagcttcccacctggaaggtctacatagatggtgcatccaacaaaaagagagttggagcaggggttattctgatttccccacaagggcactctggaggcgaaataacggtggtggcttcgttgctcaaagtggtcgaaaacacaagactcaaatatgattcacaaactaaaagaaaaatgattcacagtaagatatgaggggggggaaagtttagtgtttatttttatttaattttcatcatttctacaaatatcaaacatctccacttgtctaagatatcatgctgcgactgtgaaagagagagaggtcgagagacagtttgatgcagttgctgtgagggggagagatgatggagaatgactgtggccgttgactgtcccggtgttgcgattgttgtgagggtgagagacgagagagcccagaacttagataataggatggagagagagagcagcagggttcatggggtttgctttgggcttggaagacaaaaggctggtatggtgaaggcctaccatcgggggtagatcacagagagaaagaaggcctctgtcagggatagatcgcagagagagagagagagagagagagagtcgaataatgagggaagaggttaagtttggggcttcgagtttcataatgtcccttttatatcttatttatttatttatttaaataaataaaattaaagaaattaataaattaaaaaactaatatgccttatttataaaaaaatatatatagtgaagcgcgaggcatgattgggtacacatgtcccaacccacctagtgcgtcactatatcgtaatactaaatttatttaaaaataattaaatataagactatgatatagtgacgcgtcaggcaagtcgagacatacttttgcagtccctcttgacatgactctataggtcaacatttttaaccaaaaaaaattgtaaagttatgagtattactctttagtgacccttcatatttttagtggtacacattacaggagactaataccaaaagtttagagtcttattatgctggtcaccaaaaatcactcttaattctttattgacctgtattgttgtgcgggtcactaaagagtatcactaaaaggctaaattgtaatagtgatcgttgtttaaccaaaagtagaagcgaagcgaagctaaatttctcctaaagtagaaacataaaaaatattttttcaagataatctttacactaaactttaattcaagaataaatgtgtcaactttgataacgttagctgcaacataagtgtccactttaaactttccctctcacttggcttcctgagattccttagcccttggttgtgcttggttcttttctaattttccatatcctttgttgggcttgagttgagaaacatagtgagaagattcattcttcttcttttttcagcttgcttttctcagctacacattgagaaattagatcattgacactccatactattacaagtattgtaggctatcttgataaggctaaaagaggtaggaagtacatgaagaggacgatgaataatgtaagagtgaggaagagaaatattatgatcttttaacttggacttaacattcaaaatttccaaaataaaatttcgcactcctttgatttatcatactgaatggttgtcatttcatccataagatgtccagtttcgatattttcaccagtgtcgtgtagttttttttctacaacattgaaaaactctttgacattcgtagtgtccttcaaaccactcaatagatattcaagaatgaatcttttcatagcaatggggctaagacgatttggcttttcccattgtgcatgaagagttttatggacaacaatgttgatatcaaagatcaacatatttttcttctcgcatgcataagtctaaatccattatgcctgaagtaatttttgcatctcgtttccatgctttaaagttggacacattcataatttggacggaagagttattgttgttcacagaaaggagactgaaaacccaagaaaataaaacttgattaagctataagagcaatgcaattagaaaatattgtagagttaactggttattataaactcccctttggggtgag

SEQ ID NO: 40239 - DNA, 2207 bp, Cannabis sativa
ttatataaaataatataacatatatttatatatgtatatgataatgaagaatatatttttagtgttatggttggaataaaaaataattttagagctaaaattacacattttgttgttagtttaatacatgttatctgtatttttagagtgatgacgtctacaattctaaaatccaatatcggtcaaggacatgcccaaatctaggcctaatcaagtcagtcatccagcccattggcaatgttatgctacggttctagatttgggcgtgagtccagctaaccaacctaataaggccagaccactttggtccgggagatgttgttcaacccagaagatgaagagtccatgaggaccagtctggatatcttcatggggctatctgaatatgggcaatcgaataggcactcggaaagcttctagacatccctacacggaaccctccaaacatcgggtcccatagtatcaaagtttgctccctacttcgaactcgcagagtgcacacgctaccaaaagaagatcaccattttatccaacgccatattctttaacattctcggtatgagtgtggatgcacacgacacctagcatcctcagattttctcctcttgtacgaacaatcctcacctcgtgaattaaacctcactcaagtggcccaaagtcaataactattgtattttaccccatcaaatggcctaattgatacctttaaatcctactaggttccctataaatagaacattaccctttcatggaaagtgttagaaattgaattcttgggagaagaattaagaattaggatttttcaactaggaaaaaaatacttataagaaatactttgaagcttttctggctcaataatattgactcgtggactagaattcattaacacttgagccatgtaaaatcttagtctcttcttcttctttaatttacttctttcttaagcttatttattttataatcagtttttgaaaatttcagtaaacattttggtgatttcgttgagagatgatgaaagaattagcaaagttgtcatctacaatgatggttgcaacacaaaataattacaagcatcaagccccgtggttagggcgttaaattatctctgcaatatcaaaaagggagactcttgtcccccaaattcaaaaaataaagagcaacaaaaacaaaagatggataaattcaggctgagctttggcgttagcttcggtggacgttagaattttctcttaaatgacttggttagagatcgactcttggactatagatcgtctattttgtatagccattcacattaaaaggttacactgatattttttatttgtctaaaaaatcatttacacgcttgtgaaatagattatttattttatatattgtaaattattttgaaattatcaaatttttgcagtcttaaataatataacttacataactatgaaaaaaattggactaaaaaattttcttgtaacaacaagagatacattagtatactcttttttgaagtgcattttagaagtaccagataaaattgtgggaaaaaacttatttatattttgtagtgttaaagcatctccaataaaatactaaaaaagttgtgtattactatattttttttatcatctttatttataatattactgttatttaagtaataatatttgtatattttcgatacaataataaatgatgatcaacaattattttaattttttacttctttatactaaactacaattataaacagtgagctaaatataacaaaaactcaatttttgtatcaaacttaagcactcattttacattttgcattaagaatagtctgacttaaaaaaataattctgactagatacaaactcttccaaattatcattagaataattagcaaattttactcctgaactttcgacaatattaattttgcctcctaaaatatatagcttgttaagaatcccacctcaacttttacatctaaagaaatttagtccttctgttaagttttgtcccatcattccatttaaatgataacgtgtctttgtaaattagtaactatggaccttaaattttgacaactatcaaattgtactcctaaaaataaacatgaaaaagatttaacacttttttaagtaaatcttaaaaaattaatttagattttaagaaaaaattattttgaatgattagaaaaattaaaaaataaattaaaattttaa

SEQ ID NO: 40240 - DNA, 2569 bp, Cannabis sativa
  modified_base (55)..(60): a, c, t, g, unknown or other
ttaaaaacaaaattttaaaaacacaaattttacttttgttttttgtttttaaaannnnnnaacaaaagtgttaccaaacgccccctaaactaattatagaatgtcatctcatagtagtattaggcactttagtactcctataataatgctctaccaacaattattagtgttttaagttttgattcttttgaataatcttttttattttttttcattttacactgtttcttatccatacattccccatatgtgaatattattgacttattaagaaaatcacatgttagattaatattgccaaaaagcccctttcttttaaactttaacatgtattattatttcaaaaattaaagtggttaataagaaaaagtaacgacaaaaattttgttaaataataaaataaaaataaaaaggtatcattattagttggaataattatataaaacattttttttttgtaaaaatttacaattttacgtttaatttttttttaatatatttttacgattttttataaaaacaatacgaaaacaataataaaattacataaaaagtaacagaaaaataacatacaaacaacaacaaaaaataacatacaaacaacaacaaaaaataacatacaaataacaacaaattaacaagtgtacaacataaaaatacatcaaaaaatcgtattttaaatgtcaaaatatttaaaattctgtacaactattttttttttggtatatttgtgaaataactccttattagtttgggttgtgatacttctaataagtagtagtgaataatgcaagataaatgctacaaaaatattagtgatatctaatattatctaaaaatattatatgtttatgggaaatttgcagtaaaaatagggttttctgaaatttagtgagtcataagaaaaaaaaatatttttgggctcttatttagaaaaaaaatgtagtattttttaaaatcaataaaaaaaaatgtaattttaaaaggggacaaaaaaattttgggccctaggcatatgcttagcccgcccctgccctaggtaaaaaatttcaaaaagttcagtttgatgcaaataagtcccctaccttaaaaaatggcgacaataatccctaacgtcacatttttcataagttcgttcatccccactctgttagggtgctaacgttacacgtatacgcctttgattaattaatctcaatttttttttattatttcttttatttaataaaactaaaacttaaataaattcaaaactaaaagttaaaactaattttctttttctttttttgtctccttcttcttcttctccctgctagaaacaaccaaccactaacccttaccaccacacctgaacctccatagccacgaccctttctcttcttcttctaagactttctcagccctaccctttctcttctctctccccttcatcttcttccttctatgcctaaacctccatagccaccatggccagaaacttcggccatcaattctgcctttcccactcacaatcctatctctcttgaaccccaatctcactagccccacaccatcgctttcagccccaaaaacccaagtcctccacttctccctttcccttcaacctaccgtcgccatcatcatcatcatctccctttgacctcatattagcagtaaccatttaagaaaactttccagtgaatatattcctcttctccatatatttctaacttctcacatgcattaagaaaaaagaatacgcatttggcttagcttcaatccccaccattcgattatataattcaactgattttctaagggttttacttcgaccatgtcctctaattctttggtttcaaagagcggtgcttggcttcccaacacttttaaaaacagtgaaatagtagtttaacattaaggaaaatttttaggtaaagtcattaaggaggatcttattatgaatctatttaagtttttcaatggtattacaactctcaagtagattgaacagattttgtggatatgttgatgatactttggctagatcatcgacttgaactaacatttgaaagctttgtttctggcagcgagaagaagaagaagaagaagaagaaacaaaaaaatgattagttttgtaggttttagtttttaatttatttaagttttagtttaaagagagaaatataaaaaaaaaaatgaacaactgagattaaatgagaggcgtacacatgcaaagttagtcactctaacaaaatggggatgaacaaacttacgaaaaatgtgatgttggggactattgctgctatttttcgatgttggagacttatttgcatcaaacagaactttttagaaacttttactgtaaatttatctatttttattgatgtaaattaatgggtttggtattttataacaagcttatattgtactgatcatctatcactaaattgaagcatatagtcatatatatataactcagagatgggtgtaggatagacaatttcagagcatattggaaagaaaaaattactaaaattttgtgatttgttaccaaactaacattaggtattatttagtttttttttttttt

SEQ ID NO: 40241 - DNA, 1452 bp, Cannabis sativa
agaagggtaaaaccgtaattttaatgttatatcgtgtttttgggctatattattatatagtatatttgttccatctttctgcatgtattttttgataagttggagcagtatagttacaatcgggtattttgggccgaaccgggatcggggcccgaaatacatttctagggttttattttagcattatatgaataattgagaaattttaaatgcatgtattatttatgtctgattagaatgacaattttacccttaaaagttgtttatgacattatttatgccttaggggcattttggtcatttgaccatataatgtatttttttcatcaaaatgcaatttcgagcaaaatatatttcatcttttctggttttcctagcccttacacgacctccctctctcaccctctccttttgatatttttctaacttaaaattgtggaagacaacgtttggatttggtgtgatcttacttgattgggagtttggagaatttaaggtagttatcttgaattgttcttgattaatttctgaaattaaaagcttattgataatgcttgaagatgttcttgtgatctaatggtgcatgttgatgattttgaggtgaaatattggtgattgttgtgtaattgagctaataggattatgtacttcgcatctagatggttttagttgattttagggttgtgaaatgtgatttaattctatgtttatgctctgaattttctggttatcttttgaaggtttgaattctttaaaattcaagcttgtgaattttgtgcaatggtgtgatttgtgtttcatgcttagtgatgagtataaattggttattttgagcttatattctgtggtactaacgcctgataataccttggtttggcatggttttttcttgtgtatgacttaggtgaaattagagttgtgtttgggcatttttaggccttaaaaatgggatttttgggtgttctaaacccagtccccgcaacgcgattattggtcgccgcgattaggtttggtagtgggaatgtctgtttttcccgattttgttttggccataacttttgagtcgggactccattttggaagttctttatatcgttggaaagcttattttgagctctatatgtttatctagattttaatgccaattttattatgtatgtgaaaatggattaaccctatttgtgaatcccaaaaattatgactaggattaccgacacttggtcaggagcacccggagatttggaatctccacgtacttgggacaacaggtaagacaataatttgcatgtagagttaagcgtggtgggcgcacatgttttatactatggttgagattaattaagaaccaggattagagttattaccctaaaatgagcggttatatgcctagggttattaccctagtaattaaagattttgggtgttatgcatgctaaatatgttggaataaag

SEQ ID NO: 40242 - DNA, 2033 bp, Cannabis sativa
  modified_base (1884)..(1885): a, c, t, g, unknown or other
caatcttctgtaaatcttgttcttcgattatgcttccatttagcaaaaactcttcgccggatttaatggttttttcttggttatctccgactccggccaatccccaaacacgaaatgttttttactattcacagtataaaagttaagttattgggcttgggcagtataaaagaaaagaaaacgggcttgggcagtaaaaaaagttaaaaaagttgtatttgccgtgtcccagtatatttgtaaagtattggtcaaaaacagtatatatgtaaatttccctatattcaagccttttgtatcaaaggataacttcatcaattttgttcaggcccaactttcttgctccaagtccaagctattaattgacagaccatttttcatttagtaagaggccattacattccaagagctaacccactaaatgtgacacgatgtgtctaaagttgctcccacattcttcatgaagcccacatacttgacctcaccacttgaagcgcatagtgcgaccacatgctccacttcactacaaaattgaagccattttctccacttattttcccactaattgtaccaagatttggggtcttagtttttttataaatagagaatcaaatattttggaaaaggcatcagatttttagagtgaaaaatacacgttgtcattttgttgttacttttatttttttttattttagtttacttattttagtgacaaaaatgagtaaactagagtagtaatattagtgaggttagagtgtagcttttgtacttcttattttaattattggtattggttcttttatacttcatctccatatctcatttattaaattattcttcatcttataatttttcttccaaagttaatagtatcttttatataagttcagtcatgtttttcttatgtaagttaggatattaatattttggtatatttattatattatatattgtttactgcattctgtcaatagtggtattttgtcgatttatgatatataatatgatatgttgtcaagttagaggtaagattcaatttatgcaagattaattaatttgcgcttttattatttacatcttccagctgtaaataatagtctagaattgcaacagtgttttgaattaatatcggtattagaataggatttgcataattacatttctaccttaccaagctctttatctgatcactccctttctctcatcattttatttttaactcattccaatttccaccatattgtatttatactaatctttagtggtaatttgcctccctgtggatacgacatagtctgtttagtaccgtgacctcagtgtaactaattgggcgacatcaaatagcatttgcaaccacatcttccactgtccactttttatttcgccgagtccgctcatttcgcaccgtccagatcgcctaacacaccacaaacacacaactcaacatatccccattaaaaaaatttactacctcttccaaccaatccaaaactgaccccacatccctttttacctctccacacctaaccttttgcaacactcctaagcaaaatcataagagataagacaatgagcgtcagattttgcaaatatctcataaatagaataaactacttgtaaagggacatgttttgtactcatactcaccctcaatggaaggcgaccccccaccaccttctacataaactccttaaccttcgatggtactttaagctgccataacaatttctaaaaaccaaaattggcatccattggatatgtccatttctggaattgtagcctttgatacacactacgtgttggaatatgttttaccaggatctagattgactaccatgtatgttatttaacatcctaaatatgaatttctaaaaataatgtaanntaaacacatataaagtttgagaaatcttacagtggttgcagcgaaattcaatgactctttccgctcatatctcgaaccctggttttctttgtgtaacagagtatcaccaagatctgagcctgaaactccttccttgtgtttggattct

SEQ ID NO: 40243 - DNA, 2420 bp, Cannabis sativa
ttctagctgtcattttctctgccaacacttcacaatctttacccaagatcttctttgcaccaattggaactcctagataattaaagggcagagacatgcttgtaaaaccagatatttgcagcaatatccttaggtgatcatcaggcatattgcttgaatagattgttgattttgtgacattaggatacaatcctgatgttacagattacagctggagcccctacaataagtagtgaaaacttccaaaatcaccattgcaaaacaataatgcatcatcagcaaaggcaaggtgattaagtttaattttagtacatctgtgatgaaaatggaagtcatttttttctccaatcgtccccattattcgggataagtattccatacctaacacaaataataggggagacattagatctccctgtctaagtcctcttttagactcaaagaatccatgcaaagttccattaaatataagtgaaaatcttggtgttctaacacaggtcatcactatgttaatgaaactagaaggaaaatgtagcccttgcagcattttttcaatgaagtcccactctatagtgtcataggctttttgcaaatccaacttgataatacaactaggcttattatttttcctcccacaatgcctaagtatatcttgacaaatcataatattatgtcctataaaccttcccctaatgaagcctacttggttttgagagactaaattaggaagaatattttttattctagagcacaaaagcttggttgcaatcttgtaaagaacattgcaacaagatattggcctaaaatcttaaactgtattaggacattttactttgggcaccaaagtcagaacagtagtgttcatctccttatgcagcttacctgtttctaggtatgatgtcacaacttcaaacaagtcctctccaaccagatcccaattgtcttgatagaagaaactcgagaagccatcagggccaggagccttgttgccaggtatatcaaatagagcttgattcacttcttctttggtgaactttggagtcattattttagcttgctaagaatttaaaacaggtcctcttgcaatgattctatgcaccactttcctcctatcttccattctcgaacccagtaatcccttgtaatactcaacaaatgcctctgaaacctagtttggcttagttactctagtgccattttggtgctcaattgagaacacttgattttgccttattctcagctttatgctgaccttgaatatggcagtgttactatctccattatgaatccagcaggcttttgctttttgctgcaggaaagaggtataatctttctgcacttgaaacagtctggttctaatttgcaattcctcagcaatttctgtatcattaaggggacactgctgcaattcattctgagctctatctaactcttttctggcttgtattactatagtatgaatatcaaaaaacccagacttgttgattttcttgaaaattgttttaggggccttgagtttattaaccactttgtacatttttgttccatcaatcttcttcctccaaacttcagttactttctgttcataatcagcacggctcttccacattctaaagtacctagcaggctttttcccacttgtccacctaagatacagagagagtatgtaaagagagtggtcaaaaaggccctcatttaggaaattttcctcaacactttgatagtgatctagccatgcttgattggccataatccttcattcccctgttgcttgtttgaccaagtgaaaaaattccctgtagcctttacatcctccaactgacagtaattcacacaatcaataaaatctgtgttagggtaatatttaactttctgccctactcgctcttctttaaaatatcattgaaatctcccatcaaaagccaattagccttagtagccaactctctcaaatctttccataggcactgccttccatttttgtcattaaaagtatatattatagtaataaaactacaataggtattatccactgtagacacctttaaatgcatcagttgacttgtgcatttaatgatatctactatgtatctcatcgggttccatgctattacaatcctccccacatgattccaagcaatatttgttgagaaacaccaaccttcaacaacattgaggtacaaggttccctcttgtgaaccttgacccttgtctcaaggagccccaccaaacaaacatcctgagtctgaataaattgtttaatggaattctgtttctgaatgttgtttgctcctcgaacattctagcataaaaatttatccatttcaaagagagggtcttcccagtctcttgtgttgtcaatggttgtgttcaaagattcatgatgatcctccatctgaccattgttacttttagcaagc

SEQ ID NO: 40244 - DNA, 1820 bp, Cannabis sativa
gagagagagagagagagaggagtctgtttcttccttattattatattatatatattttgtttcttttaacttggtcaaaactaagtgtgaacaatttttttttttttttttataaaaaatatcttggttatataaaactatggactaattttggaaattaaaaatttgagaaagaaaaatgtttgagacaaaaaattatatagtatacatacccatattaaaatgtgaccccttaaataaaagagttcattaaaaattttctaaaatgcaatcgagacccataactactttagatgaatatatatgtatttatgtatatatgaaaataataataataataaaattattaaattaacaaacaaagaggctaaaaagtaaaaaaataaagaaattaaccttatgatattttactatatttataaagttatctaaattctttttaagcaatgtgatgaaatatcacaccaacaaatatatatacatattattttatagaagtttgaattttaattaaattactattcttattaattaattactcaatcaatatttataaacctattcaaaaagtaaaaaatgagaaaattatgaaaaaaaaatatttaaatcaatattaaactactatgtcactgtcttataccttaactttatatatatatagattcttacgtactatttgtagaatattctttgagtattcgctattctaagtgagtattcacatatttattttcaagtgttcaaatgatctttgaatattcgcatagttttggtattgtgtaaattcctccgataacagcctcatttcattactatcagtttaacttaaatacttctggtaagtattatagaaatattgttttactttgggatggttaaacttcacccacaaatctttgttcgaaaattatgagtaacgttactggtatatctctcaataaataatattattataatgtgaaatgtttcggtgccaccatattcagttaccgaaactatgattatcgcaagtaaaattctagctgatgtcagaaatttatatcgtatgccagttattaacattatatattaatttatttctacatgacgggctctcacccaggcctacatctaaaacttatataaattatagaaaatttacggtaaaagtctctaaaaaattcactatgatgtagattagtccacaacctcgaaaaatagcggtgatagtcctcaaagtcacattttttataggtccgtcagtcctaaatttgacggatccgttaaattattcatatctggcacgtgttgagccattattggtccaaataataattttaatgaaaaataattaaaaattaaaaaactaaaaaattaaaaaaatattttaattttttttcttttttttttttccttcctcttttatttccaggcacacccgtcttcttcacctttttttttatcaaacaaaatcctcccatagccatggaagaagtgtgtaatgacaaacctttaagccctgactccaactctaaagccccaaatctttctcggggctcgatattttttcaccattgacttcgccatcaaaaatagaggccaacacggacgtcgttctctggagtcaaggccaccatggcctttgtcgagtttcaaaccacaagctccgaggttcctgtagctcccttcgtcgttcaatcgccgttaaaagatcatcacagtaaaaaaatttgggtcaaatttagttgtatccaagatccatttaataaaacgactttcaaaaatgtattctactcgtaaagatcttttagatctcgtcgatagtttctgcaagcttcgcc

SEQ ID NO: 40245 - DNA, 1421 bp, Cannabis sativa
aaaaattttaaaaaaaatattaagagtactttttaaaaattatttaagtttatatttttttaataatagggtgtatttataaatttatagggtgtaaatagaactcatgaaattactaaaatatcccttctcctcaatgttagtaaaatggccgtgatggactacataacatgataattattgttatggaaaagaaaaaaaaaaatgataataacgccagcagtgaattataattttgtttattattcaaaaaattgtttgtgtaatttttcaagaatagattagtattatatcatatctatattatagtttatccaataaattgtatagattaaattgaattaaaaatattgaatgttcattggatacatataagtaaaattgtaccaattagattttcattgtgaaaaaaaaaagtccattttcaaacactacataatgtaagttttcaataagaaactttataatagtaggacataagcttcaaggggagagctcaccacgctcttaaaattgtaagagtgtggtgagctcccacttgaggcggagctggttgcgatacagcaggcgtgccgtcgggtcctgttttctagttgggcgtccatctccatcttctcggactgccaaattgcagtaatggattgttggctgggtcctgcccggagtggaaagctcggagtgtctttgattccactttggactgcttgtttcggattgagattgttaaactctgttggatatctcgcaacctcaatggtgaagtccactctcttgcagcgtgggtgggctgcatcaaataaatgttttaaaatgtgttctgttagggaagtggcatcccttgttgtcactacaaactttgagttttaatgctctgttttgctttaaataaatcatctgtttggataaaaaaaagttttgtgatttatttatttatatgtttatatattggatgtagagacaaaagtgatatatatatatatgcacaacatttacaataagttaatatttgagaagaacttatgggtaaaaagctccttgtatactcccatgaaattaaaaatttgcatgatctacacttttttttttcattttttttaaagtttaatgttcatgctataaatattataaaatattattgaatgctctaaatatattttattaattattttaatattttaacattttttttaaatgtgaatacaaatatattaggtttttttaaaatatacaaatatatattaatattatatatttaaaaagaataaaatatatgatgtatgttataatataaaaggtaaaataatgaaaagaaagttttgatgatgtattttgaaagatagaatagagaagttgatggaactttcaaatatataacccaaaacataggaattttgccttcaacctttgacatgtatcaaatc

SEQ ID NO: 40246 - DNA, 958 bp, Cannabis sativa
tttttttttttttaattcatttatacaaatagaaataatttttataaaatgaaaatataataattttaaaatggaaataatataatgttaaaatgaaaataacttttataaaaatgaaaaaaatattaaaaaaaaaacgtaaaagaaaaaaaaaaagaaaaatgcattatttatggcagttaccctaaattatttgtatttagtattacaatttgcaaataaagcaatttaactatttttatatttgtaaaaacagaaaatctgactattcttatttattgctctagatattactattttttttaacagtcaaatctagcattttaaatgatatatatttttcaatgtggagaaattaatactacattttatataccttgctgttgtaactgaaaatttgtcataatattttttttaaaaaaaaaaaaatccaacaatataataaaatagctgaataaaaatttgaagatatgcacatgtaacagttagtgtaattaatgcaatataaagattaataagttaaaatgtttttttttttttaaatatagaaaggaatgaattaattacacagttaataataacaaaattttaggcatttgagacatatatattagcttaatttattaccctctaattaaatattataataattgatttaagtaggccactaacaaattaaaacgtgaaaggtacacattaatattgaaaaaaataatattatattgagatttgttaattaattattaagtttatatatttatttgagtagctagacaaaacacataaatattaataataatatctagagctctattaattgaaccatatcaacatttcttttttaaataagagtacctcaagaaaatattaattatatgtaccttcaataataaataaataaataaatattaattgtgtaatgcaaaacagtgaattattgtctattgttacaataaat

SEQ ID NO: 40247 - DNA, 2060 bp, Cannabis sativa
  modified_base (40)..(43): a, c, t, g, unknown or other
ttttaatttgacacgttttttcaagaaaattctttgattnnnnaagatagcactgtaattgaaaaaatcctatagcgtgccttagcattagggcgttacacaatctctcaatcttgatttgttccgagttctgtgaggcttctccgcgacaggattacaatgggggcttttaaccatcgagattatgagggcaatcccttcttttatatgccatgtgtcacatgctctcagaaacaaaaataacaattagttttattttattgttgtataatggtggatctgagatatatctctgattttgatttttttttgtgtcgatttaaaacaagcgtttatagtattagcgatcttttaaaatgatttcttattccatccctctcttttaccgttagtcaagaatacttaatgtcaattgtttataaccgacgcctatactatctcattttgtgtcagtggcataagtgtccatcttacgaaccaatagaaatataatatttgattctatgaacagtcacatgatctcctttttttagtagtgcaaaatcaaggataagcatttccgtcgaaaggagaagatccattattgttgtcaagaataaagattcattagccaaatggcaagaaaagttcaaggtagtagcattaagtttttcttatacattatcctctattctttgtgttctccaagataaatgtataaaatttgtacacttcattttaaggggcgtattaaaagttagagttttggtattagttagttttgttattccaattagtttcatatagatattactctattattattctaaggagtccatttttttgtattaataatacaaagtatcttataataccattcaataaaaatcaatattatatttctatatttattataattgtggcagcatctaaaaattatttcaaaaaatcaataaataaataagtgaaatgttatctcaaaaaaaaaaaaataaataagtgaaatgtaattgaaatgggaaagttgtaattattttaaaggagtgtcgccgtcaaattttaattacaacctcttagttaatttttgtgattgaaaatacatgttaaaatatttttttataatagtatttattatagttacaacatcatctcaaattttttaataaattttaaataatttgcagtgttgaaaataaatgtagagctttttgaataggactagtaaattagaatatgagcaattttatttttcgatattataaattatttaaaattttaaaaaaataatattataacaatagtaaatattattattaaaaaaaatatatcacatatatattttatttgaattaatttcacatataattttagagtattgttattgggtactagtggtgcatagtacttttaaaatgtatccccttgcgattggctggcgatactctctaaaaattattatattaaattatatgggacctgatactaaattaaaccaatagtgatattaacacataagaaggtacttggcacgacgggtgccttttaacaattttcataattttaagtgtaaagattcactaaaaaaaattaaataagcacttttcatacggaaagaaaacattttacaagaaaaaaaaaataattcagggtgaaaatgctatttattattgggtaaacgaaagaatgagatggaaaaagagtattgaggaagcaaagtaattaacgcaggcatatcgatcgtagtgaaaacaaataagtaattaaggaagaaaaggtggaatggcgtggtaataaatagataagagagagaggtgtaatattaaaaaggcaccgaaatgcggtatggtatttggtgtatagatagaccataatgataatagtgatcacagttgggcaagaagcttggaaattgggaagcacgtgatcacatgggaagtggagccaatcaggtttccacggacagctatagtgcagctgccatccgtcaatatcaatgacagctggccactttaatctcacagctgccatttcactactggaggctaaaaaaaatatcacccattgattctcttccaactccc

SEQ ID NO: 40248 - DNA, 1690 bp, Cannabis sativa
tattacggtaaatttatcatattccaagatgatatagagaaatgaaaatcaagcaagggaggccctctatatataatgggcacatcctcaaaaaacgtgaaaaggataaggctcgcacttcaacaaggcaagagcccaatttattcaactgacaagaacacttaaaagaattcttgtaagctggggggcaagtgttaactccaaaaattggcgctcacaaatattggggattatttgaaacactataaagattgaccccatgatgttgcctaaataggggacgatagtagagaaggtagcaggttaatggtgtgggagtggctcaagtgcgagcctaaagagagtgaggggctcacatgcgagcctatagagagtgaggggctcacatgcgagcccgtgagtatgtgtgtgtgtgtgcgaatggctcgcatgcaagcttgttgtgagttaggggcttgtatgcaagcccgtgactgtgtgtgagtggcttgcgtgagagcctgtggagaatgaggggctcgcatgcgagcccgtgattgtgtgtgtgagtggctcgcgtgcgagcccgtgctgagtgaggggctcgcatgcgagcccgtgagtgtgtgtgagtggctcgtgtgcaagcacatgaagagcgaggggctcgcttgtgagcccgtgagtgtgtgtggctcgcatgcgagctagtggtgagtgaggcgctcgcatgcgtgcccgtgagtgtgtgggagtggcttgcgtgcgaacctgtggtgagtgaggggcttgcatgtgagcctgtgaatgtgtgtgagtggctcgcatgcgagtccatggagagtgaggggctcacatgtgagcccatgtgtgtgtatatggtgtgagcaatgtgaagtgagggaaaaatttgaatacatgttgaaaagaatgccattgggatagaaatcaaaggacaaggcgtgcatgggaaaaacatgcgaccacacctcctgcaagctctaaagcaaggaggtacgagtagtggaggcatgacatctacaaggtctaaggacttgatccagtgtacactacaaccactacccctgcgacccgggaccacctgacaccaaacaagggaaggcgcaagaccacctcctgcacctgcggttttccacccgaaagcgacaccttgtctttttgggatcaccatgtatatcaggccattagagcttataaataccctattctcaagtgtgaaagggggttagaaaattaatcttgtaatccatatactgaatgcaatagaaagaaacttctcttattgcattttctgagttttaagtttagatttccatttgctggccacaatattaattgacgaattcttaccgttaatatacacgtagcttattatatattcaaagaaacttatataaaaaattagtaaggttagaatttgatacaattttattatttagttattattattaaaaaatattatttaatatatataaatttaaaaattttaaacatcggtcgtgtgagttattttattttcattttttttatatgggggagagagagattccaacttaagacctcttgtgagaagtgtataacctctaaactatacctatggcccgaagcgtgagttatgtactaattgtaatatatccccccaaatgtaatatagtgtgttttataggcacagtaattattagagttagtc

SEQ ID NO: 40249 - DNA, 1841 bp, Cannabis sativa
ttttaaaaaatattttcatcgagcgataatctaaacaaaaagattgagcatagacatgggtatttgtcaatttgaaactttgtgtagtgaatacaacttagaatgtagtcttgaactctatttctaatgatgtaccacacacaacctttctagggtgtagtccaaaagtccattctaaaatggtcatgcacgtctatcccaatattgaaagatttacacttacatgataaaattaaataatctcttacacttacaacccaagcaactttggtcttagataggtagaagaaccctttggcaacccgggtgttaatagggcttgctgctgcttagatctatttttcatctccttttccttgttccatctttctgccttaacttgctccttcctcaaactctccatctcttcttccatggttttttttcttttcctattgtttcttcatatgctccaattatgacatatcagtgttgaaatagttgccgcagaaattaaaaggaacgaatttaccgaattgaaatttggattgagtcacggactaagtcgttctctttaagacgtccacaacacttttcagaattgtgcaagcagactattagtctcgtcgtcccctagataaaacagtccagtcgaactagtgcagcagagatctattacacgatagagagtcgtcaaaataccacacccaaatattactactcgaaatacttatataatgtaatcgtaaataaatatggaaaagttttattttgtgtgagaaaagatgtatttctcctgttggttctaatgcattatatagggaatgcacagaaggtagaaacagaaaaccacccagctagctcagctcgatcggacggaggtggaggcgtgtgtatggtatttaggtgagcctttgcgtgacgctccctcttccacaaaagtaggtaccccttgaggcccaactcaattactcatatttacactatatatacactcataaataagtgttccaagaaatgtgggactagtcctctaaggacttcaaaattcacatttccaattttttaataatttacaaatatgtgccaacaatcccccacttgatttttaaaaaatattttcatcgagcgataatctaaacaaaaagattaagcataaacatgggtatttgtcaatttgaaactttgtatagtgaatacaacttagaataaactagagtgactcgtagtcatgaactctatctataatgatgtaccacacacaacctttctaggatgtagtccaaaagtccattctttaatggtcatgcacgtctatcccaatatagtgaatgttttaaaaatttgcctaaaatttcttaggaagcgaccccactcccacattcacgtatgtgagtctagagcactcttatagttcgatactccattccatattgagtatagatgtcattaagagtttctattatctcacccttctatcgctttaggaattaatgcttcgcatttcttataaaaatagcatgatctcattcttatcacatcataacttgttattacccattgaacctatttcttgggatctccagtctataggtcgggtatctattatggctgactcatcattctaaggacaatagtctcattcctctcgaggttttaaggactttctcactagctaatcctttcgttaaaggatcagctaagtttttaacaatgcgtacataatccactcttactactctaatagagaggaactctctagcagtactatgttttacaatgaatctgtcgtctcttaccgttataataatagttctgaacttttgcagtagctacgctactacagtggatcgacacaattg

SEQ ID NO: 40250 - DNA, 1967 bp, Cannabis sativa
aatctgttgcttcttgcttttctaagaaatcaatgaatttccaaggaaaataaaaaatcatgtagtgtatctccttgtatcttgacatgctacccagttagcaacaatgtaagcttcaagcttaacctgagaagttgcaaaggaaaacaatccttctcgaggataggatttcacatattgtagcaccctttatgctactttaatatgcctagacctaggagtagctaagaattgacttaacttgatgacagggaaagaaaaagcaagtcttgttatggtaagatattgaggttgccaatgattcttttgtaaagtgtaggatctgctagattatctatttcatcttagcaaatgtcaaattaacttccatatgtgtgtttactggtttacactctagatgtccttggtcttcaagtaattggagagcataaagcctttggaatacaaaaaacccttcatctcatttggccacttctaggccaataaagtacttcatcttgcctaggttttttagtttaaacttgttgctcaatctaactttgagggcttccatctcttctacattgttactggcaaggatgacatcattcacatagaataataatataataaagttttctctaaagtgactcatgaataaagaatgatatgtagctaaattctaaaaatctttctttagtaatgcagtagaaaattttttaaactattttctagaagcttgctttagaccataaagagacttgcttagttttcatactacattaggtggaaacttctccttaggactatacccttgaggtaaagcgataaacacatcttcatgcaagtctcatacaaaaaagtattgttgacatcaatttgatggagatgtccaccatgaattgcagcaagagccaatatgagtttaactatcacaagtttagtaacaggagcaaaagtgtctatataatcaattccttcttgttgaatataccctttggcaaaaagtcttttcttgaacatctcagtgcttccatttgcattatacttaattttataaatccatttagaaccaatagcatgttgtccagcaagtaaactaacaatggtccaagtgtgattattcccaagagcgtgaatcttttcgcccatagcattgtcctactcaggtatattaactgcttaactaaagaattcaagttttgagtgactagaaatagacaacagaacaacacgatattgaggagacaatgtggcatagtcaaatacttgagaaataggaaaagcaataatagtagtagatgcttgggaaatataagagactttattagcagacagaaagcaatgatagtcttgaagatatgaaggtttaagagaggttctcataggtcttccatgagatgaggaagtaggaatggaagaatcaatgtcagaagtaaaacaagaagatgaagtagacattgggatagcagaaaataaaatcatgatattcattaggcgagatatcaacattgagataagaatatatatatccttatgaaaagaaaaatctcaaaactaggaaactttattacatttcatatcaagaagcttgtaagccttcataccagtggggtaccctgaaaacactcaagggaccttggtgaaaatttagatctagaaacttgtagggttgaggcataagcaagacacccaaaagctcttaaatgatcataattagggtgtttagattgaagagcctaaatgggtgatacattcttcaaattgggtatagggattttgttgatcaaataggtggcagtggcaatacactcatcccagtacactaaaggaatgtaggattgaaacaataataccctggctacatttaataaatgttggtgttttctttccatcacataaatctattgaggcctatgaacacaagagtggtagtgtatgatgcctatgttgggttttatgcactaaataaaactcattttaatata

SEQ ID NO: 40251 - DNA, 1485 bp, Cannabis sativa
tctcaagtttatggaaaaagaaaactctactgattatgtgaaaattgtgactggtttctcaaatttctgttgctacttttgggaaggtgttcgatgaaatgcctgagagagatatttcaaagaatttcattaactctcaattatcaaatggaagctagccaaacctaaacaccatttcatttaatatctgaatatttatttttatataaatatcatgctggaattttggtaaatatagatgagatttcattggaagatcaattctttacatctagtcactgacaccttgattgaatctgctcttgatgattttttatatagaaattttttgggcttaaggtttttcatatgattttaagttggaattgtatgcaatgttatctttgttaaattttaatcttggttgctattacaatttgatgttgtaatggtataagttgtttttttagtatctttgactatgtattattatgatgttacaattttaatggttttgtttgtgcaaaatgttgatattatttggattgtctttatgtcttagatttattattgtagttttcaacttttcagagtttcatcttcaatggctcttacagattttcttatattatatattacagcagctaaaaatgaatggaagttttgctgaagagctatactcagaaagcttaaagctatcgaaaatagatttggattctacttcaagtgccaaaaatcaagctttggattttcaaggtatcaaatcttacttttatgtgacagattatgtatcttttctttacagtctcaattgtctaaacttatttcggatgtgataggcatgaattttcccttgccatctcttttttcgcttatgatctgttctagtcacagtctcacagctggtgtgaagtctatgagtagttattggggccattaactttagatatagagagcaatgattttttttttaatctttttctacctagacgattctattagcttgttaagagtgagttcatgttagctctgtggtggaaattcttgggggagtgcaagttggtttggtctcaaaggaatcgtttagttcgggtttatggtaaagacctagtttttgtggacttgtgaattgttggctattattttaccagtttaattggagtggaatgatagaagctttcaaaagtccactagagcaaaattatggatgaggatcaagttttcgatagctatgtggtcaaaaaatgaggctaacattttctttttcagttctttaagctctgttttgagcttagattttaacaaggcaaaattttgtgagtggaaagatattgtgttatatttgttagaattcaaataagagaaaatgaaatattttggaattaatttattttctttctaaaatccaagatccaaaggtgatgtttgctttgttttgttttgtattacaaatttacaatgctttttggtttcttttcttacttttgagagagtatagagttcttg

SEQ ID NO: 40252 - DNA, 1328 bp, Cannabis sativa
tactatccatgattcttttattctagttacctcaaacaaataatcagtggttgattttacctgtgttatttgaaaccaacatttattatacatagagaacaacaatgggacaactctacaaaaatgatagaaaaatcaggatagcctcgaaatgattttgtttgacaatttaaattgcataatctaaatctcacctccaggttcaataagtatgtatcgcttttcagaagtatttgttctccaggtggtgccaatatagtaaatgtgttttgtgcttttgtcttattgctatatgtccattgttgcactaatgctctcaagcattctaacattgttgtaattggaagctctcttgatgctaaatttgctgagtttagtgatttttctatgtctgaggtcatggtggaatttctcttattttcacggtgaatccttgaccatttctcataactgacttttttcaagtacggtcttatgcgtttgtccaagccatatagttctgcatgtggtactcaaattgtgtttctgtgtacgctttcactgctctaaagaagggtcggttgtacttagcaacatgtgttttgaaggttgttcagcaggtgatatccatagtatgcgcgtgtaatttatgtgtatatttctcttgctgctttgaccaggctctcgtttctgtctgaaattagacacagtttttctatcaccttcttttaatttttttttgaaagactatttccaagatttgtcattttcggaatcaacaacacataatgcaagcagaaatatgtgacccgctgcatcttgtgtgcatgcagacgataatgttcctccgtaagctcctttcatgaatgtaccgtcgaccactattatcggtctatatgttttccaccattttatcaaagcatctaaagtcataaaaacaaatagcaagctgttatcttttgttgttttcaaatccacaactgatccatggttattttttacaccatgtgcaagaaacttggtatcacgttgtatgattccttagcatttcctcttaagtcatttacaacatgctatttacttctccaagctttcatgtagtttatcttaattctgtaactgcgtttcaattctccttttatatctagtggtgtttcttttgtctttttgtttagaaacttaagtttcatgcattcttctatgaattttattgttgcttgcctctggtcttcatctaacatctattgggcaggtgtggatgtttgagaacctcctgattataaatgtatttgttggcctatttttctatgcttgtagagaccaattacatctttcataaacacacttca

SEQ ID NO: 40253 - DNA, 2434 bp, Cannabis sativa
atctttcactataattaaagtcattaaccaaactcgattgcgtttatattgtagtaattttttataaaattattgtgagaaaacaacaaataaaaatatgaacaaccgcttagttcgatatgagtagtgagacatttttatttgattaaagagataagaagtccaagtatgtaattgtatatttaggccagattgatacagatgcccaatgatgaagctgttaggggtaaggctctaaattttttttgtcaactttttttatttatattttttaaaatttttatttttctttaaaaatttatgtaatggcccgtttaaattttagttttatattttagcccctctcacagtcactctctactctctagtctctacctcggttattgattgtatttttctttcaacataaaattatgaaaataaaaattatctaataaacattaaatattttcaaataaaatacaaaataaaaatgtaaatatttaaatattatttatttattacataatataatttattttaatatttttatttttagtaatatacaatagataagtaagtatattttcgtacaaataaatttactatagatttttttaataaaaattgagaatcaactgtttttaaaagtacggttctaccaactttaacttttaactgtaaattttttaataaattaaattttaactatttatcaaataccttattatactacaattttttttaaaacaaagtttttatcttttttaaaaattagagaaacttacaaaaatactgtaaaatgaaaaaaaaaaaagtttacaaaaatactgtgatacagagttttttttacagttttactgtataaactttattaaaataatgtgtttaaagtttcaaaattacaaaaatatcgtatttcagtaaaataaaaaaaaaaaactcaaaaatagctctaaaacaatttaacaaacaatatgaaaacaacaaaaatataactacaaagcaatagaaaaataacaaaatattaacttacttgcaatgagaaaaattatatcaactctttaatatgtttttgtattacagttgtttttacttacatgtgacaacttgatttatctttttgtactattagattgatttctttttttttttttcatgaaatttgttgttaccactttaaatatgattaattttaaataaagataattagttacaattatttattaaataagtatattaaaattgtgtataatatatatggatgcatatatcgttataaaattttatattttttttccttccacggtagtattttcggtgaactgtgtcagattggagaattatatgtacatggagatttggaaattgctcataatattgaacaaattataatacataagatcgaccatcaattaatgaagtagtgtgttaataaagacaaaagtataatttggaatggggacacaattatggagttgattcacctcataagatggttgacatttgaattccaaatccaaccgccaatttaaataaataaataatccatctaattattaaacccaaaatctgtgacagattcagaggatatattcaagctcatcctcctctcctcgtctaccatgcatccaaaattctctcatcaattctttataacttattgaattacacaaattagaaacagtcagagccgcccaacaacaacttgcaatttttaaaatctaatgacattaattttttggttttgaatgaaacaataaactgtgactactgactagtctagtcttgttgtacaataattttgacatatttgtttggcctattaaagtattacgtacgtatgaatgatggagttatgacctattttttttttttttttctatcttcaaattatatgaacattacatgtaattttatttattttagtatttggatgatcagttaggattatattagtttaatgaggttgtgtcaaatctaatcttctcagagtatatcccagaagcttgaacacgtacgtctttttttggtaagttggtccacgtatgtatatatgacaaaacatgataacttaagtcaaaaaaaaaaaaatccaaatctttctccttattgaataacttcatataacggcagcaaaatgtatgtcaattctaatttaatttttcttttcaaatatcacataatttattttagaataattggtacttttgaattttgatctcttacttattgacattgtcacccaaaataaggatgttgtcgaaaaattagattctaatatatattttttatttaaataattttttaataaaaaataataaattttttaaattgcttaattagttttaaatatttatttctttttcaagtctcttaatcattcaaaatgatttttttaagatataaattaattttgtatgatttaatttttctcatttttatttgaaggggt

SEQ ID NO: 40254 - DNA, 1588 bp, Cannabis sativa
gtgcggccaaatcgaattcagagaagaaagggccttgtaaaaccgtgttcacgcaatgtacagcgcatagcttggactcttgtacctcgtggtacaagatccctccattgctggctccttccatggttgtggtcgccatcatcagcttcagcaatcaaataatcaatcaatcaatcaatctctattgcagtgtggttgtgtacagtaaaagaagtaaaccctaaaaagattttggtctggttttgataatcgaaatcgaaaatgatagttggtttagctttggcgaaatgaagatgagagagaaacataacggaaaaatatccttcttttttattcatttatttatttaattttataaataaaataattaaatgagatgtgagtgttgtgttgtgtctgtctgggacgttacgaagcagcacgtgcgtcgaactgttcgacacgtgtggtaacctataatatcttattttttattttttaaagtaatttaacgccataaatacttaatttaattctagttgcaaaaaaatactaaatttaatttttagtaacaataatacttaagttatatttctaaaaatctgtaaatacttgattgttaaatattaaataaattgtcacgtgataatccctaattaatttaagttatgttctagaaatataactcaaatattattatcattaaaaattaaacttaattatttatttacaattataggttaaacttagatcgtatcacaaattacttttttctttatattttgttggacatataactagattggagtgttagtgtttcagttatactactgttcattttgtaaacaataaatatggcatttgttttcaactatcacacttaaatgatttttctttctcaattagttttacgtaaaaagtgctactcaaattttggaaataattatatgtaagagtgatctaaaaacatttataatggtgtactaattttagaatttatatattatttaactttaataacaaattgaattatgcattaaattggtgtacaccaaattctataccattaataatgtgagatttaagtttacactaatttggtattaaacttttttttttgaattctaacccttattttaatttattttaaaaattaatcttacattttagtccttaaattaaaatttatcaaaaaagtaatagttaatttaaagcacgctaacatattaaatatacaaaataataataacaaaaatactaaaattaaataaaataaaaacaacataacactaagttattgaactaaaaagaacaacataaataaaaataaatattaaatattaagtaaaataacaatttaataaatattttctgtgattttattgaagtttttttttttcaaaaaatgtgtaatattttattgatttcataaatattttattttgttaagttattttaatatcttaaattcatactagtagtcatgatataattatattataaattagttatatttggttattaatataaataatataaaatgcgagatcttttaaataaaatgttatcgaattgtgtatgtatttcatagaatagtacatatttatat

SEQ ID NO: 40255 - DNA, 1376 bp, Cannabis sativa
  modified_base (1160)..(1167): a, c, t, g, unknown or other
acatgtattaaattatgcccctaaactttcatccatgttagactttgttactaaaattacaaaaaaagtctttaaatctaacaatctcaatagttcaagaggcatttttaatgaccttaaaagtttaggggacatgatttggtacatgtcaaagttcagtatttttgacttatctttatttaaaaaggtaagacttaaattctaaattatattagtacttcctaagacgcattgaatagcacgctaattcttttaacatgcgagcttatttactgctcaaaatacgagtataataatttctcttaaaaaataatttttaactttgaaaagatttttaattatgactaggatgataaactcataatatctcaagtgtattgaacacacttttatcttggtagttttatattaccaggaatatgtcacataagcatttaaatgccattccttcttaagatctaacagtgtcctttgaggcttatttttaaattttaaacctcattccttcttctttttcatttccattctacttaaacaagaattcgcagaaaaaaaaaagttctccaccattcattctcattaatctcatgtacacgtgtcgtagtcatatttgttgttcgaaatgtaagtataacaatactatgttatatttattagaatgatgatacttattctctgattaatattattttaaaattttaatagtttatttatgataattcattattatatattcttaccaaatttaataaataaaattttgataataaatctatataaataaaattttcattttctatttaaattctttttaaatctaaaatatatttgtaaattgaaaataaaaaaaaaaatcctaacagcagagattatttatcccacagtactcgataaaattataaataatctcatataaatggaattaattgaattagttattcggctttcattgtgaccaaaactagactaatatgaaattgtctaatctagtccaatccaatatcctttgtgttaaatgggcccataaagtaaggaatcaaacttcttcacatttaattagagagacagaaataatagcattgctattaggcaccagtggtgcctagtactttctcgacatgccgcgttgtgattggctagcgatactccctaaaagctannnnnnnnaattatatgagacccgatacttagttaaaccaatagcgatattgacacacaagagggtactaggcaccactagtgccctttagcatttctccagaaataagcaacacgccaccatatttaggaggaccaacattataggagcgcacctcgaaaggataagtcactacaaaaaaactgttacttttagtgataactttttagtcacaaca

SEQ ID NO: 40256 - DNA, 2342 bp, Cannabis sativa
gatcttggcaaagaatatgaaccattttattcttcttacaaatccttaggcattgtccaaagaaactcttgccctcacactcaccacaacaaggtcgagtggagaggaaacatcatcatgttgttcacactggattaaccttgcttgcacaagccaatatgcccttacacttttggtgggaagcttttgcttcagcagcctacttaatcaataggctaccaacacctactttgaatagtcttacaccctttgaaaagttgtttaaccagtcccccgattataatatgctcaaagtatttgggtgttcttattttcctttactcaaaccatatgaatcacataaagtctcttttagatcatccaaatgtgtttttataggctacagtatctcatcaaaaggatttagatgtttacatccctcaggtcgcatttatgtctctcgcaatgtcactttcaatgaacaagaatttccttatacctctctttttactacatcaccctcctccacagtcagttccacacaaatctttaattctgatgcttttcttgttcctcaaaatcaacctgctctgtctgctgctaacactccaacaacaccagataattatataaatcattccaactctctgaatattcctcagtcagaacccgtagccactgcttcattctcagcttccaataatcaattttctccatctgcataacctgttgcagacatcccaacaccacattctgttgcatccacagcccctacttccattcctactcttaatacacatcccatgataacccgatccaagcatggtatttttaaacctaaactttgtgttgctaatctcagtgatgaaacagaacctacaacacttaaggctacccttgcaagtgcaaagtggaatgctgctacgcaacatgaaatgctctcaagaacaagaagacatggacacttgttccctggacatctgaaatgattatagtgcaaaacaaatgggtttatcgcatcaaattcaatgcagatggttctgtagagcgtctcaaagctcgcctagttgccaagggatttcaacaaacagcaggcattgattattttaaaacgtatagtccagttatcaaaccatgcactatacgaattatgtttacattggctgtcactcaaggttgggaaattcaacaaatagacattaataatgccttcttgaatggggaccttcaagaagatgtctacatggctcaaccacaaggttttgttgaccatcaattccccaatcatgtatgcaaactcaacaaagcaatttatggactaaaacaagccccacgggcctggtttgatactctgaaatccactttaatcaactggggctataccaacagcaaatcagacacaagcctatttttcacaaactcaaatggttagctacttctcattctagtttacgtggatgatatattaattactggagctaattcctcacaagtccaacatgtcatctctgcattacacaacacttttgctctcaaagctctcggcccagttcattattttctggggtttgaagtccacagaaccaatgacacaatcctgcttactcaacacaaatatattaaagatctcttggctaaaactcagttattggactccaagcctcagtccaccccaatgtgttcctccactaaaataacagctcacagtggtacacctatgtccaatccaactcaatatcgaagtattattggagctttgcaataccttacaatgacccggcctgacatctcatttgttgtgaatagactcagccaattcatgcaaaatcccacctctgaacattggggagcttgcaaacgagtcttgagatatctagctggtacttctcacattggtctcacattccaagcttctcctcggcttgatcttcaaggttttacagacgctgattgggcagggtgttatgatgacagaaaatccacctctggatattgcatatttttttggaggcaatttggttagttggtgctccaaaaagcaaactgttgtggctcggtctagtacagaatccgagtatcgtgccttagctttggccacttctgaaatgatttggcttgaatctctccttactgaactcaccatcaaactacctcactgccctattctctggtgtgataatctaggggcaggttctcttgcatccaatccagtgtttcacgctcgcacaaaacatattgaagtcgacttacattttgtccgagatagagttttggctcacaaattggatgtaagatatgttgaaagtgaacaacaaatagcagatcttttcaccaaacctctaccagcaaccacttttcattat

SEQ ID NO: 40257 - DNA, 1063 bp, Cannabis sativa
tattttgcggctgatatgacagctcttactctagtcatggcagcaaatactagtgctgcctgccacggtggtggtgggcatagccacagtggtggcggttgtggcggtggcggtggttgtggcggtggtggtggttgtggtggtggtggtggttgtggtggctgcagttaataatcagtgtgagactaagagtataacttatgatgtggagcatattaatcctaatttggattaggttaagctttgcatgctttttcttattagttactactgatgttttatatatagttaggggttttttatttttgtaattattataaataagtggatcggatattaaattacattagtagagataaaatttgtgtgatgatgttagtaactatgggtgttctttagcttttctctctctcccatcctattgattgttttaatttttagtatcttacatctaattggttaagttaaattgtattgcagtaatttcaagttttaaaattctgataaaaagttttcaagttctcatttatgatcgtgctttattgcttttccggctgagttttcatttgatttgcttgagggtcggtccaagtggttttggactggggaaatttatatatttatatatcaattaatattttataaaatcagttttcaaaaaagaaatacttgctacgatacaccgatcaatggttagcttaatgtgataaaattaagcttataataaaaattacagattagaaaaatacacaaatttaatagaatattggtgtaccattcttaacatacttgctaagatacaccgatcaattggaagcacttttaaagtgtttgatattattaaaataaaattatgtatacattaagaattaagtaaataataattccaattttaaaaaataacttcaaaaatggacataacaaaacttttattgatcacaatagacaaccaaaaccccattaaaaacacacacagaattacaatttacaacatgatcaccagttgtttttatttagataaaacagtaacgagtaacaccactaaatatagactttaaagcca

SEQ ID NO: 40258 - DNA, 1951 bp, Cannabis sativa
tcccagccataggtgccgaggagccagcaaccacattaccttgccaatcaagaatcacggctccaagacccatcctactctgtatcttgttgatcgctgcatctgtttgaagaaggtactggttttgtggaaccacctttggtctcctgtctaaaacctgcaaattatgaactccactatatctgttcttcatagacatggctgcattgtaatctgaaatgtaagaattaatccaagcaatagtatcattaggggttaaatccaagtttgcaaatagctttttgtttcttgagtaccaaatagcccagagagttgtaaccaaaagaactaattgatctttatgtaactgctcaaaaccgatgatcataaaatctttgacatcaacatgcctatttgacaaataaaaacttcggagaggcgaggccttccaaatttttgacgctctgggacaatctagtagggcgtgggtgactgtttcagtggggtttggacagaaagagcaagcaggttgggggatggttttcctaacaaacaaattaaggccaacagggaggatatggtggtagactctccaagcaaagtttttaacctttggctgaacatttaggttccaaagagttttccaccaggctttaggaagggaggaatcagaggaggagggaggaagggatgcattattagctatgtggtaggctgactttacagagaatatacctgagttttcttggttccatatgagagagtcagctttttggaggcctccgattggaattttgagaatggtcaaaacagagtattcatcaaagtattgttgcagttttttcctatcccaaaatccagagttgtctatgaaaaaacttaccttatcagcaggaggtagatcactacttctcaagcatggaaattttatacctggaatccagggatcctggaaagttctgatagagcaaccatttccaaccttccaaagcaagcctctaataagaaggtctcttccccagatgagactagaccaagtgtatgaaggggtgtggcctaacttagcctcgagaaagttattaagcttaaagtattttgcttttaagatgctggtcagaagggagtttggattggatagaacacgccaggcttgtttggctagcattgcctggttatgagagataagagacctgaagcctaaaccaccaaagaatttggaagagcaaagggtacgccaatttttccagtgaattttagatcctttccccattgaaccccaccaaaattgagccatcagtctttcaattttgtggcaagttgaggccgggagtttgaaacacgacattgtgtaagagggaattgcctgaatgacggcttttaagagcacttccttaccagccttagagaacaacttgctattccaggtagaaagttgagaactaactttctgcagaaggaaataaaaattcgatttctttgagcgcccaaagcattggggaactcctagatacttgttgataaagggtcttgactcaagacctaaagtatcaaagaagtaagtggagatattggtaggagtgttgggtgaaaaaagaatggaggatttggtatagttcaccttttgaccagtggctaaatggtaagttgtaagagcctccttgagagcattacaagatgagggagatgcaaccgtgaatagaagagtgtcatctgcaaacagcagatgagagataggaagagcattgcgagcaacagagatgcccttaaaggatccatttaatttctgaagtcgaagggcagcagtgaggccttcagagcagaggaggaagagatatggcgataagggatccccttgacgaataccacgagaaggatgtatggagcttgtaatgtggccattgatactgaaacgaatttttgcagaggaaatgcattgatggattaagatgatgaattttagagggaatttgaa

SEQ ID NO: 40259 - DNA, 2225 bp, Cannabis sativa
aaaagttattttttttatttgggctcctaaaatgagtgggtcctaggtgcgggcctagcccgcctatgcctagggccggccctgggtaaatattgtgtttgatattattagatagtcccacattactaatgtgtggaaaaataatagaatatataagaggaatgggctactcttgccattgccaaataattttgaaatgtaaccccattcaacttatataaaattataatatggtatcagagcaaaaaaaaatcacaaattattatatgttgatagtttgtgcaatttaaatgtgttacaatcattagtgatagtcctaaaaattttgaactaacaatacatatatatgtttaattttgtagagtaattatctatataagtgcatctatattttattagggtgtatttttgtccggatatgtttatttttggcatttgaaaaagttaatatataatatatttttttaaaaaaattacttaaaatattatttttcgcaaaattttaatatttttactgtcaaataattttttatatatatttttacaagattttttttttattttacatttttttttatttatttttaattataatctttaagtgtcctatgaaaataacatgaaacaacatgaaaataaatagaaaacaacatataaataataagaaaataacaatatgaaaaatatcaatagttcgtatgtaaaaaaaaattcttatatataaatcgtaaacatatttaaaattttataaaaccgtatttttgtaattttatttttactcttttaaatatttatgaaaatataatttatttatatgatgatatatattgtacttatattagacattctatcctgaattatatataatttacgatatgaaaaaataatcaattgtatgtgtataaaaatataaggtaaatattattttagaccttttgttttgcaaaagttataaattggaccctctcttatgttaaataacaaaatgtacactgtattttctaaattagtacaaataggatcctaaactgattttttgtgaaaatcaaacttaataataatctgacttagaggtgttatgaaaaaactggttaaattttctatatttgttcgtgttaggaattgtcttcaagttgattatattaaaaaaaaaaaaagttgtcaaaaattaaactcagtgtcatatttgtactattttaaaaagtatagagtctattttgccatttaacaaaatagaatgttcaatctgtaacttttgaaaaacacagcatccaaaatagaatttacccaaaaatatatatacacgagtaattgaatgttcgaatctgaatgcttgaactttatttttaacgctatatgatttaaaattttccaaaaaaacttagaaatatccacaccattataaatacaaactttataatttttttcttgtatattatattacgatgatgatgatgatcatgttaattaagcacatagagcaccgtcccaaccggcccattgagccttggtctggtctcaatcttccaaagaaacaccatacacttaggtgtaggtcactgtgtgctgtgtgactgactaagttcatgcatgggtgcacaattatatgccttaattattacattatattatatgtatagtacttatcagtccaataatataagttctatttgtcaccattttaggtggcaataaagttttgaatttaatttataccactaaaggaaaataaaagattcatcaaagacaaaagcaatgctatatatgtactatctatggttttattataggttcaattcaattattgcattcaaacataaagttagatatattttgactagctattttttactgtttagagattcttaaagttgtaaagcataagcatatatctatatatggcataatggctctaggtttgcatagatcatatatatatatatacccttttatcagagttttagaaagtttcttcttttttggtctttcttatctggatattattaagatcatagcaggttatgttatatgtattttcggtgattgttattatgatgatgataatgttaaagttactatattctacgagatcttgatatatacacagtttcaatttttctttaaaaaaaaaatattgaaaaatgataagaataagagtataagatatattaatattgtacaccttaactacttggcatgggcaagaggaaaaggtctcttttgaa

SEQ ID NO: 40260 - DNA, 2983 bp, Cannabis sativa
  modified_base (26)..(35): a, c, t, g, unknown or other
  modified_base (62)..(71): a, c, t, g, unknown or other
  modified_base (1589)..(1594): a, c, t, g, unknown or other
tgatttgaaaggaaagaatcttcaannnnnnnnnncttcaatatcactttcagatcttatannnnnnnnnnataaaccaattttaaaataaatttggttaataaagcttcgttcccctggtttctctctcccatggcgaagaaaaaaaaagtggggcgtaagccaggcattagggctccggcggttgaggaggtggaaggcgacgaggagattgcagagtttcaggtgacggaagaatcggcggatggtttgaacttgatagcagaaatggtggtgcacgattccattactgaacctgaggcaatcgcatctaaggaaaatcaagtcgagactcatgatttcaacactgggagtcgcagcaagagttggggggaggaaactgaatccgagcaggtacaaatgagggagacggtgtggacttcagcaaagaagaactgggaatcattcactcgggacaagaatattaccagggatcaaaaattgctatatacagaacctcaaataagagatgggattaagatagctcaagtggatttggaggaagtgcaagaacaggaagagaattggaagtcagcaattgtttgcaaagttttgggtgctaaccctccagcaacagtttttgaaggattcattagaagagtttgggggcacttgggcattgagcagctggcaaagatgaacagggggcttatcatggtgaggttaaatgatgaggccactcgagatcaagcagtggaagcgggagtgatccaattcgacaggaaaccggtaataattcgaccttggtctgctgatctgaaatctattaatcttgttcattcagttcctatatggataagattacatgattaggtcttcaatattgggggaataaaagtttgagtgctctagtaagcacaattggaaaacctattatggtggaccaacatacaaaggatcgaactcgaatccaatttgctcgagttttggtggaaatggagatcatggatgcgcctccaaaattcatgccgtatatagatgaatttggacaattgcaagatcaacccattgaatatgaatggctgctcgctaaatgtgctagttgctcgaaatttggtcacaccaaagcttcttgtcgagcagaagagctgagaaaggaaaggaaggaggggaagaacctgcaagagaaaaaaaaccagcaaaatgagaaaggggaggggaagattcaaggtaaaaatgatcatcaaaattgggttatcctaaagaaaaaagctaccaagagaccactgaatttgcaagaagataagggggctgagatagctgaaacaaccagcaactcatttacaattctaaacaagcagggacatgatttggaggagcaaaaggaagagctggcagtgtatggagaggactagccgaaagggaagggggtaagtaactcagatcagaccttatttgctcatggataacactaacatagcttgttggaatgtaaggggcatcaataaaaaagagaaacaagatgttgtgtatgagttttgtcagctgaataaaataggagtttgtggtttgcttgaaacaaagctaaaggatgatagaataaaggatannnnnnataggaaattttctaattggggatactatactagttctacaattgaaaatcgtattctaataatgtggaggaaaaactatgctcgagtcattgtcattaaagaagacccacaatttgtttactgctatgttaaaatgtctggtcaaagtaaagctatgtgtattacctttgtttatgggtataatacagcagaggaaaggaagagcctatgggcagatcttatgggggttcaaattccagcagcctcttggcttgttacaagagattttaatgctctctttgatattgatgataggaagggaggcaacttggttactttgggagatgttgaagatgctactaattggctagctaaaagtcatcttgtgcctcttattaaaacgggttcaagattcacttggactaacaatcaagaaggcaacaagcggatctattcgaagattgatcacacctttgttattgaagaatgggcaaataattttcctttgacaaaggcgcactatggttgggagtttgtttcagatcattgtgtttgcattatttcgatgagggtggatgagaacatagggaggaaaccttttcggtattacaacttttaggcagatcatcaagagtttaaaaaaattgtgatggaagattggtcccaaccggttcaagcagttgggttgaaaagccttttcttgaaactcatgcgtctgaaacacaagctaaaaaagttcaacaaggaagtcataggagatattggtaagacttttcaggaagccagtacatggaagctagaatggacactcaagctaacccgcatgatcagttgatgcaaaaaaaggagaaagatgcggctgttaactttagtgaacatgagaaaatgtaccatagctttttgaaacaaagaagcaagatagattggctttgtaagggggatgagaacaatgctttttttcatgccttcttgaaaaaaagaagaattgaaaatagcatagttgcttatacaaacgaacaaggggaagtcgttgacaagttccctgaagtggtcaaacactttgttaaccacttccgaagctaccatgggttctagttgataagccgactttgactattcaggaatgattgtatgaatcaggggaattgtctcaacatagagcaacaaattagaatgataaagtcgtttactagcaaggagatcaagaaagccttctttagcattcccgattcaaaatctccagggccggacggttttggagcaggttttttcaagaaaatgtggccagaattgggagaagacttcactaaaagctgtggaaagcttctttccaaacaggaagtatgccaagggatcttcatgctacaatgcttacacttattccaaaggttgactctccctcaaaagct

SEQ ID NO: 40261 - DNA, 1610 bp, Cannabis sativa
atttcattttattacctccaaccaaacgccacctaaaagtaaagtagttacatatgtaaaagaaaattgtaaaacaatatgaaaaaatatatatatttagtttagattattaattttttattacaaagaatgaaattaatttttcaattgttaaaatgcatttactttaatctaaataaaaaaatcattaaaaaaaatgaagtttcaatcaaaatttaaattaaaatctaataaccaaatatatcaatttaattttttttttttttttttgcgttcataaatataagataaattttatttgcatcccacaaaataatatgtggacctaaatatttaaaataattaagcttaaaataatttttaaaaattacttttaatatttttttaaaaaaaatctcgtattattttatgttaatgttaatactttttttaattaaaaaatcatgtataatttttttaaattttttctaatgaaatttcacatattttctttttaattttttttgttataatatttcaaatataatttattgttgtttgatatgtatatttttaagaatatgaagtggaaaaaaaattaaaaaataataatttaattaaagatataatattatataaaataaaaattattaaaatgatatatttataaatttttgaggtgtaaataaatattcccctaaacataatatggtttcacatttccatctcaccaaaaattatactttccattttctcctctagaaaaaaaaatgttaaaactttaagagttatttgcagcataaatacttaagtttatcttgcggttgcagattaatacctaagttaatttttgaaggtaaaaataccttctgtcaatattttgttgcaaatgagatatttgcgttaacttctctattaaatgtcaactagataaatacttggcaatttctagttggttcaaatcatttaatttttattttttatttaaaaaagtaaaaaatcgtttaaaatatttaataaaaataataaattaacattaaacatttaaacagaataaaataataaaaaaaatcaaaagaaacctaaaagtaaacctctgtctcatttctctcttctcacaagtttcatctccgagggcacttctgcccgaccctgacgaggcattctactaatgatcgcaagcatcagagcacaccgaagcttgttctccctctcgatctcgcttgagttctcttcactctctcaatccctttcttatttctctctactcagagtcggacgaagcaactctggccgtccatggccaaacagacttcaccgaacctaatggagatatgggtgaggtgtcaacaagatacttggtcttggttgagatctgggcatcgatgggatatattgtttgtttattaaatctcgttgcttaggtgttttttactagatctataatttagttatatctttgtccactatgaagatttttttagaaatttttgtaaataaagtgttaatgcaaccatatcttgtgttgtcggtgctagggttgcaatcgcacaagaggatgacgatgttgtttctgggtagacttttgaagcagtgtagaagagaaggcttcaagtttttttttttttttt

SEQ ID NO: 40262 - DNA, 1256 bp, Cannabis sativa
gacgggggagcactactcccccccgccaaattccccgccccgtgtgcatccctagtagtaggcatcatgagtacactttagcatttttatttaatttatacacttaatcccttattttattttttttggtagtaaaatccttctaattttacttttctttgtagatttgaggcgctaatttaatctactcattaatattaattgaattgtcattgtgtacacttatatatactagcttatttttattggcttcgaaattttactctcacatatatatgtgtacatagtagtcatcctagttagtatttaacaataaaatttaattggtgcgtatcaaatttgcaaataaaaataaagttaagactattaaaaaaattaagtgtataaaaattaaaacgtaaatttagccccaattgtattaaccattattcaaatataacttaatttaaaatattacatattctattatcatactaattccataatagaataattggattttgtgatgtggattaatttaaaatttaagattaaaaaagaattttacatatcattagcataattttttttgaacagatatctttagcataaatttatgcaaatagatatgatttaaaattttattataattaaattaattataattatatatgtaattaaataaataaatttgaattcaaaacttgataacaatttaattatgttgatataatatttattatataatttttgttcaaagtgcttttatttttttgcttttgagattatggttcaaagtacttaacatagcaaaacactggataagtatcatggatagtgatgagatgagttgtagtacaatcatattcccatgaacataaaaatgaaggagttgtttagataaagatgatgatgatgattatgaatgacaaaacaaccatcaaattaaatgaaaaattgggatgaaaattaagatgatgatgacttttggaatagattttgtttgggtcaaacatgacaatcatcatcatcaagctattaacagaggactctaagatagttaatgttctcttctctcatttcaaatgtaaagtttccatttttaagtttatatttgaaggagggcaaaagagtaaaataaggagatatggagagagtcatgaagtttgaaccaatgaaaaggcaacaagagagatttcacacttggctgcagttggcaatactattgcatgccttctaccacttgtttataattcccaatttggaaaaacaataaa

SEQ ID NO: 40263 - DNA, 2043 bp, Cannabis sativa
atatatatatatatattctgatacaaaacttgtctcttaattaaattcattatcattgtaaatacaatatataacaatgtattataaagttgcaaaggcatcggagtatctggcaatcaccggagctggaatcaacgatgtaaaactcttgaaaaaggcatggattttaccaggtcaatcatgtacagtcttcgatttgtctccggtcaattacaccttcgaagtccaagccatgagcgccgagaagctccccttcatcctccccgccatcttcaccatcggtcctcgcatggacgacatgaagagtcttgaactttatgccaagctcatgtcgacccacgacaggctctctaaccacgttaaagagcttgtccagggagtcatcgagggcgagactcgtgttcttgctgcctcgatgactatggaacagatctttagaggtactaaagagtttaaaagagaagtgtttgataaagttcaactcgaacttaatcaatttgggcttttaatttacaacgctaatgtgaaacaactcgttgatgtgccgggacacgagtatttctcttatttagggcaaaagactcagatggaagcggcgaatcaggctaagattgatgtgtctgaggctaagatgaaaggagagattggatctaaactcagacaaggtcaaacggttcaaaatgcggccaaaatcgacgcggagacaaagattttgtcgacgcaaaggcaaggagaaggtatgaaggaagagattaaggttaggagtgaagtgaaggtgtttgagaatgcgagagaggctgaggtggctgaggctaacgctgagctggctatgaagaaggccgcgttaactagggatgcacaagtggcggaggttgaggcggccaagacggtggcaattagggaagctgagcttcaaaaagaagttgagagaatgaatgctttgacaatgactgagaaactcaaggctgagttcctcaccaaagctagtgttgaatatgacattaaggttggtataatatgatttcttacatttttttctttatttttcttttaatataatttttgccacatatgattggaacttaattttctatattttttaccaataatattaccttaaagctgattaaaaattcattgtccttgtcttcctattcttcggcgttgggttattttgtgttgaatgatattagcaacttattatatctcatttccaaatacaagtctatatataactaagttttcagtttcttttgataagggcatctccgatggagttagttgcccaattggctccatttaatacacttataattttttaaccaattacaattttttttgttatttttgtaattaaaaataaaaagagcattggtttggtgccaatatttatatcttttctttacttatctctcttgccacgttatacattatggtctaccacttttttgtcaattataaagacaacctccattagagttggcctaatgaagttagcaatgtgttacatgtgacatgtattttcactttagagagtattattattaagtactatgtttaggaattttttataataattattaaaagtaaaataaacaagacccaaataaaattgtactaacaatataagacacctcatcaaagtaataggtagcattggtaattttgatttttgagctttaattttctttttacttattgggtaaatagtggcataagtatctatagttttgcgtttgtaaacagtataaatttaatgattttttagcagcataaatatcaatgtttataaaactctaatttttttttcaatttcatcaatacagactttgttattatcttaaacacgacacatatgagacccaaattctaaattatttggtctggacgaaaatatatagtatcagttatttcactaaaaaaaattattaaatttatgctgctatttatccttaacattttttataaatgatcattaattggtccttaatgaagaaaaaaaaactcaaaattttttaattggtttttgttattataaaggtg

SEQ ID NO: 40264 - DNA, 1284 bp, Cannabis sativa
gtcgaagagggaacgacagagagagagggggaacgacagagagagagagagggaaagaaagggaaagacgaaaagagagagagaataggaaaattaaatttgaggggtattttgggtagaaatgagtaatagtggaattgttttgtacaaattagtggagggtataaattttgatatggggtgttttattaggatcaaatagtgaaatttcccttataaaatacagaatttttttttttctaaaaatgtgtggcacttataatgaaatgtacctataacgggtacttagcaccccctcaatatttttcttaaattaagcattgttgtttcaaaaaataaaataaaactaaaagcataacttcattctcataacaaaaaattttaaagattaaaaatgaaaactgaaaagcataattttgagttgaatatattattatcattattattattattattattattttaaaaaaagcaacatattattattagtgggctacactattttttttctcagaagaaatgcataaaattagtttctatactgaatttgttgtctgaagaggcggaatactttgctcatttctaaaaaaattgcctggatctataaatgtttttgctttcaccaacctatcaaaattacccttaaaatattttgttccataaataatggctttctttaagaacgtctgattatttggattttctccaatttcaagatctcgataattcaagaaagtttctctaggattggttgaaacatagggagccatcttcttgtacaattgtcttgaaagattcatgtaataattcgttacatcaattccatcctcattccaatatacgtaatattgcactaaagccaaatttccagccctatgagggaaaggcgtttcccattctgaaatctcgctcattctcccaccataaggattccattttatcgaaacatgaccaatcttgatcgtcattttccataatctcttcaatgcttgctttgtaagaggctttttaatgtaatcagacttcaccttgtaaaagtcaacagctccattttgggctacaagcaactcatccaatgatgttattttttcagcagggtgaccatcgatccaaaaaacagtggattccacccaactcatttcgaaacactcttttttcttcaaatccaattcagggtatctttgttctagaagagaaacaaggtcttgagcttggcccaagtaatgcccaatgaaatataccataatggttttgtttaccacatccaactctgctctaatgaat

SEQ ID NO: 40265 - DNA, 3469 bp, Cannabis sativa
  modified_base (35)..(39): a, c, t, g, unknown or other
  modified_base (3314)..(3320): a, c, t, g, unknown or other
gtgcaagcaaactacgttgtagattatcatatcannnnnaccctgtgtactgataaatcataagaatacatttaatcacacaatcttaactctccgagccaaaccacttagtgcactgaagagaaagtcttgggtttagttcaccaagtcaaattctcgggttcaaaacccgagatggtctttttggagccttccttccccttaccccgagatgtaggaattattggtttgtaagttggcatcatttcaaatccttctagtctggtgattgggatttgatcaacaatggaaatttgacgagttgttgagaagagcttgaaccttagtctctcggttagttgctttcttcattttctattttattatatgttcttccttatccttcttttgaatttactcttattgtaggcatctttgctttctcacgttgcacaccaaaaggggcttcaaaaaatcaaacagttggaatccaagcttcacaaatccatcaaaaaacgcgaggttattatgaagtagtggactgatgctcaaaaggaggacacttatttgacgaaggatgtcgaggagctgaagaggaaccacaaggctaagcttgaaagtgctcaaaaagaaaccaaggatcatcgcgaagcccaccaaaaaattcaggaagaaatcaatgaagccaataaaaagcttgagggtgccgaggcagatgctaaagaaaggtgaaataacattgcaaaacattatctacagagcttggctagccaatcctaatatggattaaagcttcctgaaaagttgtgctgcggagatgctggcttattgcgagcagaccaaaaaagatgaagcagtggattctgaggaggaagaagaagaagaagatctatccaagtctccaaccatgtagacttggtttttatgatatttatatatttattgtttcaattagaaaatggccctttggctgagacaatggttgcccctagtggcattttgtacaaacttttgcattgtttgatggccaactttgcttatttatttattttttaccttttatcccttgtatctcgtgcttgagctaaatatgtttgtttattgtgttttgtctcacaatttaaacatttatatctcgattcaacttacgatactttaggttgaatgtgtttccattgtacttggttttttttgagatatttaagtagttattaatctaccatgtatatatgcgagcagttctaatctatcttgttatacgcgagcagttctaatctattttttttcaaagaaaacttaaaatattttgaataattcacctcaagacttattttgaatatcttttgattgctccaatgaatagttaaatcatctattcatattttagcttaagtcttatttttcaaggaattcttgtgccttgtttataatacatgccagaacaatgcgagctgttaagtattcaactcgcatatagcatttttattgtattatgagttgatctcacttacaactgctattttgattttcctttctaaaagaaaaggttttttaattctttgacttgatattgtccatagataattttaatcaattatcctttcgtttgtggaaatttttttaattttttgggtttgaattatagtatatatttctagatgaattccaatcgttatacacatatatatgcccccaagtaatttaaagaaaataaactttgtaattacttgaacacactttatttataataaacataaattgttacagagaaaaatacagctttcacatattacatttactagtaataaggtcgcaaatattcactatttcagaggtttttattagcgagccgttaagccaagctaacctataaaccctagttctcacgacaactttaataacataaggactgtcctagtttgggttaaacactctagtagccagatctcgcatgtttgcaaacacacaccttaacaccaaatctccaaccttaaagagccttttttggactattttgttaaaatacctcgtgattcgatgttgataagctgcattggttatttgcgactcattacgtctttctttgagtagatccaaggacatactcagaagttcttggttttcttcttgattatagaattcacgcctgtgggttgcaatgttaacttctactggagtgtgtcctgtcgctattttctctgttgttctatgggcccacaacacttgtggtagttcatctacctatcttcttttagcagtgttcagcttcttcttaatagtatcttttaaggttttattaacaatttttacttgtctgtttgctagaggtctcgatactgatgataaacttttaataatcttattcctttcacggaaatcagtgaacagctcgccgtcaaactgagttccattatcagacactatttttattggtattccaaatctgcaatgatgttcttgataacaaaatcaagaacttttttacaagttatggaaactagaggttcagcctcactactaactacccaaccagtactctttacttcaaatctgttggataactactaactacacgtgaacagattcaactacacttcaactgctctttacttctaccatttagatggttcatccaaatcacgtgtgggataatatctaacaactacccaacctctctttacttctatcctttagatggttattactgacgtggaaggttatatcttctctgatttgagttatcttgcatatccatcttgataagaaaataagctaagtgttgggaaggtttccatctcgctatattctctttgtgatatttgttatgcaaggtgaccttctcactatttgaaatgcgaggcatcttatgctgatacacccacttcgctcggatggatgaaggttcatttcttataagtatattttgaggcatgtatatgtctcgttaatctcagattaatagttactattcttgtctcgctattgactataaagtcaatgagttttgaatattatctatttaacctttaattaataaacgagttatttaatatgtattttgtaacaccctaactcttaggcacgctacccaagatgattaagaaaccctaatcccctaatcgggattactaataaaataagcgcgggaaaagttaaactttaaacgaaaacagaatgaaaataaacttgtaataattttaactttacaaaccaaagttacatgtttcgggatcccaaaaatattttacaaaatattacaagtctttacactagttggcctatgcagcaaaatagagttacaacagttcattcctggtagaccccaacccgcttgnnnnnnngtggcccgaacatgtacatacaccatccagctcctgcacacatgtctgatcagagacagatttaccctttcctacacagtagagcacccgtgagtcaagcccaggaagacagtataaaatatcgataatcataattatcacattatata

SEQ ID NO: 40266 - DNA, 2072 bp, Cannabis sativa
ttacagttaaagaggtgaagccttttatctctcttgtaaacttggggttgtttagcttcataaccaaaaattgttttcaatttttaaaaataaaaaataatttttaaaaactaataggggtcgtttggctaatttttttaaaaactgaggtctaaaaaccaagaaaacagaaaacattaaactgtaattttcaatttaaaattttgtttttgtctaacacattatattttacgtttttgctcacatacacggacctgaacccccgacccgacccagactagggccaggacccagatcccaaagcccgacccgaaccccaaaattggacctggaccctggtctaagtctgggtccggggttcgagtatgagtttgtgttttggggtctgggtctggggctgggtttgggtttgggtcggagtccggattcggggtctaatctgaggttggattggtttatggcatggtatggtgtagaatattgtttttttcagtaaaaaaaaaaatctaaaaaatagctttgaaaaacctaagccaaacaccattgaattttaaaaatgataaaaaactatttcatgttctcacttttgaaaatacaatttaaaaactaaaaattgaaaacacagtcaaacaaccactttattttttgagctttttctatttataaaaaatgcagttttattttaaaaaaatggacacaaagataatttactatgtaactagtaacataaaaagtaattgaatgagtcaccctaatgaaatgagttaagaagaaacaatacttctaaaaatattgttataaggcaccaataatagctagtaccacatggtagcgtcttataattgtttagcgatattttataaaaattatatgaaacttgatacttaattgtatcaatatcgagatgatatattggtcatgaggcttgaactcacactattgtgtaatgtatcatacactcaatcaatacacttaattttacttaaataaaagtctaatgaagcatttcatcttttattttgggcttccgaaaaattgaagggtattaataccactgatattttttaatatttttccgaggttggagcaacccttttaagttggagattaacagtagtattaaaagaaaaaagaaaaaactaatttgagaaaaagtgtgaaatttaagtcatagtaattattgaaaacaaaataataacatggaaattggaaggaaatgataaagtaaaaaagagaagattgttggttatggtagaagaattggtcaatgattttgttgcaatgacttaaggagagattaattttgaagggaagttttgtcacatataatatcatatcatattgattaacaagtaatgaataatgatgttacttttaggcacttttttgacgatttatggcaaatttaatttggagtgaatgaataagaattaggttatattttgatttttttttttttttgaaaagggttatatttagattttgaaaaagaaaaaaaaaatagttggaggtaattattttaataaaatgttaatggtaaatttggtaggaaggactatagaacctacaaaaaagtattctccctaaaactaggggtgtaacgtttataaagttggctataaataaaattaaaaaatatatatctagaacaattttagttttagtgattggataaattataatttagttttttttatacaacgatatattaaaagaaatgtcaaaaataaaacttatatattcatttcaatgtatttttttattatatatatgagtaaaattcattattttattgattaattgaatttattttggaagaatgaaatatttgtgtggttacatttatttatatttatgttgtaatataaagtaaaagactaaataaattgtgcaatctcacattatttgaaaaatattaaatatgatgattctaagactgtttaaataagagattacataattgaaaaagacttaaatagattcatagatactactaatgataacaaaatgtctttttttttgtagctcattacttgagaactccaaactaacttagagtaatcttgggaatg

SEQ ID NO: 40267 - DNA, 1458 bp, Cannabis sativa
gaaccccggggtcataccatcaggcctcggtgacttatccgggtgcatttggaacaatgcattctttatctcctcttcaagaactgtacgcaataagtccctattttgagcatcagaaaccgaaggagagataccagcaacaaccacatcagtaggtgaactagttgaagtgaataaatcggagaagtaagaataaatgacatcttctaaccctgaattccaatccacccaattgcccaagtggttctgaagccttgtaatagcattatttttcttccgtgatgtagccttggcatggaaaaatttactattcgaatctccttcacgaagccaaagttgctttgaccgttgtttccaaaatacctctcgctgagtaagaacctctgtcagactttttcagcctttttgaaatccgccacagaagcatcatctcttagcctcttcaacctcttaatatcacttttgcacttcttaatacggtctttgaagtttcctgtgaattcactaccccaactagtaagactcgccccacatctcttgatcttctctataattgacaccccgacattggcttcccatgagtcccgaacaacttgcacacacagaggctcccggagtcaggcgttctcaaatctgaactgacgaggagttgtagtaaggttctgattcaccaattgataagctgatccgaacttgttaattccacattgataagctgagctgagttaaaaagattaatccaagatggattggccatagcacgatcaagacgaacttcgacccaattttcagtcccacgaccccgctcccaagtaaagggatacccatgtagttctagatcaaccagattacaatcggagagagctttctggaatccttcaattaaactattcaggtatcggttaccccctttcttatcagaatgagagacaatgttgttcatatccccaattacacaccaaggtagtgaagattcatccacaatcgtacgaagcaaattccaagttttatatctttgagagcgattaggctcaccatacattcttgttaacctccatggccccttatttgcagtagtaatcctcacatcaatatgacataacgaataccccaacacttccaagtcattttggtttctccaaagaagactaacaccaccactatgtcccctagcatccactgtaaacacactgtcaaaaccaagcaacacacgaattctttcaagagtttcctttagacttaacgtctcacaaaggaaaataaaatcgagtctcttttgacccacaaggtcttttaggaattggacagtccacaggttcccaagcccacggtaattccaacttaatatacgcataatgaacggtgggcctggaaaccagaacccaccactgcatcgttttttggacccacaggcccaacaatgttattgttatcatccttcatcaacacatcttgccc

SEQ ID NO: 40268 - DNA, 1463 bp, Cannabis sativa
  modified_base (843)..(863): a, c, t, g, unknown or other
tagcttttgtctttgatcttctttttcaaaaaaaaaaagatatatatatatacttaccagaaatgggtagatcagaatatagtactgtgaaaatggttgatagcgtccaacgatcctatagtagcagctagctaagagagagagagagagagaaaatcacgagagttaaggttactgtcagaaaccctagctaatccccaccatatccatctgcagtactcaccaacatattcattatcgattagcaaatgcgagagatctagggaggagagagagagagaccttcattatttcaagaatgtgattacgcttgagccaaagagttctgatcccctcccatggaaatgccggtgttggttgctgctgctcaaatatggaaaaggaaaagaaaatcctaaataaaccctcctataatactgagagtacgagagagaaaaaaaaaccatgagttagggttactgcaaatgcgagaaagtagagaggagagagatctagagagagaccttcggatattattagaagaatgatgattacgcttcagccagtcagttttgatagccttccatggaaataccggtgttggcttgttgctactcaaagctggaaaaaatcaagaaaaatgaggatatatttaggaaattagagcagcaatcctaagagaaccctccaagaacataagaataatgtatatgactgataatactgagagagagaccttgattacaagaggaatgattagggttgaggcaccttctttcttcgttttcaaaaccctataacagaaaaatgtatacattgcaaaagagtattgataatactgagagagagagagagaaagagagnnnnnnnnnnnnnnnnnnnnngagagagagagagagagtatggtactgaggaaagtgggagggagtgagtgactgtgtccactgtcactgtccaacctatattcttatatataggactaggaggctaatttggtaggtaggtataatttcgttataaggaacgtgtccctttgcattttcagtgtagtaataatgaatctcagtttaaataaataccattaattagtacaaaaccaatacatatattatacactaattaattacacttgttttgcctgtatatataggatccacatatttttttaattaacctgactattgaagggtacaaattaattaatacatatacaaaaacacacgaaaaaaataattaaataatttttttttatatatgatgaataaggttgagtgagtgagtcattggctatccaaaaaggcacactcttttggctctcatttcatttaaaacgctcgtttcatcaacgtcacacgcacgaggattaactgaaaagccaaacccaattcttacaacttttcatttttgttttgacaaaatgaaaaaacttcattacttcaaatcgctcatccatacagaaaaaaactctgagggagcgttgctcg

SEQ ID NO: 40269 - DNA, 1348 bp, Cannabis sativa
  modified_base (76)..(89): a, c, t, g, unknown or other
ttaaattgttggacattaattttttagttcaatgatatattattactttaaaaagaaaaataaataataataatannnnnnnnnnnnnnaataataataatcttttaaaaaaataataataataatattgatctctttttaatttctatagtagaaaaatggtcaattaagccttgtcataaacttgagataaatatgtattattgctctctctctcatttgcctcatcgatcatgtcatacaccctgcaattccatgtgccctatttaaatgtaattataataatattctattatatatagagagattgagaatggagataagatatattttgtctgaattaattacagctcctctactatacttctctttaattcttattaatggagatttaacaatttgcttattatggatactctctactacacatatatatacttcatttagttgagaagttttaaatattttgattgattaaaatattgaagtttctatgattttgatagttacatttctcaaatatttaatgaacatcaccaccatttacatttagaaaaaatattcattttttatctcaaatatatacccgagtggaaaattatgcaacttataaaaatgacattgagcaatcatttcgaattcttatcaagtaaaattaatttttttttttgattgaaaatcttaatttttaaaaccctgtcaaatagggtatagaatttccatctatcgaaattttacaaaaaaaaaaatgcaaaagattacgaatacgtacagctcaaaaaaatgtataaatagttcaaaatgattgtacaaaatgctgtttaaattgatatttatcatgagttcaagttttttaaatcatcaaaattgtttatttattcgtttttgtaaactatatatattaccatatttttgtaaaaaacattttaatttttttttatataaaatgaccatatttaattttttacattattttattctaccatattttctctacactataataatttttcccaatttttttgtaaaatttcctttggtttttgtgacagctaagaaaataaatatatatatgtctatcaactctattatcactaaaaaatatgtgagcaataactataagtattaatttacaagtattatagtttatttgtgactaaatatattgttagttttatttcaatattttttttatcttaataagtgttattgtattcattagaataaaattagtaaaaatatttatctaactagctattatattttacacacaaataactaattttattatgacttaaaaaataacatttcgtaatcagattagataatattaaatattataaataag

SEQ ID NO: 40270 - DNA, 2385 bp, Cannabis sativa
gcataaaacccaacagaaattacccaagatgatccaaggctcgatgatcttcccaaaaccatcaagagaatcccataaaccttttcgagtttccatcgagttactaccacacactattgtgacaaaaaaaggtttctaaaaccacaacatttaactttgcaatgcactaattgaggctcttcacatattattttgacctgaacataatccttctgccaaattaacaaagtctccctaaaattatatcatcaaccgaagctgcttgtaaaacagcatatccattgctactactgcctattttacgagcttccttgtttttggttgcttctatctgcttctgccctcttcttttaggggtaatccaagcatttcctcccttttcttgttcctggtcagcttggtactgctgctcctccttctgcgcagcagtaacttgtctagtatcttccttgtcactctttgggtcttccttctttctttgatcttcaccctccctatcctgcttagcctctttatcgactggttgtttctttttccaaaccactttcctctccttattgcaattggcaactgtatgtccaaggttagcacaagccgaacactttgatgggagccattcatattcgatcgtctactccacaagttgctttcgctcattgataaaagcaatcagttttggaggataatccgatatctctatttcaacaagaactcgggcgaatttcaccattgatctttcttgagtaaccttatcaatcataactcgtttccctattgtgctaaccaaagcacttagattgtttttgccccaatactgtaaccctagtccattaagccgtatctaaactggtactgcattaatcattctagcaatgtctaagtctgtggaccaaggtggaagcaccactgacttcctatcaaaatgaatcacaccaacttcaatcataaggtctctggttgcttcatctctgaagttcactaatgtgcatccagaatgcattctaaacactttatccactcccaaatttccccaaattcccttcacaaatccctcaaaaatcttgaacggagggtttgcacctagcactatacaaacaatggaattcttccaaaaagaggcctctacttctagctcttctaggtcaagtttcgcaaccaattgatctcctaccttcataggttcagtgaactttaatctagaggaaggagttggtacctggtttactttgaatttgctccacaaatcctttgcattagtcaagataagccatatttgttacttcataaagtaaccatttctgttgttgcttactaagacaaccttgatgccctacccaacatccatatatcttattgcctaataaggcaacaatgatgccctaactcgacattcatatagctcatttcctaataaggcaaggtcgatgccctaacctggcatccatataacccataataaggcaaggtcaatgccctaacccgacatccatataactcattgcttaataaggcaaggtcgatgccctaacccgacatccataaatcttagttacaatctaataagataatcgataaataagaaacttaacaatagtttcccttgatgtcatgactttaattgacttaacggtaatcaccatcccattaccttaatcataactgagttataacgataataatcatatcttgaaatgctaggtggtatggatctatttttcttaccttgagttttgattcaggtatgttggctgacctgattggagaatgataaacgatcttgagccttatgtcacaacaatgaaaacaacaattaatcacttgacctaatctgttctatctccttaatccatcaccacaagtccccatataggccactagggtaccaataccctaaacattgagaaaacatgaaaaatgaggattctaaacaccaccaagaaagtaagatgattagaaaatgggaagtcattttcataggttcctcacagggaaaatgggagaccgtttttccaaaaaaatgtctgccattttctacaaaaaatatgaaaccttgattttcatcttctcaaaacccatcaaaaacctaaccaaatcattccaaacttcacagagtaatcatacaacatccatacaataatctctacgtgacagaaataaaaatcatgtcctaacatgatttactccatgagagctcaagctttgagcttaaaattcaaccttgattctctccatcccacaataagcaattataacaaattagcatcaaagcaaatctcaaaacaccctagaagcaaaaccataagctcatagaccccacaactgttgggattttatgccctaaataaaacccatttcaatctaatctgatttgttatcaataaaaga

SEQ ID NO: 40271 - DNA, 2319 bp, Cannabis sativa
tttttagtcattttttttataatcatgtgcattatagttatttaaaatatcttataaactttttaaaaattttaaaaacatttaaaatgtcgaaaacggagttgaaacagtaatgtgtcattcgcgtgactactttattttatacacgtgtaaaatagactgtttgaatactattttttatattctaaattatttcaaatttctcaaaatttcgtaagatatcttaaatatctataacatataagaatataaaaaattttgattaaaaaattcttctgaattccaaaaataagtaaaaaatatatcagtatatctcttttaagagacttcattaaaaaactactttatattatatattgtcatccttggctacaatatatatatatatatatatattaatataatattgttaattaattcctagttagccaacttgtcacaattagagcttctaccatgttaatatatacctataaaaatataggaaaaagatattaaatattgtgactatgatagtaatttaatcaatagggagaatttgacttgttcattatataatgtgtctcaaattatgtgacgatatataaataaataatatatcaattagaaaattatacagtcaaccctaattaatgaaatttagtcatcatcaatttatcccacttacacaaaaagttatatatgtatatgtatatttatcttatttaaagtacataaataaatacacatatatatatatatgtgtgtgttgtgttcaatgggataaaaaacgggtcaagatttgattgcccaatcgatatatctagagaaataaaaaacctagctatagtaaagttaaagaaactttctttcatgtatgaggaaatcaatgagaaaaaagaaaagaaaatcatgtgtaggaatatttaataatgttataaaattattaacctttaccatatatatatgtgtggcaattatttgtgttatcattacttagtactaattaattaattaatgtaaaaatatatgagttgaacaagtcaaatatttgctagaatttatatgtacttttaggtctcctacgaaatacatgcatgtgtctaaaagtgtttatatttatatatagaatttagaaacaataatattaacaagaataaaataatgaaatatatatatggatgtttatgcaatacacacatttaaaaaaattaaatgtactggtacactttttatctgttttgttatttgaaataattttttagtttaatttttttatagtcgtgtaagttataattaagatatattacaaaattttaagaaatttgaaataatttataatatataaaatagtatttaaatagtctattttacacccgtataaaataaaagagttacgcacgcaatgaatcctatttttggcatgttaaatttttctgaaagtctcaaaattttacaaaatatcttaaataattacaacgtacacgactataaaaaaattagactaaaaaattctcttaaatgctgaaatagataggggtgcatctaggaactggttgcaatattgtaagattttcataactttctctcatcatgacctaataatcgttcattttagtaataggcttaactaagttatatatattaatatattttctatttcaatttttgtttttcttttataatctgagtatgtgaatttgatttataaaagtgtactcaaattcatcaaataaaagatctaataataatatatggttttttgtcatggatctggactcatgtacttgtacatagctaggtcatatggcaaattaatttcccaagttgtaatatgatatatatatacatatataattgttatcttatattatatggatgacatgtatgtgaaattttccaaaactgatgggggattatatatcaattgaatataaatcaagttatagtttgaaaattaattatcaagaagaatcaatcaattgagattgttaaatttaaagatttttgtctaattttattaacagatcgtctagcgtgaatgtaaaatcaatgggcataattttatatatgtcaaagttcaggaggtgaaaacgagatttagtgcatgaacaatcgtcgcgttagtaaaataaaacggaattggccagaagtctataaatctaatatcttaatagttcgaaaaaaaaatttaacggcttaaaacgtttggggtataatttaatacatgtaaaagtaaattataactataaaaataaataaaaacaacaaaaatgtgtatatacacttcaatattcataaaaaatgatgttgtaagtgtatttggaagatatatattgt

SEQ ID NO: 40272 - DNA, 2374 bp, Cannabis sativa
cataacttaaatggtctcactctctttttatagagttgcaggtggagttagttgatgttcaaatcatatgggtggacaatcaaggggcttctgctcttgcagctaatcatgtctttcacgctccctgtaacatattgaaattgatcaacattttgtgtgtgatcaaatcgtcaacaatgaagtttttgttagatatgtgccctccattgatcaggttgctgacatactcatagatttcactatttgagagagaaacttaaagttgtatcttccccttttcgtttgaggagggatgataaccaactaactgtgttatgacaattggttagtgtctgttgagttagttattactgttgttagcttcttggttgttattttcctaaacgaatgtatttctcttgtgtatataaacacttaatcattcattaatgaaatcaagttttctctgcattttctttctttttgaacatactctgttcttcttcttcctcctctgctttgttcctttaatggaaactttattttgcactctaatcttataataaattatgttataaacattttttatttatgattttatttattcttttttcgtaggtaattaactgttggtacgagaaatcaacacactaattatcggcaaaaaggtgtattaacaagaccatggttcccagattacttatgttgagcgagtgaagaaaaaatttcctcaaaaagacatgccagaagaaacgagaacttcggagacaaagaagggacctcaaggcccacaggggactcccctcatgctgcaccacgacccccagtgaggggggcctcccctcgcgccccaccccgaccccaatgagggggccctctctaaacaccgcaccacgacctttaatgagcggacctctcctcaacaaaggggtctccctcatgcgacgtacaaccccagccagggggcctcctccttcctgccatgaccccctgcgaggggtctcttcctcgcacgtcagggctccaacagggaacttccccctcttgcatatgacacgacctcacgatgacctctcacacgagatatcctatcatgcgagaaccttcgttgaacaaaggctctttttcaatacgtaacaacaagagagggtcaatcaagaagagcctcatctcttcttattagctactcatcaagggacataggattaggtatccacactcttattcatagcgaactttagcatgcaaggtatgaaagtacaacacaaaacatgtctcatataacatacgtgtcaaggaccaactcaaagagcctccacgccactacaacacctgggcaagtagtgggtgtacaaagtgtagtgaagaccaaatctacagatgtgaatacaaactgacactgagccaccactatctctactacccacctgtagtgctgattccttgggtacaagtcagggtgtgttttgcgcttttgggattccatgtgtattagggtaaatagtgccactacaaataggaccctcctccatgagaaagggagttggaaaattattctttgttacccatattaagaaacaatacaacagttgaacttcatcatcttttataagtttttattatagtttatcattcaaaccttaatttctaagttgattttttggccataacttagttgacgagtacttatcgtcaacaattttgtccttctgtgggaaaaacaaagctacaactttatttttctattgaaacactactagaaaattggactttagaggcatttttttgggacatacaacattttggcaaaatttgagacttacactgttccaagggtcgctaagggaggtgaataaaccaaaagcatagaccctccctatgttgttgattattataaataactgacgacataggaggaaaaatttgaaaaagcttacctatggcgttggttattatcaaataactaatgttgtacgtctttatagtgtcggttctttacatgaaaatcgatgcctaacgtgttatattttgtttattaatttaaaaattaaatatgatttttatataaaattaagtttttatatttataaaattttatttttttatatttacattttttatctttattaatatatttaaattaaatattaatttcatataactaaaaatttaattgataatctaaataaatatacatttttacattgcactaagtaaatatattacataaatattctaaaattactctaaatgtttacgagttatctaattaaacattaaaaaagaaaagaaaaatattcttatacaattgttctactcatcatcatcgctatgaatcactgcaagaaattttgctatctactcttgctataatggtaacaactcttttattgcg

SEQ ID NO: 40273 - DNA, 2462 bp, Cannabis sativa
ggtagcctcattaattcttgaagttttattcgttatggatatattttttttaagatccactttattggaaaattaaggagtagcaaaacagagaggaagaagaatctcttccaaacaataaactttttgtttatttatttttggtttttatttttgcattaattttgtctattggttatggatatttgcttctcaatttaatacaactaagaatcatactaaattgtttattaaaagaaatcatactaaattttattaaaaaagaaaagaaaaaaaatcatactaaattaataatgtgctacactactagctagttaatatatattgtgtaattatcaatagattataaaataaaaaaaattatccctaaactataacatgtatcaaattatgttctctgaacttttcagatagtttaaaacttctcctgaactattaaaattgttgagtttaaggatttttatctaatttcatttaattttgctaatgtggcgagtgtctatcttctaaattgtgtccctaaactttaatttctacaaaattatgcttcctaaacattaacatgtaccaaattgtacttttaaaattttcttctatgttagattttctttagtaaaattggataaaagtccttcaatccaataatctcaatagtttgaggaaaatttttaacgacctaaaaagttcagagaacataatttgatatatgtcaaagttaagggggtaaaaatctaaattaatctatattataacatgtgatttcaactagcaattaataatgtactatttgtaagttgtaactcactcatggttgggtattcactaaatcttaatttttttttatagataggttattttttattattttttcaaacgtttatatatctattctatataaaatgtggctatgtaacagaatttttaatttaacgattttttttaacgtttctttttttcaataaaaactaacggaaagttaacgattgaaagttttcaatcccatttttaaatctaaaatatactaaaaaaataaaatctttcttttttgagaatttttttcttcccatgattaacaacaataaaaattaaccattgcaattttttaattctatccttaaactcaaaaatcttttttttttctaggatttagaacaacgaaattttcaattatattcaaacctaaaaatcctgtttttttctacaattgaagacagcttctcccagttcttgtagctgcccatctccagcaatcttcccagaagagtcgatgacgacggaaactcccccactcacagacgacggtggtgcaggttcttccctactcgcagatgatgacagcgcaactattccctcagctcctctctcgcaaacggcaatgacgcaggttgattttctttctcttagttttcatttctcatagctttatcaactatgtaatgtaatccttcgtttttcatatgttaattttctttttctccatttgggatctagatctatctcttgagtttattttttttaattgtttatcttcttcatttttacttcggttatagcaagtaagaatatgtgggttgatgtaatcataacagtattgttaacgcagattttcgttaaccaaatttgagtctcacggtgataatctcatacagaaaaataaagctataaaagtaaaaatataaacacaaggtttttacgtcattttgcagttacaattctacatagtccacgagtcaatcttattcagatttctgattgtttctcaaggcctctcttgtatgagctttttcgtccccctttctgatcatgcttgccactatttataattacataatgggcagttaattacaaagttgactgtaatctttttacaatgattatcccctagaatcatgggatttgatcacaaatcacgctaagtaaatgcaatttttatttagaattcacacagctgtgaatatcctgtttttattaggccgagatgaacacacattaaagatatacgtaagccttatctcatgaggatgcctagctgagttaactttgatggcgagccgaagctcgtcatatatcttctcgaggttgatattgcttttactttaattctgacaactacagtttttggtgtcgagatgatctttctcgcatgtattctctcttacagcgagatggacgcctcgctacctatcacttcgatttacccatctacttatacttagtttgtataccatgtactatacgttaagtattttcgttgtcattatatctcatccacgcgacgaggtcaatgcctcgtctagcacgcttgtagctacatggtttctcatcgaggcacaagtcaacagttagtatatttttatctcgcataagactgttcagctagttgagttatacacatactctgcaaattgtgcttttaatgagttattccacgtcaagtgtaattgcgattacgtgtttgagtt

SEQ ID NO: 40274 - DNA, 2365 bp, Cannabis sativa
ttttttttttgtagatcatcatgcttatttgctcccttgccctattttgagctcggaggatgtctggcgtcccccctcccccccaagataggttgaagctgaattgtgatattagactggggttagacagcatgtgtgcagctgtggtcgtaagggatcattttggcagggtgatctgggttactacctctaagctggagttttccgatgctctttgtggggaagcggtggcttgctgtttggccctagagacggcgaaggcacgtggcgttaagtttattatcattgagagtgattcgagggtagtgatcaacactcttaatgggaaggagtcccgctaggagcttgagaactatgtctcattttgtgttagatcctctgctttttttgttggttgtattttcgaacatataagtagacattgtaattttgtagccaataacatggctaagtgagtgtttttccaccagaagtttggtttaatactgatgttctctatgcctgataaactcttttgtaacgaccgcaaggtctaactgctttatacatatatgcgcgcttttcttaaaaaaaaaaataattagtaagtttcaattttatctttgaaaaactctttagctcttttaacggaagctagttctaatagctttttaaaaaaaaaaaaaaaactttatgagaagctaaaaacaaaaaatagaagctcaattaaagtggagcttagaatacttccaacaacttgtttattatatcttttaaaatacatcagaaaattttattttattttttatttttttaattatttttttattccaacaacttgagtaagatgtagaggaatataatgtgtgatggtaagtgatgtgagaaaggacttaggattgtggagttagtgatgatagtgctttgtaaaaaaggatgattagcgccatttctagctctaccagacaaggcatagctgacgtagcagttatgatctgtggtcctgtggaccatatttacgtaagaattaatttgctttttgactaaacaatattcgttgcaacagaaagtcattatcaaatttccatgtgactgagtactatatagctagtttaattatagcactagaattgtgaagaaaaacgtactagaatcatagaaataagctttgcgaaaaaaaaagtaaactttttcagaggcagaaaacacatgcatgacggtacgtttagatatatagaataatacacgcgaataccaaattattaaaaggatagaagaaaaagtactactaataaataaagtgagcaaaatgaagaccccacaccttatgattaaagtagtaatataaactgatgatactactaccaaacgtgtcatgcatggaatggaaattagccactgtgagatgaagtttcttggattgatcatcctttttaattatttgtttattctttaagcaaacatagaatgaaaacacattaaagttttataagtaggctttccacattttcagttttgtctttattaatttatctctgtctaaaggctaaaatgattttgctttcttacaagcaggactgtagtaaataaataataaataaaatatacttcatcacgtggacaaatttgcactctttcgaacgcacccatataatactttcctcttttttacatccctattttttttttctcgaactttatataatacgaaacaaatgtgaagagtcttatatatttcacacaaaacccttttcatgaaaaaagtcccatcctgattgaagatattaaaaagataacttagttatgaactaatgatcaaagttgtaagggaatttattagtaggggccagaaataaattcttgggagggccaattatgaaaagataaatatggataaaaaaaattaacacttgtttagcaattataatcaacacgtgatcaaaattttaagggacaattaattaattaaaataatagaataagtactccttttgaaaaaggttttttgacacacttccaaaggagagtttttaatttttttttcatttataattatttatgatcaattataaatttttaaaatattttaaatactttgtagtgtcaaaaataagatttaaaaaaattactttgctgaaaaagaaaagtagtcatttgtgtataaaatatttaaattttaattttggtaatatgaactattttaaaaatttacaaattattttaaataacaataatatatattattacaaaaaaaaaaaaaagattaaaaaactcttctagatgtccaaagagagaaaaaagttatacttaaacaatcttttgaaatgtagaataattttttttttttaaataacatacttagatatttgtagtaaaatttaaaaat

SEQ ID NO: 40275 - DNA, 2725 bp, Cannabis sativa
  modified_base (2098)..(2100): a, c, t, g, unknown or other
cgagataggtatatttttgtcctaatttaatatttttgacacctatcttgacaggtctgaccccgatattggtcaatctcggcggtctaaagagcccgccgagatagtgtactggtggtaaaaagaataattccccctactattacattgattgtatacaaaaatttacagttgaaatataatttacaaaataatctttcaatgctttaaaaatatgtatgtaattcatctcttaatataataatgtattatataataatatatattgtaattagtttaaaaatttgacaataagtataattagtcatatatgtttaataaactttaatctaaatcatgggatatactgagttaagtaagaaactcattcttcactcacttcgttgatctcatttattgagtatgttttctgaccataacactacaatataatagtctgtcaaattttttatttactagtttctttatgattcaaaatttaaattatattataaaaatacgatagctcaagcacttacatgcttttcaagataatctcttggattgttcgacatagttaagtctctcattaatcgcatgatgtaaaaatcatagactttatcgttagtttgtttaggaccctgaaaatatgtatatatatatatatgttgtaattcttgaatagaaaaataattcaaatagaaaaagttttaaagtttaatttaagtactcatacctgaactgtatacgttacgccttggattttttttttctcaaattattatttcaagtatttataagttaggtacacttcatgaaaaataaaataaatttttaattaggtaatataattcataatttattataaattttataagatttatataaaagtttaaattaatctaaccttttgactacactcgcaacatcttcttttgaatgattaccaactagatcgaaaaaaatatgcatcttggctatgagcataataattatgaccaatcaatatcgtctgtaatcaatattgttaagtcatcttttatttttaaatatatgaaattataaataaaaaaaaaatgaataacataccccaagttataaggtgtcaatagaaatattcttttttctattgagtttaagcgttctgcaagtaaatttgctcgttcaacaatattgtttgttttaccaatgctcggtgcaaattgaaaagcctccataaataatacatattgagcaattctcatttttaaaagagtttcatatagacctctacacaatacaataatacatttatcaataataataaaaaataataacaatttatctaaatttatattaatatatatataaattacctcatatacaatgagatgacagatttcttcaagatgtaaaacttgtgaaacaacatccttatatatatatatatatatatatatatattatgttcaattgatccaaatatgttttgaagaactataattgtgcacatgaaagatcacttactctttagaaagttttttgtgtacaaacccaaactttgtggtatgtgattcagaattgtactttccttcattctcaaacttgatgttttgacactagataatgaggatggatgtgtctctttctgttgtggttgagttctaggttttatgtgttgacttggattattctttcttgtaactttcaacttctttggtcttggttctattaaggcctgcaaatgaccaattatgttaacaagtaagaaaagtagatatgaaagatagtataattaagaaaaatatgttacctcatcaaatcctcttagtactaagtgtgatggtcgtggtacaaatgtgtcaataaacatataattaaaaattaggcagagtttcctctgtttctataacattttttactttcataagtaccttattatatctcaaataataaacatcagacaataagttttttccttatatctctgcagcacacaaatttctcagatgctacttcactacaacacacaagttttaaccttctattatcactccaacacacacttaatctcaaaacttactttactatggatgaatatttaagatattcaaactcttctaagatgaacaatattatnnngttaagtaaagaaatgagtgattgtacacacctcttttaatgagccaccaaacaaaatttacttcaatttgtaaaataaatccttgctaattaaattcacaacctacaatattaaattttactatattatccaatatatcaagaaaaataataataccacatacatattataaagttaagattttagtaacacaatatatcataaattttttaaacaaaacttcttttttaattataattactaatgtacatatcccaaattaaacttttcaattttatgttacacaaaataataaagttgtatatattacaacttaaagtttaatcaacacaattactttttcttttaaaaaacaaaaatacatttgccttttctacacatccaacatccaacattttctacacatccaacctttaaaagtttctaagttgtatcatatctagttaattagctaataaattagtaatatacaaacttttaaaattactattacactaaaataactattacaaaattatacaaaataaaatttaactaatttatatatatatatatatatatattgtaacacttaaaaatgaataaacattaccctagaataactaattacaaattcttaaaaaa

SEQ ID NO: 40276 - DNA, 1264 bp, Cannabis sativa
ttctatattataaattattttaaatttatcaaaattttacaagatgtcttaaatgactataacgtacacgattatgaaaaaaaatagactaaaaattctttaaacacccaaaatgtaaacatgaaagtttttcccattcgatgttccaattaactttatttttatttattttaaggaaaaatttattattatattaaaaaaataaaaaaatatcactccaccaaataactatctcacgtgtcaaaaaagtaattgaattaaatactacatatatagaatatttttattggacacttgtggtatttagtactttttagatgtgccttcttgcaatgatattcactaaaagtttttatattgctattggataccagtagtgtctagcacctctagacatgttgcattccgattgacgaacgatattacctaaaagttatcatgagacttgatatttatttggactaatagtgatattgacatataagagggtgctaggtattatttgtgccttttagtatttttttaaattatatgagatttaatacttaattatgcaaatagcaatatcacatcgatgatgatgctagttattattaatgacttttagcattatattcatatataaagatggacatttatttcccatacaccttcctatatagcaactgcaaaataggccattaatatgaaccccaactatattcaacatattaatattttttttcttgtttatactcatgtgtgtccattcaattatttggtatctaaaagtaaagttttataattactagctagctagccagctagaccttaaggaaaaaagacattgcaccaaaaaaaaaaaaaaaaaatacgatgccaatttcttttaacactacatatgtatgcacatgtgcaaggccattactttaaaataaataaattcttatctcaatataaatgtacaaagtacatataagttagtaataaatgttaagtatgaagagtttaatatacttgattaataagaataataaagtaaataatataattatctgaattttttttaaggttgtgtatgagaatattgaattagattaaaatgagttgaattatattatttggacaagagattaaaaaaaatatatatatatatatatttaaatgaaactcttcgagcattttttattccacaagtaatatacattattactggcattttgatctaataggggtcctttgttatgttgtaaattgcagtccctaaatttacttgttaaagtga

SEQ ID NO: 40277 - DNA, 1374 bp, Cannabis sativa
atataataatattaatcatattttgatctcaatattaatcaattcataacaatattaattgtattacaatataacgtactgtgcagtacaatatacttttcttacctttaatccaggttcatacatgctggccaatctaagtggagaattattcccgttgatctcaatcctatgtcacatcaacggtaaaccaataagcatttatcccaaaacactactcaacagttgcaaaggatgacctagggtttcctaccgaatcccgtatcataaatacactaaaataaaacttatattttggctctaaaacatacatcatatgatagagctcgttacaagcttcgaaacagtataaagaacgtctaaaccgaacaccccgagtgaaaagttatggccaaaatacaaaatttgactttttcaaaaactgaccaaatggaattccagttagtaccatctggaattccggttggtaccatctagaattccagttttgaacagccagaaacacaattttcctcaaccttaaaccctccaaactagctccaaacctaaccaaatcattccaaacttcacaaaacactcatatatcatccatacaatattttttacgtaacaaaaatcaaaaccaagcctttaaatgaaaatggccattaaatctcaagctttgagctttaaaagcttaaactttgagctaaaccctaaatagagaatatttattcttgattaaaaacttgcataaactttgatagttaatattcataggaaatgatctatcttccttcttaataagccacccataatgacacaacaggttggttaaaccctaaattcatcatcctttgaggtcaccaatttactttcttgagttttgttggagccattatatatggtgcctcagaaccacttctgctctaactaccaaaacatcaacaaagtctatctctgttgtgatgataatttaagaagctctacttgaaatacatccaagaactcttataccattctaatgtccaaaggctgaattgtctcccattgctaatgatcctatgtatctatcccatgatggatctttatcttttatcatcgtaagaactggagcctaaaaacctcgtcccgataccataatacaaacaagccttcactttcaagttgaaaatttactactttctatttggaatcattactagcagcttatttagataataattctatatagtaatatctcatactctaatatacccaaaactacgaggtcaatattcaactttaattggcatagacctaatgttgtcgagtgaatttcgcaacaccaaaaagtactatttaattgatataaaagacaatttttagggaaatgacaagtgcgagtattcaacc

SEQ ID NO: 40278 - DNA, 2478 bp, Cannabis sativa
  modified_base (44)..(46): a, c, t, g, unknown or other
atctttgttaattagtaaatctgattatattaaaatggattttnnntagggcacaaaatccaacaacaaccaccacgacactattatacatctcacttttatgttcaaaatgtcgtttatttagagtgattcccacaaattcaaaaggcatgatattatatagagcattgctattaggcattagtggtgcctagcaccttctcgacatgtcgcattgcgattggttagcgatactccctaaaagctattatatattatataggactcgatacttagttagaccaatagcgatattgacacaaaggagagtgctaggcaccaatggtgcctattatattggtgcctattatatatatactaatttaagattaactctaatgattcattctcaccattcccaatatcaatacaacaacctattaaatatttagtaatgtactactcctcttcatacactatcaatacaatcttaggtactactccaaacatctattcatcaatacaatcataagtactagtactactcccttccatacactttatttctattattattattttagaaacattcctccatagtaagtccccttaaactaaaaaacaaacacaaatattttggaaaatattagtcccacattcagttctataaccatcatttaaatgatgataagttaggtaaataactccatataagacaaaaatagaaaaattctaaatggaaccaatagagttaggatcaaatattgtcttgcataaataagaacaaactaatttatcttaacctaaaaatacaactaacatagacattaaaataaacaagcaaaaaataaaactcatcaaacaattgaaatactcagatttgtaagaaacaagattgtaaaataactattgttttggagaacacttgtactgacgagattacatggagtttataaataactgtggttgaactcacctgactaatagaagaaatgatcaatctcagtccagctcaccatagtgagcagagtacaaatgataccaacgtcctctaacctgtgaaaatgtgaagcaatagcacttataatttttattttgtatttataaaagcaaattttgtgtcaaattaatgaataatattatgatagtagagccaatcaaacctcttcagccatgagcaatgactgtcccttcacctaaagtagagcaacagcaaaaatgagtgaggagcagtaaaatacgaaaagttacatttacaaatagagtataattttaaagttggaagctttacattcaaataccctcttcctccattaattatattatactaaaaaaatatagattaaatcaaaatattctaacaaatcataccccactgacttatcccaaaccatcttgtaactgagtttaaaaggcctttataataaaaatggcatgtagtatctagtactagaaaaaacatgaaaagagaaaagatccacaactcattattgtaatgatgctaaattaggtaaataatcttagaaaagacaaaaaccatcaagttctaaatgaagacagtatagtttgaatccagcaagttctaaatgaggacactatagtttgaatcaacgacagtaaacttacaaaaatagtaaaagggtataattataactttgtcatgaagctcaacttgagcaaaaaaaaaaatggataatttagggcaggagacgttatcttgtttttatttacggaaatggtcctatattatttaatcctattttatactgtaattaagcttaaaaatagatgtctcgtataccgtttttcttgttccatattttatgggtgtattacacgattatagtctttgagctatacttcaaaagctactttctctctctctctctcaaacgataacttctcttctctcaatccattttttctttctctttctctctgattacttttctagtcactatttaagatggtttctgaagtgagttcctctctctttctctctctctctatatatatttatatatatatatatatcttgtgatatgaaccagcaactcataatcttttcttctttctttttggtttttctttcgttttctctgttatactttaacttgtgttttgggttagagttaattttagggttttgcatttgtgaatagttgttgaacgtgttgcaatggcgattactagtttaatgttttttttttcatatatatatatatattttagatatttatatatcatcatatgatgtgtagttactaatttagttactttttttaaaaaatgatattaaaaaaattacttttatcttggttatcattttttatataaaaaaaaaatatatgtatatattttcatatttcaaaatatatattgaaattgttcaaaagaaaaggtaatgtcaatgtatcttaaacaataaaataatataatatagcctaaaaattaaaaaataaaataatattttcaaagttaactaatcaaaataagtaa

SEQ ID NO: 40279 - DNA, 1555 bp, Cannabis sativa
aatgagagaaaaaaccttgtaattacatcaatgaaaaccaacaaaccaaccagtctttccccaagtacttttattctttttgatgaaaattctgaggaagaagtggtcaccaaaatctctcaaaaatgatatttataatacttctccttattaagagtagcctttttttttttgggagttattaggggtatcatttgttacatatagtaacttttgttaggggtcacaaaattatttttttaaaagaaagaaataaaaaaaatataaaatgaattaattaattattggtgtaaaacaatagaatgacacgtaatgaaacaaaatatttgtacgtttttcgtaattttatccaagcattatcctatatatattgtagtaataatagagaacgcaaacaaacaacaaacaaagtaatatatttattctcatgcatttgtccttgtacttgttcttttcttcatgaaagaaccaatagtgaatttggccatggtattctatgaatcacttccatctcttgaattttccaaacccaccatgcttccagtgcttcccgaatttaccatgcttgaacttgccgtgatggtagccaccatggtaacccatgtgcccatgtgaaaggtggtgagccccgtaagcagcggctgcagctgttagaccgccagctaccatgggccccattcccataccatgtccaccatggtggtgccctgtggtattaataagaagaatttgtcaaactaacagaatataattatgaatttaattaacacactaagaaattctcactaagtctaaattaaataaataatatgaggaagaacacattaatctcctaataagtacttttctttgaaaaattagtttgttgataaaaaaaaattataaagtttattttttccatgagtgacaaataggattaccataattttccaagaatactatagaatttcaaagaagaaatatttatacaaatgaaagaattggtaagaaacctgctgtaggatgtgggtaaggagcaggagcaggaggaggaggaggataagtagaaggagggtatccactaggaggaggatagggtggtgggtatgcagcatgaggcggtagaggagtgtatccgagagatgggtagccaggaggaggagggtaggcttgatgagacggtggcgatggatatgcaggtgttggtgccagtgggtaagatccagagtgcaactgttgggaatagtatgcaccaccaagatgagagaagagacctctgtctctttcattggaattgacgttatagctattttttcccattaaattatgtttattgatgatggattaatcaaactattctaccacagaccaaaacttaaaaaatgataatgaaaaggttgaaaccaaagtcgaaatgatgattaacaattgaaacggttattggatttggtcgggacgtggatgtgattagattaggctttcattctacctgagagttttatgttattttctataatttgtttttaaagaattttttttttttttttgtaatttctcttctcttctatttattact

SEQ ID NO: 40280 - DNA, 1808 bp, Cannabis sativa
aaaaaaaaaacataattcattaattattaacaaaataatcacgtttgatgatcataatgattatttttgttgtcataaagtataaagttatttttttttttaaaaaataataataaattttatttcaattttggaacaaaatataatcaatatatcattatataaattagaaaaataccatgaagactttagcaccagaattaagtgcattaataaccatctttctctccaccggaccagtgatctccaccttccgatccgccacagctggcggcaccgccgcgcaaacccaatcaccctccctaatattcttagtagcgggatcaaacccgggggcagatccgtcattatacctcttcttggcctcttttctacactcaagcgcatacctcacgcgctgtttgaactccctctgtaactgcgccacaaaattaagagcatctcttgttagaatcttggcaaattctccatcataacggccccgaatctccaccccctcgggcgcgtcataacccgccatcggaaatggttttgccaccggcaccgcggtggcgccggtgtaatatgatcctgttcctacaccgttcatagcatataaataattttttttcttttgttaattataatgtatgaaacatttggtatttatacgtgtatatattatatattatatagtaatgaaagagttatcgttatggggatgatatataatttatagaggcaaacggtgcatatgtggatttatgtgcgtaagcattatcgattgtgatgtatgtataaagagtgtttaattattaattttttataatatttattaaagtaaaataagtgagatttaatattaagttgagttttttagggtttaaaaatagtaatattatagtttataaaagtagggagctgattttgtgcttagaaatgcaaaatacgaaatgtattcagttgtataataggtgggtttcaggatatgtaataatgtgtgtaaatttatttatgggtcctaagatatgtaataatgtgttacagggtacgttaccattttttaatcctaagtacctcttgatcaatctcagtcctcaaatcaaataactactccatctaacggctgtcgtatattacaaaatatatcccctaaagtacactaacagaacaaaatcgtgtccgtataaaagtattaaacactataaatattttttaacatttatcattcaaaatgttaaaagatatattaatactctttcaatattatatttttagagatacgattttgtcccgtgatgtacttttacggaatgtattccgtggtacattaaatgggtctcaaggtacattaaatgaatgtcagggtacgttactatttttttaactctaattacccttagatcaatctcaaccctcagatatcataactctcatctaacagctgttgtatatcacagaatacattttgtgaaaatacgaaacaaaatcaagtcacatatttttattagtataattaaatattgggagtaagtttgagtacacttacaaaattctgtattgttttatagaatattaggatgtaggataaggtggaggaaaatatgggatgcgttttgaaattattgaaattattgatagttgtgcctacctagctagctaagcttgcctcgggagttgcagagtacatcttttgttttgggataattgatgatgatgatgatgatgacactttcatactattcctccatttctacacgtgtccttcacacgtgccacttttgctttctttcaccgtaaataattaataaaaattaattaagattttt

SEQ ID NO: 40281 - DNA, 1386 bp, Cannabis sativa
aaaaaaagaattctctttaatgacttaggataagtcaacatgagcagagaaggtgagctaaactttcaagaatgaggctcctcgctataccataccattaatgggctaatcccactaagtggccatcatgaccatgcctgatccctttacttttcccataatgccataccatgttacttgttgacacatgcaacttctgtaatgtggtgcaaccttgtttaagtaggtgtttagctcgccttcaatgcttggtttagtcccatctgttaagttaagtcagacaaactacaaagttagttaacgtgtaaccaatttgtttttcctagacaaatcaataaatgaattgggccaaagaaacaaaagcacaaaagaacaagctcattaaaaatcactttctctagtcaagttctattaaaaataccatgttgtcaaaaataaatatcaagactagaatgtactaacgttattatttttactttaagcggaagacattactattgaagtttcattttccatcttcttccaactcgtccttatcctcgtcgatatcatcgatatgaatgttttgctattttcatcaacgtaacctgtacatatttataccattagtttatcaaaaatgatagcttcgttcattaaaaccgtgactaaaataaacagaatcttgaccattttatgccaaataaaagatttgtctatagcttgttattaatggttcctttacatgaactttataatttcaaggattttatactttgtgaaaagagaaataaattacctctatgaatcagtgaatcttgtgtatttgatgcttccaaaggttctgacatgttatcaaagatctagaaaccgcaacaaagactctgtttgaggatttcgagtatatcctgcattaaaagttttgtaaatatttctaaaataagttttttatactcccagaacacaaccaaaaaacttacaatgtaaatgtcttcaaaaccaataaggtggctttaattgctgcagcagttcagctgcaggtttacttccaagtgttgtttcctaaatctggacacatataaatatatccttaacaaaacccaaagttagagaacaatatataataaattccatcaatttcttcaaccaaatgtacgacatatatgctatgatttcttcttatatgtaaagttttgttctcatgatatcaactgaaaatatactattagcaataatcccaggtttcatttaacaggtcaattgggccacaacaggtcaacttgttcatacaaagaagaccctccgaaaaacacagaagatacatcccgaaatgtttagtgagccccaacaaatcgacaccaacatcttttacaacaataaggctgatcgaaacaattaggagtctca

SEQ ID NO: 40282 - DNA, 1611 bp, Cannabis sativa
cctcatcaatggagctcccaatcctgagttcttgcaatggaaaaagaaggaccaactcctcctttcttggattcggtcatcaatgtctgaaccaattcttgcttctgtggcaacctttacaacatcgttctcggtctggcgggcacttgaacaaaggttttctagccaaaccaaggcacgactcctgcaactcaaaggtaatttctcaagacttcaaaagggaacattatccattgttgaatatgtggagaaagctcaagccactgcagatgctttggcaattgctggttcacctgttacaacccaagacttggttctccaactcttgaatggattaggaccagattttgatcccgtggtctccggcatcagatctcggagtgataatctctcttttgaggaagtccaggccttgttactctctcatgaaacgagattagaacatcacagtagcatcactgatctctcactcaagatgcaagcgaatttgagtgtcaatcagtcaagatttgggggaaatcaaaattctggtatgtcttcttctcgccctcacaacagtgaaactggccgtcctacagggcgtttctttggccgtggaaatggctccaaactcatgtgtcaagtgtgccttcgatttggtcacacagcggctgtttgtcactaccgctttgacaagaacttcatcacccccaagtatggtaattcctcttcctcccaagcttttctcactgaaattgagtccatttatgatccataggccttctctaccactatgattcctgatatgggagatgatgatctctggtacatggacaccggtgctactaaccatgtcagccatggaaatgttaatcttgatcatgctactccatattaaggaaccgagactctagctgtgggcaatggtaagcaattacttatttcccatattggtcagttatccataccctctagtcattcctcttccttacatttacaaaatattttacatgtccctgctattaagaaaaatttggttagtgtctctcaactcaccaatgataatgatgtctttcttgaattccataaatcttgttgttttatcaaggacaagctaacagggacagtgcttcttaaaggaagggctaaagatggtttataccagcttggagagtcatcaaattctgtcgttcagtgtcatcttaccacaagctctagggtagataattcttgttgtacctgttcttgtatttgtcattctaatgtacaaacaacttcttgtaattctcaagaaatcaataaaaatacccaagttgttttgagtgtttctccacaagcttactctacttccaaattttctgatgtgaataattggcatttaaaattggggcatcctgttgagaacactttggcaagactcttaccccatatttctcatacaggatccataaaagcattacaattttgcattgcatgccatcaaggcaaaagccataagttgccttttcctttgtccaccagtagggccacccaatccttagctctcattcacactgatttgtggggtccttcccatgttgtgtcaaaagatggtttcaaatactatgttcattttcttgatgattatagtag

SEQ ID NO: 40283 - DNA, 2141 bp, Cannabis sativa
tatattattaattaatatatattaaataaataaattttcttacttgtgataaaataataataaaaaaataaaaagagaacatgtaaaggattttatgatatggtatggcattccttttcattccaatggtaaacatcaattaaaaaaatattaaaaatacatttatgtcatcaagcatccttcatagcatctccaatcttaagtgacagctcaaaaatacattgcgatatatttctttagtttatttaatacatagtctaataatatgtcgccacgtgtttttaagttgacatttaatggccaaaaaaggttacgactgcaacaaaatcgtaagataagatacttttgctactattttttttttattaaagtcatatgtataacaattatgaatattaaagaggtttcgtcgcaaatgtttcttttatttttagttaattatttatttcgtttaaaaataaataaattcttgtttataaataattttttttaactaatattaaaaataaaattttatttataaaaatactgatttacttaaaaaaaaataggattattttatcagaagtgttgaggggtggtgggttcgaatgtagtggctcaagtcagatcattttttgattcgtctactttgccgactgattttaattgtactaatatttctctcattccgaagaagaagaatctgcttaatatgggcgaccttagacctatatctctatgtaattctattataaggtggtctctaaagttcttgcatatcgattaaaattttatttatctttggattatctcagataacaagattgtatttattctaagccggttgatctttaacaacattatggtttcatttgaaattatgcactatatcaaatggaagcgtaaaggtgaggaaagcttcatggcactcaagcttgatttaagtaagccttatgatcgtattgagtgggattttcttagcgcaatgatgcttcgaatgggttttgcccaactttttgtggacctcattatttccactcttaattcggttcagtatactgctgttcatggtggacggtctttggggcctattgttcctagatatgggcttaggcaagatgatccatttttaccttatttgttctaattatttgttgaaggcttctattctttgattcattatttataaaggtgtggtgatctgaagggcattaaagtggctaatggcgcacatgtagtttctcatatgttgtttgcagatagtagttacatttattatcgtgctaataataaagatgcaaataatgttctgtgcttgctgagtatttttgaagaagcttcaggtcaaaaggttagtttttcagccatttgtatttttcagttctaatactcctcaagggactcgagatagaatatgtcctcttttagggattgctcatgttgatgttaatagtgtgtatttaggattgccttgtattatgggtaagaataaatctgctattttagcattctttaaagagaagatgcaaactaaaattcagagttaggaggatcgctttttatccaaggttggtaagaaattatgcttaagactgtggcacaagcattgcctgactatgttatgtcagtatttcctttgtttgtgaaaatgtgtagccagttggaacgtctgatgttcaagtattggtggagttttggctcaaatagttctggtgggataagctgaatgagttagaaccgatcgtgttaacataaaagtactggtggacttggatttagaagtctctgtggttataatcttcctttgttgggtaagcaaggttgatgactcttgattagtgacatctctcttgttagtcgaatttataaggctagatataactcttgtggttcttttttgaatgtccaactaggccataatcctagtttcatttggaagagcattttcgaatctcaatctctagttaagtccagtgctcgtgtgcatgtggggtcggggcgcagtattgatattcttacgaacccttggctgcctgatcttttctgtccttatccaatcttcacaccctggtattagggctgtacaaaaaaatttgtaaaccgcctaaaccgaataacccgcccaaaccgaaccgaaaaaatcgataaaaattacaaac

SEQ ID NO: 40284 - DNA, 1280 bp, Cannabis sativa
gcatcatcactagctttagcaacttgcatcatgcgattgtatttggataagtggtccctcgggcccattctcccttcatacaattccatctgaggcattctgaagaactccggtagtggtacgtctataattctcttcacacacggttttatatcttctccttttgaatcggagatagttccattctaccttctagaaatcttctccatgaacttcgttaactcttcaactttacgttccaagtgtttagttttatcatttaatgattcccttacacggacacgatcgttgatataatttctcaaatccttccaattcatccttttctttcttttcctttaattttcttcggaagatcatttgtggagagacatcaactgtcattgtctaaaattggatcactttgactgctagaatcactgcatcaattcttatccttctagatagtaggcttcttgactccatcatcagacttatccttctatgcagctctgccactagaattagcctggacacccttccctgaagcatagtttcttttctttttttgttgaggttggctgacagatttagatttctcccgttgttcagcctgagaaggctttttcgaggtttcgctcactttccctttccttttatccttatgtggatcataatttccaagattctgaggattagccttcctgatggcatcgtttgttggagtcatttgtttagtttattttttccaatgatcagggttgtcgtcatagcttatattcttgtcttttctcaagaattagcaaagagccttagaaccaaagaataatttgaagagaaatagaacaacaagtttttttacgttgttggggcgttaaagagccttagttcaagagttgatattattatgtattttagctaaaaaattctttgggaatataatgaatatatgttctctatttttgcctaagaaaatattgtaagagagtttaattcttaattcaaaggatttgttgggtatttatagtgtttacatgaattatacttagtttctattttccctctaataaggagtttacatgaaaaatacatagggctgtattcgtgaggctcagcccatgagatgatagatgagctctctagccaggttgaacacgatcaattatcgtgtcctataattttgggtaatgaattgtgaattaattgcttgatctttattttaggtaatttccccttttaacttgctatgatcttctagccgagatttaaggaaagttaattccttattttgtgcaatttga

SEQ ID NO: 40285 - DNA, 2244 bp, Cannabis sativa
ttgtcatttaacaaaacacagggaaaacacagggtccaatctgtaacaacacagggtccaatctgtaacttagggtccaatctgtaacttttgcaaaacacagggtctaaaatagtattttgacctattagttgtgctcatttattgacctcacagatctatcaaggtttgtttttgtgtctttgtcaggtcagttttaatggataaaaatatttgtgccaactgttatgagctagcacctgaagaattgagtcaattgatagaaagttagggcttatatatttgattctagcaatttcttaaataactttcttctttgatagaatcttctagtgaatttttgctatgttagggcaaaaacactttttttggttttttttttttttttgtattgtaggtttcatgctaatgaatgcttcaagaaactacgaaaaaaaaatcttactttaaaaaagttgtaactaaaaaatttgtggctaaaggtattagtcacaaaaaaaatcacaatttgttatgactaaatacatttttagtcacaatactttttgtgactaaaataaaattgaggcggtatgggattggtctcaacctaagtctgcaactggggttagaagttttctggaattagcaaggtattacagaagatttgttgagggctttgctaagatttctatgcccttaacataattgactcggaagaactaccagtttgtttggacggataaatgtgaaaatagtttccaggcactgaaataaagactaattaccacacttgtgctaactttgccagtcagtgatgaaaagttcatgatttattgcgatgcatccaaacaggggttaggttgtgttctcatgcagtctggaaaggtgattgcttatgcatccaggcagctaaaagagtacgagcagcgatatcctactcatgatattgagctggcagcagtcgtctttgcactaaaagtttagcatcattatctttatggcaaaaagtgtgagatctacaccgatcacaaaagcctcaaatacttttttactcagaaggatttaaaaatgaggcaacgacgatggttagaactggtgaaggattatgactggaagattctctaccaccctagaaaatcaaatgtggtagcggatgctctaagtcgaaaaggcccagggcaagtctatgaattatagaagatttcagcagagttggctgaagatatgactagagcgggaattgagtctgtggtcgaaaaaattgttaacatcacgctacaatctgattcgctagaaaaaattagaacggcctaacaaagcgattctgaactacaggagcataaggagaagttagaaacaggatcggcaaaaaacttttctctttcatcttatgggttactacgatataagagtaggatttgtgtactgtccgacaaaaatagtagacaagagattcttgatgagtctcataccacaccatactccctacacccggggacaactaaaatgtatcatgatgtgaaggctctgtactggtggccagatatgaagaatgacattattgagtacgtattcagatgtttaacttgtcagcaaatcaaggcagagcaccagagaccagcgggtttgctttagcctttcaagattcccaagtggaagtgggaagatatcaccatggattttgtggtgagacttccaagagcgataggatactatgattctatttgggtgattgtggatcgatatacgaagtctgcacactttttaccagtgtggacaacatatacagtggattagtatgctgatttatatatcaaggagatagttaggcttcatggtgccccaaagtcgatagttttagatcgagatccaaagtttaggtctaagttctgggaaagcttacaacgagcaatgggtaccaagttaaagttcagtacaacttttcatcctcaaactgatggtcaatctgagagaactattcagatacttgatgatatgctgagaacgtgtgtaatggattttaaaggttcttataacaaatatcttcctctgattgagttttcttataacaatagttatcaaagtactattggcatggctccatatgagatgctttatggaaggaagtgttgtttgcccattcactgggatgaagctggtgaacgtaggtatcttgaacctgaggctgtccaaagaacgagttaggccattaaaaagattcgagcttgtatgcttgcctcacaaagtagacaaaagagctac

SEQ ID NO: 40286 - DNA, 1443 bp, Cannabis sativa
aattattgttgttttatgtctctagcaacaaattaaaataaaaaaaattttaaaacaagaaaaaaaaaattatatgcataaagaaatattaaattttgttctaaacatattttctttgtaaaaaataataaaatatacattatttgatgcacaatattttgaaatatatttctaatttttttatcatatgtattagatttttaaattattattttttacattaaaatattaattgtttgtataatttatttttaaatatatataaatatgggttaattcgattagatcgattacttttgtatgttaatcaacatttaatccgcacaagtgtggattttaaatattataatcttgcataagtgtagatatccacactttgcgaattatattggattggatcgtgcggattaaattagattgagtatttatgaacagccttaggagttgtttggtacacacgattccttactcacaaatgggtatactaagtctaacttgtgtttggtatgtattttcaatttttttgaatggggttttcatttactgtgctacctttacacttcgggaaaattaacatttctcaaaatgttgtgttttatttgcctggaaaattaacatcttttagtttagcttggtgaagccctagccgtctcattcctcttcatcgatcttctgttgaaccaggtatctctctctctactaacgaagttaactaagaatcgaaggttttgaatttggggattatgcaatttttttgtatgaattttttatacattttttttttatttgatcttccaagtttttttccactttattattgatgtatggatatagttcgcatcttcacgtttttttccagtgatgcgatttaatatatgtgtagagattcatagtggtttttaattttcaattttatgtatgtgcctggctaaatttttaattggatggttttcagtattgtgacttagaaaaattaatgaaagcttgagtattgtatttggattcaggggaagtgatgaaagagatcaaataataatgtagtatttaaatgaagaaaaatatttcattttaatttgaaattaaatcaaataaatttaaaaattaaaataaatatgaactatcagaatgcgtccagacagaagattaattttgaaaaatctattatcacctttagtacgaatgttggtcagactaattcgtgatggggtactgaatattttaggtttgacttttgttgatactcatgataagtattttgggctcctaactgttgtaagtaggaataagaaacgtacttttgaggggatttgtgagaaggttaagaagcgagtctaggattggaagcatagtttctttttggccggtgttgcgatatttagcacacgcaagtgtacgtatcgtttcaagtagtagactcactaggagtgaggtcgatcccacagg

SEQ ID NO: 40287 - DNA, 1845 bp, Cannabis sativa
attcatttatcagaaaatcaattatttatttatttccttaaatagaaatttatttctttaaatagaaatatatttccttaaataaaaagtattcttataagtacttgtagaaatattttaggcttaataaaattagaaaattatttccacttcttttcttctctaagagcttttaatagggggaaataaataaatttttagaccttgttcaagtttgacaattctcttacttgttacttgtaatttttggtattgagattactctaatatcttctttatattctgtgcaatttttttatttattattatttacttgttgcatattatcttaagttgtgattcttcacttcatctcttgtccttcatattattcattttacaagtatgtagcaatataattggaacattattaaatctttattataatttttgatcatagaattataatattgttcatatctttatttctattgaatatctataattcccaacaaactcaaaatattatattgtattatgtatttatttttgctatatatataagtatatacattctgagctttcatgtttgagtcttttttctttttgtttttacaaaaaaacttacatatataaatagagtttagaccatcaagtcattacaaaatatttttacttgtattgattgaaaataagtaattttcatgctttttaaaatattaatcataatatatcatgccaatattttgaaagtgtaggacctttatttttgtatcgtgcttaaattcgtatcatattttattcaagattaggtgagcatcctacaacttactaagcacctagaaaaactccgcatttcttggactatttttttatcattatgatttctaggcttggttctcaatttaaatataattatgtaactaagaaacaaaatttagagtgatgtccttgtaacaagtgcccaagtgaggcctctacaaaaaaaccaacacctaggtgagctcctctcacccaataagcgcctaggtgaaccatgtctagggtttggtgcttgtacactcaagctccttcaaatggatgtcaacacaagtatttaagcattaaataggttttcaagtcaccttatacatggatgggggggtgctcaagtggccttatgattaggtaatgcctaagtgaacacccgagcacaagtgctctctttcttgatggacatgcatttggtgatgagaaatttagttccaactcaagaaagatattgtggctacttgaaattgttgggttttatgctctaaataaaactttttctatgtaatctcatttgttaattcaataaagaaaataaaaagatcatttataatgtaatcaatttcttagttcacacattttattttatgtgattatatgtttaatatttaaattccattaaatctagatcatataattatcaaatttatagtaatgtcatcgcagcggattacatttgtcttttccaaggcacccgatttttcaaatgagttattggtgatgtcatttagaatgacaaatgctccagaagcttttatggatcttatgaacagggtgtttaaggatttcctcgatagttgggttatagtgtttatcgatgacatccttgtatactctcagatagaagtagaacatgagtaacatctttaatggttttacaatcacttagagatcacaaactgtatgctatatttaagaagtgtgagtttttgctattgcaagtgtctttcttaggtcatattttcggtcaggatatggaatcatagttgatccaggaaaagttgaatcagctaagaacgggttgagaccaagatagttttcaaagttagaagtttt

SEQ ID NO: 40288 - DNA, 1422 bp, Cannabis sativa
atcagatctgaataggcctaaaaatattggatgtgatccaatgaacacccctagccaagtgcatgccaaattttcccttcctcacaaaaacaaaactttgaaggcccttctccttgcctaagtgtattagtgatattgtttcatgtggtgttaaaaaaaaaaagaatattaataaatttatagcttaaaatgtgagagtgtgtgtgtttttgtttcttttatgtgaacttatttttttctttgacagagagaaaaggctacaaagaaataataaatttatataagatgggaaaattctacaatgtattttctaaaaaagatgcactaatgactttaatgaacttttaagctgttaaaaattatctctgaactatttaaattgttaattttaagaatttccgtttaattctattcattttttttaagatgaaataacaacttcattgaattattaccattctgaaatacaagagagcttttaaattagcccaaatattatgctcgaaaatgctacgaccaaggaaaaatcgagagtgccttacaacaacatgagcaactcgatttgttgattgtctaatgaaaaagagatttacattgtataaagaagataacaaaaataggcaatcttgaataacaagttcgaaagtggagttcatcttttgcttactacgaatactttggacagagaccatgctatctgtctcgatctgtacattctgacattttttgtttttcagccaactgagggcttccttgataccaatggcatcaatagtttcagcagaataatcacctccttggtaacaagtttaagcctcaattaacttgccttgattgtcaggagccacaattctaaagccgtatgaattttcttgtgcaaaggtcagcgccatcgcccttgttctcagagaacaaggaagatagccaagtattgtaatatcctaagattatgaaatggattagcaatccctaactagttaattgtgtattattgtggaattatattattatataatatattatatgcaaattattatgaaatatgacatgttaagatcatgttggtgaaccaggggcattttagtaattttgacccaaaaagggtaaaacggtgaatttaatttaatacgtgcttatggactatgttattatatagtatgcatgttttgtcctttttcaggtatattctgacaagtcggtgcggtataatcacaactgggtattccgggccgaactgggttcggggtcgaaatacaattttgggattatttattggcattttaattaagtgcgtttaatctgaaatttaattgggaatatttatgttgaaaatgactatgtcatccttggaaatgcttttatgtgttatttggccctagggggcgttttggtaaattagccttttggattaattgcaacaaa

SEQ ID NO: 40289 - DNA, 3002 bp, Cannabis sativa
tatctgtgtgatgggaacccttgaagtgactatcgatgacctaattaaggtaggttgaggtataaggctcctatagttgacatgtggttcccaagattattagaatgacagaaggggtgatgaagagatctgcactatgtgatccattttttaaggaaaaaaataaaataaaattgaacataaaaaaataattcacttctctttttgggcgtggtgaaatgcattttttttaattatgcaacaaagagttgatgtcgcctaaaagaaatcttgatttgctattataaatatatttgataattttatgttttataatttattaaaactaattaatgtaatttatatttgcatattgaatataaaaattggtgttgacggtgagaattcgtcaactaagttagtggtcggaaaatacaaagttacccagaaatgtgataaagatgaagacaaagataaaggtaaaaaaaacgtctgaatattgctttatctctctctattgaattcaagatctgagttacactaaatattttttcaacccctttcaaatctgagatgggggcatttataggctctaatggcctggtgtacaaagtggtcccgtggggacaaaatgtcactttcccaccgcatgttgcagatactggaggtagtttggcaccccatatccttgtctagtgtcagagggtcttcagttgcaggttgcagatggatggtctccatatacatgcgcgtggtccctggttgcacgcggggtggtcaccgggtacaggttgtaggatagaggttacaacgtatccttggtcgggttgtcagatcttccaggtccattgtctctactacttgaacctccttgcttttagtcttcagagggcatggttgtatgctcttcccttgcacgccttgtcctttgattcctttctaatatcattcttgtcatcatgcattcactctttctcatattcgcacccctcctcaaaacatacacactccacacacaccagggctcccatctcttccccttcacggctcgcgtgcgatcctccatcctccgtaccatatcaattctcatcttctcgcaccatgccaactctcatcaccccaagacttaagctcaccacaccaaacacactctcacagttcgaatgcgagccccccatgggctcacatgcgagcccccatacccccgtaccaagattcacactcaccacacacaacatccactcgcaaggctctacaccatgcaccctcggctcgcatgcgagcccccatgcctttgtcccaacactcccttgcacaaacatgcccatggaatctatcctcacatgcacaacctctccttcttttgttcatgctctcgccccattggatcactaagggactagacagcgaatggcacaggtgtaccctgggcattgtgagaatcatagtggcattgcgacttatataccaagtgggtaaacttatcgaacacgcttgcattaattgctccaagactagtcaactaactttagaaattagcagcgctaatttttggagttgacacttggcccccattctacaagaattattttaagtgttcttgtcgaatgattgtgctggttgaatcggtcttgttgtagggcagggcctcttgggccttgccccaacaattttgagcgatctcatctcccatgtggtcgagcaatgattttacttggcactggtcgaacgactctatgggttgctctttagctcagtccatcttagtgacctgcattggccgaccgatgaccattctttggccaagtcattttcgtgactggtgttggccgagtgactctagggatcactctttggccacgcgttttcgtaactgacattggtcaagtgattcttgaggtcaccctttggccaagctatttttttaccatagttagcgggcatctacttaagggattatgtatttttgagcactctcagcctctttttgtttcttcatccttttattcagatggaaggggaattattgtacttgactgcgtctccccttaatttatgaatatctgcttacgtttgagaggtgtccctctcgtttcagcattatgccatgagcatctttccagagccctttaggctcggcaatttttgtgaggagaggcatactttttttgtcgagcaagggtagctaatccttgccaactaagaaattcttgtacaatacttcctcattcgctatttttgtcatttttttaaagggagcgaacattgccttgtcattcagcagcaaagtgtggttgactaactctaaggtaatattcttatatttcatagagaaattttgatgccatccggttagccttttgtttcattacattagaatatcaagatggataagaaaaaatgagaggaatctcactctggtggccttacaggttatcaccttggatttttggcctgaagggctaaacaataataaaccagacttaccttctcaacaatgatattccttcaagtgtgctgcattccacgcccttggtatcaccatgtcatccatacatgccaacttatagatcccgggtgggttgactttagcgatccgataggggccttcccaattggctcccaaaactcttactcctggatctctagtatttagaaggacttttcttagtactaagtcttcgattttgaaggcatgcatgcagactctcgaattatagtaccgcgttgccctttattgatacaccgccaacctcatttgggttgcgtccctcctttcttccaagaggtccaaagtttcagccatgactatttcgttggactcctcattgaagttcttcacacgaaatgagttgagcttcatctcgatgggaagcaaaaccttgcatccgtatgccaaggagaagggcgttcgtggtggagtggggcgtggtcttatatgcccagagcacattcggcagttcatctacccatctgcctttaagcttctccaacttcgttttgaggtttttcttgattatttt

SEQ ID NO: 40290 - DNA, 1579 bp, Cannabis sativa
aatcattgataagcactctcctttgaatgtgtttttgaccacaaaaacctctgccccaaaagtacaactctcattcacaaggtatccattggagtcatcgttgaaggtcttaagctcaatgtacttaggaataacccattttgtcctcattgagtggaacctcattactcttgcattacctatacttaaccaattagtggtaataataaattaatttacacactcaaatgtatttatatgatttcaatttaaatattgttaagagactagaaaaccaaatagaaatgttaaaacacaccatgtttagcacatttctaggtgttattattgcttgcaattaaatatcaggtcttaaatgtaataattttcaaaaagaaccttttaccaattacaatttaatacgtacaaaaagtgttaatgttaaaaaaaatcacaaaatatatatttagcttaccttctataagttattttttagcttttagaattaaaaaattccatctaggtcagtttagataaaaaaaaaatgaaaaattaattattttttaatttaaagtccttttgaaagaaatcagaatttgtagtttctttcaaaagaatttttaaaattaaaataattcataatttttttttaataatatctaaatactttcaaaaataattttttatataataattatgtaaaaggtaaaaataaatcaaaattgatgtaaatctttacttttacgtataagcaaaataataaaaggagattattatgtaccttgagaagttgatacatactggtcccgaatctgatcaaacaggaaaaatgtaaaaatagcatgtacttcccagccaagagggagagaatttgagtttaggagttccaatgaaacagagagatgatcttcaccaccattataaatgtccccattgggaaaaatagttagttgcctgccatgaccatatataatattaatgtttacaacttagaattggtacataaactaaataaaccccaaatggtaattaatttgatatataaaagtaggtaccatttgtagcctccactttcaaactctgaactgtagtaagctactgctgaggattttgaaagagagtgaaatgagtcgattttgagtaaaaagtgactgggaacaacatctctccctgaaaacaaatatgctaaaataattaataaggaaaattcataatataagactaatatgattaaacattattattattagagtagtaagtagttacgatgaaaggttggagacaattcctgttcctgctcatcatcatcatcgccaaaaaaggatgatgacaatgatcttttctttttcttttttgatcttagatcaatggaaacattattaagagtagtcattatatttgttatacaggtcaaaattatatctgaaataatagatctatatggtatatatatataaatagaaaatgcattatgcatggatgcgtcttttcattttcggcggtgataatttattaaaaagttacacttttttatgtaatgtttattatataccttgggactagctagttaggatacgtaggatcatttcaccattatcac

SEQ ID NO: 40291 - DNA, 1867 bp, Cannabis sativa
ggatttactttgtcaagacaaagtatgcctggaagacttagaggcaggtttagtagcctattttatttctctgcataagttcattgtgctagttcaatgcgttgtatggtaagggcacctctcaagcgaccatgcaggcaagtctcttggtcacttgctattcactaagtttcatagactttgcttaggttcttccttgggggtggtgtctatagtacgtatgtagaactgaaagaataactttaagaagttaatcttatgagcaagtagtttagacatagtcggtctaacgtgtaacaaaagcttacaatttagtgcccgcttttgaaatcacgtagaggctacccatgcgcggcttaacaaagcagaggtcaccgttgaagaacagtgggagaccacgctaagaagatcgtgggtactagcacttttatgggttcttacacgatgaaacattagaggaactcaattgacaagttggccagtgagagtacttaccgagatgttccttattttagtatttgggtagaagttctgacttcaagttctcgtcatacttgccagacttgtgtgcacctttgctgttatttagtaacatggtgcagaccttttcagtttggcccgaacatgcttactgcaggggattttctgtcaaggaatattctttagggagtaattctcttgtgaagaatttctttcctcgatctgtttgttgacgggcctggtaactccatgtgcgtagtcatgctgctttgagttggcttggtctcttcttctttcccttttatcaagggatcctactagcaagatgttgtgtacctcttggtcactgtagactagaagtatgatagtagactgctggtggatcaggctgactagggcaagaccaggtggccagctatattgagggagtactgcctgagggattggataaggccttttttggccagcatgtggaggtggtagctggcctaaatgcgaattctatggtcgaccagcttgctaaggacatggtcgaccagacttctaaaggcctggtcgatgttgtggttggatcctgtccacatttaattggctttgccccctggcataattgacgtggagcctttgtgcacttctgtcattagctagacagcttctttcttggaaacactccttggtggtgttagagtaccacttctgtgtgttatgttgtgcaagattggacaccttgtagtcgtcttctcagtccctgctctcggacaaggtctttatttggaggtaggttatgataggtgtcatccatgttggagtgtcatccagcatgtcgaccttctgggacaacaatgctgggggttttcttctatgagctaaatatgtgggcaccaggtttgctttgtcagttatggtactactcgctaggcaggcaagtgcatctactgtggcattatgttctttttgaaaccgaacttagttccttaaagaactagataggtaccaagttttccttggtagtcaaggcgtagctagctagttaaacaagtgtgtcgactgttgtgccatctttgggggcttgccttctagtatagcctttgagctgtcttaacagctttggtaggccatcatcttcttgtattgagttgtatattcacataggacataacctgtgactagctgagagtagtggtgcatgtctaggtagttagcctgtgctttgtgtgctagcctagggctagcgttcggggcttcatgttcagcctcatcgttagaagctttgaaactgaccttgtagcctcgtgcttcagttgcccccagatgccttgggggccatgcttgcatcgggcaagcggtcaatgcacctcttggattcttgctctcacttcttctctgg

SEQ ID NO: 40292 - DNA, 6210 bp, Cannabis sativa
tttagcgtcgccctgatcagcgtcggtagcgaatttcgcgaaaaccgacgctgaaagagcttaaaaaccgcctctaaaaggagtttttgtagtagtgtttgcatgtcatgggcatgtccatactcgcccttcaacctacaattacccttctatttccatacgaatggggtatcataacctagatagccgaagctttgctaatattattctaagctttcttcttcttcaagagaaacacaaaatacatagttaggcttcttgcataagcactataaaaatatcatatacgccttctatggctaatagactgactcgtggattaaggttaattaatacctgaaccacgtaaaaatctctatcttctttattactgttatttattattttttaagctcttattataataattttttaaaaatatcaataaacattaaatattccttgagttataattcattggtcacacatataattaaaaaaaaatagtaaaataaaattaacttgaaatttgaaaatgtaaatttgaaataattattttattttattagaatttttccatgaacaaaaattttaccaaattaaccaataaacttgacaaatttagagacaatcgtatcctcctacatcatattattcacattaatgaagttatttttttaaccttctaccaaacgttcactaataataagtccatctttactttactactctttatattcactcttgtttctctctctcttctagtgagcgtggattggtcactctctgcacgttcctctgccccttcttccccgcaaatcaattataacattatagcctcatctccttcttcattcctccattctctctctctctttttctttccctcttctcctctctctgtaaactaaaaccagagataggtgagaggtcgttacactgataaaagagaagcacgatcgcctcggctagctagctactgtccctttactcctgccactgcaaatggatcatgaactaccaacccaccaccagcaagattgtttcggcattgacgaccttctcgacttttcaaacaacgacgacgaacagttcttctcttcctcctccaacttcgacgttcctcaacaccaccattgtcttccacccctccttcctcagacatctgcgtcagctcatttctttaacccacctgatttcaccagcgacctctgcgtccctgtaatcctcatttgaccagttctctcatctcattacatttctttttttatttgtttatcataatatatataatatgtttttgttgtttccatttgatttggtcttgagcagagtgatgacgtagccgaactggaatggttatcgagatttgcggacgattcgtttaacgatttacccactggagagatccccggagccctaacgtacccaaacgacgcgtcatttgccggcagagctagaagcaagcgatcgagagttccgatcaccggcgccaacactagctggggatctatatcgaatcaaccaacaccgcaggagcttgaatcatcctcatcgatctctgctaaaacaaaatcgaaaagagaagaagcgtcggggtcgaacgttaacccttcttccacggtatcgggaggggcgcgtaggtgcacgcactgtgcatcggagaagacaccacagtggaggaccggtccaatgggacccaaaacgctttgcaacgcttgcggggtcaggtacaagtcgggccgcctcgtacccgaatacagacccgcagcgagcccgacatttgtcctgacacagcactcaaactcccaccggaaagtaatggagctccgtcgccagaaagagatgacacatcaaccaccgctcccgcaacaacaggccgagcaggatcagcactaccagcaacagcgaggccaattttactctcatcaccacgggtttcaagtatgctaagtcatgggacacgtgtcgaccagtgtattacgactactgctactgcttcttctactaggactactgttactacttttctttttcatccaaggtctcagtgagacggatttttctatatgttaaattaaatattcccgagtaaagagaaagaaactttgattgaatgttttgggttattaaatgctttcaactacccattgccctcgtctttaaaacgctcaatgaaagctttttacagggaaaagatagagaaagagagagaggacaagggcttgggtgtggttagaatacattagactgagactttgtggagttacatgtgatagagaagatagttaatttgcgaaatcgaatattctctcccttccctctcactacaaagtataaaaattgtcatgaaaataagtatttataagacagtagagggtggtgatgggacatagtataaaactaaagctagctcttttttacttatcttcagtgtttagactttagagtgtggactaagggtttggagtcaatcatcattgttattagtgacttagtgagtgaatctgagttttctgggccaaagacataaatttagataacaatgcgaggaaattgtagttttgggatatcacactcacattcttttcatataaattatactcgaatagtgagtggccaatggtaactcataaagttacttagagttgagtgcatcgaatgaacctgacaagttaccaacaactaggatcaccaagttgaatattttaatagtctccccgaacggtaacatgaattttctaaaaacctacttatcccaaactatattctataaccttaaaaaaaatacaattacaacttctcaaaaaaaaaaaaaaaaataataataaaaaaaatactatacatattttagatttcttttatcttcaattctgtttggtttaattattttgcaatttttacaataaaaatacaaaatccacattttattactaaaatatcactacacggtgaaagcaacatttatacttttcatctttactttattacatttttaccatatgcacacacaataaatgcagctgacacgttgttgattgatatcttgtatcaatctttcattacatcatttccctctatttttatcttctttttcttattattttctatttctttttagtttttttttttttaaaaaaaaatcataacctccatagctgaactcttccctcttcacgatcccaactcgttttccctcttctttatgttcttcaattttattttcaactcaaagtaaccgattcccataaccgttttccttcttttactttttctcttaatccatttataaatatggctattactcgttcttcatccactcatttccctatgcaaaagaaaagttctaaaatggggttgaaatctttagctaataggaacaagggcaaacgtcctgttgttcaggaagatgactttgattttgctcctcccttgtcgaaacgggagcgagctcttccaaagaagaactcaaaggttgctgcccaggaaaaaattcctcatgataatgctcaaaaaaatgatcttgatggtgctggtcgatctcaggtttgtttctgtttcttttaggtttcccccatttttgatattttttcgtattcgacctttgtgggttttgtgtttatcgatttcattattttaggtttttcattttaacatttcttttgttttgtttggttttttagggcttatgttttattaatttgatttatgtgttatttttatgggtttttcatttttcttttgtttagttttaatttctgtttcatattgttgttttttttttcctatttttatttttctatatgtgttattgtttttcatttcagttacttcatttgatcatttctcattttttaattgttttttcatagttttttaatagtttaaacaccttgatgtatgcgtttttcttaacatgttttttttctagttgttttctgtaaatttttatctcatcaataggtaaaaattagatttatcatggatgttgatgttcaaagagtttttcctgtatgttagtttgtttaaagttgttttgaagttttattatagttttgctacttgcctttgctatttcataatatttgctttctttgtaaaatgcaagattcggttaacaaatacaatcccaatgatttgtacagatcgaagtgtgtacgagtaatttctctgttattaataacattaagaatactttgtctgtgaatttgttaacaatgttccgagacccagtttgggcattttttagatattcctgactttattttctacccccaagttgttcacaacctacttttgagggaggtttaccagcccgatcccaaagaattttaggctaaggttgctggtcattgtatacagttcagtgtagaggagtattacttgattactagtcttcattgctttggggattgcaataaactgttgttttcccatgaatcaaaccaactaactgaggtttgtttccctggcataaaaacaattgatgataaggctatagaggatgctttgaatccctacgtttgaaactctctgtgttgtatttcatccaatgtttccttcttagcaatactccagataaggaagtttctaggtttgatttagatgtcgttgacagcggtcgatgggatgagtattgttggggtagggagtcgtttgagaagattattgattcttttaaaggcagaataaagcatggtattaaaatgaaaaataaaaaagaggagaagggaggtcagttctatgatggtttgtatagagcattgggctgtccttgggtgttcatagtttggttttaagaatattgtcctgcgatggtaagcaccttttgcaaaagagttgcatccaggattccaagaaatctgaattggaccgatgatgttgggaccaaaaatccaacttttagagacttgaaaggtaagatttttgatttgtcgttgaacaaggtgattttcagtttctttaatgttttatatttgttttgtgctagtttattaatctttttttttttttaattttttttgtttcaagttttttttttgtttctatttttcagttgaagattaagaacatttgtccatatgatgaggagaggctgaagttgcaattggaagtcttatttttagatgaatctattgataatcgtggtacaactaagcaaaaattcgagagtggttcatcttctaaaaagtctgattgagaggacatagaaatgttgaaatctaagttggaggttatcatttccaaccaagaatccttggccgaagatttttatttctttaggtgttgttgaccttaatttcaagtctgtcatgactgtaattaaggatattcaagaaaaagttaatgtcatttgtggtcgaccttctgatgaggtatttattttcacagtttttgtttcatattttttctcctattattgttagtttttttcctagtttatttcaattgcaatactgttttttaaacaggttaagtcatctgatgaatttgtcacccgagattctgatgatgatgatgatgctgatgaggatgatgacaaaggattacctgatcaagagaatattgatactggttttgatgatggtgatgagttgggtaaagatggtggtgatgcttctagagttgataaggttgttggtggtgttcctactgttgatgtgattcaaactgaggctgttacaggcagtgaagagagggccaaggatgttgaaaatgttaaggccaaagagtctggtgtaaagagatgattttttaaatggtttaagccagcttgaaattgataatgagcaagttgtgttggctggtttagaggctgttgctaaaatcaatgtaagtgtagtttatattatttgttaggttgtgttagcatgtcaatttctttttagttgattgacagttttatgttagttttgtaacttttacttttttgattttcaaattttctatttcaggttctagattccaattcaaatgttgctgttgaaaaggcagatgacattgcttgtaatgaataagttgatgacactgttacttatactcctctattggataagagaaagcatgccccgacattaaaatcgccttttgttgattttgggtcggctgatgtgagcagcactccaatggaggtaatgtcctcagattctcaatctggaggagatgagagggattttaagattgtcacgtatgtgaagggcctttacgctcttaatgttggaatttatttta

SEQ ID NO: 40293 - DNA, 1825 bp, Cannabis sativa
caccttatgaattattataccacaaacagcctgattatactcaattaaaaatatttggatgtcttgcctttgcttctacacttactgctcatagaactaaatttgattctagagcaaaagcttgtgtttttttaggctatccccaaggtgtgaaagggtaccgattgtatgacataaatagtaagcaaatctttatttccagaaatgttgtgttccacgaacacatttttcctttccataaacttaatgatgaaacaggtaaaatcgatccattcactactgctgttctaccctctactggtattaatgatacaccagttggtgactatcctattgacaacatagctattcctagcaatgacttaaatgtgcaggacacaacaaatgcaccagcagcagacataacacacacaccagcagacaacaatcacacaccagcagacacgactcacgcaccagctgatataacacatacaccagcagctgaaacttcatcttcagcagttcttcctcgaagaacaagcagagccactaaaccccctgcttatctacgagattttgaatgttattctgtccttcaagacaaacattctacgcctcactctattgataaatatatgtcatattatcgattatctgaatcttataaagcctttattcttgcagttacttctctcaaggaacctcaaacttatcaacaagccatccaattcaaacattggcttgacgcaatgaatgcagaactccatgctttacgcgccaataatacttggattgttgtacctttacctccaaataaaagagccattggatgtcgttgggtttataaaatcaagcttaatagtgatggttctatagaacgttttaaagcaagattagttgctcaaggatacacacaacaagaaggcctcgatttctttgatactttctcccctgtcgctaagatggtcacctttaaattgctacttgccatttccacaatcaaaaactggcatatgttgcaaattgacatcaataacgcttttcttaatggcgacctcaatgaagaggtctatatgaacatacctcctggactaacagtttctacttctgctcctacaggtaccactcttgtttgcaaattacaaaagtcgatttatggactaagacaatcatccagacaatggtacaaaaagctcactgatgcactacttcaagaaggttttcagcagtctcaagccgattacaccctcttcaccaaaggacgggaagacactttcattgcattgctcgtgtatgtcgatgatatcgtaattacgggccccaatcttaccatcctgcaacaacttcaagaatccctccatcatcaattcaaactcaagaccctcggcaatctcaaatattttcttggttttgaaattgctcgaacaaaagacaacctcttcctttctcaaagaaagtacacattacaactacttgaagaaaccggttacattggtagcaaaccagctaaagctcctatggaccctcgacacaaacttgatgaccaggaaggcgagcctctcaccaacccatcacactataggcagctcattggcaaactcttatatctgactttgtcacggccagatattacttatgcagtcaatgtcctcagtcaattcatggcatctcctcgcactccacacttacaggccttgcatcatctcataagatacataaaaggtagtccaggacaagggatcttatactctgcaaattcatccctgcatctccgaggattctcggattcggattgggcttcatgtcccatcacaagacggtccaccactggcttttgcatctt

SEQ ID NO: 40294 - DNA, 1112 bp, Cannabis sativa
tcttaaagattagtgtgtattctgataccatattagaacagagagtataaaaagaaatgattttctgttattgaattaatgaaaagaaatgattttctgtgattacatgcctttatataaactttgtgttgtatggacaacataactaattggtgtaacaataagctaatttaaccagaaatctaactaattactctaatagtgctctgaaacacagttttaattttacattttctttatactattatcatatctatattgacgtttcaattgttcttcttgatcaatttgttttgacactagactaaatttattcatcaacatagattaatgggagaaatttcatcaacatgaagtattacatagttgttcacaatggaatatataaatatatatatattatatattgtaatctttgtgcacccacaatatctagttccctttcccgtagacaaaacacatgctatccttaattaggttatttattgttcctggaattattaaagtttccattgtccttattaagactaaattgaaaaaattctttttattagacttttggcttgttcatgacattgcctttttattttttttaataatattacatcaaaagaattttcatctttattactttctcttgaattgattcttcttcaattttatgatatatacttttgaattttctccaaagaaaaatctatagaattatggagaaaattttgttattaaagcctttcatgcactactagagacaaacagatttctcattcatctaccatttttaacttaaaaatattttgagataagccatttctttggtacctcctcttcttcaatctttgtttaattttttacccattagtctaattttaattagctatataatttagcccttaattgtaaataattttctttacaatcgagtcctttttgtgtaaatttttacacttatgcccctcatagtttgtttttcaaattttgccccccaatggataaaattatttctaggttcgccattatctttctttgcaaatgaaatatcgatgtaaagatcataactgttgagaaagtgatcttacatataattccatatccttgggctttgatgtcat

SEQ ID NO: 40295 - DNA, 2905 bp, Cannabis sativa
tggcatttatagggttgaagttgccaaaagtggtatttgtgaaaaatagataaaatagttgagaaaaatggcaaaaactaagctaatgtagggcccattatatggccgaccattaggtgcctattttgctctatttttatcaattttttatttcaaataattcaaccctaaccctattggaaattattataaaaggaacctatcatagtaaaaggaccaacattagcctctgtctgggtcaaagcgaatacctgagcaggaaccaatgtatcatctttcttttgttctactatcccacactggaagcaggctcgagcttaacattcgccctgattgtgtctcttgcacctcgagcactctagagaggttctctagtttttgtttccacctcgtcaaaaaccctgattaccttggaaattcttattaggactcatagttgttgggtcattaggtcttttcttacgattattagggttagcacccgtaccagaatcgacattgggcaattgtttccacaaatctcttctcacgctatttctctttcgaatttgaccttccgctccctcagtagcaatagctagctcagccacttcagcataagtttaaacaacccctggttgcttagcaactacaattacatcttgaccaataagctcttccaaccccggaatgaacttagcctttctagcagcctcaatggaaacttcatcagaggcaaactttgccaactgatcaaatttggtggcatactctgtcaccgtcatactaccctgagtcatctgtatgaactcttttgccttagtagcatgaatagattcattgtaatactttttgtaagagaaggtccaaaaggcatcctaggtcatgttattcggatcatgaccctgaggcacaatttaccaccaaatgcgggcatcttctcccagcatgaagatagcacatccaacccaatcattaccctcaacacacataaagtcaaagatggatgttatcatgctcatctattgctccgccttaactggatgagcaccaccttaaaacactagtggattctacttcttgaaccgcacatacaacatctccagatgatttccaacatcctatggcactaccaaaggttctggaggattaggattgggattgggagcaggctgagcttgctgctctctcaaatctctgatctgatcaccttgctgctagatggtctcttgcatcgctgcatacatttgttcctagttttgtggtagtggaggatttccaccctcaccaccagccccgagccccaaaagctcacggttaaccctaccggattgcctcaggtgcataatgtaatacacctacgaccataacttttaaatatttggaatcctccaaaccaaaaccaatgctaataagtattaccatacgtacatataaatagtatctattatctataacctaccatactgttctaatagctcatacatttcaaataagtagacaattcaagtaatcaacaaataatctaataatcaactaacaattaacacttactataccatgagtcgaacgagtcttcacaaccagtgtacatatccaacaagtcttgaggatctttaaaccttggtcattctgataccatgttgtaacgccctaaaccgtaaaggcaccacatgtgtggttttattaattagtttataataacaaactaatggtttaagaaaattgtagtttaattaagacctttagtaaaattatttaaaacataaattaacttttcattcgaaatactactggatttggggatccccttaaaataaattttttcataaaatactacaaaacaacttattacaaattgctgtcacattttcaaaatacaataaaagaaagatcctatccattgagagcaaaaatatggcgactaatatgtacgttgccgaaagacctctgactcatggctggtccagttttccctttcccttacctgcaccatagagcacccgtgagtcacaaaaagtcaacaagaaaagaaagtaacaagcaaacatcacatatagcataacatttaataacacaaaccttatattaccatatatagcttaagcaattatccaaagcataatcaaataatagtgatcaattatttgccttataagaaacaccgaccttgatactttataaagtatccttacccctcgctatcaacaagtttcttatgtcactattgttgcttaattaagcaactaataagtaagaaacctatcagcaatttcaaaagagtaataactcattcttaacaacggtaattaccgtaaccttaatcataattgagtcagacgataataatcctatcttatttaacatgctaagcagtgcaattgacttttttaagatgaaatacaaaatcaagtgtgtagaccaacctaagtagaataacgctccatgatctcgggtcatatgtcacaacaataaaaacttggtaaataatctaaccaaatcctaaaataggccctaaactcaaaactggacaaaccctaatcaatacttgcttaaaaacagcctaaacttcaataaaacacctaaaactaagttctggaaaaacacccaaatggataaccagtttagaaaactagggttcccttgctggtcaacctgttgaccggttccatagtgccctgtagaacgggttaaccagtttctactacagaaatgagtaacccctgctttttacatcaaaacaaaaccaaaactcctccaagcctattgaaactaaccataaaaatttataaatataaaaacaacatactcaagcattcaaaacatagaattacactaaacatgaaattccaccatagctgagtgagatttgatttcttgaactcaactcaattgtatcaaaacctgttatcccaatttttgcact

SEQ ID NO: 40296 - DNA, 1922 bp, Cannabis sativa
  modified_base (1495)..(1497): a, c, t, g, unknown or other
ctgattgtgattggtttaacaaaatggctgaaagtttttaaaagccttcttgttggtgaaaccctctggcaactaaccttactttgtagcatttgtggctcccatctgcattaaacttttccctgaacaccgtttgcatcctataggtgttctaccttgaggaggcttaaccaagatctaagtgttctttctgttgagagctgtaacctctgtatccatagcagtaaaccaatgtggctcttgaagagcagttttgactgaccttggtgcacaagcagcaagcaatattttttgttttctgatgccattcttcaatcttgttatcataggatgactggatgtgggtggtgttgtgttaatagctgtatctgcaaaagaattgttagtagcaattggtgtttgaacaaggagagcatcagtgataggttgtgtagtagttggtggatttccatattgaatgggtacttttgtaagcgttgtaggagggagattaggagagttggcttcagaagcaacattgggaattggtaatggtgaattaggtggagatggagttgtatttagagagacaggagggtcatttggtggaaattaactactggggaaggaaacagggttgaaagggtgggaatttgggaaggagatgacatggtggagtgaatgttgggagattgctgcatagcagagacagcatatgggaaattcagttcatcaaacacaacatctcgagagatgtacaacattttttctttggaaagacattagaaccctttgtgtgacatgttgtaactaaaaaacacacatggagttgacttgtattgtaatcatctcagctggtgttatacccaaaatttggctaccatttcaatagaagacacgtgtcaaagtaagaagaatatggatcaatgcgtgtaacgctaattatatttgaaaatggaataactcatcaaatgcggacgtgacagagtatatttataacttgctgactataaggtcttatgcgagataaagatatacaaactggtgccttgtgcatcaacgagaaatcatgtaatttcaggtgtacaagacgatgaactaacctcattacgtggacgaaatataacgactaatgagacacttaatgtataatacacggtaagataatcgtataaacatatacaactaatagcgaggtatccatctcgccataggaaggcatgctcacggtaccttcactagtcaactccaggtatctttcaatgagattcacagttcagtcaagtcaattctcttagataaaagctaacattcaaatgatattggatgttgaagttcacctcgtcatcaagaactgtagaagtgacaagatttacattatcaacctcggaaagatatgggaaaagctccagcttactatctaggtcattggcactgagttcctatcgagacaccccagaatattatgatttataacgtgtttaatacacgattattttgacccagtaaaatcggnnnaatcacagctgtgtgttattcaaatattaaccgcatttatattacgtgatatgtaatcaaactccacgatttcaggggataattgttgtaaagattacagtcaactctgtaattaactggcttgactatgtaattataagaagcaagttagactgaaaaggggacgaaaaatgcataagagaaaaggccctagaaacactaccagaaatctaataagattgactcgtggactatgttgaattttaactacaaaaccacgtaaaaaatatttgtgttcatacttttttctttactgtttttatttttctgtgcaagtttatcacttttaaggttcatatatggttaacgaaactcagcgttaacagtttggtgctttcattgagagccttcatgtaaaagctcagaaaaaaccctccttacatata

SEQ ID NO: 40297 - DNA, 2340 bp, Cannabis sativa
  modified_base (87)..(90): a, c, t, g, unknown or other
acatacataaataacatgaatcttataaatatattatttaaatatatacctacattaaataacaaacaataaagagttaggcagaannnnttagttaacttctcttttacaattttcactcttcctatgaatgttatttcatacagaaattttatgtttttctacttaatttctttacctcgaatgtagaaaaaataacttgattgcaagagtgacccttgaaaccaataatcgccttatgaaaaacctagtttccatattcttaaattagaacatactatagtagtatgatcaatatttaaaatttaactttgaatttataatccaaatataagatgataatatacctaaactcccaaagaagatctagtgactatgaattacaaccgagccttgtaaaagcacaccaatactttggagattactagatttgagagagacaacaatgttggtctttttgaaaatattgtagtgatgggagtgtaatagcaatgtcgatatgacaaaagatacgttagaacttgtagtgactctcaagttgcatggttttgtctcttaaagaaactagtgattgactatgtaagatggtaaagaatgaaataattgaacaaaattgtgaagtgccaatggttctggtttaagggaacaaaataggttaatcgaaaatattgatggtagctttaattagagagcacaataaaattgagagagagattatgagagtattttatttgaagcttatcttttaagtgaatgaggaaagaggtgagctcaaatcctctatttataggctttaaatactaaactacacttcactcttaaccataccaccacgcactaattaattaaggttaaagtttaaaaattacttaataaataagtggaataatcatagaatgacatatagcctccaagactcattcttcatacttggagaatggttcaaagtcacgtcctagaccccatatgcacacatctaagcttcattcctttaggtgtttcaaattatttgctcatttaaactataacttcctccactaaaatctccttacaccccacgtgtagatttagttccatttattttataaacctaggtaatatcaactatatagcaattcctcattaataacatgcatatatatgccctaaatgtgatacatacctcatgttgaaatgccacacgaccaaataataaatggcatcaaaggctgttaagtttttatacaataccatgtgttatatctcatcaccaaaatttttacaccttatgttatatctcatgatcaaccagcccttctttgatcttttctctaattcagtagagtcttatatctatgtgtttgctcttttcatgataaatttggttcttacaaaaatggatggatgactggttatccaagtacatagtcactcctcattttatctattttagttcatgtgaaatcccctgaagccataaagcttccttgaacgcttttgtgctagccataaattacgcttcagtggtagaaaaaacaatcacggactgtaactaggttttctaggatatatagtttcggtttgtcatgaacatgtaagctgtagcttatcttctagtatctctgttaagaagtataatgaacatccacgaaccctttcaatttaagttttccttttgctttctcataggtcagaccataatcccaagtgccctttaagtaccttaataaccatttgagggccttccaatgttcaatcttatagtcttgtactttaccacaagtgagaggattcaagtgtagtcaactcctttcacctgagtaaagcccttggccactaacttggctttgaaccgtttttcaccttaagaatccatttgcactacataatatttttcttctctaattttgatacaaccacccaggtcttattctttcagagtgaatccacctcctcatccatgggctagagccatttagacttgtttccacctgaaattacctcttcgtagctttcaggctcttcaattttagtctattgtccattgctagtgcaaatactatcaagtctgtttctgcaaaccttgcggaaggattaatccctctccttgctctgtcacgggctaactgataaccttccacacctgcctgtctaaatccttccatgccagaacatttgtttggtctatgttatctttcaatttaacaccatctttcctctgtgaaatatcttccagtttcaccatagcttctaattgcaaaccttcttttcgttgttttgtttcgttccccatttccatgcgtgtaacgtccttatttctagataatcctgcatcacatggagacacactaactttctcgg

SEQ ID NO: 40298 - DNA, 1162 bp, Cannabis sativa
tctctctctctctctctccttcatactctctttttgttttttttatttgatttggagaaaagttaaggaattttgtatgattcttggtgcttggagcttagaattgtggtatacttcttactcctttttgattatgactaatttttagtatgtgaatgttctttgagtttgaacttgatgttcttgatgttcatttgagatttaatgtatgttggtaaaattagtgatgatttcggtgattctttttggttgtttaagcttataggtctatggaattacatctagtatatttgggtgattctagggctattttggttgttaatttctgggtttggctttgaatatttctgggtgtttttagttggtttgaaaccttgtgattcaagtgtgtgttgttgaggaatcagattaatttgtggatcatgcttttatgtatgatctttgatttagcattttgagcatgaaattgtgattatatgagttctttgagataaattgactggttttagattgaattagaagttatgcatgtttggattaagtttggattggtttttggcttgaaattcgaaaaggaagaaaatggcaatttttgagttacaaggtcccttgccgcgggcacggttgggcttgccgcggtcgtggccttgctcgctgcggcgaggccctgctttctcgagaattttttgagtttttattttagtcataatttttcattcgaaactctgttttggattctttatatcgttggaaagctcgttacgagctctatatgcctatctgtaaatggaatgaaaattatatgattatgtgaaatggaatttttggattaaccctatatgtaaaattctgagaattgtgactaagattaccggcgcttgctcaagaacacccagaggtttagaatctccacatacttgggatatcaggtaagacattagccagcatgtagggttaagcgcggtggcgctcatgtttgatattacaattatgattaaatgaggaatcaggattagagttattaccctaaagtgagcggttatatggcctagggttattactctagtgattaaatgattttgaatgcaatgccatgttacatatgttgaaataaagaattatgcgggtaaggcataattaggttaaactcggtaatcagaac

SEQ ID NO: 40299 - DNA, 1702 bp, Cannabis sativa
tttatatcctgattgtatcagtttggggatgtcccaactaagttgctatacttaaaaatatgctatttttgtgtcatttttgagaataagcttgtcaatcgaaaatgatatgtaccctagcccatttaagaaaaacacaaatttattcatttcgtctcctctaactaaaaagtacctccatattctttatcttagctctttaaaaatacagtatacaatagatatattattttacataaattttacaacaatgaatagtgttgctctacatgtaaagcagctctaaatttattttattggtttctttaattttattatttttttatatttatgtatatataatattatatatttaaaataaataaaatatataaaaagatttaatatagagaaagaaatagagaagatgatcatgatggatactataatgtaaaagtttattgtaaaatagataaaataaaattttaataaggtattttaaaagatagaatagataagttgttgtgagtgctctaataatttatagtatatttttggtacatgaggataggtcggggtattaaacaaaaaatatgtttttaaaaaatttatatataagacttaaaaaatgggtacttttaagaaataattacattttgtttttcaaaaaatatagtggtaaatttaaaatattttagtgatgtatttgaaggatagagaagaaaaattcttgtgagtgtcctaataatttatagtataaatatatttttgaaacttttataatataagattaaaagaaaattgggtatttttaagaaataattatattatttttttttcaaaaaaatatagtggtaaagtttaaaatatacatatttttaaaaatgtaaaaacttttgaggaaaagaaattttttgcatgaatagatttctcaaattattcacataataaaacgacaataactcaagaaacgacagtggaatatgaaaacgacagcactaataaggacaaatttcaaattttggagatgcggggtatcgaaccccgtacctctcgcatgcaaagcgagcgctctaccatgtgagctacatcccctttgatgtttttctgttgtttttttgttatacatcgataaacaataaaagatgttcataaatttgcatatctcgataggatcgtagttattactgttggcttctatttattcttttaaaaaaatatataaattttaaatatgtgaggctatctttttcaacatctccatcttagtgttgcctgtaaaaatctttacactttctactcttggcttttatggaagttccatagttactttcgtatgatctctttaaaagcatgaaacgaagccgttcaccttttcatagtgtataatatataatttagtttatagtataaaataaaactaacatcatattaaaatattcttaagaaaaaaacataacattattaaactatagaatgagttattttaatagcaaaaataaccgaagccttaataaaggaaatttgagccgaaagtttcttgtttctctctaataaactaacattgaatttgaagttaaaccaaattaattaaggaaacgattattcttgttagtactccatattatattaataagtaaactaatccaaattgctggacctactcgtactaagattcctccagagcacgtggggtctaaaggccactttttttttttttttt

SEQ ID NO: 40300 - DNA, 1800 bp, Cannabis sativa
  modified_base (41)..(41): a, c, t, g, unknown or other
  modified_base (97)..(100): a, c, t, g, unknown or other
tctaattataaaattgaaaagtaaaaatagttttatagaanatgtttttgaaaaatattttcactgttctactttaaaaaacaaaaaactgattaannnngtgttaccaaacgccacctttacaaactacgcccctttaaaatccatacatcctattatacttcactcaataatttgttaaaccatatgttattttatcttatattttaagtatatagactataaactctctttacaacaaacaaaattgattaaactattaacaatttgtacatctttatattagataattttgtttctggccttctaaattatatgctcactacgatattttacttagattttaatgtacatataaaatacgtatatatatatatataattttatctaaaaggcacacaaatatagtcgctatagctaaaataagagaataatccttaaagatcaaaacctcaaactctattttaaaaattaaaaaaatatatattatctaattaaaaaagaattaagtatgtattgcacttaacatcacctaataaaaaaactaattatacatgcatttcacgtaatattaacccaatatatatatatatatgtatttattgtttgagcctatttaagattaattaaaatattatagattaaacaagttagttttaataatttttaaaatatatgtatttataagaaatttcttaagtcaaaccaaggttccctctataatatagatataaattttccttgttgaacaagtcttattttgtaggggaccattaatgtggttgtaaatagattagtggtgcatacttttgggatgaataaataacttgtttgattagacaatttttctttgttgtctttgggatgcttaatttatttgttattaggttgataaacatttttttttattttactcaatgatatattcattatttttaaaataaataaaataatttatttgtaagttactacaattatttaaccctaggcctttataaaatttcttggatcttcccctaatcgtagaaatagtttcctttttcgatacttaaagaaattatataccaaccattttatagataacgttgtatatatattgtagttataacaaatattttacatattttgtaaaaatattctaaataaattatagagtagaaataaaatttagaatcgaagtaagcgtgtgtgtatatttattaaacaattttcactataaaaattaattttaaaaaaattaataaattattagattttgatctaataacgaacaataaaagaaaaattttaatatctatactaagtttagctacttaattaaaaaatatcaaaaaaatctatttttatactatatcaaaaatatgtttagatacaaaatatttaagtcaaactcaattttttttttgccgaaaaacttttttttcttaaatttttttcagccaatgaaacaagcacaaccatataatgtaaaaaagaaagagattaaagtcattagatagaaaaattaaacttaaaaactaaaatttactcattcgtggataatatccgttaaaaatacacccatacatatatataataataataaaaaaacatagtctcgctttttgaatttcatcttcattattgtacattattttaatttttccaaaaacaaacataaaatgcctactacaattataatataagctatcatatatatatatatatatatatatatataaaaagatagaattataatctccataaaaaagaaaatgatcttaaagtttagcaacataatcccctcacgtaaatttttta

SEQ ID NO: 40301 - DNA, 1439 bp, Cannabis sativa
gacgtttgagaggtttagtgatgtcaactgttacccgaatcttcatgtactccctccatacgcctgaataattatttacatcggactcaacatagactccaatatagtttccaatacccttcagcactagttcagaccgataaccatgttgtaaatcaaaaacttgcacccataagtctagccgattcagagtcacagttcttggattatcgccatccttcagccgttcaaaaatcaattgttttctatcgaacgtccaaggactacctttgatcgccctctgaatgtcaacctcgtgatagaactgaaacaagtatctgttattttcaagctctttaacgtataaccccttcacaggtttccacaaaaatgccatcatattctgcattgcctgaaaatccattaacccagcatttagaaatctccctactaaacaccatcgaacatcaaaaggctcttcctcttccccccctgtaaaactgtatccgatctcttcatcatccagggtgattccagcagcctgatcttctatgccaggagtgttactagccgaagccataataatggattaaaacagaataaaaacaaaaatacaccagaaaactcactctttgagaaaagatcttactgacaaaagacaaaactcatatattgaacaatactgatgaacatggtaaacatgtcaaaagacaaaggcagaccgtatcaaaagatacgacagaagaaaatcatgctaggtgatctcctatttatacacatacaagagtcaaatattaagaaactaagagaaagggaatgttaagaaaaagggaatgttgattacattaatggtaaaaaatttagacatccacataattaataatatttataacattatatataatttgttttcaattatcccaccataattacgattcattgtgaaaaacccacaatcgtgttcatgggaaaagttaaccaaagtgaaaaaaaaaaaaaatagattaattcctatgggaaatttgaaattgtatgtaaaatagggacttaaaattggtctactaatttaaaactatacaaaatttgtaaaataggataatttttactaaaacccaattttacccactcattctaaactgactctctctctttatcctcccctttctctttgtctttcgaattcccaccacccacggaccgaaccccaccacccacagaccgaacccattctcccacggcgctcccccaccaacccacgggacacccccaaccgaatcggacacaatgtcaaaggtgacttcgtgttctgttttttagaatctcagatctgggcaaggtccgatgtaggtctaatggggtccgatggggtttatgaatctgtaagtttgcgaggtaggatatgtaggtccgatggggagtatgatgggtccgatatgggggtctgattggtccgattgtgt

SEQ ID NO: 40302 - DNA, 2119 bp, Cannabis sativa
gtgcattgtagaattttccaaactttttatactaccaaattagagtatatagtttgttaataatatccattaaaatatatttttttacagtaaggtaattcttccattacattttatttaattttattatgaaatatgtaaagtaatggttgttgataaatagatacaaattaaatatttttactttttttttttacgttaatgaaataaaataaaagagtttttcttttttataataataatttatatttatattttttaatgtttaattggcatctatttattaattattatttaccacgttatttattttacgataaaattaaatagaatatgataaaagaaagactacgatactgtaaaaattatatttcaattaatattattaatgaaccttatattatagagacacgactttatagtgtaaaaagtttcaaggacaaaaataataattattcttatgaatttttataaaaatactgaatttttggtaaaagtttataattttactgtcatacaaaattttttataaaattactttctttttataaaataacctcaaaacaataaaacagaataattaaaacaatagtggaacaactaaaaaataaccgtgaaaacttaacacagtatacagtataaaacttacacagtatttttttaaaaaaattccaccttacattaaaaaaaataaaattattaaaaattttagtatgtggtgtaaaaattatttaattttataataatattaatgggcctctaataaatttttaaaaaatttcaagcataatacaaaagaatttgtgataggcgtattattttttattattttgctgaaaacttaacaattaattatttttatctcaaaaaaaacacaatgaattattattatttaaaaaatttctattatctagaaaaactgagggtggcaggtttaaacaggtgcgtgggtaaaggtaagaggcagcagagaaagaagagaaaggtactaaaattggcacagactaaccgggcctccatggtgttgagtgggcccccacccacgaactgtaacggggcccattcattgggacacgtgtcaagcatcactcggttgagagtggggcccatcacagggtggactcgaggtgggccttttgcctgtttcatgctgcgtcaggtaaaaccaggttggcccaattaaacacctcatctccacatgccttatttaaatttttgtggaccccaacaaataaaaaataataaaataaaataaagtaatactaatatttttgttattagtagtacatttgtacttttgattcttgtaagaaaaacttaccataaagtcttatagtttttgaatgttgatgactcaatagtatttaaacaaaagtggaaaaaaaatatattatattgttttttatttagtttagcctaagaaagaaagtattaacattgatttcataaagcttctatatttagaacttttactcacaatatcttattgcttttttttttattagtgttaaattatctcaatttattattattaccaacattttgagaaataacaataataaaaagataaatattgctaaagtaatttaagaatgttggataattttttaatataataatttttgatatttctatttgcaatatttaacataaatatacatatttctagatagcgcataagttattacagagacccaacaaagaagcagacctattcactggatccgtatacgaatcgactactcaacccatccatcaaggataggtttaaccatatacttggtccggttttctaaagttcaccgctcaacaacaaatctgaacatctaaattttgaatcaacaatcaacacttagcaagtagaaagatgtgaaccaaaagaggatggccctaggggccatccgggaatagaatttataatggcgtccaagatcagttagtgtcccgaaagtggatccacgtggcacacttataacacgatccgaagaaatcaggcgacttgtcacctgtgtcacaggttggaaagtctcataacaaaaagaaaatcacatttttgggcaaacacctactatttcaatattcattattccccacgacacatcacgcacacctgccactg

SEQ ID NO: 40303 - DNA, 1725 bp, Cannabis sativa
aaatctagatcctggtaaaacaaattccaacaaaacggtcgagcttcgtcgtatattctgttacagacatactttctccctgaaccaaattagtgaactctttttgtatagtattgcgcagtccatcatgataatacttgtcattgaacaatccccgaaactcttcccaggtcattgtagtgacgtctcgggtgagggatactaactcccaccatacactactacaatttgcctttttagtgacacacataaaagtacatgtcactaaagagtcaagagtgatttttagtgacatgcacaattagactctaaaaattcagtgttagtctcttataatgtgagtcactaaaaatatgaagtgtcactaaagactaaatcccaaaattttctcatttttattaatataaaaaatatagacatatagtgacacgccatgtgcgaatggaaaatatatccccactcatttagcgtgtcactatatcataacttaatttttttataaaaaaaagtacataattaataagtaaacaaaaaacaaaaaaaaaaatgaataattgtaaatatatccatacgcccgcctttttttctttgaacagcacaccaccactttcttaaccaattagaatctcatataaaaaattaaataataaaacataaaataaatataataataaaataatttttttttttagaaaagctatcagctcctctttcttaaccctagcagctcctctttctccagccacctcacccatttttctctctgcatctctctcgtccaggtgaacgtaggtggatggccaggtggaggcctctctctctcgtccaaatgaacggtggtagacagctctctctttctctcggctaggtgaacgaagcggacgacctcttcctccttaatctgtacagatttgggcaccgattttttgaaccaggaagagtccatgatcttcgctatcgtgattcgggtacttcggttcgggtcaagaagcttggtgactaaacggcgagcttctgaagagaaccacgacgggcatttaaaatctcctctgtagatttttctgcacatggtgacaagattatcgtcgtggaatggaaggaatccagcgatgaggacatagaggatgacaccacaagaccagagatcaacattggcgccgtcgcaacccttttttctgatgactttgggtgccacgcaagcaggggttccacacgtggtttggagcaaaccgtcctgtttcaggtgtttggagaaagcactgagaccaaagtcggtggctttaaggttgcgaccttcgtcgagaagaagatttttgggcttaaggtcacagtggtagttagtagagtctatgatgagccatttcttgttacagccatagattaattaatggcagaaatctatggcaatgatgatgagcatgttggtaagctaatttatgcagataaatagggaaataaacagagagaaaaacaggggagatatagctggtgcaatcttgtattaaatgtattttatcctcaatgaatatacagaatgtttaatatggtatatatagtacacggatgagtatcaaatcctaaccataaaatattccctgagccaatgattggctgaataaaaggaatcccaagattataggaaattctagagaattctaaatgacagctcatgatttggtaaatgatgaggtgtccaaaggttaggtaaatatacaattaggaaaa

SEQ ID NO: 40304 - DNA, 1089 bp, Cannabis sativa
gcccatggctgaccgttggatgggatgaccttaggcattcctgttgccacgtgtcacaatcccaatttatgaggggtattggtatttaagctccctgatacgaaataattttcttactttccctcccatttttattttctccattaacccgaagctttcaaaggcaaaaagcctccttttcaaacaaattgttgttctgccccttttgaatcatcaaagcttctcaaaacgatcgatactatttacagagaggagcatcgaatcccaaggttagtctttcgaatcttctttggaattttgcttatgggtttgagaaaaaaccttgcatttctgaatgttttggattttggaaaagaggttgaaaatgcatgtttagttgtaggtaatacacatagagttttactcccttgttagaactgggtaatccccaggagaaaacagacctgtaattgccataactgccaatttaggaagaatattttgaatattcgcatctttttgatttcttacctctggaatactcgtgggtatttggatgagcatctagaatactcgtatatctgcttcctttaggaattctgtggactttatcatttttacccgttgtttagaacttagggttttctctatattctctatatattttgttgtggggatactagttaagtctttcaaatggtgggtgtatcgccgtattccaatgctcatgcgtgcgattgcatgttccttgagatactgcgatacacccagccatttgcgacatacgccagcgttcccatttcccatacaacaatatattttgactactaggtttgctcgaaatagtgaggtgttttcgttagcccaagggttatacgagaaaggcatgccccttaagatataggagattcctcagatgtttcatgagatatatcactagtcggatatgcgtgatatactcgccagttgtgattggttagatttctcaaaacggtgggcgtttcacagtaacttcagggtcatgctcgaaaatgcatgccccttgggtcactgggtaattcccagccgttttttgagatattcttttagtcgcacacttgcgattttatg

SEQ ID NO: 40305 - DNA, 4330 bp, Cannabis sativa
  modified_base (1611)..(1613): a, c, t, g, unknown or other
  modified_base (2092)..(2097): a, c, t, g, unknown or other
  modified_base (3139)..(3141): a, c, t, g, unknown or other
  modified_base (3804)..(3806): a, c, t, g, unknown or other
aaattaccataatacccctaggttattttaaagtttaaattttgtatgaggggtagattagtcattttattatataggtattttgacttttagttttgtgggcaaaccattaaattccaaaaaagaaaaaataaccttatatatttttgagttaacttagaagtcaaggcaccaagcttcttcttctcttcttccccttcgtgcaagccaaaccagccaaccttgaggatattcttcaaccttttcccttcatttcaaagttgattcttacccccaagtcaacctagaagagctttgaggtaagttcttaaccttttttgattgaaaactttaggttttgagttggttttgaggtagggttttctaattttgaggctggatgaattaaactaagattggggtatgtttatggtaggttattgagtatgttggacatggttttaagtggtttctatggttgtttggtttgatttgtgctagttgaagctaaaaagttcagtttcattcacttgaacatatgattttgattcaatgattgaattattatattttgaagcttgggatatgttgtattatggttattatattgttctgtgaagtttgggaacaattggttaggtttggagcaagttttgggacattcaagatctaaaattttcgagtttctgctgtagtgaactggaattccggatgatcaattttttcaggaatcgccaattttcgtattttagccataacttttcactcgggtgtccgttttagacattctatataccgtttcaaagcttatgaagagctctacaatatgagatatgaattagtgccaaaatatgtattttaatttagggtgctttcaccataaggttcggttaaaaaccctaggtttattttatgtgtgttttagacagtgttattgaatagacccttattgatttacatttgtcatgaaataggacccaaaatggtcgagcatcgttccactcaggtcggcccacatacttgactttggacttgaggtaagcaaatattaagcaccgtataaggtaatgttatgattgttacagtcttgattatgatcatgatccaggtatgtgtttattgtgacttaatcctaatcgaggttaacgatatgtatttgtcgtgactcgatggtaatcagggtaatgaggagaaacaattattatcatttgtgaatcgtctatgattgaggaaagaacacggttatcaccgttgttgtgaatgaattaagatacgattagtaccgttatgagcaatccttcttaaaactgcggataggtttcttacttatcgtttgctttactgaccaacgatagtgacatacgtagctcgtggataacgagtggtaaggtttgaaacagtcattaccgttatgagtaattactcgttcaaactgcggttaggtctcttacttatcgtttgctttatcgagcaacgatagtgacatacgcagctcatggataacaagtggtgaggattggaaacggtcattaccgttatgagtaattattcttgaaactacgaataggtttcttacttatcgtttgctgtatcgagcaacgatagtgacatatgtagctcgtggttaacgannngtaagggtactttatgaagtaccaggattgtgagattacaataatgtgaaatgaattaagcatgttattatgtgatgagttgtaatctatcacatctttattataatgtgaatgattgaattttatattgcttatgaaattagtctcttttcttgcagagtctctgtgactcacgggatgtaagaatatgtgtttgcagggatgtaagattagactgctttacggggcactgcaaatatgtgattgtgtgctgagtgaatatttgattagtgtaatgataaagctattcgttgcaagatgctatgatatttttatattgggtaatatatgagttcgtaaagacattatactacatatgcaggctgaatgataatgaatcacgagtatgaatgttacgttatgattagaatacttgcatttttattgcttttgagttaataacttttcttgctgaatcattgtgactcacgggtgcttcnnnnnncaggtaaaaaggttaaaagttgtgcttagccacgattcagaggtcttctagctgtgtacatatcagccgtggcgtcttggcttttgagaagcaggatcaatcctcttctataattggaaatgtaacctacttttgtaataacaattttgtaattgtaaaagaattttattagcaggggatccccatatttttatagaattttgaatgaaagttttattttaaatataaccaaaggttttaattaaaccatacttttccctaaattaatagattagtgataataagattgtaaagcacacatgtggcgttcttgagagtcagggcattacaaggatgcaccaaccattctccatttgtgcccaaggacttcaagcctcaattggagccgaaaacaatggattccaaggctgaggagcttgtgagtcatccaaactaggggaaccccgtagcccgccatgggcgttcttcaccagtgatcctcaagggcatagatcttgtgagcgatcttaaaggtcgtcctcaagattataaggaattccagaggaaagttggcgtggtttcagatgaatatgggaaggaagttggcatggtttctatcagagaatccagccaacccaagacccaaacctgcgccagaagacctttgcgccaacctctttctggtatcgaagaaaaatcctaaggttgggaaagagatctcagcttcaggaaatgggagcttctgatgattagaagaatgaggtctgtgtagagatcaagcctatctacatgtagccggtctttctcaagctatgtgtagtcaattttctccgagctacgtgtagacggtctttctcgggctctatgaagatggtctttctcgagtttatcgacttcccctctcatcttttgtttaggtagattacttaatagtttgcccctaaaggaatttttgtaaagacaagtttgtaaccagttttaggttttttcctatcttaaatgccttgtactattttcatttgaacttaatacaattgtgtttgcttgcgtttttattcacaannnaaacaactatattttgatcaaatgcacagtacttttgggtttttccattactcgtactcttcctatttaagtagttagtgatctaccaaactttttgattttcaaacagttgtgaattctgcctctctatagcagttccaatctgccttaaacaaacttaaatatacattaatgattttatcactttatatattttaatttgctcgtatgaatagttatattatccatccattttttaggtttaaatacttttattaaggcatcgtgatacctcgtttagtactttcctagctcacgagaaccgttagtatttagttttatacgtgagttataacttttgattttcctttcccgtcggataggttttaaataaaaaattatagttgtttgattccttctttgtcaaaaaggtttgatcaagattttataacgattggacccctctctcgtcaaaaaggtttggtcatggagttgtaacaattcgactccacttttgtcaaagaggtttagtcgagaacgtttgaatttcaaaaaaaaaaatgaaatggcaggtttgcattataccatgtatttccagatgaattctggttaatcatacatgaatgccccttaagtaatttttaaagaataaaactttttaattacttaatataaatgattctnnntattcataactgaagtttaaagtttaaatcagtactgcaagttacatcatttatttataggtagtagggtcgcaaatattctacgttccaggagttttttattagcgagtcgttaagtcgagctaatttataaactccaactccatctactgctttgatgacatatcgaccctcccaatttgggttgaagactcttgcagatggatctctcgtacttgcaaagactcgtcttagcaccaagtctccaacattgactagtcttttgttgacttttttattgaagtatcttgtaactcagtgttggtatgctgcattggcgactcagttcgtttttcctcaagtaaatccaaggacagttttaaaacttcctggttcacttcttgattataaaactctcttttgtgagtcgatatgttcacttcaacaggcagcactgcttccaagccaaatgccagcgagaaaggagtgtgtctcgtagctgtcttctcggtagctctgtgggcccagagtacctgaggtagctc

SEQ ID NO: 40306 - DNA, 1149 bp, Cannabis sativa
cgatgatgactcctcaggctggacgatggtcttctgtttgaatcctaatctcatacaattctctctcctagtctagtgattttcaaggaaagaagctcccatgtaggagaggtcaacattggggttacgtagctttacctcgtataagacctctgaagacaagccaacatactcgtgcctaatggattgctggccatcaagggaaaaattcagtgctttgtccttcttcttgagttcgacctctaatctagaggcctcaacgacaagtgtgttgttttctttgtttctgatgccaagcatgcgctccaaactagtaatcaagccttgcctctattcggtaagagcctcttccttggtgacggcatccctcttcaccaaaagctcgatctctcgggccttaagcttctcctagagagcacctggcaaccccttggtcttgccatgagagaggctgaacttccatagggcttaaaaccaaaacaaaacttatttagtggcaaaaagaggacctggacggccagcccctttgaggtgctcccctgaccgaccagtttcgcaacactacaacattggtcatccaactttgcaaagctccatacctggtcgaccaatcattgatagtacaataatttgagcaaaattagatgtgtaacttaccgaggtcaagtcttggagaccgttagatgatagcctctctagctcatcatcatcaagttcttggagctcaccaccgataatgggtaggatcctgtgaatacgtctatgagccacctctacaactctctatccagtggtcttgcctgctccacaactagatttctgggcgccctttcttgaaggccagtgtggaggtggggtcctcctcggcaaaggatcaacaatcatcgactgaccaatcggcacaggcctcaaaggagggtgagatagtgaagaccttgtagcatcaccatatcgggtggtccgggtcaccttggccataggacgacttgaagctcctctcaaaggctctctagcaagatccttcagcctagaagccatatctgtaaaaagaaggtaacaaagtcagaatataggttacaaatattcaatacaagaaaaaagcaaaaaagttggtggtgtcaactatcaactgttgggaatattttacca

SEQ ID NO: 40307 - DNA, 2876 bp, Cannabis sativa
tttgggttctgattactctttctgttggttgctttagcttccaaattatcgattactcggagattgaacaaagtttttagtacaacaaactaccagatcaaatttgtttcgttttccttataaaatttatttatttatttatttattttcttttgcttaattctgtatttatttcagattcaggacaacaatgtaatcttgggtagttttcaaatccccataactttcttttttcattgttaatttctattggatttttcaggttgaccttaagaagagtctggaaatggagttcaaagaagggagttcagtggaggtgatgagagaacagatgggtccttacggtccatggtatcctggcagggtaattggtgtagatggcaatgattacacgatcaggtacaagtttcttatggacagtcgaggaaaattggttgtggaaagggtgcaggagaagaacatgaggcctcaacctccacaacatgatcaggagaagaaaagatgggtggctggtgatatagctgaggtgtttgatacacagtgttggagggttggaaaggtagccaaagtattgagaaagggtcgtttggttattaagttttatgggttcattcaactcaaggaattcaatgtgtcttgtttaagaactcataaactttggcatgagaagaagtggtcactgcttgtcaaagtaagggcacatttagttttttcttttttgtcttctgtattcttttgacaatttgaccttggagattttatttttcaactttttcaactattagtttagttattttcagctattttgtctttctttgaagtttagtaataatcggtctagtatcataatgttttgtatgattgtttgtctatgtgaatggagttttcttatgtcttagcatatgtgttttacaggttcaaaaccatggacaggaagctagccattctccacaacaaactatttcaaaccagtgttggagcttggtttgcagtgatccagttcaggcagtttgtgaatcaaaaacttgcacaaaaaatgaatatgtaccaagaagccttaagaagagaacaaatgcctttgatcctcttcatgaaccagtctccaagaatcaaatgttgggaaaaaacattaggaaaagaacatccaaaccagttgcaggagtattcaatagccctttggtaaaaaaccattctttgtatacttttcaccaaataagattagataacaccaccaaaccggaacaagaaacaaacaactggttacattgttctgttcagtctactgaagatagtaacgagtgctcggttgctagttgtagtttgaacgagtctgctaactccacaagaggaagctcactcaagcttaacgaaaagaattttcctgattcggacgctgagtcatcttcattgcccttgttgtacagtaaaaggaacacagttcttccatgtcttggaagcaaactaggagttgacatccataacttggagcttgaagcctacaagtcaacagttttggcactatatgcttctggccccttaagttgggaacaggagtctatgctaactaatctacgcctctctctacacatttcaaatgatgaacatttgcttcagctgagaaaccttttggctgctcaagttgtttgatcatctttatctcggtcaacacagacatgtttggtatctgctgaaaaattcaggtgattaattctctactaatctcttgaatattttggctgctgtactttgtagctcttttaagttgtagatacatgtgtaagtaaattggtccagaatttcttcagttttgtttttgttttcatttgtagtcataataagtaaaagtgacaatgtctatgtccaaaaatattacatatatgtagtgttaataataagtatgtaaatgctttttggatgccaacttgtttgttaaagatggaatgagatcttttagttcttgactgtgttttcgatgattgttacagtggttgggatcaacaataaaaaactgtatgaatgctttcatttggagttatgtatggaaaatattaataataataattgaaatgtgtttacgcaatgaaccattccatgttcaaattgatgaaatttccttttccctttctaattaaacaaattgaaatgttattccatttcagtagacaacccaacttaactttgtgtgctatgattgtctctctttatttgggcaaactttatggccgctgatactaatattccttccaatgaaattttgaaattgttttctcgtttatatacttggagttggaaccattcgccataaaaggcttcttttttattattattattattgttattgttattattatttaattaataataataatatctaattatttaattaattcagttatgtaaatatctaatttgttaagtgattataaatatgtcaaggttgttgagaatataagagtttttctcataaatatcaataatcaaattcggttataaatattaatttatttaaactattaaataatgatttaattaaagggattttactactataaaatgaagcttgatttgagaaatcagaacatcttttttttaaaagtatattttgaaatttgtagagagaaaaatgaaactatttttctcttagttgttcttccttgtgtttgagaataaatgttatacactttatcctcattgcccacactatttcttgtgtggtagatcgatttggaagacactagtgtaagaaattgcatattcctcatcaactgaattaaggaatacaacttatgagaagtttagaggataccctgatagacttcaagaggtataatctaaacttattttgtttattgttttgatttaatgtgcaaacatat

SEQ ID NO: 40308 - DNA, 1976 bp, Cannabis sativa
ttgtccgtcatctactttcttggtcttggaagcctcttctttaaacctcttgatgaagttcttcaaggtttccattggtagttgtttgatgttagtcaaggaactaacttcaagatttatctttctggctgcaaaaagtttctatataaaattagttttcaatttattccaataatccacaaattccagttctaaatttttgaatcattcttctgcagagcctcccaatgttagtgggaaacataggcacttatcatcattgttgaacctcatgattgtcatgactctgttgaatcaagatagatactgacttggattcgtgtcacccatgtacatagtcatttaaggcatcttgaagttctttaggagtttagcctctagaatgtttctcgcacaaggctctcagtcctcacaatttgatttagagttgtctccttttgcctctaggtgatccttgatatgtccttctggaggatagcaagttcaaccaggtctctttcatttaggataccctcataggctggtgcgaatttctttctttaataaaggcgtgcccttagatccccgtgtttgacattgagtttgtgtcgtagatcgacatggggatctttcttggcagacttcttttgttttcctggctcttgatgcacggatacgctccttcaatctccatgatcatgggggctagttgttctttggggaaatctaccccctgcggacccttctctttcgggagatcaggataaactttttgtggatcctgggccttcttgttatttccaggcgcaaccataggatttccctcttggcatgtctttttggaggatacctgataggactaggttctttattcttctatttttggccttccttgggctgagagagctcttcctcagtcctctcttgcactaatggcattgcagttggatctacttggatgcctgcattttctattgcccttttcatggcaatcaatatctcttgcattctcttattttgttccttttgttctgccaactctacctcatggtcagcagccttttgccttagttcaactaattctgtatagttgtcttcatcgtagtcttcatattcttcttggtctaagtattatggatcattgatgtctcattctcctttagcatccaccctagaagtcgactcttcctcttttagatcctttgggtcatctaactgttgtggatgtgaagtgtttcttgtctttaccattataccacgaggttatttacaacttcctcttttgataagcttcctatagctcttaatgaaagtattaaaatctttaccgaagtttttggcaaccaataattagagttgtattgagtaattaatggatgttagaagagaattttttttacgtgattggggcattaatgagcctcagtccatgagtcactgtatttatgaaagtatttattacaaagaattttttgatcaatccctcttctatatattattagaggtatttatagctcataatagtggtgataaaaggctatcattgtcgtatttgtttgcaccatactttgcacaatttctcaaatatgattttagggcatgatttcctacttttatgataaattttggattgtctaaatgtgtttggtgggatgtgatttattccttatttatggcttgacaacttatttatgcagttatcgattgttgtatgtggtctcgcgaaatcgaaaaatgattagttcaaacccttaaacacgtttctcagcaaaaggtgttagatgctattccccatgccgcattaaatgcacatatagtattttaatcctcgggtgatgtgttgtacttcatcagtcctcccatacccttctctgggtcgacttcactcacagagagaaaaagacaagagatacatgttaatttgtccagctagaccttcttggagatgactaatctatcattactcctttgaaacaatagactccgagagtaattaa

SEQ ID NO: 40309 - DNA, 1715 bp, Cannabis sativa
attataaattaataacaataagacttgagattagaagggacgaaacttataatatataggtaatattaatctatggataaaaaagatatatatatatatatatatatatagagataaatccatttcaaataattaagacgtcttaatcttcttctttttgacataagtggataaaacatgtaataattaaagagtaataaaaaaaaataaaacatgtaataaaaagtggatatacagtataattttttcgtaaataagagaatgaatgctcatatacaagtagcaaagtttgtaattaattcttgtttggtcaaacaatatatagtttcaagaatacttctatcactactatggccggtcctgaaatttagtgggtcatagggaaaaaaatatttttgggccttcatttaaaaaaaaatatggtatttttcaaaattaataaaacaaatgtataattttaaaataggataaaatttttttggactcctgagttaggtgggccctagtacaggcctatgctcagggccggccctgatcactacgaatgatcttgagggatgatacaacgagttttgtcttacctattatataaatgtttagtatttaggacttttttatttttacactttaaaatatatatatttttttttgtatttttatggaattttacatagaaactcctattgcaattagcgctgtaactttaattgtaacaaaaaatcgtatagcaacccacataaaaaccaccggagaaatcactttagaaacacaaatcgtaaatttgaaaaaaaaaaaagttaaaaaaataatatacgaagtaatttcccttaatatatatttttttttgtggctgtgttactttttttagatgtattttaattgtgaacaattgtctcttttgtgagaggatcttataaatgaatagatacatttttattgtgaataattatcttttatgagagaattatgcaaatgttatatttttgttaatgcttctgttaatatacaataaaaattgttaagagacaacaaaaaatgttacatagatatttatataataggtaaaagatatatattttgattctacattgttctttcttatatatcttgacgtaaatgttaattaattgattactattaattagaccctaatacagagttggtaatcaaaccttattaatttgtgcttttattagtggtagaccttaatgtacgtagaatattatatatatactttgtttttgacactaattggaccaattcccaatttcacattactactcaacttaagtggccaagtaccaagttaccaactgtcagcatatagaaagcaaacttatcgaatataaccatgtatccttattacaactactatacttgagtatgtgtaaacatatataacaaagttttaattaggtctttctttcaagtatatatacaactcacttttccaaacaaacaagaaaagattaaaataagaataaatcttgaaaatttgttaaaaacagtgttaccaagttttgagtaactaaacacagtcatataaaaacatttgggtgtatataaatgagacagatggacaaactcagccgccaaaagaagcagagacaaaattctcagtatccccaaagtaatagcatattctccttggagtgcaaagcaattctctcacgaaacatttatgtttttataatattttttaagttcatcctttc

SEQ ID NO: 40310 - DNA, 3122 bp, Cannabis sativa
  modified_base (2475)..(2478): a, c, t, g, unknown or other
ttgaaatgagttttatttagggaacaaaacctaacatactcttcatggcctcctccatgcctctgaatttggacatggtatatccatggtcaatcagcatcttcgagagaagatcggtctctgttgcaatctggcaaccaacaaaaaatatatgatattaggcatcaaaaaggaaagaggcttgaaggaacttagcagatagaaacttaccacagtaagggtcgcactcacatcctggatttgataaatgggattggtagaggcacatgcctcatatctcttcatcgggatttgagtcaggccgccagcaaagtggctcatcaactctgaagcaaaaggagccagacattcttgtcgtattcactatgagtaaatttgtcttgggcatcattcagaatcttcttcagagcctccacctttgaattccccttggtatactcctccgtggcgtaattatgtttggcaatttggagctgagtcctctcctcatcggcagggatgggggttaagacgataccaggaggcacggtatactcgtccatttcggatggaatccttgagtcaaaactaggaaccagagtatccacacgcctcgactttttaacagtctcggtctccaccatcttgcctttacgctgtcggtccaggggacggaggatctcgccatcttcttcttcctccacttcctcgtcgattaaaacgacttagtcctggggaatgctattaaaagacctcccaatagtcaccaataggtcgcgtgcttgaggcacatcgacctcaggactgtaagtttgggcgaggacatccaaaaggtcatccatcggctttgttgcttaaagaaataaacgaataaagatgttagaacattatcagaaaatcatacatggaagagtaatgtaatgaaactattcctaccctagcgatctaattctgccctagcaaaagtatgtactaaaagactgttgttgtcatcccctagaaagttgtcggaggggaggaaccaactggatataaataggcagagtgatccaggaggatgcgtacgggaggatcggaccccattcgggaccggcctaagaaatgactaaggttggaacaataaaaacccttggcatgatcaccccattgaaagggggcatcctaaacctatgaatccggtcattaaattccaccgacctacaagtggagtaatcctgaacagaaggaacatgatgaacaatcagtggggacttaccagctttggaagtgctggcatcaggagccccagcgttaggaactgggaacagaaacttgggcctagaagtcgcctaatcttttatggcctctatctaaaggaccctccctccgacagcttgggccttgatgtaggctaactcttgttccctcttgaagaggtactttttgtaccggtcctctgcagaggcaatgatatttgcccgaagtgccttctcagattcgggattacgaatgttggggtagagaaccatggataaattaaagtcatctactgattggctctctaaaatcaacttagccttcctgcaatgtgcagacgtgaccaagtcccccacgttcaacctatttttaccgtaggtgagaagactttggcgtgttgaagaaagagttgagtaggggcggtgcgatgcatgggatggactctaacccactcagtgagtagcttcgggcgctcaatggctttgaagccagaggagaagaaaaatcaatggcgatactgcttaacattcttctaaaaattgtaaggaaccaggccctcgttagcaagatgggcctagagtttgaaaaaactatccttgagtttgtctcctttcttggggacggataaaacttcgtaaaaataaagaattttagcagggttgggcgaagcccagctcttggcaacataaaaaatctacaagcctatgagcaggcgataagcttgacgaataagttggtaaggcgcaaggccaacaaaaacaaaaaaatctatgaagtagtcctagagtggtagcatagccccagaaattaggtgagtttaactccaggccccaaagccaccgtagttacggttgagcatttcttcatctctgggaagacggtgaaagattccggacccagaaggcttgatctcggcaactgttacaatcttctccagttggtgggcgcaagtcaaagttgagtgcaattcgtccgcctcccagctggtagatgggcaagtgtatttctcctggaccacgggtcctttcatcacctcttccagggtggctaaggtcgtggaccctttgcctgaagacttcgctcttgttgtaggggtagacatgtcttgggattggtaaaatgacaaaatttcttaatcaaaaccaaagaaaccgtgctcatgaaggtcgtggagaacctcactcatctaaaaaagagaaatccagcagttagccccaaaccaaaccctaacataaaaggagggaatgggggtcccctaannnntggaaagaggccccctccagatgtctgctagaaacaggaaatccagggattctcctaggcaaacatcgggtaaaaatatcccaaaagcagtgaaagcagagaaaaaaaaaggaacataagtattaacatcgtttcatactctcgacagagcctaagtgaagaagttgtatgcaaaatcaaatgacaaaagaaagaaaggaaacaacggaatactacgacgcactacgatcttccccatgatcatttcaccgtagaaatcaaatacgactaaaggcactaccctaaaccttgccctaacatgcaaatgaataataaaagagaaatgtatccagaaaagttacacaatggtaatgagctagaagttgatgtcgtgtgacggtagaacttgcactggcaacgacagaggaatagcagcaagaaatcgatgatttctggaattttctcaaaggagttatatggtttgaaatggaaaagtagcgagagtaatccaatgaaaggaaaatgctggctttagaccagaaagggtgcaaggcaactatgatcagtcaccatcgtacggtgggaatcagaatcgatttgcattctatgatccaacggatgagatgaatgggtgccagggcggtttaaaatgtttgagcacctct

SEQ ID NO: 40311 - DNA, 1068 bp, Cannabis sativa
gtataattgaatacaatagaaacttagattaaaacacaaaaagtatcacataattgtacaagcatgaggattatcatcactaaagagtgaagcaatagcctcgtcggaggctacagcaacggaataaacagatggagtatggaaaaaagtgtggacaccattggtggtgccatttttgtaagcatcatgatagtaatggttgacaatgtgagttggatatttgtaaaacgatgagaaatgagagtatcctggaaatggccatggctctgctgcttttccagttcgttttatggccttaagtacttttttctcttccaatccataacctctcactgttattttttgtgtctccatttccacttccacctcttccgcaccttaattataaaaatgaatgattagagatcttattaaatgtaactaattaaaaaaagagaaatgctaaaagatacaagtggtaccaagcaccttcctacatgtcaatatcgctattggtctaatttagtatcaaattttaatataataatttttaaggagtatcgctagccaatcgtaaagcaatatgtcataagggtgctagacaccactggtgccaatgcacttaaaaaaaaatatatgaagtataagattgcaacaaaagaagcttattggttttgattatttttcccacgtgtctttgaattgttaggttaatgtagaagttggtgttacttgtgttttataccttttatttttcttacttgatttatcttttgaaaaggcataccaaacaaagctgttttgtttgtcgtaaagtcaacggaaaaaggattaatgacaatttcaatcctgaaatgcctaactcttagtgggattgtgagtggtaatgaacccaaagcaaacgctaacaaatttaatgttcctaatttcatatacttatcatgtattgatgtgtgtctaaactataaagaaagattggggttgctttcaaaaaaaaaaaaaaataaataaaacagaaagattggggggtttccaaaaaaataaaaagattgggaaagagaaataaaattagaatcaaaggtaacgtct

SEQ ID NO: 40312 - DNA, 2145 bp, Cannabis sativa
aatgttaaatttgataaattttaaaataattataaaatataattaaatactttaattgattcaataaaacttcttataaaattttaggaaaatatttttctcttaacttttctcaattatttcccctagtaaactttttctatacagatccaattctagtctaaaagaataattatgaagcaaaaatattgatggcttgaaacttttgtttgtaaataagttacattcataaacttaatataactacatagttgattctacttataatattgtgatatattattagtgataaaaaagtgttgaacttgaacaatttatacacaaaaaaaactcaagacctacacaaaccataaaagagcaacaaaactaccatatattcagctaattaagagatacgattgatgtaacattttaattcgttattttttttttcaattaaaattgttataagctcatgtctataaataataatttagagaatttttgagaagatgtttaaatacaaatttattagggcttaagcttaaggcaaataatactttcatattaatataagagttaaaataagtttttttttttattttttatttttttaaatgagttaaaataagcttgcagtcaaaatgaaagaacaaggtccaaaaaatatttaattggacacctacgaggaaggtgatggcttgaaactttcaattaattcgtaagattttctataaatttatacaaagttataagaaaattatgcttgtggaattatttttttacttagttttttttttgaaagaattttattacttagttttgattaaactataatagaagaaatagggtatttcttcattgataagtgtggtggtttgataagagtgttgactcttgaattgattatgtgaaaaattgaagagttaacttaaaacacaaacaaatatagtatttattaagtgctttgacagcgtggtacattttctatagttgcttttgtctttcaatttttagcttacataaaattggactcttcaacattggatcatggaatgtattatgacttgaataataagttataggctatagattatatgataatgttgaacaagtctagcaaggatttagcaacattgacacaatctaagcaacatttgtgcttagacaatattcctacttttttttttcttatgttgaggagtgaatttttaaatgtaatgtctagtgctcttctgagtgtcatagtattggtgtaattaaatattagatctcatataattcaaaaaaaaaatagcttttaagaaatatcactactacttgtgggacgctacctatagaaaatattaactacttctggtacctaacaacgattctctattattgattagctttaaaattagagaattgctaaaagacacatttggtgcctagcatgtgtcatacaactattaatataattaagtatcgagtcttatataagaaagtaattttataaagaatattaccaaccaatcgtaaaataccacttatagaaggtgctgagcattgatgcccaataacacccaataacaatgctcttaaaattgtttatatgtttgatttaaatgatgaatttgaatgacttattattataaaatgagtagagctagaactagagctactacactttctccaataaaaagatagaatcttgaaaagccataactaatgcaaaacttatttatatattacaacacaattatatattgacacaaacatattagtacctaatttaaaatgtagcttactcaaacttttcattcattctcatctttcacaccatgcttaactaaatcaatcttctcaaccatttcttcatatccaacaaagaagctttttcctctcccaacctcaacaccaactcccaactcttcttccaaatacttataaacattataaaacagctcagcagccaaaggccacccaattataggcacaccataactaagtgattccaaccacaatggctgagaaaaccacacacaacttcatgacccaagatggtcacttggggagcccattgatgcacaaccaaccctcttttcgactctctcattcgctcctcgaacccctttggcagccactcgtcggctctgaactcgccgtttatgtcgaacccgatcg

SEQ ID NO: 40313 - DNA, 1348 bp, Cannabis sativa
gttgtggaagtgatggccttagcacacaatactttacaccattggagaaaagctcaacacaaagatagcattccatcttgtgatcttcaacaatctggggatggaaaggagctttggaataaaccggttgctggtgtgattaaagtaaatgtggatgcggccttctttgaagaagagaatcgttttggttatgggttggtggccagagatttcacagggaagctccttgaagcttgctgccagtcgatttaaggacagttgaatgttgcagcagctgaggcgatgggagtcaaggaggccctcagttggattaaaggaaaacaatggaatcatgttgaagttgaaactgatagtaaattaattgtgcaagtagtttgtagttcaattgctctgaaatcagtattcggtcttcttgttaatgattgtcgttgtttattccaagctatgcctaatgttagtttatgttttgttaaactgtctgccaatcgagttgctcactatgttgctaggcaatctcgattttttgctgatcgtcgagtccttagttcaaatgtttctgctgatatgcaggaaatattgtatcaggattcatgctattaataaatgtttgctttgttttcaaaaaaaaaaaaaaaaatcctatgtgtttataagataaaaaaataatctaaaagctacctatttatttatttatttatgagtgtaacagaatttgtttaggaattgttacacaatttgattaaaaagttaaatcttttacataattaataaaaataatatatatttatatatatattgaatattttgtagtttgttggaattaatttataaataatttgcatatttcaacaaggttgatatcttgtttttttttttttattgatttatagtttttattttgttattttatagttgtttttatgttgttgtttaagtgttttatagttatgtattttttgtaccgttatttaatttatgtgaattttttatggtgtatattttttatttattctacataattttttgttgttgtatatatgtgtatttgttttgttacttttttagttatttctaagtaattttttagatttttttttattcaacagttattttttagttgtttttctattcatgtctatattttttatgatgtatatttttaattttttcttgaatttttttaattatatgtgtgttgctttgtagtttagatacatgtatttagtttatatttttgacacattttattaaaataaaatgataagattttttatttatttttaattaacacaatatgcaacattacatattaattggagattatttcataaatacacaaaaacaacaa

SEQ ID NO: 40314 - DNA, 1587 bp, Cannabis sativa
  modified_base (888)..(892): a, c, t, g, unknown or other
cactagagttattattattttgaagtttttttaaaaataccttttttatgttttaattataattttacgatctaaaatttttatttataaaaatatgtttgtaaagttttaaaattacaaaagcacactttgctcagcgaaaaataaaaaaataacaagaaatcaatatcacgacaacaataaaaaaattataaaacaactaaaataaacaatcttatgataagtataaaacaactaaaaaatagtatattatttttactaaaaagatgtttatgtaaatgaaaaatttcaaagaataaaactgaaaacttttatgtgtttacttatttttgtattttttttttaatttttagtctataaattttctattatttaaccatctagtattataaattaggttgagatcctgagtcaaggaacattaactactctctaacttcccaagtaatatcatcaactaaaatcatataatatattatttaaattttaggtatgaattttttatgttgaatgatgtgactttcatctgcaatataacaatatattattattattattcattttaagaattaacaatacaaacatccttttttttgttctctttcattgtttctcatttttaataaataaataatatttaaataatgtaatatatatagaaatattcatttaatgtcaaataaatgagataattaataatagataaaaaaaaaaaaagtaaattcatttaatgatgtattttgcaacatatttgaagtgctctaaaacaagctttagattttaccaaaaattcaagaataatttatcaaaaaattatttaactaagatacaaacatgaaagacttgaagtcaactcttgtttgtttatttttaaataataataataannnnnataataataataataatagaataattgaagtaattaagtcaactaaaatagatttagtttagttgggtttggttttaggtgaagaagaataagtctacacattttttaacataaaagagagaagaagagatatgattgggattgggattgggattgggattgggattgggattgaagaaccaaagaaaagaaagagccaaactaaaacgacaactaaatagtaacctttctttctcaaactcttgttatttatttatttatttttggatgttgtgttgttgttattaccacaaaacatattcatttttttctcttttgaaaaaagccaacaatccacatctctacattttaataacataccatgatattatataatatggtacttatttatatgtatagtcttacaaaatacaataatataatttctacacttttttgttgttgtttgatggtgtacaatgaattgtcaattcttattagaaattattgacataccatataaagacatctcaccacaaatgttaaatgggcctttaaaatttgagacatacatgagtcatcttccaaaaaaaaaagtaattttttaaaattattttaagatagaaaaagtgaaaattaaaaattataagagtttatttatttatgacataaataaataatattatggggttatgaatttttttattttatttaca

SEQ ID NO: 40315 - DNA, 1435 bp, Cannabis sativa
aaaaaaataaaaaataaagagagagataagatatagaggaataataagaacacactttagccatcttaactaatagattgacattagtttaaatggataggatggctatagttttttattagtaatagtaaatattagaggtataatttcactcatatttctccaaaatttcttattaattagatcaaaagaatgtatgtcaaagaaacagaattcggctaagtaataaaatgataattaactgatcataaaattgtatattataatctttacaaatatattctgtagttacaaagatgaaatagtaagtttggaaattatgtctaaaataagtaaaataataatcaatgagagaaaagagaatgaattgtgctataaatcttgatagaattttggaataagatgaataaagttctatctctcaaaatcaattggtaataggaagaatagctcattcatcttatatatcacaatttatttccacacattaataatgtaggactaactttaataaattccatctatgttcatattaataagctttcattgttaccatcaattgtagatatgagtatgggcagacattaattaattaaaagctataggatatgaacactatgtagagtaattatgtagtagtcattaaaattaataactatttatagtgattgtttataatatttaagttttaatctaatggttttactgtaaacaaaaaccttaaatacaataaattattaaatcttttcaaaaaatacaaaacaaatggacaatttattggtaacttattgtatagatactcatttttattaaaaaaatatatatatttgatttcgataattaatttcttacattctttctgttatacccgaaattcgacaagtactttagatgaggatatgagtcaaattaggaagaatacgaatcaacaaatataatgaaaattatatttgaaaatagaataactcattaaatgcggaattgacagagtatatttataacttgctaactataaggtcttacacgagataaagatgtacaaactgttacctcgtgcatcaacgagaaactatacgacattggatgtgcaaggcgaggcatcaatctcgttacgcatgaagaaacgtaggcaagatataatgactattaggacacttagcgtataatacacaatatacaaactaagtataacagtcgggtaaacccaaacaactaatagcgaggcgtccatctcgctataggaaggcacgctcgtggtaccttcactaatcagctccagacatctttcaatgagattcacatctcgtcgagttagttctctgagatggagcgttatgttgactgttgaagctcaccttgtcaccaagaactgcaattgtcagatggagcgtatgtcttcagcgcagaagtgaagagatttacattatcaacctcg

SEQ ID NO: 40316 - DNA, 1500 bp, Cannabis sativa
tccttcaagaattgttgagcccatgggttcccaagcccatgaaaattccaagatataatactcatgattatgggtgggcctgcataccaaggcccacctttgattcattttttgacccaacaagtccatcaactccactaaccaacttagccgtaatcccctccccaccaagaacgacaccttcccgctcagtccgcctccttttactatccaacaacataaccaaatcctcctcatcattaatttcttcatcagatgccattgattgagtatccccatcaccaccaggctgtcgagtatccttcccactttccataaatatttccttctttttattctttcctaaactcatgggatcatgatcaccaccatggtcaacacaatcaacatccatgatttttggggaagcattaataccattgccggcaccatacgaccgaccactgcctcgaccagcagctgctctgccatcatcattcccagtccgaagccattgagcaccgactaaataatttttctttctcaaatccgcacgcatagcagcatcatacggcttggccaattgctctataggttggtcaaatcatttcggacaagaacgatccgaatgtccaattattccacaaacaaagcaaaaggtaggaagatgttcatatttaaaatttgcctaaatccattctccattctccttacagagtttcatcctcctctttaatggtttttcaatatcaaccaccgtacgaatacgtaaatattctcgccaaatgccattaaaattcttaggataagattttacaaacgtagcaatatagccacaagcactcctaaccaccctctccaacatgaaaccagatttcagatcgtgaatctcaacccagaagtcgatcttgtgtagtgtcacaaccttaggatcttctcccttcttcagtcgatgaaagacaagaggacacctattaaatgtccaagggctcccgtctataacagtttggacatccaattcatggaaaaactgaaagagatatctattcatacccaactctttgatgaaaacacccttacccggctgccaaagtgaggccatcaaatgcctcattgcattaaaatccaccgccctacccgtaagaaatttccccaccaagcaccattgatcatcaaataacgtttcctcagcctcatcatccccaccaatcaagattccttcttcctcatcctccagacttatcagagcatattgctcgttcaaatcaaacgtagcatgactactagaagccatgaagaacaaaagacaaacaaaacaatcttaaaaacttgagagaacttttaccaacatgtgaaatgacaagactttcatgtatcctttttatttgctattctttattcaatcactttatattagagacatatcgttatattaaaattacagtttgattagattagtactactactaatcgtgattaattaggccgaacacaacaacaaaaaaaaaaaatggcttcaaa

SEQ ID NO: 40317 - DNA, 2507 bp, Cannabis sativa
aagcgtaatttattaattatggggattatattggaatatgtgggtatcgtagataccataattcgaataaaatatttttgggcctggaactgtggaacttgttggggaggtcagaaaagccactataataaaagatgaattgaattgaaattacataggactagtttagaattttaagttgtcgatttgacggattatttgtaatgactaaaatacccctagggtggattttaatgctttaaggttttgaggggcaatttagtcttttcttagaattgttattcttgtctttagtgtgacttttatgggttgaggaagaaaaataaataaatataaaattatgatatgtgcttaggttttaatcatttttgaaggaaaacctagaaattaagagatggcacaacaccatttcccttcttcttctccccttcgaaacaatgaccagcagttgcaagggagggaaattctacaacaattctcaagctttagcggaatttaacctaatccaaggattctttaagctttaaggtaagttcttacttcttttccttgatttctagaagttgtaggttaggttttaatatagattatgggattttagagctgtgatttcaaattgagagtaggagatgcttttaggttggaattatgcttgattagagtttggtttaaatgattttggtggctgtggtgctaaaattgaagaatttagtgttagaaattcaatttcttggttttagcttgaggactttggtaattgatgaactgaagtgaattgatactttgtacatgttatgtttatgataataaactgttctggagctgttgattaggtttggaaaggtttggctcgagtttgggggtgaaaacccaagagttgttggtctgccagaacgggtcaaccggttgccctgcaggagaaatttttgggttttttttttcctcggaattgattttggcttagggttgtacccagtatctatttaggttatttcggtgttatttggcttattttaaagctaatggaagttaggtttggttcggttgcgggaattagggttaatttccagagtttcggtttaaggtatttattagtttttattgtcgcgacatagggcccgaggtcatcaagctttgattccacttaggtcagcatgattgccaaattctagactgaggtaagaaaagtattacgtattgtttatggttaacaattgtagttgtgatagtctcgattatgatcgagatcttagtatgtattagtgtgtctcaattatgatcgagagaaataataggaaacgattatcatcattgtgactcaactatgatcgagggaaaataataggaaaggattatcattgttgtgactcgattatgatcgagaaaagtaatatgaaacgattattatcatagtgactcaattacgatcgagtgaaagaaacggtcattaccattatgagttattactcctgaaaccgcggataggtttcttacttatcgtttaatgtatcgggcaacgatagtgacatacgtagctcgtggttagcgagtggtaagggtactttatgaagtattgagattgtgtggttatgatgttgtgaaatggatcgttattatgtgatgagttgtaattgaatacatttttgttatagtatgattaaatgtatgttatattgcttatgaaattagtcacttttcttgcaatcgcagtgacctagggatgtaagagtatgtgtttataatgatgcagaattagagtgctttatgaagcactgaagttgtgtgaatatgctaacgtgtgaaccagaatgctttatgaagcattgaaagtaagtgtttatgataatgtatgattagaatattttatgaaacactgagggtgttggttatgtataatcttgtaataagtttgctcgtatagacgctgaattgtatatgtacgttgaaagagtatgacctatttgtatgtatattctggtgtaatgaaatctgctataacttttcatgatttttctttatctagtagattttcttgttgagttactgtgactcatgcttcatggtgtaggtaaagaagttagaagttgtgttcgaccatgagttggaggttttcccagcaatgtacatatccgccgtagtctcttggcttctgggaagcaagatcaacttcttttctctatatttgaaaatgtaaccttgatttcgtaatagttgttttgtaaattagttgtaaaggaattttattagcaggggatccccatattacgacaatgtttgaaatgaaagtttttattttaaatttagttaaagaatttaattaaaccacactttttcctaactaataaactagtaataatgagtttgtaaaagcacacacatggcattcctgagagtcaaggtgttacatccaggttggcttgttgtaatgatagaagagatgaatgctttagttgcaaatggtacttgggtcttggttaacttaccttcaggaaaatgggccatagggt

SEQ ID NO: 40318 - DNA, 2542 bp, Cannabis sativa
tttattaataagtaaatctgagtatattgaaatgggttttatttagggcacaaaacccaacattgacagggtgttgatcacacccatatctcaagtttggtggatccacttgttctcttgggtgtttccgcttgttcctggacctagcatgttaaagataagccttagaacgaattcctcatgaatgttttagagaggaatatcattctattggctgagtagaggctggccgaatggggccattactaagccagaaatacttggtttgtcccccatgtcacctagtgccaaagtctagctattcatgccataagatctatttggcaggatttgtccatcttcaggaaaggggaagtctgtccttgttcttgaggaacttggttggattttttgcctattgtctacttgtgtgtagaccctactcgatctatcgataagcctccattgtagaggatctctaatcagatattgacctctcccagtagttctctcattgatctaccttattaggttactagcttccctattacaacgatccagctctgtctgatgggcccggaggatggcttcctagacatccatccatctcaagtttttgcatctctatttggcaaaagcatcgtaaccaaaaacgtgtgattcttcagtttggcctattttgcctacagcctccctaagcttggccaatttaaagccttctcccaggtccatatgaggctcaccaatagtttgttcaccaattcttggtcctgtttcccctatatagtactggggaacaaagtgagtttgggtgtgtgggggctattacacattgacaaaaccttttgttcgaggttctaatggtggatctactctaggtagcagatactgttcaatgggataagtcgggttagtagggtcgaccaaactagttgtattggtcgagtttgttgggcctacagggttggcagggttgccacgatttgatacactcgttgggttcgtgggaactccagtggtggttggaacacgaacattaggatcaacattgatggggtcttgaggaagacccaatgaagtagaaattatagctaaagttctccttgcaacaaccatgatgattgatcgaattaataaatattgttctcaatgaaaaaaacaaaatgttgaccttagattttgtcaactgacagcgaagccataaaaatcgccacatgtaaacaattaaagcaagtaaataaatgggcgcaacaatttatagaggtttggcccccttggttaatgggtaatgacctactccctttttagttgtattgaattgagagataataccactcatattataggtttataccttgtaatttttaaggtaattctctatgaatagtgagaataatgttacacagatctcgaataagtgagatgagaaatagacctagtgacttgtatgatgcaagtgacatgtgtgtgagagagagagagatctagggttttgagatgaaagcttatcacttaggacttagtgtttttaacttaggtttttagtttgagcaaatgctctttatatagatgagagcttacaaaaaatctaattcaaagtaggctaatatcccttaaaatgaagagatattacctctttttcacatattaaatatacagaaaatagccaattaattgttcctaaggaataggttaatatctgaagttgaacccctactttcatgggttgttggagcaattttgcagttgagaacaagcaattgcctatccaaggtgaaggctacagaaacaacaatcgtggttgttaatataaaagttgactgacctaccccttatttagggctggccgacacatcctcctctatggccggccaggggtggtcggtcagacccctatggttagctattttgtagtatcttagtcctacttgattattcaaactcttcatccactggtaagttgtgcatgatgacttggtcctcctactaacaggttgtactccgcacgacatcaatcttgcctatgtgggcatgcaacgtcatgtggaaaaaaatttggataacaaaatctattgtaaagattcttatatttgcctatattaaggctaagtgaaatcacttttccaatatttatcaaaaggcaaatagattctttcttattctattctcctttccttttttttctttttttcttttctttttcttttctgagtcaatgacaaatgaacaacccaccattcttaatgctactgaacccaataggcctgtcaatattctccaattgcaaaacaccatcaaactaacacccaaaaattacatagcttagaaaactcagttgcaggcaacactacttggctatgacttgtgaaaatatatttatagcacatttccgtctcctccacaatccatcaccactgtgggtgtttctatccccaacccagcagccttaacctagatccatcaagattgactcatttttggtgctctagttggtgctttttctcaagatctagtgcctcttgtctttcaaaatggtactaccaaggaatcttgggatattctt

SEQ ID NO: 40319 - DNA, 1913 bp, Cannabis sativa
gcctttttcttacaacaatatatacatatagtttaaactttaacatataaaattaaattattttttgctaggtgaaatgttggtggagttcaatatttatttgaaagctctttaactatttataataaaggtgttaaatattttgttttagagtgtgaggaactttcaaatactaatttcttaattatttgatttaatatatagacaagtatatattagataatatataccctcaaaagtcacacctatcaaaggttaaaaaaatgtcctcatactataagcacaaaaccaagattcctattataaaattattctataattataataataattaaaaaccctaaaaaataatattcaaatatatagattcattaatctaataaatgattttttttttcatatttcttgcaacaatcttcaagttgtaaaacttaataagaatataaatttaaacacaatgattaaaatagaagagataacaatagatgaatcacctaaaaatgtatcttttttactttttgagatacaaatttactaatcaagtcatcgtaataaagcttatttatcaatttatttttgatagacaacataatcacttagttgttcgtgcaacatagttaatcttaaatatgattttatcaattttaattttaaaaaatttctctctgttgaaacaactgttattggaattgttagtaacattctgcaagtaacatatacatttagaaaagaatcaattttttttttttttttatgtaatcaagtatttcaattgagttactaattttattttaaaaaaaattcttgaacactttaaattctgaaagcatattcaaaccatcaatattagataatccactgtattaacaccctcaacatttaaagagtggtcttttaaactatcatcatccaatccttttcagtttcttcatgctaaacaaaaaaactaaaatattttcatacactttaaattgttcatacttatttttaagtggacaaataatttagccaatcaactaaagaaaataatcaattcgaaatgattcttcaatatatttaattacatcaacatcaatatttttctcaaattactttttcctacgaattaatcgtttttcagaaaatttaggctctactcccacctcacttgcaatttttttttcagttgaattcatagcaactacaaatctattttcccttcaatcttcaaaataagaaaggaggccgtttaaatattttatatccttgtcaatgtccatgattttactttgtaaatgtatacttattgaatttaaaggaaattaaatatcataacaaatggtcatgcccaataaaaattctaaattctctagttcataatttactaaacttgtagtttcactctttatttttggattctcacttatttctgcaagttcaatcaaagcatctcttatgtttggagtttgtgatataattgccttaacactttcaatttgactttcctaacgaatttcagacaataatttcactgtcaaattagttatattgttttttgatattgtccattgtttagttgaagaagagaataataaatgtatgcgttgtaaaataccaaaaaataatatagctttaacacaagaattagctgttggttttatggtactaaacaggtatgcagtggaagagtttcgtattatctgattataattgtcccatagcccctaggatctctagatgtgtgtacattaataacaacaataagtttagagtataccacttgaagcttattagagtatcctcttaaaacttctcatatgttgtatcccttattccagatgatgagaaatttataatttggactcacattagtgtcttccaaatcgatccaccacacacaagaaattgtgtgggctactaggataaagtgtata

SEQ ID NO: 40320 - DNA, 1557 bp, Cannabis sativa
ctctcttcagctccttcatgtcacctctcaacaaaacttgactgatatatttaccaaacctttacttcccaatcccttttcaaatattgtttccaagatgaatgtaatcaatattttacaccatcttgaggggggctttagaggttgttaagttgttattaagtcactccaactgtctttggagttagttatttttctgtttagttatttgccaagttgtgtaattgtagcacatgtctgttttgtactcttgcctatataaaggctctttttctcagctcagtagaataacagatatctttttcattcatttccttctttttactctgttttcaagctttaagcttctcatagacctaattcaaacaaatcaacaagcaggattaggagaatgattgttcgagataattttccaagagagagttcattctcacctcgaacattacctcatgaacttacatcatcacccctttgttgaaggttcaaaatatttagtgcctagatgaactattctaagaataacactataaaactctgctcgactacaacgtgttatgacttattaatcaacaaccgttgcttacaccacaaaaaacggccgctaaagctagtaccagcaggggtccgtcgctattgagccgcaggtaatattggggctactaaaacttccaaaacttctaatttttttaacttttaactaaaatagattttcctatcttctttattctaaattcaaagaataatctaaaaaaattacaaaaactattaattaaacaatttaatgtttaatatctacctaaacattatcaattaattatatttatctttaacataataaaaaaatattttaaattttcaacaacaatataaacatttaacctaaacattactcaaacaaatttaatttatctttaacaaaataaattacattttaaaatttcaaaaccaatatctaaacaattaataaaaaaaaaaaaaaaaattatcaacctattacacttatatttattaagaaataacattttcaaacgcatagcccaatatcaaaatcttttcctcaaaaaaaaaaaaatgtgaatacttcttactccaagctgcaatatatcccgattttttttttaccaagagatctaataaatagaagaaaaaaatatcaaaaaaaaatattggtataaactcataaccacattaaattttatacaacaaaaaaattaaaaaaaataaaaaactcataattatatatcacataaatatataatatttaacaaaatatactaaaaaatattgtatacaatttatatttaaaaaattatataaatttgatatacatttgtagtgatttggtttaaatgttgaagatgatcggcggtggtcttaacttcaaacggcggtgttcttaacttcaaacgacaatggtgtcgtagactgaaaatatagagaggaggagaatgaaaaataaataaagcattagaaaatttttgtgactaaaattactttttgtcattgtcttttttaaattctaatcattaatataattcatatacatacatatatttt

SEQ ID NO: 40321 - DNA, 1659 bp, Cannabis sativa
tggctaaaaatgagacaatattatatttagctcaaattttataatttttctccaatgcattaggggttaattaactttattttttatgaaaaggtgtaaaaaagtaaacatatgcattaaattttgattaaaagtgtatacaaatctaattaaatatataaatgtaattaattaaataaatatttgctttcccatgtggtaaagaattttgcaatcataatatttaaccagttccaaccatcgacgttgcttcatgtttaaaactctctgagtgaaaaaatacttgaaggttttacgatctgtcttattctcacattttttgccgtacaggtagtggtgccaaactttcaaacaaaacaccactactgctagctcaatgtcatgagtaggataccattgttcatactccttcaattgcttagatgcataggcaataacattgtcaagctatattagaacacaacctaacccttgtttagaggcatcattgtaaattacaaacttttcattgctggtcggaaaactcaacactgtgcgataatcaacctttattttaactcctgaaaactactttcacatttatcaatcatggtaaacttgcagttcttttaggttaagttcatcaagggtgtagaaatcataacatacccttctacaaacctctatagtgtccaagtaaacctaagaaacttctgaccgcagtggtagacttatcgctgccattgatttgaatttgattttatctctgtcataatctagaaagaaacaacaattgaaagagaaaaggaagaaagtaaacaccaaagaatgaacacctaaacacgaaaaaggaaaacgtatgaaaccacaaatgatcataagaaccgccatagaccaatgcaaggaggatggggaagggtttagattatgacggacattgattatcactggaaaaatgttggacacgccctcacgcgcgagctagcgcgtgagagtcggggtggtggcgatgggtggcgcgtggggcccacgcgcagagattctagttttcgaactttggggttttgcagatcgacgactgggcattccgtttatgtgggttgtgagaaagaactcgccctccaactagggttttcgaaaaaagaaaacctaaactcaaaccctaatcttattatttttttatgaactctaatttcgaatttcgaatcacaattttaagtattgctctgataccatgtagagaatagtaaatatgtgtgctgtattccataaaatattatatatttatatacaaaattgggagactaaataaaaaaactactaaatacaaataaaaaactattaaatacaatttactctaatattttacaactaagattctaaaatatatttatctctttaggatgttggagtaatattcaaaaacaaattgataaatttgaaaaagaatgtttgtttttatgtaaaatgaaaatagtcaaaatttggatgtttttttatacttttttaggtgcaaataaaatttacctaaaattattttaagaaataaaattttaaataataagaatttaattagccaataatctacaaaatatacaaaattgcattaggtaatataatatttattccagaactacatattttacatactaaagagtaatattgcatttaaatatatat

SEQ ID NO: 40322 - DNA, 2533 bp, Cannabis sativa
  modified_base (1603)..(1617): a, c, t, g, unknown or other
agaggtatgtttcaaataaatataaaattagaagtaaatttaatttagttgattaataaaaggggtatttttcaacttacccccttgagtttctaggctccccaccttccatcttccatcttattttttctgaataaatggaaaaggttattgaaaagtgaaataatacaaagcccaatacaaacaaaagtcaatcattttagcaagagaatgagcaacaacattaacaactttaagacaataaacaacttcatcaataataataaaaataaaagttcacttgtagcccggagatcatgtcttcatgaatcactaccccaaaagaggaataagtcgccacaagattattatggtctcaatcatcggtggattgtaagaggagaaaatccatgatggggcatggtttacacatggcctctaagggcacaactttagtcatagtaagtccattagcttcagccatgtcaattttttctttactaattctctcccattcaaagcactgaatcaatgatcctattgtccatccaagaacacgttcgactagtccaacacctggacaagcccgtctcccgaatccaaaaggcatgaatttataagcttcatttttgatattattattttcgaacctctctggcttgaaactctcggcatcttcccataatttaggatctctttgtatggcccatgcattcacaagtaccattgtgttacgtggcacatcaaatccactaatagtgcaatcactagatgaataatgtggtatgaggagtggagctactggatataatcgtaaagtttcagatataatattttgaaggtatggtagttttgagagatccgattcttccaaccattgttgttgaccaattttagaatcgagttcttctcttgctttttgtaaaatacgaggatgatttaataaattcgccattgcccattctaatgttacagatatttcggttcccgcaatcagtaatatctaaaaaaaacaagtttattattagttataaattaattagaagaataacaaataaaaaataatgcatggaaaatgagaaggttagggtttcattttattataaaataaaaaaaaatgaataattaactatttaacaattagtattagcgtgaacaaattaatagtatataaatgaaaataaaattaattaattaatcaaatatagatagtaaatttaaataccaaacaattattgtcaactaaagtaatacattaaatttctcttttttataactaggcaatataaccgctctttgcgcggctaatataattatttttagtgttataataaaaaatagctatttattaatataaaaaaatagtcacttaagaataattctaataagtaatataataatataatcacattatttaatttcatgttatgaattactattatttggagttatttaataaaatgttaaaaatttatactattaatgtgtatatacagaaccaaactgttcatggcttggctaaacatgcattagcgttagataatgattgtatgtggtatgaggatattccctctaccattttctctattgttgtaaaagactcttcttaatttatgataacagnnnnnnnnnnnnnnnaaaaaaaaaaaagaattttaaattactttgtgaaaaaaaatgttataataaaataataaatagaaaggtataggaaaaacttgaagtatattcttcaacgcctcccattactctctcttgattatgaccgaggtggtggccatgcctccaattactctttatcagtaaaagttaaaaattttttaatcttttttttacttctttcgttcttttttttttttttttatttttctcttcttctgaaaaaccctaatccctctttttctcactcaactctccctctcctcctcctaaggtttgctgccccaatgagaacatcagggatgaggctcggtgccactgctccgatgagaacatcaaggacgaggctaggatctgattcattatttttccttgttccatatgctttattttgttttacttttatttttattttattttgtgggatttgaaatttatttaggtttttgtttgattttgttgtgttttgatttgagaaaatatttggcagcggtggtagtggtagtggttggtggttgtttcggtggttgtagatctgtggtgagttttttggtgttcatagattgaagaagaagaagaatgaagaaagttacttggtagaagaagaaagaaaaaaaaaagaaaacgaaaaagaaaaggataagattttttttttgtctgatttggaaaaggaaaaagaaaaaaaattaaaatatttttataattttttctgattttttcaaaaattttaaaagttttttttttttttttctatttttaaatttttaaatattttaatttattttttagttattaatattaagtggcctaataaaattttggggaattatccttactattttttaactttttttttttttttttaaaattcacggtttgggtttctaaagtggtt

SEQ ID NO: 40323 - DNA, 2569 bp, Cannabis sativa
  modified_base (1612)..(1616): a, c, t, g, unknown or other
  modified_base (1869)..(1876): a, c, t, g, unknown or other
accatgctggtggttttgggccaaactgattggaactctgaagctcaacgagccaagctccttaccggagctcaaattatcgatcatggtgatgatgatgatgatcatggtgatgatgacagcgaactagttgacgaagagaaaccaaatgagaaatctgctctagtcaaaggagatggtttatacactacgttatgtgattgtaaaaataattcacctgtttaataattttatgtaactttttttttttaattaatttatttatttacttacttatatcttaaactgttctaaaccaaattcaagttgtatagaaggggtgtaaggttttttttttttattttttttattttggaattgggttgtttttttttttttgtctattgaagagagaaagattgactatcctttttccatggtctttttggcaatatgggactcgtatacaatgatattattttcattttgtcaacgtgtgtaatatacattatgctgttaaaataatatcatggaagaagtacatattaactaaaatcataggagagagagccactggccacctttttttgttattgaaaaagacaacgaaaataaaaatcatttcattattgtatgagcgtcactctgttttatttgcaaacaataaaaatgtgaagaaaaatcagttagaaataaacaaagcagtactcatcaaaagaaaaattcaattaagacttaatttgcctttatacttaatcactagctagttcgatttttttcctttatatatggtgatgtgaagttgtgaacaaaacaagagtcggtagaatcatgattcataacgtttctttacaaacttttatgtttaaaaggttgttagataaattaacctatttaatactatacatgtctgcttgattaaagccacttttatttaattatactcgtttatattgtttaacacttgcactgttttcaattcagttttttttttttttttttgatttttaaattagagttatatcatatgacttgcattaaacacatctggatctacttgctttccctgctgaaagagtagacatgtgccccgaattagtaataagagaaacaatgccccgaattaatgacccattatttcgttgcaaatggcaatgcccggccgttcttcttcttcttcttcttttttttttttgtttgtacaattttttttatttcttttaagatgaagtttaaatagaaatctttattcccgttactattacgtggttaagggccaatttggcacaatttttaaaaaagttaaaagctgcttttcaaaaaagctgtgacgaaaaagtgtttgataaacagttaaaaaataacttattgaagaatttattgaaaaactgtagctaaaaagctaaagctggtaaacccaattttttttttaaaaaaaaaaaatttatgaaaaaattataataaattattttttactaaaaatttatttaattatttattatatattacaaaaagtagaatatttttttacggaaaatatatttaaaataaataatatttaaattttaaatttttttaatttttttaatttttttttttggttttaaaaaaatattttatatttatatttatnnnnntattattaacaaacaatatcaacctaaattttttataaactacaatttttttatagaattgataaaaatataatttaaaaatattaaaaattatttttatcaaatacatataaatttatgtctaattaagatttttgcctcccgaactttgatatgtacaaaatcatgtcacttgaacttttaatgtcgttaaaaatacctcctgaactattgagattgatggatttaaagacttttgtccaattttagtaannnnnnnntaacatggatgaaagtttagggggcatgacttagtacatgtcaaagttcgaggtgcatgatttggtagatatcaaaatctggaatgcatgatttagtacattaacaatcactgaaatagtaaaattgagtgaaattagacaaaagtccttaaatctaacaatcttaattgttcatggggaatttttagtggccagaaatattcagagggtatgatttggtaaatgttaaaattcagggataaaaatcctaattagcctaaatttatactatagaaaaaaataattaaaaatacatagaaaataaaaattttatataacatatattttatatatatatttgtgattttaatgaaatagattaaatattattattattattatactagaatcttaaccactcgtagtacattaaaatttataatttaccaaatattaagttcaacttttttctaccgttctgctataattattttttcctacaacacaattataattatttttccccatagcacagctgtaataaactgccctaaatcatttggattctttttcgaaaaggagaagggagttgtttaagaaaaaaaacagagcttttactgcatattttaatcgataattctttttttaaaaaaaaaatggtgccgatttgtatgaaggaacaaaagtatagaatttaaattgtcaacagaatca

SEQ ID NO: 40324 - DNA, 3936 bp, Cannabis sativa
  modified_base (3175)..(3177): a, c, t, g, unknown or other
tgatgggtaaatttgttgaaccagctgctcgctgccccaactagcgaggtagggaataaaatacaacgtagattattcgtcacattgctggctctcatgatggtattaaaattattcaagtgcgcgaccagatctgtagtcctatcatatgacgagacgtgagggttcttgaatccctaggggaattcgatattcataatgtctggatggaaaggcttgagtttctcgtccgagtcatatctagactgttttccatgttccccaacttgatacctcttgaattggtcttccaactcattaatttgcaattggataggatcctcttgcttttgattgagttgttggcgaaggtaaggttttttttggtttaagtgattacgaagatcgggctgttgctggtcatagttactcatggatctcgtcctactcatggacctcgtcctactcatggacctcttcctcgagtaactttcagttctacttgtgcctgtactctctcgatcagtaccgcaacgggttccatcccctcctcgcgttgatcgactacgagttcttgtgcgtcccgagctggcactcgcctcgtcacgtacatgccttctcccttgggtatggattgttgcatgcccccagctggggtttgtacgtgccccttccctatttgttcgagaaggacattgatgaaacctcgatggcaacccacccgtcctaggttgagtccaggatttcccttgttctcacgggggatttcttgttccctagtctcgggtcaccttccattctcatttctgtgagaaggctccgattggtcatttggttgttcattttcagggggaccctcagtttccccaggttgttatttctgagcgttctcctgagccgtctcttgcgtcctagttcgtgagcgaggtctgcctcgtggtctcctcactccaagatcaagttggttttgtgcgttgtttttctgtgccgccatggctgcggctgcccccgttccaactcagcatttcgtcggtttgcctcctccagacgtcgcctgaggttacaattttccaactcgacaatcggtatgtatctcgtgggatcataggcaccatcatccatgggttgagcaccaccaacacttatgttaggttcttcactccctatttttgggttttggccacgttgggtcctccttgaacgtgtggacagtgtagattctgggttttggccacctttatgttgggtccttcttaaacgtgtggaccatgttgttcgtgatttgggaggcctccgtgagcccattggctcttttctaggatggtgagtagtctctacaagatgagtatcaacattttctctgttatcaaccatggtgaaaggtttttttttttggttaggagggttttttctgagctttttttacgtaggctctcaatgaaagcaccaaactgttgacgtagatttttgttaacgataataagcctattttcgtgataagtttgcacagaaattatagaaaataaaagaagaaaatataacacaaacttttttcgtgattttgcagttaaaattctgcatagtccacaagtcaatcttattcagattattctcataaaaactagggttctttttctcaaagatttttcgtctctttttcagtacattctgcccctatatattgtaacatagggtggcagttaattacaatcagatacgaatcccataataatatttcccgaaatggtgggctttaattacgcaccacgtaaataaatacgattattaattgaaaatcatacagttgtgatttattcacttttaatgggtcaatgctgacgtgaatttagatacactgcaaagtgcagctcgctgggaacttgaatagaaacaataatcctggcagcaagctggagctttttccatgtctttccgaggttaataatggaaatcccgtcatttctatgattgaagacataacggttcatttgagaattgcagttctttgtgacaaggtgaacttcagtagtcaacatcatttggatgtcagattctatttgacagagctgactcgacggagtagtggatctcattgaaagatgtctggagctgattagtgaaggtaccatgagtatgccttcctatagcgagatggatgcctcgctatccgtcacttaggttcttctagctgtgatacttagttatagtacaatgtatattatacgctaagtgttctaacagtcaacatgtcttgtcatcaccattttatacgtagcgaggttggtgccttcctttgtattactgatgtcgtccttatgattgtgtcttctgacgcgaaatggtttctcgtcaaagcatgaatcaatagtttgtacatccttgtctcgcttaagactttatagtgagcgagttataaatatactctatcaactctgcatttaatgagttattctattttaatatcatttaatataattgccattatattcgttgattcgtattctctaaggttgacacgtgtcatcctctaaagtgccaaccgaatttcgggtataacaaatgtcacattttttaatattttttaattaagatatttaaaaaacaataataactttttaaaacatattaattgatgataaccgaacaaactaatgacttttttctaatgtcttaaaaatatttaaaattcgagatgaaatttaagaataagatgtagacacaaaaaattgctatttttagtgacaactttttagtcacaacatattttttttgtgactaaatgtgacttttagtcacaacaaaatactacttgtgactaaaacatatagtatttatttacaagttgtctctaatttagttttagtcataacaagtattgtgaccaaaaatacatttagtcacaacaaattgtaattttcgtgactaataccttagccacggaccttttagtcacaacataataataatttataattagtcataataatattttcacttttagtcacaagttttggattgactaaaagtaagattttttgtagtgagatttggaaaatacaacaatgacgactacaagtaaattacggtaatgacaagagatgagatacagtgatgacaatgtgggtgagatacggtaataaaaataagcgagatacaatgagacaacaagtgagatacaataataacaatagttttnnntgatcgagatatgaaaataatgtattatggggaacaacgtaatttttttctacaccactctatttatttatttttataaaaataatttttctaatcaagcaatttaaaatactacacataatatagaaattttgaacttcttaataaataattccaaataattattaataaagttatacatttagtttctaataaataaaatcattaataataatatgaaataagattatatatgtataattttactatatattaaaattatatttttaagtaattatttattataatattaaaaatgattaaattaacagcgcgaagagctgctatattgtttagtttctaataacgtttgaaaccagttggtacaataagttttgtttaaatcatttagttgctctttgaatattctaaaaaaaatcttttgggttaattaaatacaaaagaaattaaaatgatatttttatttatttattttaataataaaaaaatatcatcataaagagtaggttgagataggttttttatttttttattaatttttttagtgaaaaataatgagattttattttaaaaaaagtattaagagtgagaaagaataatttatttatttattttttttaaaaaaaaggctgttgaaaaaaaaaattaaaatcaaacaaaaaaagtgcacggacgtgtaacgtttttaacgttagtatttgtggggtttaagtgtaaaaatattagagaaattatagtaaatggccccaaataatagga

SEQ ID NO: 40325 - DNA, 2342 bp, Cannabis sativa
cgccgagaaaggatggcggagcggaatgaaatggccatatttggtgaggtggtctaccaccacgaaaatggagtcaaatccattagaaatgggcaacctttcaatgaagtccatggaaatgtcttcccaaacttggtccggaattggaagaggttgaagtaatcccgccagtgattgtgctaggtacttgttttgttggcacacggagcattcagccacaaatttttggacatcttttcgcatcccagaccagtaaaaatcaaccgcgagccgttgaaaagttttaaacacaccggaatggcctcccactttactagtgtgatactcgtgtaatagtaatgggatggatggtgaagaagccggtaacaccaatcgcccacggaacttaagacaaccatgagtgaaggagtaaccgccaccatcttgacctcggttgaggtccgcaataatcttggaaagatcagggtcagtagctacttgttcttgtatggtggcaatggacaacacactaggaactgaaatggcagcaatagaaactttcggagagacacgagaaagagcatcagctgctctattttccattcccggtttgtactgaatatcgaagtcataccccaagagcttggtgagccatttttgatgttccatcgaaaccagccgttgttctaataagtacttcaagctgcgttgatccgtgcggactaaaaactttcgccccaacaagtaaggtcgccatttttgaatggcaaggacaatggccatcaactctctctcataaactgacttggagcaagctcgaggtgataatgtgcggctgaaataagcgatggagcggtcatgttgcatcaagacagctcctagacccacacctgaagcatcagcctcaaggacaaaaggggcagaaaaatcgggtaaggctaagacaggcacggaacacatagcttgtttcaactgttcaaatgcatcttgggctgccggggaccatccaaatgcatcttttttgagctgatcagtgagtgggcgaccgatgctcccatacccgtgaacgaacttccgataataccccgtgagacccaagaaaccccgtagctcattgatattggaaggagttggccactgaaccatagcttcaatcttgcttgggtcagccgatacccccttagcagaaatcacatggcccaaatactccacttgtggttgagcaaagatgcatttctttcgattggcatataattggtgttgctggagtcgtcccaaaaccatgccgagatgagtaacatgttctgccaaagtgggactatacacaagaatatcatcaaaaaatactagtacacaatggccgcggaaatcacgaaatacctcgttcatgagagcttggaaggtggccggtgcattcgtaagaccgaaaggcatgactaagaattcataatgtccctcgtgtgtgcggaaggccgtcttctcgacatcacttggtgccattcgaatttgatggtacccagactttaaatccaactttgaaaaaactgttgcgccatgtaactcgtctagcagttcgtcaatgaccggaatggaaaatttgtctgcaactgttgcccgattaagagctcggtagtccacacaaaatctccaacttccatccttcttctttactaacaaaactggactggaaaacggactagtactcggttgagcgattcccacatgaagcatttctcgaaccatcttctcaatctcggctttttgaatttgagcatagcgatatgggcgaactgagataggccccgtgtccggtttcaatgtgatggagtggtcccggaagcgtcgcggaggaagaccagccggcatctcaaacacctcttcatacttgtctagtagatgaataattggggctggtattagaggttgttcgtggtgtttttctgtagtcaaggctccaaattgcacccagtaagcttcggcacccttctcaactgtcaacatcatggcctttaaagaaattggggatttacataagctggggtccccttgcaatgtaacccaagttcctgccatctcaaatttcatgaccatagttttcccgttgacgtgcatattacccaatgtttctagccatttaatacccaaaattacatctgcacctcctaattccaaaggaaggaaatcagtgatcacgcgaatagcacccaaatctaactccacattagcacaaatcccctctgttctgacctttcctccggtgccaagaagtataccataacaagtggttgctgaaattggaattcccaccgctgtaacaacttccatcgacacgaaattgtgtgtggcgccactatcaattagca

SEQ ID NO: 40326 - DNA, 1227 bp, Cannabis sativa
ttaaattaaaataaaacatcaagtaaaccattcattttttaaaggaaaaattaaacaataggaggtgttatatcgagttttgtataatttaatttagaaactttaaaaaaatacttctaaatacgtaatcgtaaatattatttataaacactgctaatactcaataataatactctaccaaaaaaaatctctaacttattccatgaatgaaggttaggtgataggtagttaaaatgtaaaagccattgactaataaacttgtgattatctatataatacatatatttatttatgtatgattgtgaggtcacatgattcatatttttatcccaacttacatgctttttcttgtaaagttaagattccgtcttctctctaattaggagagaatattatatatcttgcttataaatacagagggtcagctttaagtatagacaagtttgcgcttagaatttacttattttatgggtccaaaataaaaaaaaaatatatcttttaatatatatatttttaataaattttaaaaatatcatttatctttatagtaagagttaaaaaataaaatttgtctatgacctattttaactcaaaataaatcgaccctgtatacacgtacatgtcatgcagtgtagtagtagggaaatatttactatcatcttttattttttgggtcaaaagtttgaatcccattataatatctcattgtgaggaattatgctttgtcttttggaaagctaacttattgggggtagtgtcatctttaatagaatggaaattcatcatgaggtccataatgataatctaattaagacaggatgaggtataagatctctataattggaacgtgatcttcgaaattgtcaaagccactgaaagagtggagaagagatctataccacctgatctctttttttaagaaaaaaaaagaataattagcagcaaaactcttttatattttaatttctataaacttaatctttttttgtagttaaattctcttaaatttaattttttacaaatttgagatgttagttaaaccttgtaccactacaccaaataaattttattataattttttcttatttaaaattttatctatatattaattttttatttcacaatttcgggagcctgagcgttcggggacccgaggcgcacgcctagcctgtctaccctcagagtcggccctgaagtcaatatagtaataatctaattaatattagt

SEQ ID NO: 40327 - DNA, 2227 bp, Cannabis sativa
aataataaataattttcataattaagccctaattatctgataatttccaaattaagctaagcggtctttacaagcaaggttagcactggtcctgtaattaacctctgcttcaattcttagaagctactctcgcacttgtcagtccaaacaaacttacagttcttttaagtcaattctgttaagggtgtagaaattttagcaaacccttcaacgaaccatcgatagtatcttgctaatcccaggaaacttttaacctcggtcgcagacttgggtcgaggccaatcttggatcacttcaatcttcactgaatccaccaagatactgtctttattcaccacatgcccaaaaaagcttaattggggcagccagaaataatctttcttaaatttatcatataatttatgctcccagagacgttgcaacaccatctgaagatgtttctcatgtgtctcttctgaatcataatagattaaaatatcatcaataaaaacaattacaaagtcatctaaaaagtccttgaaaactcggttcattaaatccacgaatgtcgccggagcatttgttaatctgaaggacatcactagaaattcaaagtgtccataccgggtacaaaaagttgtcttgggaatatcctcctcccgaatcctcaattgaggataaccagatcgaagatcgatcttagagaaaagggtctttccctataattggtcaaacatgtcatctatcctcgtcaaatgatacttgttctttaatgttaacttattcaattcccggtaatcaatacatatctgtagggctctgtctttcttcttcacgaaaaaaactggtgcaccccaaggtgaggttcttggtctagtgaattttaaatctaacatcatctgtaactgaactttcaggtatttcagctctgcaggtgccattctatacagagctttagatacaggctctgcccccagcatcagatcaattttaaaatcaatctcctgcttcgggggtaaccctagtaactcctctggaaagacatctaggaattcttaaaccaccgcaacatgttccggtcccgttggtgtttccttcgtagtatccaccacactagctaggaaaccgatacatccatcccataacaaatctcttaccttaaacgtcgagaataatggtattcaagatcagataccgaagccttcctcatagtttgcatggtctgtgccatcattctatgttaatacgatagttttgacttggaggtgtgcctcccaacagtccaacgttgtcagctacagtggtatgcctagaagatggagctagtcaagcctttagaagtgtgtctacaataccatgtagaaccctatatgtctagaaagcagagagataatgtctccaactattcttcatctcctaggtaataaaacaatcatacccttctccacgtatctggtcgtggtattgatggtgctgcaccacaggcttcaaggactctgtatggtcactactgacttcccaatttcaaaactagagttttaagggctttcttgtgatgagaatgagtttgtacctaaccgaggatgatatttgtaaaggacttgaaggagatcgtagttaagatgatgatgacctttccagtactcacctagggttcatcaacaaaaggagggagacaaaaggtgagcgttggacgggggaaaagaggaagaacatgtttattataccgaccaagtcgattcaaatggaaagaaggaatttcattacaaaatgacaattctagatccaaaagttcaaaatacttagaacatcaaaaagttctgtgaaatccatgaatgggtgaatgtgaacaatttcaagccaaaagtggaataaaattagagaatcaaaatacctaagcatatgttagtcaaagttaaaagtcctatatatcctctactcttggatcaatcgagaacagttcaagaatacagagattttgcactaagaaattcaaaaaaataatacatgtattcaacataaattgtataaagaagaagaaaagataacttactcactgtttgaagctttctgaatattctcgaagggtttcaatgatgaagattccaataagttttcttataaaatttgagaatgaagagagaaaatttattactcttgttttccaaaaaatgaaatgactaaaagagttctcatgaagctttagaaccttttatatatatgtatttgaaatagataattaattaat

SEQ ID NO: 40328 - DNA, 915 bp, Cannabis sativa
ctaaccctatatcacttttacaccttttgttttgggttttgagagaacatttttctttttgaaatgacattcttttccatgtacataacacattcacttcctttcttctagtgacaacgtttgggcatccactttttcaaataagatgggttgaatttgaaactatagttgaatgggaattctttttatttgacaataataatattgtttttatataatataatactagaatgaattaatttttttaaagcttataatatagatatcaattaattttaataaaagaataatattatttttctttaaaaaaatatttttagtaaataatttattaatttaaatgattgcataatgaaatgatgtgtatttttgtgatataatactttaaataaataagacttttggacccttctagagttttgcttcctcatattatttttatattttgttgtaaaaattctctgtaactataaaaatcattgctaatgtcttcttaagctccattgtttaaaagaatttacttatgtggctatgagacacatgtatagatatggtacatgggtcaattcaacaacttttagctaggcaaactcaagtttattttcattaaatatacaaccattactctaagaatccacatgcatatttctataatataattattaagttactctttatgtatttattttggactcttatgctgttaaggattaatgttatgttagcgccacatcaacaaattgtttaaaaaaataaacaaaatgtaattaaatggggatatttgtaatatttttttttttacaatttagcaaaaattttcataacaacaaaaagttcatgggcaaaattctattaaggtttggggaaacaaatcctatttattatataactaggtaactaattcgctcttctcgc

SEQ ID NO: 40329 - DNA, 2045 bp, Cannabis sativa
  modified_base (1453)..(1455): a, c, t, g, unknown or other
taatcacggtattcctccgccacatgtgaggttatctatatataacggggaaggggttagtctaagacaaaggcctctttctctttttcaaaaaaaaatttgtgtgtttattttacttatatttagttcttttctttccattttgtgagaatatgtgttattttgtattttttgtgttcttttggataatttggagttgttactagtaattattaagtgttatttgaattttggtaaagaaaagggctttatagagaaagtacaagattttgttgaagttttgcaggaactttgctgcagcaaaagtagcagggctgattattgaaactaatgtagaaaaaagacggcgtgacaattcattaattaatgtggcaaatatgaggcttggtggcgaaagacaaattgtttagagctgatctaattggaaaagtttctaactaagaattaagggacgatgtgggggacatttttggaatggtgaaaaaggaaaatttaccctagcttaaatagaaaagaggagccaccattttccagaatttttctgggcagccaccattattgaaaatacctaaaggaatgaaggaaaaaaagaagaagaggaggaagaagaaaatgagtacacaaggagaaggaggagccatccacatagtttcttccacttctgaatcttttgtattttatttttatacttcttgatttcattttgggtatttttgtggtgttgagcatgaactaatttcttttagttagaactcttaatgaacattggattgtggattttattgatgttttatgaatatctttggtaatagaaattttgttcattcaacgatgctaaatgtttatctacctacttttgcttgatcactaattgtaggttgttagctaatcttgattttggaaaaaagattaatattaatggaaatacttgaatgatacaagattatcaccttggaaaaatgtgatttgtagatggtataggaatatactatttaccttgtatgactcataggaatatgtgatttgtagagcgagtttgtcgtctttgcaaatctttatatgtattgaaacaaaaccctcgtgcttaatttggtaaatttagtcaggttgttgagaaatttagttagttgaaaagtaaatcagatcattctgtgttttataaaagatcaactactggcatcattttgttagtggtgtatgttgatgacatctttattactggaaatgatattgaaggcgtctcatcccttaagcctttcattcatacccaatttcacacgaaagatttaggggaggtcaagtatttcttgggtattgaagttactcggagtaatcaaggtatttttctgtctcaaaggaagtatgtactagatttgttaactgagacagaaaaattgggagcaaaaccttgtaatgctccaatgaattcagctgtgcatcttacacgtgatgnnnaacaatttgaagatcctgagaaatatcgcaggttagttggaaagttgaattatctaactgtgactcgtccagatattgcattcccagttagtgtcattaatcaatttatgtcttctccaacaattcatcattgggcagcactagagcaaattttatattacttgaaacaatgtttaagcttttaatctgtgaggcgaggcgtaagcctcaagccgcattgaggtgtaaattgaggcataagcctcaattattgaattaaaataatatttttagagtaactaaaaataaggagaaaagtagcagcaatttctctttttttttcttttgttctctgactgtgcgattgagaagatgaaggaggggtgtctcatggctactaagcctaagaaatatagttttgttttagtttttagttggacttttttttagttatttgtttgagttttattgggtttttattgtgttttaatgggcccttttcttaagttaaatgttattgggctttcttcgaagttgttgaatgaaaatgggctaaaaaaaccctaaaatcttgttttctttttgaggtatgcgcctcaccgttttttaca

SEQ ID NO: 40330 - DNA, 1688 bp, Cannabis sativa
gtttaagggcgcctggagctggtggagaccacggtgttgatgatgtagtagttgtacattgctagtgcagaaatagccgaagcagtaggctttcgttgagctgctcgaaaattctgaataaacacagtagaaaaagtagctaaatcctttggcaactcttgctttacaaccatgtaccactttattacgttcagtccaaatagcccacattgtacaaaaaatttgttccatctccaatttggtgtaggttgttgaaagatgtaacaagtagtctccattacgcattgatgtacacgcgttccaattgaacatatagttttgagctctccaaacagccttggcatatttgcagctaaaatgagcatgtctcgttgattcccaagcttgtctacaaatggagcaagtggaatcagtaatgatctttctttgaacaagtgaagtagccacaggtagagcatcatgaatgacacgccaggcaaagatcttgactttttgtagggaccaaaagaatttccaccatgacaaggatgacgaggagctagagccagggtctttgtcttcaagggaagttgcaagaagataaccactttgtactgttatattcctgaattgtgatgatgtcagataagtttatcattggggttgaagtagctcaacggtatagtgaggatctttacaacatcaagcggacaaagaacctgttgcaacatggagacattccactgtctttcctccgtaatggaatttgctacaacaccgtttgaagagccaatgtatcttgttgggaagatagtagtataaccagggatccaaggatcggaagcacattttacaaaacgaccctcaccaattttccatctcaatcctttggtcaaaagatcacgacccaactttttaccttgccaagtgaacgaaggggagtgacccatacttgcttcaagaaaggtgttatgagggaagtacctgcttttgagtaattgtctaaggagtgagtctggattttcaacaaggcgccacgcttgtttagctaataaagcttgattgaaatggataaaagactaaaaccccatttcgccctctcccttgttttacatagcagattccaagagcgccaatggattttggacccattctcattcataccccacaaaaaattagctatcatactctcaagttttttgcaaaagtgacccggtagccgaaagcaactcatagcagttgggatagattgaacaacaaccttaagaagaacttctcgagcaccaactgagaagatcttttcactccaagagtgcataagtttccaaatatgttccttgatattgctgaaaagttctttcttgtctcttcccgaataagttggcaagccaagatatcttttatgacactcacggattggcatagagaggtgtcgatggaagaacacttaggttgccaaagtagtattcggagaaaaagatatcacaaatttatcaggattaagaacttgactcgaagcacgatgatatgtgtctaaaaccctcttgatggcaaggcatgagctttcattagcttaacaaaatagaagactatcgtcgacaaagagtaagtgagaaatgggtggtgcacgccttgtgagtttgaaaccatgtagattaccaatactctgttcatgttgcagcagtctagataagccttcagcacaaatc

SEQ ID NO: 40331 - DNA, 2998 bp, Cannabis sativa
  modified_base (1361)..(1364): a, c, t, g, unknown or other
gaatttcttcttgttggatccaacaatttcaagaaagtcccttctttccaacatatgtttcttttcctcaatataccctttgaatccattagaaaggaaatttaagagtaaattgaaagtttatatgaatcgattcaaaactcgaaactcatccaactttaggagaaaaatcagtaaattgtgtactgctttaacatgtcaaaagcaatattaggaatcaagtacaattctcctagttagcagaaacataacagtattaaacaaaaaataattcacagacaacgtatactgatttgccataccgaattgaaagaaatcaaggcttttattgggcacatattcgtagaccagaattttttctgtgttgaagcttggtcatcaaaatgacctcattcttaaactgttcatcagctactttccccatatttccaataagtcttttcacggtaatttcatgactattagggagggtaccctgaaaataaaatctggtggtataagaactacaaatatataaggtttataatttatacaattgagaaattcatcataatattttcaccttataaacatcaccaaatccacctctctctatcttattttcatttgagaaattagtggcagtcttaattttctccgaagaaaattgaaaagtgtcgccccctgaaatttccttccagactacattctagatataaaactataaaaactctagctattacactttttttctttaagaaaaacaaaaatgactgtgaaacattcctcaatcaataaaaaattaaaataaacaaagcactcaaataataacttatttttcattcgaaaaaataaaggaattttttctattttgagttaatattattttaaataaatatttagtaaaaataaacatttttattgtttattaatttcaaatatactattttcaaagtttcttatttacaaaaatacggtagcaaaacgcctccagatgtgcaaggagaagtgtgacacacatgtggctatgtgggcgagtgagagtcacacgcgagtgagagggacaaaacattcagagttgcctgacactcacaaactgtagcgtcaaaacacagcaatagttgccacgtggagaattcggacaaagtggattttaacgtgtaggacttcttttctcagtgcaaaacaactaaacaacaacacaaaaacaactataaaacaacttaaccataacatataaatcaattaaagtttatcatattatgcatgcaaataaaaataaatttataagataaaaacttcaaaaaaacaatactaaaataacttaataacaacgaataaacaatacgataataattctattttaatataaaaattaattnnnnatcaacacttacgtcaatttaaaagataaaataaaataacatatatatacatttatttctcttagtgttgaccgaggttttcggcaaccaattaaataatatataagaagagctatagaaagtttaatgcatgagatttggacgtggttggagcattaatgagccttagtctacgagtctttttgagtgctaggtgaggactcttctggtgtttcttcgagtcctactgggatggccttagggtgtatgtgaatcattgccgtctccatggctttttgcatggcgaccatcacctcttgcatttttctattctgctctttttgggctgcgatctcggcttcatgatcagcagccttttgcctcaagaccagtaactctttatagctaccttcgtcgtaagtgtcatactcgtcaaagttctctttgtactcctcattgttggcctcatcgcgctcctcaaagcccaagttcactcttgaggccacttcttcgtcctctaggttttgtgcatcctgaggaagacggggctgacgtgtattgttgcaagtttccaccattgttgatctagcttttctgattattgtctgtttaaagacgcttccttcagctctcaatgaaagcaccaaaatgatgatcgaggttttcggcaaccaattaaataatatataagaagacttgtataaagtttaatgcaggagatttttacatggttggggcattaatgagccttaatccacgagtcttttttattaatcagagtatttattacagagaatgttcttggtggatttctctcctattttctctctttgattccttaaataaaattgatcgaccccttttcaatctgtttgtggggtatttatagtgtttttctagggggatccctaggaatagattacttgtctttctttgttagcttcataggggcacatattcctagtagatacaaaataaaaaatacatgacctatactgtaggtatcttaggagttaggtggatataatcttttatctccgctttactgatgtgatttctcataaagtagccaccactagactcattgattgttgtgtaatcgccgtaaaaagggatttacgccatctgtcacgtcttttatggaagttccaatacgtcttctcccatgcggcattaaatgcaaagtgattgttcatgtaatctctttacctcctggacatgccttctcatggccctagcctcccggaaggtagtgatttgtcttatgctctcctccgggaggcaccttccctgaggtattcctctttgtccaagacttaattgattttcgtgagcgatggttctttcatatccacgtgtaacctttgtccgcgtctacgtattttgggaaaaatccaaggcaacacttagttaaacaactaaataagaacaaaaaaataattgcataataaactccactacaatatgcaaattacataggcatgaaaacaactctaaaaaagtaaaaaacaccactaatgtataaaataacataaacatgtatatatattatttttatttggttgaataattaaataacaacaaataaacaattgtataacaatttactataatatgcaagttaaataggcttgaaaacaacttcataaattaca

SEQ ID NO: 40332 - DNA, 1271 bp, Cannabis sativa
ttaatagactatcatgttttgcattgggaccttataacttcaaagccaagccagctttggctgtttagcattttgttttttgttcacacaacttacacagtccagagttatatgaaaagctttggtgctccaaaatgtaatgtaactagttaaaaaaagtttcatgataaaaaaaaaggaacatatataacacaggattaccaggtactaacttatatccatcctcattgcattatcaattattgtcattgtagacttgtcattatgaaactagtcaattaacttggaaagattgtaacattgtatcccatgagataagttttcaaatccagagaaaaccattgatgttttagattacttgccctgtcgtttgttcagcgatctctttcctctttataactgagataatacataaatgctatctaatagcgatgctcaaaataataatatcttgcctcacagtgacattactgtattatctcctttttctgcttatacatttgtacaaaagtcaataaaaagtaaaaactataaattttccttaaaaggttctattacaataaaagcaattttagattggaactttttttttttaggtgaggattttttattggaactttgaaatcatcgaatttgctaaaacaggatatcatgggactgatcctattggctttctcaacattagaaagaaaggatatcatgcacaaatacagttgttcattccaaaatagtttaccttgtatttgattttatagcaagtgctgttgttaattattaaatatatttatatctatatgtgttgctcagctaattttttgttgatgaaaataataataatggataatgtgttgctcagctattttaattgtatacattcctgacctgaccatttattaaatttgtaagtttgaacaccccgaagttcgaactgattgtccacttttttttaagagatcattaccattgatttttattttacatttttaagaaatattgtattatactttcatatggttgatttgtgtgagtattcctgaacttccattattgtttgatattcagtaaagttgtgaacttgtgatacttggttcatcagttcttctcataatcttcctcatgggaggttcaatttagcagatcatcaagtgacttctgttataaaatctctctcgaaacaaaccttcaagtgtgtatggttattaataagtaaatttgattccatttggacaaggtttcatggacttggctcaaccatgtaaagcaccactaag

SEQ ID NO: 40333 - DNA, 2652 bp, Cannabis sativa
  modified_base (1608)..(1622): a, c, t, g, unknown or other
  modified_base (2429)..(2433): a, c, t, g, unknown or other
gtgggtagcaactaaactcgccagcaacaactgatctaactcggtagtctcgcttatattcaacaacacaagtcctcaaagtattacccacatagtctctgatggctcgctcctttgactctattagctcagcctcgaaggtgacattagggtcctggggagtctttgatttatgtggcttggaagacataatttcaaagtccaagtcacttggttcaaaagcaattgtaacctttggtaagaacaaaggcttagccaaaggaatagaagacaaactgggaggtttaggcaaagcagcgtttcgtaagaaacggcatctgccttctgtaatttcttgcaagaagcatatgtggtgactagcaatatcttcttagtgggttttcactaagtgttccttaatttttgcatcatttacctcaaatttggatttaggttctgaaagtctgggtttgtatgggagggcaagttcaataggacgttctatttctaaatattcaggacgataaacttttgaaccagattgggtcattacagcaaggagaaagcaatcccaaatcctggaataaatttatgaaacagaagttggtaaatttgtgagtctcaaaaacctatgttctacctgttatacccgaaattcggctatcatttcaaaggaagacacgtgtcaaattgggaagaatatgaatcaatgagtgtaacggtaattacatttgaaaatggaataactcattaatgcaaaaataacagagtatatttataacttgttgagtataacgtcttacgtgagataaagatatataaactattgtctcacacgttaacgagacgtcatgtgccattggatgtgtaaggcaaggcatcaacctcattacacatgaagagacgaaggcgagatatgatgactattaagacacttagcatataatacacattataaaaacttagtacaacatctagaagaacctaagtgacggatagcgagacgtccatctcgctataggaaaacacgcttctggtactttcactaatcagcttcagacatctttaaataagattcatagtatcaatgagtcagttctctcggatagaagctgacattcaaatgacgttggttgttgaagttcaccttgtcgccaagctcacagaagcgacaaggctaacactattaacctcagagaagatgtgggaaaacctctagctcgctatcaaggttattgatagcgtgttcccatcgaggcatcccaaaacgttacgatttacaacatgtttagttcacgcttaccttgacccggtaaaagcgaacctatcacagttgtgtgattttcaaatattaacctcatttaatttacgtggtatgtaatcaaactccatgattttagggagtaattgttgtgaagatatcagtcaactatgtaattaactgcctgactgtaatatcccgataagcctaatggtaaataattagagtttatatttatacttgggttaatcaggtaattagtgggattatgatcttactaatctatttcagtataaaatataaatttcgctataagtgagtaaataaacttaatttgttaattatggagatttatatagcatgtgtgnnnnnnnnnnnnnnnatatgtggaataaaaatattttcatgttcggggaccctgaagactcaataagtggatatatataaacgtaatttgttaattacggagatttatttaaaatacgtggatataatacgagttatttgtgaaataaaaatattttcatgttcggcgaccctcgagactcgattggaggctaaaaatgtcacaacagttttagttagaaatatttatgggataataggataagttgattttagaaatatcggggtattttaaggtagtcgaagttggccaaataccttagaaattgagattccttattggctaaaaaatagtaagataactattaataataaagtttttattaatattattattaatatcatattattattaataatatattaatataatattatttagatatataacgttaacttaagtttatttatatatatacattaagttatcagtgaaacaaaacgaacgaacgaaacaaaccctcattctctcctttcaacaaaaccttctctttttatatccattttcttcgattttcaacccaaaacctagtgatctaagctccggtagtatcaggatagcaaatctttgaaaagggaaagattaaagtatggtttaatttcattttaagtttaaaaacaattggttaggagttttgtgaattagaatagttacgaaggttctgaccttatatgattattctcgggtagtcatgggactagttctaatgtttatttgttgaatttgaggtaattttgagttagaaatcgagttttgaactttttaaagcttagcccgaacgtnnnnngcgtttttcatttaagggctcgattttaatttctgttacgtaaggatggtaatatttatggcatatatgcaccctgtgaagtttggagtgatttgcataagttttggtagtattttgttgagtgcgaaaattgagattttcgtatttcatagtttttagaaattcttaagagatcaaaaatcgtatttttatcataacttttgactcgggtgtccattt

SEQ ID NO: 40334 - DNA, 1129 bp, Cannabis sativa
tattacaaaacagacatcctggatcattaatgatcccaaatctatacaatctttctcctgtccttagtcttccctatgtagcagtccacataataaagctgtatttgggaatattaaacttcccccaaacttccttactccaatgcattttaggttgtggagggactaatagtttgtatccaagagaggggtgatacctggactgggtgaattgctgcacatccaccatgtttttaatctgattcttagcctctaccacgtctttccagtatcaaatcccatggatgggggcattgtagccccactaatcttcttcccgaatatatatgttgtgtatccatcgaacccacatgttgtcttccttattagctatcccccacacatatttaaacattgctgctttattccattcagctacttttttaaaaccaatacctccttttgatttagcctagcatacaaattcccaagctattagacccgaggcagtaagagtatgttggcctttccacaaaaaaagctctacaaatagcttcaatctcgttcactatcttcttaggcaaaatcattatctggctccaatatgagtgaatagtcatcagtattgagttcacaagaactgcccttcgtgcaaaagagaggttcctagtactccaggtcttaattcgagaagtcattttctcaggtagttcttaacaatcctgacctgaaattcttttggcacaaattgacagtcccaaatatctaaatgggacatcatgcctacaaaatccaaacatgtcttaattaactgtgagtcaccgtaacacaccagattcttgacttttaacacttcagctattttcaaaccagctatcaaggcttcatactcagcctcgttgtttgaagtgtcaaattagaatctcagggcatagtgaaacttaaagttttttggcgggatcagtatcacccctacacccgagccattttcattaaatgctccacccacgtacaacttccaagtgtccgtgtctcgctggataagtggatttttatctagaattattctttctattaggaaatttgccaaagcttggctcttgatggatgttcttgggtgatatgttatgtcgaactgccccagttcaat

SEQ ID NO: 40335 - DNA, 1139 bp, Cannabis sativa
gaactaaggtccatgtgttttgtcttagagcaaggtattccttagtcatagatgcattccatttcgggtcagcaagtgcagctttcatagatgttggttctgattggataaggacagtgggtagtttgtgtttagtagctaggtaggattttggtttaaaaatgcctctctgagaccgtgtggtcattggatgggtgcgagtgatgttttgtggttcaggggcaatatctaaacatggttgggtagatgggatatcatggtcaggttctgcaatatctgaggtagttatttgggtgagagattgagaggaatctggtgtgggtggtgaggaagcatcaagtggtggggtaggggtaggttcttggggttctgtggatgtaacagtaggcaaggcagagacagtagatagtgtattaaaactagctaatggtaaattttttgatgaagtctcttctgtagcacagggttgaggaaaactgaaggtttgctcattgaaagtgacatccctggcaatatatcttctaccatgcaaactttcagatatgtagcctttgtgattgggagaatagccaagaaatcggcatggttcagatctgaagctgagtttgtgagagttctatggtcgaaggtttggataacatatgcagccgaacgttttcaaggacttgtaatcaggaactttattgaataacacttggtagggactgctattgttaagaattggagtaggcattcggttgattgtgtaaactccacactgaaaagcaggcctccaatatgacatataaagatttgcttgtgctaatagggtgagaccggtttctgttatatgacgatgctttctctcggcacgaccattttgctcatgtgaatgtgggcaaggatgttgaaaggtcataccctattcctgcaaaaaattagcaaacaccctatattctcctccccagtcagattgaactgatttaataggtgaagaaaattgtttttcaacaagtgtcttaaaatgggtgaatacattatatgcctcaaatctaagagtgagagggaagatccatgtgaatctactataatcatctatgaaatgtatgtaatacctaaaaccatctatagagggtgtgtgtgaaggtccccacacatca

SEQ ID NO: 40336 - DNA, 5909 bp, Cannabis sativa
acatttcccttctaaccaccacatctcatttcatcaagtatgagctttacccatctgagaaggttcaggaacctgaataggtagctgagaggggttagtttcccattttggatttatcaattttaaccacctaaaggataaccttcatgttgtctttcccgattattgtgaaggaaagaaaactaaggaagaagtaaggaaagctgatgaggattcttctaccgtctaggatcaagaaaatcttgtcgctcaagactcaacccttcagttgtaagaccctagcactcccctagagtgagtttttaaaccctttttttatctattcggcctatgggtcttttatttggtacaatatggccgaccaagcagcctttaaacttggaaaaatatttttatttttcttaagacaaccgactagttaagcagcttttaatcccaaacttatcctgcttcattatcttaatataaataatttcctttaattttgaattttgtttcttgctttagcttattttttaccaatgcttgtatgggtgtaagtgccccccaagtgactgagcagacttttgactaatggtcacttatatttcacaagttttattttatcttctcgacttttcggtttaggaaaaccctgtgtacacctattaggtaattaaataaattgctctaatttgtaaaagacgtaaaattgacataatttgaattataattgctatctttattcatttattggtctcgatatgtgttgctaccgtggtgtaacatacatttattaaattataaaaagctattacatgatccatctgatctttagctaattaaaacacagaaattttgaacggtttattctgctaaaaaggcattgctcaagagcaatgatttttaaactaactatagtttgaaagtagtcatgtgaccttagcacaagtgttctctaaacctttgagtgaggttcactcagaaagccattacttaagagtaatgttcaagcattgtgaaatttaagtggtccctggaccttttgcacttattggtagtattttcttaaatgttcaccattccaataccttggtaatagaactagctccatgttttcattatacgaaccaagcttgtatgctccagattttgtaacttcagttacttggtatggtccttcccaattaggctcgagcacacctacgacattatcttaagtgtttaagaatacccttctaagtaccatgtctccaacaaaaaattttctttctttcacttgcttgaagtaccgagccattttttggtgataagttagtagctttagatttgttgaatcacttttttcttcaacttcatcaagtgattctaccgggagggcatggttagttttctggctgtaagtcaatcttctatgggatggagattctaattcaatgggcaacattgccttacacccataagccatggtgaagggtgtctgctcgtttgttatcctttcaattgttctgtacgaccaaagtacctcgggtagttcctctagccagttcccattggctcctttgagtcatttttacatgatttctttcaatgtcttattgattgctttgaacttgcccattttttgggggtgtgcgactgccgagaaactctttatgattccatgtatcatgtagaagtctataaacatctggcggtcaaattaatttccattgtctggaataatttttgtggaagtctgtaccggcatataatattttttaccataaattccaaaactttcttggatgtgattatttccaatggttcagcttctatccatttggtgaaataatcaatagccacaattgtgtattgtactccaccatttcctttaggcaattgtccaatcatatctattccccatatagcaaaggccacgagctttgcatctacatcaactcgttaggtagtgctcgagggattttggaaaacctttggcatttgtcacattttttcacataggcctttaaatcttcaattgttatcgtcaagaagtaaccttgccttactattttcttagacaaactttacccacaggatgattgccacaaaagccttcatgaacttcagacaagagtcatgcaacttcttcatttgtgacacatctcaaacggcatggaaaaacctcttctgtacatcacatcatccactattatatactaagcagcctttctcatcattttttgagcttcattcttgttgcttgaaagttcaccagtgctaagataggttgtcatgggagtcatccagtttggtgtgttgtctgtcatctcgatttcctcagtgaatgtgatgttgggctcttttagaaactggattgggaccaagtttactttgtatattacatattttcttaaaagtcgtgctagtgcatcaactattacattttttcccttggaatctgcttgagggtataccccttaaattatgtgagtaggttgtagatcttacttagatatgccaccattatttatcctcgagacgtatattcccccaagacatgatttaccactaactatgagtcactacaaatttctaaatattcatcacatacttcctgagcaagttttagactgacaatgagtgcgtcatattttacctcgttattggatgtcttgaactcgaacttgattaacccgtgcaaggattgccctagttgtgatgagagcaatccaagctctggacaactggtcagtggataattcgtccacgtgtagcttttaaattagcttatcttcaatgctttcttctagtgggggtgatttttcttgctccttttctggctcagtattatattttgaacttgcctatgcattcagccacaaaatctctcaaagcttgtccttttactattgtgtggggttgataggttatttcatactgccctaacttaatttcccatttgagcaggtgactagatgcgtctacctttagcaaaacttggcataaaggttggttagtgtaaacctgaactggatgagcttagaagtaggcccttaactttcttgtggctaggatcaaacagtaagtcaatttttcaatcaggaggtatcagctctcagcctcaaagtctttgctaatatagtagactggatgttaaacattattgtcttcttttatcagtacgacacttatagcatgctcggtgactgcaaggtagattcctaactcttcctcggccaagggttttaagagaatgggaggttctgcaagttttctttttagttcttgaaaagcattctgacattccttcgtccactcaaacttcatattaccttggaggatgttgaagaaatgaacacactgatatgttgattttgagacaaatctacttaatgcgactatccaaatagttgggatttgcacttctttcacctttgttggcgacttcatatctaggagggcttgaattttctctagattagcttctatattcctcgagcattaacaatgaatccaagaaacttacttgagctgaccttgaaggaacactttaagggattgagtttcatgttatattttctgaggattttgaagcattcatccaggtcctctatgttccccccagccttccgagatttgatgaacatatcatccaatacttccatgttatgtctgatctagtccttaaatatcttgttgactaacctttggtagtggcataactttgtagaagtacagaccaatatatgtttggaaacttgtgtgctcttggtcaggtggatgcattcttatatgattataccctgaataagcgtcgataaagctaaagatttcatgggcggttgttgcatccataaggtgatttattcttgacgtggaaaacagtctttagggcactccttgttgaggtcagtgaaatcgatgcatacttgccaatttttgtttggcttgggtactagtacggggttagctacccaagttaagaaaaagatttcaattatgaatatatttatttctacctcttcttttagtgcttgtgcacgttctttgtttaacaatctccttttctactagaaggaacaaaattttggatcaatattgagggcatgacacattgtaaatggatcgatcccgtccatgtcttcgtgcgactcggcaaaaatgtcgaggtttgctcttagaaattttatcaaagatgattttattgcaagcaacaaacctttgccaatttcgagcttcctagtcggcatggtaagataaattttgacttcttctagcgcttccactggtccaacaattgtgttaggttccccaaggcagggatccatatctttgtccctaccttgggcagattcctattgggaaatgcttttattcttctctgaacactgaccagagttttattccattttagccttagatagagtgaggttatagcattcacatacagttttttggtttcctttcagatggcccactccatttcttgttggaaattttacacataggtgaaatactgcagtgacgaccttcaagtcatataaggctagtcaacctaacatgacattaaatgcaaagggcatgtcgatcactaagaattaagccatcaccgttgtgcttattaaagcttgtcccactgtaagtggtagacaaatttgtgtgagtggagaaacgctttggccagagaatccatatactagctgagtgcaaggaactaaatctttgagatggagccccgtttttacatatgttgttttgaacaagacgtttgaggaagctccattatctaccatagtttgaactaccattttgtttgcaatctgaacatcaacgaccaaagggtcattgtgcatataaataacatcgtcaaaatcttcttcactaaaagatatgattggttctctagtgcgcggctgcttaggttttctttcttctacggccaaaactgcatcaaattgttcatattgtagggccccaagcatatttttctctagctttatctaagtctccagcaaggtaagggcctccaatgataacttgaagatgttagtccactggtggaggcatcatctgacttcgtgtgttatttggttgggtggctatttgttcttggtcggtcttaacatatttttgtaagtgtgggttgtttttcttgatgagtaattctatttcccactttaaattattctattcgttagtgtcgtgactgtagtctgcatgaaagcggtagaacttggtggtatcccttttgctcatgtcttttttcatgggaggaggttttttgtatggcactatgggctgagtagttttaaaaattgtttctatgtcctctgttaggatggtaaaagcactgaactttgaggcattctcttgaggatgttgttcaaagtttccattgaatttctttttctttccattacctatcggttgccattatttgaccttttaccaccttggctcgatctattgtgattttgtgaaatctagtcttgttggatatatgtagtggctgcagtggtgtgttgttgatttttcttctgtccaactgtgtccacacgccaaaccgtttcttcgagctttataaatctatttttttcggtccaagaattctaccattgaccttgtagtaagtctttttatgtccttccacaattcccttagaggttcaatacctcctaagattgtggctagcatcccttcctcaattaatcctttcacttttgttcattcataaatatgttgatgtaagctctcaaaagttcccctagtatttgtttcactttgcccaggtcttctaagtgagatggaaattgttgagaagaggagaactatgcgtgaaactctaacatcaatgttttatttatgccaataccgtattgtaaggatattcgatctccatttttggttctacatagttcttattttagtgagattcatccccaata

SEQ ID NO: 40337 - DNA, 3196 bp, Cannabis sativa
taattaccaccctagtaattaccctacgtagattataaaatataaaaaagaatattattaattataaaatattaactctttttacgttacaatggtatatggcacttaacatgtgaattgtgtatggctagtcttattagagatattttgtaaccatttcttctattttaaatgcaattttaacttaactcaaattattatattaataacgtttttcttcacccattgttcaaactaatatacctctattaagaaatattctcagttttacttttccatttatcttttctatctcctatatattctactctttcatttcaaaataattttcaaacacacctttgaatatcgattgggtttaaaataatactattacgatcaactctttaaggcaactatttgatatataggaaacatatatttttttatcgtgtaaaaagaaccaaagcaaccataaattaaaattttgaaattaaactgtaactttaataaacacataatttcaggaatcccgtttagaagtttacaattgtacccaaaatacatttttctcaaaagttttgcttagtgactacaaaataaaagctcatgtcgtcctgagaccgaacactccaagcctaatcatcctaataatatgtacaaccatcctcaagctatgaactcattgttgttcagtctttgtctttcctttacctacacatgtaaacatatctgcaagtcgacatactcggtaagaaaagtataaagcaaataacataatactaactttgttatacgtgatttttgaaaaataaaaaagtcaacattgcgactttgaccaagacttataaatgtcaaataagataagacatcattcttaagagtctcatggcacctctaggggactcaaaaacattaaccaaccatttgagctgggactcacacacccatgtgtgcccaaactaaggtttatgggcccgcgtgagtattttcaccctaaagacctcaatccaacaagaaaaccaacaaggacataactcatttgtgcacaaaaggcctagacttgaacataaggtcaaaattgcataagaacctcatgcaatagggcatatgcaaccattgccacatgaagatggtaatgctctctagtttttggagaacactaccacaaggagatggcagtgctcgccaatcactaagtaccaaagggaacttgtcaaaatgtgttacctcaacaccaaggaatgcaacacaagtgaaagaaactatttctcaccaatgaacaagcctagtcgaccactgccatctttgtggcacaaattgtggcagtggtcggccacaaggaaggggatggaattttttcccaaaagtactttttcatcaaaacatatcaaaattaagtgagaaaagccaccaagtagaaactactcaagcaaattgtatttccaacatccatttatcaaatacaagtgagaaatatatcacccaagggtccataacccttttatgcaaccactgccacttttttggcaaaaatggtggcagtgctctcttaaccaattggccaagaaccaatgtgaccacagtagttttctagcatccatatgactgaaataagtaagaagcactatccaagagttcccataagccatggtcgaccactaccacttttcggtcccgactggtggtagtggtctcctattagggtttcaaatgtcaaaatcaagtttttgggtcccgagacccgcaaaatataactcaccatcaaaaaacaagtcaaaacacaccccaaggggttcgagaatatgcatggctgagagctgccatttggccgtgtcattgctcgcaattggagtaaaacaacacaaacttcccttcagtaaaacaggcataactctctcaatttttatccaaatgatctagttcaacttgcattggaaagatattttcaagaaggatctaagtgtgccttatagtcatagctcaattctaaagttatcggattcaaaattggctcacaaggcaggctggtatactttactcgggtttgagtagtgtaattaagtgtgggatgttggagaaccatgccacaacccatgtggcattatgtgcgagaaatcgcacaccaaaacacatgtttccaatacttctcaccaatatcatgaattccaagccgagaagtgacatcccttattactccattttaaattagtgcatctctagctgaatataactattttctaaatgtttgtgggattttggcctagaaataaggatagttttatagatatttatttatttgtaattgtttattaattattgggagtaagatatgagatttgttaatgggacaccccgacatatggggggtcattaacaaaccctaaggcatatataaagagagtaatagactaggataaggagatcgcttatttgattattggatgactgctaagaacattacttcccttttttcatcttttatcgacaccaagcctctacaacttaaagcaccactgacatacacagtttccaagaataaggaccattctcttttcttacttttattggtttattatttccaagagccttacaaccaccacatttatcaaatttgtgaatattaagtctcccatgagccttgtgttcataagactcgttacagatttcgcctagaaatctattgttgtattattatccacacactcttgagaacataactttggtgtgtcagatctaattaataaaagcaaaagtaggcgtagccccattactatcacgacatgggggtgaactactacaaatccccgctgtccattttatttattacggttttatttagtcaaataaattcattgcagtcctctttatttttacaatcttcttagattagttgaccaaaaattgcgtcaatagtttggtgctttcattgagagcactacagtgaaatttgactgttttccctttcgagaactcattaatttatctttttcacaacaatggtgttgagtaccaggaggaccaattttgaggaggacactgaaatcccaaggggagaagttaatcaaccctatatgaaggaacctttgtcccaccgcagccacatggagaggggacctctaggcgctgagaaaagaatcccatgttgcctatgccagaagatgaggggcaagtccaagattgtgaaagttcttcatctccatctaaggagcgccca

SEQ ID NO: 40338 - DNA, 1549 bp, Cannabis sativa
  modified_base (1502)..(1508): a, c, t, g, unknown or other
ttaataaaacaattgatcattcaaaaaaaaaaaaaatttaacttcaataaatatggacaaaaaaagaaaagaaaaaaaaaaaagaaagacaatgccaccaacaatgtaaaatttgcttattaagagtgtgtttagaagtaattgtgtgattacttaagttgtaattatacagtttagtaattatactatattttacaaataaggttctttgaattttagatggtaattagatatgaattcttaatatcttgtttaacaaaatatttagtaattacacgggaacataatattttttaatagttaatgtttaaaatagaaagtttttaataattatattcaatttttatggagaaccatgaaaattagaaagtataatcagaatcaattaattacctttgattacactattataatataattatgtggtcagacaaacatgtcaaattgtgtaattacctttaaaaacacataaatccaattacaacttttcaaatgcgccctaagtaaaagctatactaacaaaaaaataatgccacgttaatgttacttgtttcttttttaaaatttatttttacttttttatttttattaaggaaaagaagattacgtggtgcacatttttttcccatatcttcggtaattttgacaattttaggggccacgtgtcagctataaagattttatactattttaccttaattgggtcattgatatgtacttcaaggattcctatcctattaaggatggcactgctacaacaagctagcctcccaaaaagccaaacataatctctctctcaatgagaggttatgatggaattcgaacctttaacccaagtaaaaaattatgtcactaaaaatttctccactacaccacacaactatattaaaatttatgtttacttaagtctcatctttaagttttcttatatagtgcattaaaaagtaaaggaactaacaagacaaacatagtttagagaaacatctcataaaattttcaaaactattaccaaacataatcttaagcaatctactataattataccaaacataggtttagttttgatccacccaatctaaaagaaatctaatcttaattttcatatgtatatatatcgatacatatatcggaggaggttttaatagttacattaaatatgtaactatcatggttatttctttttagtcattagattactattgaatagttgagattaatttaaaaattatataaaaataaataataattaacttataatttaatagtcacttaataatttatttcctaataaaattttaatgaagattaattatattaaaaaagtaaattattttaattattaattaatttttcgtaatttattattaaataaggatcttttgcatttttttttgcccttaaattattaaaattttataacaaaattctttataatttaaaattatacacatataattttataattaaaattttcaacactaattagtaattttttcccctgnnnnnnnacatgtactaaatcgtgcctcctaaatttttttggccgtta

SEQ ID NO: 40339 - DNA, 1328 bp, Cannabis sativa
gcacagtatgtttaaaatcacgtctactcgcctatgctagttagggtgttacatagtagacctcctagtatccttgcttgatgcataatttgcatccacgtattctttcaaatttactttctctgaagctcttttgtaagttaatccaatatcaaatgtccctctcaaatatctcagcaaccatttgagtgcccttataatgccatgattcgcgaggacgccacgtatgtgcttttattaattactttataataatgatctaacgttttaagaaacatgttgtttcattaaaacttttaggaaaattatttaaataataacttaaactttattacaaaatactactcgtttctgggatccccttagttacaaacttttacaaaatactacaaaacaacttattacaaaatattgttaaattttcaaaacacaactaaaggaagatcctgtccactaagaaccaaaacatggcgggttgatatttacattaacgggagacctttgaatcatagctgatccagtttccctttttccttatctgcaccacaaagcacccgtgagtcacaaagactcagcaagaaaaacaggtaaaacacaagcatcacataaagcataacattttaacaatgcacaacatacattgcaatatatagaataagcaattatttaaagcgtaattgaacgataataatcaattatttgccttataagactagccaaacttgatattttataaagcatcattaaccctcagtaccaacgagtttttttatgttactatcgttgcttacttaagcaatagataagtaagaaatctaacagcaattttaaaagtgattaataactctttcttaataatagtaattatcatatcttattttgacatgctaagcagtgcaattgacttttcttacctcaagtccaaagtcaagtgtatgagccgacctgagtggaatggtgctcgatgatctcgggtcctatgtcataacaacgatacttgataaataacatgatcacacccaaaagggccctaaactcaaaaaagacaaaccctaatcgatactagcttagaaatagcctaagcaccgataaaacattattgacccaaaaaattgatcaactgacggtgggggtcatataaatctgatgtttgccatgtgttacacaattagaacaagaaagtaaggaacacacagcatttttatagaggtttggccccctttgatagtaggtaatgacctacttctcttttcattttattgatatcgagggttaatactatatagatgttaggttttatgccctaaataaaactccaattcaatgta

SEQ ID NO: 40340 - DNA, 1868 bp, Cannabis sativa
acgaaaaattgttctgtttaagttataatacccattatttatttattcacttggctgttggaggaaatagtacatttttgtagatctttatgttcttggaggagaaaaataatgggcaagtgactttcttcaaaatgtagttatgagtactgttcctttatatttatgttacaatgttgaacaaatttgagtatgtcttagtatgttattatcttttttgttgtggaaattttcgatttgctttttttaatagtttgagtttgatagggatttgacaatggctcgatgtgggcacacattcataggtttgggatatgcactgagctcaatgacaataaatattttctaggattatagagttaaactccatagagctcaacaagagcttgataaaatgtaattttttttttttaaaaaaaaatgttgtctcgattagggcttgataaaatgattttttttttgttttttaaaaatgttagcgcgatatgctcgattagacctcggtggaagctcaaatctataatttttcattctattttttatttacactagacgagctcgatggcagtgaaattttataggtgaaatatgacattttcctttatatttaggctctagtgttatattatttatttcatatagtggcgtttgggagcttgaaagtagtttatgggttttcaaagatggaaagaacaaattgacgaagatggagaaggatacaacatacttgcaattactttacaatctgttaaaaaaatttaatttgaacaaattgttggatgagctgaaaatggaggtctcgctcaaaatttgtctatgagtaatttgtgcccttgttctccttgaaaatgatgaggatgtgtgtcattttctgagtatgttgtcagacaggatcgaccatcaaatggttcttttatgtgtgactttgattatgaagaatgtgactatagatctgtatcgtcccacttgcttaggcacgttacagtgattttaatgattgtttaattactgtcctagcttttgctaatcaaaagttttctcgaaaaatgtgccaaattaaaacttttaattaaactttaaatctttataaacacccaactgtacataaaagtcgagattttgtcttaaaagtttacaacaatacctaaaatacattttttttaccaacatgtcactccacaactacaaaataaaagctcaagtcgtttcgagattaaacaatccaagtctaactgttaactggatttttagccaactgatgcggagtcgtaataaatgaaatttaaactaaaatcataacaataaatgtaaataatgatactggaattcgcagtaaaggtaaagaaagatactagaatttaaagaggttagaatggcaatagcctactccccttatattttattaattagagttgcaaaagtcaagaacatgctcttgaatgcaaagaataaaagactattttttctctaagtgctcaaaattgcggattcttttcccaagtcatgagtgaccccttatatagggaaaaaggttggtgcttctcgtttcaagagtcacgactaatgcagagctatctcaaccgtcttcttttttcggaggtggttgaagtctgattttttgataatatcccgctattttcgtgagtttgtaactatctttaagcttcttacgggatttgaatatttgagtttgccactgacggcgagggtctcctgagggtatgacaccgtcgttaaccacatttagggatagaagctaatacttgggggtgacaccccgggagacctaacatgagatgtcaattgtcatctcggggtgaccccccaagaccctttctatgttatgggtagtcatggtgtcatgagga

SEQ ID NO: 40341 - DNA, 1700 bp, Cannabis sativa
taagtagcttttccaaactaatagtctaatacaaaagagaacaaagaaaactctcagagcaagctacattaatattctccattgttccacatgactctaaaccttcacctattaagttcaattttcatttagattaggtttggtaacagaatgtattgaaataaaatttaaaatgtataaaaatttaataaaataattattaaattttttctatattaaaatgatttttcattctattttaaaataaaataatcaaaagaaaattcatctaacattacaatactctaaaatgtaaccaaaaacaatagattatttcatttccattccatttgaataatgccaacaacacaaaaggttttcatagacacatggcaaacaaattgttcttcctctgtttttttttttctcctaacattatcatgccaatggtaataataaaacagtgttcatctccattcaagtgtttatatttatgaaaattatattgtaaagtttcatattcttaattacttacaaaattgcatgcaatgaataataaaataataataaaaaaaaccatccaagtaatgataaatttagagtctttaaacaaagcccaaaaaagaactgaactgactaacctgtgataaaagacaaagcagagactctatatggttcctagccactgagtctccaataaaggccattttcttgcctcgaaccatctccataaagaccatggaatcaaacattggtaactcacacttttcaggtttccatctccaattaacaaaatccacatcttgtcttccatgtttgaaacaattcttcgaatcaggaatagttgtacaacttgaattggtataaacagagcctttcagttctggaatccagtgacctgtaaacaaattacaattctccacttcttctacacacaattaagaatcattatcaataacaaatacaaatttgatgaaaaaagaaaacttgggttgtgtccaaattttttatttttgtttaccaaaatgatcagttttgggaaagttgccttgaagttcatgaaggttttggactgaagtaaggccttgtttggatgtgaccttaaaagggattggagaaaagagaaggaagaaactgaataatacagtgattaaagcaaaagaagtgaacaagaaaggaacaatctttcccatcttggaccatttctctcttttatcatagtgtttaagtctttctgagaaaagagtacttgtagttgtagacttcatcattgaaagacaaagagaaaaagaaagaaacaaagaaagtctaatgtgtatatatatatataaaaaatgaaataatgagagaataatatgtaactttcatcattgtttttcttttgagatatctctcatgatctttggttaccttttttaagtttgatttgcttaaatattttggaagagaaaaaggtaagaaatggtaaaaaattaccaaaacaaaaagattattgttatttagtattaatggtgtttagtatcttttataagtaacactttactattaatttttaaaattattaatatgagactgagaaatgtgctaaatacgaaggaataattacataaagcaccaatttttataaaatatttacagttttacgttcaaagaatgttttttttacttttttacagttttccaaaaaataacacgaaaaaacaacataaaatcaacaacaa

SEQ ID NO: 40342 - DNA, 1761 bp, Cannabis sativa
aaacataacaactgtataatggaaaagtccaacaaatctcaacaagaaatgaggtactttccaacgcaaaggaaaggaaattgtccaatctggcatcacattctagaagaatgctagtctgttctgcttaggtcaggattttgggactgcttttaggccgtttattattaatataaattttccactaggagagttgtttatatttctgattattaattaatggaaagtttgtatttctaattattaatttattaattaatggcattgttagtgtgcggcgtgggtaggacccacccgaatcgaaacgacgaatctagttaagaatacagcaaagcaaatattgatttacttcaaatatttaatagaggaggcgcaggagcgaccataaacacggcagcctttagtatctagtagaatattccatttattaaactaaatcagtagagtatcgaaagagtatctggtaaaaaattaaagaatacttgctttgctagacgaagcaataaaatattaaaatgttatattattagaggaaaaagaataatattttaagaatacctgtgaatgttatatagtagtattgatgctattattaaaattttgcaattaaaataaacacataatttttataaaatataagtactaatatttacgggaactttctgttataaaaatatttacattcaggactaaaagtgtttttacaaaataaatttatattttaaaatacagtcaaaatggaacatattgttcactgggtcatggcaccgcgactgatatgtacattgttactgcgacctcagactcgtagcttcttgactttgaccttccatttacctgcatcatttagcacctgcgagtcacaaaaacttagcaaaaaatgtgatttaatcaaaaagacaatatataattcatttattcacatcatacaaatacatgcttaaacatttacacaattttggtacttcataaagtatccttaccagtcgttaaccacaagctacataagtcactattgttgcccgatacaacgaacgataagtaagaaacatatccatagtttcaagagtaattactcgtaacggtaacaaccaaccctcggtcataactgaggcttaacaaacatatattcaagttctcaatcataatcgagactataacaacacaattgttaatcacttaaccctaagtgatacataacacttttcttacctctgtcaagaaatcaagtgtgtgggcccacctgagtagaaacaaagatgggtgatcgcggtcctatgtcacgataaccaaaactccataaatgccttaaactaaaactccagaacaaaactctaaatccgaaaccagacataacctaacttccaacaatctcaaaataggctacacaacacctaaataacctaaaacaggtactaggtaccgccccaagccaaaacagaattcgaagaaaatcccaaaatttttccccaatagggcaaccggtcgacaggttctagtgcactagaaaactttgggttttcttcccgaaactcgaaccaaaaccatttcatacctgtccaaatattccagaacaatataataccacaaattcaactcatcccaagcatcatttattaatcacaatttaatcattactcaaaattacatactcaagtgaaaattaaacttcatccaattcaaatcaagctaaacaactcctatttctaatcaatccaaactcaaacaagcataaaaataatcctagaaacttaccctaac

SEQ ID NO: 40343 - DNA, 1842 bp, Cannabis sativa
acttgtttgtttctgtttgtaattgctgatgtggatatatgttgtaaaaagactggttataagtggattttaatcaacacttctaaaaaaaaaagcacatatatattattgattggtggtataagctaccatctactattcggaaaataatcaatcaaaccttacgcatttgattttgttataccattcgttttccgattgtataaaaatcattacatgtgacaattaatgacacctttaataaccccaatgtagaaattaattaatacaaatatatgattgagattgataagtttgttaaccaccaattaacaattcaactctattgttatggtgatcgtacactccagttgaaatcaagcacaaacgaaagtgctataaacaaattaattaatgttattttttttaataattaattaaaaaagggttgaaagtgggtgatgtttactcgtgtaattattatgagcattaacacagtagataccttctctgtctgtgcctataccatactactctatagtactactgtactacttatatatagaatgtaatgcagttgattattaagagagaagttacctttgaattatattgctttatattatatggtatagctcctcttggctctataaagctgacaaagctaactagctacttaattgattcttcacaatacacttcatcaaacttaaaaaaaataaaaataaaaaaatatatttgaaaatgctaaaaagtaaaaacaccttgtctgctttgagttaccatacacactagagtatcaatataacacacatctcaaaaccaattaaattactttcacattatccaaccccaaaaacaaaacctaactatacatttcttctttccgtactatataaagtttgggtccatacaaattggtcttgaagatttaaatgaacagaaataaaggttttgatggtgagttaggtgggtttgactttgaatatggatattatgatgatgagattcagagtcttctaaattttccttctcaaccttgtgatctagatcatcgacagtttaataaggttagctgagtttatgttatcatttggtgataagggtgtttttaattatttatagtaatatggccctgcctctcctgtgttcaacagagtggtaaaagttcagaagagaaaagaagtaaggctacattgtcaactactactagtcatgaaaacaacaatagggaacttaaaagggaagaagagctcactatgatcagtagtcacagcctttctgaaagagtacgtacgtttttatatgtgctttatatatatagatacatatatatatataacccaggttttgaactttcattattaattgttattagttgagaagacaaaagataaatgagaggatgaagtttctgcaagatcttgttccaggatgcaataaggtaataaggtcatatgaaattggattaattatttatgtatatatataatgaattaataattgtctgagttctttttgtagatcactggcaaggcattaatgcttgatgagattatcaactatgtccagtcattacaacgacaagtagaggtatatgagtatagcaagtgaaactagctagctagccatttctactaattattattaatttttagaaatatatatatatatatctttgcagtattaatactatcaaataattttatgtaattatatattgttttgtgtatgtatgtacgtatagtttctgtccatgaaacttgccacttactcggagatggaagtgttgcttttatcagaagaacatcatgtaagttacacaaatattcattatagttgacccaaaagagatatatatat

SEQ ID NO: 40344 - DNA, 1751 bp, Cannabis sativa
tgtcaaacgcattctccgacatcttgctggcacactggactatggtttgcacctcatcaaagctcctacctttgatgttcaagaattttctgatgctgactgggctgctgacccagatgacaagcgatctacaactgatgtttgcgtatttcttggctccaatcttgtcacatggcagtccaagaaacaaacaaccatatctcgatcctcctctaaagcagaaatagaagtttggctgctgttgttactgaacttagttggattcgatctctcttgtttgaactcaaaattcagcaaccaaccattcccaccatctggtgtgataaccaaagttctgtcctcgtggatgccaatccagtgctccatgggcgcaccaaacacatcgaaattgatctctatttcgtccagaacaaggttatccagaagcaaatccaagtgcatcatgttccctctgaacaccaactagctgatactttgacaaagcctatttcaaaggttctcctccatcagagacaaactcagtgtttcttgcctcactacactgagtttgaagggggctattagagtatcttagtctaggctgtccttgctttccttattttctgttagttggttggttagtcagttaactattctaactgtctaaccgactctattgtagctggctttcttggttctctttatgtatataaacctctgcacttggattgatcaatgctatgaatagttctcttctttcactttctaaaacttctacacaaacaactattttttttaataattaaccacttttattaaaaggaaaaaacggatttcatcctttaaacaacccgcagatttcactttggcacatctagcctacaccgcaagagcatcaacgattcaaacaatgagaaatatgagaaaagataactgtttagtgtctggaatcaaggagggagctagaggggtcggagggtgccatggtcccctatttttttttttttttaaaaaaaaaattacataaaaaaattaatatattttttttttatatgattcgccctgtaaatttttggtgtggaatagtaatagaaacgattgagcatctatattattttgattttgaatgccacatatagcagcaagtggctacaacaaatgaaagtttggatggattggcatactacaagtagggctgacccattaagagatttttgtgtgcgttatatacaaagtggagtgtgagagttattgggcctatttttacaaaagttcacaaaaagaataccattttctttgaatgcttaaaactatgagaaatttatgctatttttagtaaaattttaacacttacgttaaagttataatgtatatatatttacttttttttaatggtgttttataaaaataatactaaaacaaccaaaaacaacataaaagtaaaagaacaataatatataaataacaaaaaaggaaacccaacaaaacaacaataaaataataaaaatacaacataaaaataacatgaaaacattaaaatactaaaatttctgtaaataaaatcttaaaaaccgtaaaaacatttaaaattacgtgcaaccatattttaatatttttttattttctttgtatgaaataatctctaaaaatatactatataaaatttttgggccctgagtttgggtgagtcataatcacaggcctagctcatcttaactcaagatcgggcctcactataatttttttttacttttagtcacaataaaatttat

SEQ ID NO: 40345 - DNA, 2383 bp, Cannabis sativa
  modified_base (2346)..(2351): a, c, t, g, unknown or other
gggcccatccccatgaggaaaatgtgcatccctactcctgactctcctccctgccttcttggtttgatgaggagacaaatatcttttcttgagcaggtttatattgattaagtgtaacttttgtcaaagagatcatattgtgaatgcttggatcttttttattccatactagctcatttcttgttttccaaattactcaacacagtaccgcccccaactccatctcctctactttccacaactaaacactattttgctaccaattcgcaaaagatccctatgcacttgctcgagctgatctcaaaattgtgtcaaattttgtcaacaataaatacaaccataaaattattgtgtcaaatttaacacaacaataaatatgattttaattataattttaccactaatattaaaggttttaatatctttttttaatattataactttatttaagaaatcacacaatttaatatttaatttatcaataattatattaataatattttacttcatatttttatttacatctaaaataatattatacatctcactataatatatttgtttattttctcatgttaaatttagtcctatatttataagaatcttgttattaggtactagtagtagtagtacttagtatttttaagatgtattattttacaattaattagcgatatatttaaaattattacattaaattatgtaagacctaatattcaattgtattaataacaatattgacactaaaaaaaaatactaatctcatattttttagacatttctcatcttaataatgaagatagaggtagggatgcattgaagatagagctagggagcacaatcatgataacctagttcaagtttcctaattttatcccttaaaaaatccttattttacttccttttccataatatcatgaacatgttcatgtagcaattgtcaatttttttactcctaaattagcttgacattcacaatgccgtgtcatacttgtcttttcttcccataatacaatcttatcccaagattcaatttcttttcacaaactatatccaaaaatatataaatatgtctaattatattattaattttaataaggaaattataagatttgttgttctatttaaaagggttattatctaataatattgagataaaataatttgaaacttgtgaaaattataactttgttaacccaggccagaaaaaaaaaaatctttcattaatcaaccaacttttttacaaccaaccaaacacaaaaaagctaaaaaattaaccccaacaccaaataattagagactcttagaccatccctagtgtaaattttatactaaatttaacttaaaaattaattaatgttatatttagttgaaattttataattatgctccaatacattaaacgtaatataaattttattttaatatatgtatgtaaaaaagttaacaaaaacattaaatttttattgaaattatataaaaatcattttaaatatataaataaaaatataaaaaaaattattaattacattaatgagtggtgatagaataaataaaaaaaaggaattattacatgaaaaatataaattaacactttatttacaaaaaatacatccataaggtgtgagcaataattttatctttaatggacttttatttaccaaaataccacttacacataaccattcatgtcggtccaaaccactttccaaccattactcttttgaaacccacgttcaaaacccacaaaaaccacctcccagccataatgttcaccatcttcttcttccaattgcctcctttatcaattttttttttttatatatatatatcatcttctgcttctccatctccattgccaaaaaaaactttaaaaatatgtcataaatcagttgttaacaaggctaaagaggaacatccaatcatcaacgatgatgaatccaatttcgctccccccatggctaaaggtagtcgtcatccagtgaagacgaagtggaatgtgtttttgcctgaaaaaaatttcaacttcgacggaaagaaaaagtcaacaattatgatgaaactgtaatgcaacagttatatccgttgcgagccaactaacataaaaccacaaaacaactaataattctacatatttaatacaaacgaatattacaataatcgtattttatttgttcatgtcgcgtattcgacaattctgagccttatttttataatactataatattgtagtagcaaaatcattattcaactaacgtacaacttaattgcaactaaaaatgttaaaaatgtgactgtgtatctgtacgaaactatttgtcagtatttttttttttgtcactgatnnnnnnttacttgtaccttaatagtaatatgtggagaa

SEQ ID NO: 40346 - DNA, 1744 bp, Cannabis sativa
ttttttttaatatatatggatatataaatagattttcaatatttctctcacacacatcaaagtatttttcgataatttgaagacatacagttttttttttataaccgacgacttcaccattgtcgataattttaaattttttatgatatattcattagtaagaattatttgatgtagaaaaagtattttttttttttaataataggccctaacatcataaattatattgttatgaaaataattacatatatacccaaagagtgtatgttatttatacatatataatattagttttattttcattattattatttgttaaactaatacaagtaatgtcattgttattattattagttttgatgcatataatattgaatatattattcatataattctataatgcttgattgattgttagtatacatatatataattgttagtatacatatatatatatatactagcataaagttacgtataatgtacgtatatttaattatacacttagttttcaaggactttaagcaaaattttttaaataagcagaattgaagtattgagtcatcccatatatcctgttcacattccaaaataattgttaatattacgtgtatatgcatgtatacttaattcttaaaaaaaatgtaattttgaataattttacatgatttatgcaaaatatatattaataatttttgtaatcttatatgtttaaatggaaaagaaaataataatattataatatttgcataatattacttggcacataagatcatccaaattttagaattataactattagtttcaatggcacttttatttaaattagattttaattataaatttaaatataaagtagttactgtggcttctaattctttgcactttggattgtgatgttataattgttttctattgtctcttgaatacttggacacccgagaatcaatttctttaatccttcactttgttcatttgcaatactaaatcatgagatgtatgaagtttcaaggattcaatgatttgccttatttattcttcctgaaccaaaaaaaaaaaagaaaaagaaaatcataggcaatcaagataagtacaccatagtaagtactgtcaaaaaagaaaaaggtttgatataagcatgtaagataaacaattgcaacactatataacattatttaacaatatctttatttgaggatgaaaatgaaaaacaagacacacctcatttaaaatacagtatctaatagctcaagtcctagtgttatttgaaaaatttggactattgagttctggtaagtatcctccaaaaagaactttaaatagtcacattacaacttcacataccaatgaattttaatattaaccacttaatatacaatcaaataattattattttcctaataattattagtatagtgttagaaggttaaaacctactgaattgtagaatatcaagttaagaaattatcatctggcataatacatacatctattggtaattattaattatatggaaaattgatttccttaattttcacactatatttttttaaagaaaaaaaatacaaaataatcttcaagttatgaaagcacacagatgactaaataaggtaagaaagaaaaagaaaaaaaaatgagtgcatctcactcattgaagacatgaaatgtgagaatatcaagactaaaaataataataattaatagtattagagtaaaaaagatataaataattaaaagtcgagaa

SEQ ID NO: 40347 - DNA, 1892 bp, Cannabis sativa
  modified_base (29)..(37): a, c, t, g, unknown or other
ttaaacaacatacttgtgagtatatctannnnnnnnntaaaataatttccaacagttgatacatcgttggaagacaccaagtacaaaaacgacatataagatcctttacctttagaggattttttagttgccacaaattacagcaaaacgcagaatttggatcatcattcccacccctttaagcattgtagcaattgatacgcactcttcactttgtagaaacccgaagcctccctactctaataaaagcaatcatccatgtcctcccctattaaaggaatagtaaaataagctgcctatatcgctcatcaaactaatcacaatcacctcctcatcccactggttaacatcaacttgaagtaaactttgcactaccttacgaccaatcctggatggcgagaaacaacatacgacaccacctcatgaagtaaccaaaaggagcctccaaaatagaggcatgtaacccatcaccaatttgcagacgaaccctagatgtaacaagaaacttagcctcccaaatactcatccaaacaaaactagaattaaaaagagcttgttttatcttatttgtctttttcattacattcatttttttaggaaataatatattttaacatgttgcacagttcatcatattttataacttacatgcattaaatactaagataacttaataaataaaattattatatatatataacttaacctttaactatattttaaccaaataaattagattttctctttttatcaaggtttttattataattattttaatttatacttaattaatcaagagaaaaattcaaatagtacgatgagagatattttatataataataattgttattcatgtttctaaatagctaataagtatggcatgagaatggcccactcacccatccatatagatcagcgacttgacccgtccatcaagaatggacaaagctggtcttgacatctggcttcgtcaatactaactcataatgatgaatccagagagcccaaacccgaagcaaccaacaaacggtcgaagagagaagaagtgtagatcaaagaaggatgccctcaagaggcaccgagaactgaatatgaaatagcgtccaggaacacttaaggccacggaagccgaccaacgcgacacaattctggcacaatcccgagaaatcaggcggcttgtccccatgtgttagactgcagaaaggcacgcatcaaaaatgaaatcaccttttcgaccaacgcccgttgacattctctttcttaaaactaacgacacacatgcgcctatcattgtcaatagtatgttcgtgtacggatgaagaatacctacaatctgaacctcacttacctagtctaacagccaatattatattgtatttacctcattagtggacttttaacaccaaacagaatcattattctgggtccaatcgatccactagccaaacgcctataatatggctttatcccttcatgaaaagggttggaaaatttgtatatgtaaaaactagtaaatactccatagtcaaagagcttataacattgacttgtggactaaggctctaaccacacaaaaatcccatcttattttcttcggtatattcttcttttaattcggtttatgaaaatttcggtaaatattttggtactttcattgagctgaagaaagatcttaccatatctgtcatctataaaaatggttataacaagaacgacgattggaaaaccagtcactgaaactactcacaacaatgccaaaaactctaccatagaggttatgaaccctcctcctccggtggacgctttgcaggctaccgtgggggaaggtgatgttggaaattattttaccaagatcttagatctactcgcaagtatgttgtttaacaccctaa

SEQ ID NO: 40348 - DNA, 1458 bp, Cannabis sativa
cggggatggggcggggatgggggtataaataggtagtggggatgggggcggggattgcattccccgtacattaaccgcccaatttctatctctaattatgacttatattacaagtcaacccaaattatttcagggaggacataaaattgataagaaagataagaaaaataaattaacgatgattataaattatttaaggatggtattaaaaaaacaatataaactaataggttatatgaaattaatattgattataagctactctgaaaaaaataaaaataatttttttttcaatatgctaaaataaactaataagtttattagcatgtaagatggtatgaaaagactattgttatgtaaataaagaatgaaaatttatttcaatatttcaaagtaaactaataagtttatttaacatatttgagtatatgtatatctaattataggatatttgatcttatcatatcgtttttattcatttattgttttctgatttgttcaaaaaacttgcattgcatccattatgtaggaaattattactcccaatttccctacacacagcaaagaccagtcaaagaaacccacggtcaattaggccttttacccagtcaaagtatcttttgactccttgatattaaaaccccacaaaacgggagcctcccctttaatcgaagctacaggttgtttctaaatatatatcagaaaccctaaattcacatcacatatatatatatatctcattttaaccttaacacataatatacaacagccttacaaaaaccttagcagcagccttcgttcttcattgttcttctctgaagaacatgaagacagatgctattacagtccagaaaaataaatctcagctaagaaaaataaacccaacccgattgcacaaataccccagaaatacctgtaatcaacctagatctaaaccagaaaagttaatcctttcccaaaccgatttaaacccagaaaatcacatacacaaacaataatcaaacaaacatatcaatgaaaaatacagaaaagaaaaatggagaagaagacaccggttttatagaggttccccaaaattgtgcgggtacgtcctcttcgagctcgcctcgttccactatgattcttcaatgttcaagagttacaaagcatggattctaactcacaatggtaagagtggtaatccgaatatattactataatttgctcttcttattcttctctgtttttctctctaatcacagtactaatttttgtgtttcttctcttctttaatgcatgaacaacacccctgactattggatcttcgaaccaccaccttggttccaaagcttacaccattgtaagcctcttccaaaaagccccaaaaaacaagtcggttccccttgtgaaaaaccagatctgtttttacttatgttattctgcttttttaatttatgtgttgatgtctttgtactgatc

SEQ ID NO: 40349 - DNA, 2399 bp, Cannabis sativa
  modified_base (2365)..(2368): a, c, t, g, unknown or other
ttactaattagccttattaaaatcttacaaaactaatcacagttcattactattttataattaacatatatgaatatatattttttataatatcaatcaatatgtatataaaggagagtccagataaaattgaaatgacatcctataaattatcgtattttatcttttttcttttatttattattatatatatatgtgatgaatcagctagtcttttcattactccaaaaattcaaacctcaagtattctatacaagatttccacatttacaaagattataagaatcattccgagtcctccaagcttataacttttacaatataagagttattttaaaaaaaaaatctcatacgatttagaaactattgtggtaatatacattctaggttatatatagattactattgtttcattttaatttgtcccagttagtataatttatttattatatgagtgtggttgatgaacttaaccaataaattgtaatttttttaaatgaatgtaaaatatatttttgtatttttttaatttttgtcaagtaattcatataaatttattgtaattattatttaaatatatttaacattataaaatattaatatgtatataattgtgaaacataaatctatttatatatttatagtctatgaatttatgtaattgtaaaatatagagaggtggtgaaccatctttataaacttcttctataattattatttttttcttatttttatattctttttaatttattttaaaaatcttgatgatatgactacttgtaggatataaataaatgaattattttactacttgtatttatatcaaattagtattttctattttaaatgagtgatttattactcccattataaccaaatagttaaatttttaaaaaagaaggtttgtggatatcttttataaaaattagctattttcacttcaattatattattttgagaggtccattatacaaaatacatattattaaaaaaaaataaagataatattaataattttgtagtaccgtatagtattttttttatctatggattaatttaatttaaaaattttaaaaagattattatttattattttatataaagatgaattgatcacatatctcttttgagataaaagataaataaataaaaatattagatatcaatatatatatctctctacaaagagtcctttaaaaaaactataatatttagttgaaccaaaaagaagaaaaaaatttaaataacataataaataatttaatttaaaattgtttttaaataaaaaatctaaataacataataattaagttaattttgaattactttttaaattaaaaattaaacaaaaaagtactaaaatttaaaagaaaaaaatctataattatagaactacaataaaatttatagcaaatatttttatataattcaaatttataaattttatattatatagtaaaaaaaatataatttttatagggtaaaagaaataaataaaaagagattacttgtttgtaatgaatattaagtaaccttgtatttgtgctaattacaaaatacaatttttttattattacaaatgataaatatcactttaaaatatgcattataaaaattattgatttgttacttcagttttcttaaataataattttttttatgaattagaggaatgatttgaattgtttctttttattaaaaattaaagtttaaatagtcttttaaaaataactacatcatcggttacaagtacaatttattaaataactgttattatttttatttattttcttataaaaatatatgcaatttatttttgttaattccacaattttttaatatttattacaaaatcattatctttctctgtattttaaaaatagcacattatgtttcttatttccatactattagtttgtttataatatctacatcaaaatattatattttaaattatatatataatatatgcaatagaaatactaatctctgatttgttacaaaaataatttttaaattgtaattagttatacattttttaaatctcatattaagaaagtatagctctatatgagcataattatgttttaataaaatatatacatataatttataaattgttttatgtaaaattaataattaatacacgtataaatattatatttagttaaaaataattttattatgatatagtattaaaaattatttatttttatttttgttatattattattttttggtgttttagattttttttttctaatctaattctattaagttataagtataatctttcaaataaaatataatttagttggtggtgtattcttagatatagtggatctaatatatatatatatatatnnnntagcaaaaactacgtgcgaggcacgtatact

SEQ ID NO: 40350 - DNA, 965 bp, Cannabis sativa
tatgataatcatactagggtttgcgactataataatcataagtggtgcaagagtactcacatcattttctcaactctatcattaataattcctcactaaaagctcactttttctattttaccttacacatttattatatcagattcatatatcatcttttatatattttctctataccatatgaaattatttatttatatatatattttgttcatttttaaaaaataaacaaataataatagtattacacacatattttttaaagatttgaaaacctaatataatatttataattcaatgaatagtgcttctttacatgtagctaagtactattcatgagctaaatctttgaactagctgtaagaccatttccaatggaaaatttaaaaatttgcagtaaatttagtataaaaatgagtttgtactatttttggcacaatatttgcgattgtgctcaaatgcacacgatagggctgatcatataaaccgtcaaaccacaatttaaatttggaccgcgataatttgaaccactgtagaccatagtcagtgagaatgtttttgttggtctggttaatccagaccattcacttcataatggtttagttgtagtttgtaataaataattaatggttaaaccaaccggacattttataataaataagtaattttttatatatgtatatatatatattacatattgactatataatgtaataaaaaaaatcaattaattacctaattttgccattaattagctaattggattaaataggtttagaagactaaagatttaactttttttgtttgtcagcttttaaattaaataaattttagatttttatattatgttttgattttttacttattatattaaatttatactttgaaaataaaaagtaataaagtaaaaaaaaaaaaatataaactcccttaaactatgatttagcttgatttgatttaataaa

SEQ ID NO: 40351 - DNA, 2847 bp, Cannabis sativa
agttgaaaactaaatgaataagattcatttatataacaccagattttgttaaacctttgttagattataaaatagtcttcccaaaaatttagaaaggcagaacaaagagtttctaaaagcctattagtctctcttaaacatcacaattaaaagagtcttaacaaagaaaatacctgaaaataagaaagaaacttctcattcataaaaggtcatatcagtacaaagctactaataataaaaagatagtcattcttatactaatactttaaagcaactaaaaaatctgtttttcgttaatagataatgtttctaaaaatggtgaaatccagaacaacgagtccttcaaatttgatattctttcaagattactatctttagaaataactctaagatgcttccaattaatcaatggagaacgacataccctcttcaacttttctaactaaatgagagccttcatacaaacatataaacatattaatatctttatatataaaaatgaaaaatgtgtttatatataaatataaatattatttattttaaaattaatttaaatatatatataaatataaatattatttattttaagttaattcaatttatattaattttaaattaatttaaatatatataaatattgatatattatagtaatattattattttttttttgttatttttaatatttaaaatatgctcaattttaatattattcttttagaaaaggtactgttatattaagagtgttttgtaaataaattgaggagattattatttaaatattatttatattaaaataaattgaacacagaaaaagaagaattgtatttaattgtggttgttgaacttagaacgattttagagatcaccatgcatttaatttggtttcattaatgcaaagagcgagacctttggttacttatcctgcattattgaataatgttaaaagcaccttctttagtgtgatagcattgtaattaagtagcgggtcccattagggaatatcactaactaatcgtaaaataacacctatagaaggtgctaggcactactgctacccaataacaatgttcagcattataacacttgtacaatgctttagttacctttcccttaatggtacttaattgagtccaaacttgcatggatcctatacatataagatgataatttatataatatttagagatcaaactgaagtagcaaccttaattagtgatcaacaaaatcaaccatgaagtttgtttagtttctttgtttgtatcctcctctaaagtatcaacagtgttttgacatgtaatctctgactttcaatctcagtttcattcataaagaagatcattcattgttcccccaacccccagtagtagacaagtatctcatggtggttgatcaaaccttgtaattcttggtgtgtttgtttcaattattcttggttgatcatgtgttcttgatcaagtgttaattcaccacaaaaatacataattgattgaatataagaggcagagtccttaaagggcaactctggaccccaattgagaatggttgctgccaaatcaaatctataagaaactcatcactgacaaacacatcaataaagaagcaaatattctcaagtaaatattgtgtattaagttaatggtattcttttgtttttcagattatgctcaatggtttctctctactcctactgttgtttggcttaagctgaattgcagttgtggctcggaatcataatgctgaagtggtgtggattgaaataaagtgcttacataagatttgttaattccctttgttattctgaaattgtgattagttaacacacttgatgatatttgttttagatgggttgcttatcaagtttaaagtttccattcagaatattagctgataaatttcatatgttacattcaggacacaatatcataaaaggactatagtaccattttcttaagctaataaaaaacactcattcttaaactcagcagttacaatatctgcattttgtcaatggacaatgtttctaaagaaggcgaaatccacaacaacgagttcttcaactatgatattctttcaggattactatgtctagtaaaaattctgagatgcttccaattgagcaatggagaacgacataccctcttcaacttttctggccaaataagacccttcattaaaacatataaacatattaatctaaagacagaaataaggttacataatcaacaaatcagtaaaccaagatccatcatagccattattatatcctctctcacaaatcacaacttttccactcaaggaattagacatatctattgatatgcttagctccatatgacctccataatagaggtattctaattcaggaacagattcaattctaatctttccatctgtatcaccattcataagactgatttcattcattaaactgaaacttttcaagtgttgactcgagattttgagatgggagtcatgtatattgccggtacacaaagtcaaattctcaagaagaggattattagaaataagagcatttagtgataaccgtaaatcatcactagtatcatcaaatgagagatttctaattttcttgcaagcagagaaatctatattgcatgtagactcaccacatatatcaaaagattcaagatttatggcttcaaattgtaagtaatccccattatatgtatcaatcagctccaacggctcgaggcttaaactttcaagtcggtgcttatcaccactgaacctctggtttgtggggcaattacaacagcagcccacagtgatttcaaaaatgtggtctttcaaagtgattagaatatgaaaatatgataatcttaa

SEQ ID NO: 40352 - DNA, 1439 bp, Cannabis sativa
atatgcaatcattgtacagggggggacaaccatagtgacaattgtgaaacctatacacatcaagacaaataagagtaaccactaattaactttcttaattcatttcctaacaggctgccctctccatctatggaagtgcccccttcatctcactttctcactctttctcgtctaactccctcccttgcctaatcgagctccactcatgcatgcagcagattacagccaatgacaaccactagtggcaagccgaggtaactctctctctccctatcaacctctttgtccctttgattttattcttttcaagcaagtgagttgtggtagtgtagtttaaaggtcccgcttcggctgcctcttttcaagatttgtatgttttctctctctctctctctcacacacacacacacacatttcatagttgtcgttagtaatcaatttttattttcttgcatctacagatgatgtcaaattgttttgtgtaaaatatttaggacttaatttttgtatttatttttcttttttttttttttatgaaaatttagtttatttatgagatatgatattaaattttctcatatatattttggtaaagatagtaaatatattttggttcagatcaaatctttttattattagtttcaatcagtaaaaacaaacaaaaacatttcaaatgctctaaacaatgatgttttatactattagcgattgtttttaagagacacaacatttttgtaccgacggttaggaatcaacgttaatgaaagtgaattattttttgtcgatgggtcttacgaatcgatggtgatattatagccgattattttaaataatcacctaaacctttattttagtagtgaaatattatgtagattgttaagtatatataagacataaattaaatataatttttttaatatactaaaatagaagagtaatttgcggtatgaatatttaaatttaactcccagatacaaataaatacctatgattattttttggaaataataatatttaagttataatttttgaaacttttgtaggtacctagctgttaaaagttaagtaaattgccacgtgacaatttctgattggtctaagtcattaaatctttattttttttaaaaaaaatatcaaaataccaataagaaaatgacacgtggataatgacttaacatttaacgatcaggtacctatagagtttcactaatataacttaggtattattactgccaaaaattaaaattagatatttatgtcgcaaattactcaaaataaaaatatccctactgaaatagaaaaacaattagcgccctatcataatacatacataaatttatatatatgcactatgagtagtattttaaatttttatatttaatttatttatctaattagaaaattttcttattttaacattatataaatttaagttgttc

SEQ ID NO: 40353 - DNA, 2938 bp, Cannabis sativa
  modified_base (1232)..(1246): a, c, t, g, unknown or other
  modified_base (2276)..(2281): a, c, t, g, unknown or other
atatactaattagtatacaaaacactacttactacttacaaaattataaagtaatactaatatactaaaaaaatacaaacacattataaaatataaatattaataaaaagataataatatattaatcgggtccccctcaaggcggggagtgtaatctccgtctccgtcccatttaatattcaggaacaaaaaataatctccgtccctatctcgttccccatttagacaaagaatccccgtctcattaggagtagggttgacaaaacgggtcagactcaataacacaactcgaaacccgcacgagatttagcgaatttgggtttaccttaaatgttcgagttgactcgtgtaacccgattaataaacgggtcgtgttcaggttgacacgactaacaaattgactcgttagcaacctagctagttaaacgtgttgcatacttcataaacgtgttattggttcacatgtctaaacaaaatatgcttattataaataggttacacgggtcttgccgtatcaacccattaaaaaatagatcgtgttcgggtttcattttctgataccattatcaaacaggtcgtgttaggatcgagtatatacctgttatacatggatctcgatacgatacgaattcaactcgtgaacatgaattgccacctcctaagggcaagtcctcgcgaggccatcccgaaagaaaaattgtgcatccttaatactaatagtaatatactttccatttcgttatatttcattttctatatatgaaagaaaagtactaatttttgtttagtcctccaacagccaaaaatgaattaactgtcgaaaattgagtgcattgacatagaagtcaatcagctttgtctccaagtggcaatatgtttaactatttgatgttaaatagagagttggtatgtgttggaaaaaccacatctacaagttttagtgttctctaatgttgtgtattgaggccacaaattctagacgccatggaaatgagtcagtcaagcataacacaggtacacaatgcaattcctctacatttgtatttctcattattaaatagtttgattcatacatagaaagaatgatgtcggttacgagattctatctcaaaatcaatttgtaatgagtgaattaacctatgttcttaaatataacttaatatttttacatttatccatatatgacaatattgtccaataatgctcaactccctttattattattattattnnnnnnnnnnnnnnnattattattattattatggtttatttgtagcgaaactctcttatactttaatttataagtatttaactttttttaatttttttttttttgtgacaaaatctctttatatgtttacttttaattgtaaatttgaggtgtcagttagttataactgttaaataccaattaaaattatcactttgttggtttcgagattttactatcacatatacagagtacttatccagttgatgtttaatgataatatttaactgaccctcaaatttacaaagaattataaatttaagagaattttaccgctaaataaaaataagagggttaaatatataagaattaaaaaataaagagattttaccacaaattgaaattattttttgttattattatgtattaggattggatttctatgggctgtcaaacaaattctcaatgaattattttgcctatcatttcttttcttctctctttttttctttgaaaagtcttttcttctctattatcagaatttcactagctgccaagcactcttgcccaaaaattcaataaagtcagaaatcagtgaggtaagtgttaagaattgcttcaaatatatctatttattttcttcttaattttcacattttataatttttttattttactttaaattctcctcttaattctcttttttattcttttattctactttattttatagatagcattaattttatcgaaaaaaatagagatgattaattaattaaaaattttaaataaataattattcactttaaaatgtactaaattatgcccattgaacttttctgattgttaaaaattctcccggaactattgaaattgttagatttaaagatttttatctaatttcattcaattttattactaatccagtgatcgtccatgtactaaatcatacttcccagactttgatatctaacaaatcacgtctatcgaattttgacaagtatcaaattatgcctcatcaatttttatccatgttagacattccttactaaaattagacaaaaannnnnnaatccaacaatcttaatagtttattagagatttttaacaaccttaaaagtttatgaaatatgatttagaacatgtcaaaactcaaagagtattaattttatatataataactaacgattcacttaattaaataacaaatgattcacttatgtacaagtaaattacggtaatgacatcaaatttaaatgtagtaactagtgattaataagagtgaaattgtgaattacggacatcaaatttaaatataatagtgtctacaaatgatctacgatgataattacaattattttaaaaatatttcttttgcgtgtttttttttatataaataattgtatgaaatttttttagagctttctatataatgttatcattttttcaataaacatttttttaaaaaaaattatacataaaaatatattttaatttatttaatataattttattgtttaattaatatttatataaaatttaaagtttttacaaacaacctcagctgaatggtggcctagtatttactagttttaatatatgattcaaacaacaaccatatatgttagtcattatttgatggtaaaccataattatatacattgactatattattcaaattatattattaagtttccatagtattacatttaggactcttacattaca

SEQ ID NO: 40354 - DNA, 1191 bp, Cannabis sativa
tatcatttgtttaatagagcccgggaaaacccaaaacaactcaaattcctccagcaattaattcctccagcaattatggtttatgttgctggaggaatttgagatgttttgggttttcccgggctctattaaacaaatgataatgagtaaggtggttgggtgcagacgcaaaacaaagctttggaggactgcgatcttgacaacatgttgggctatttggatagaaagaaacacaagaatatttgaaggatctgaaagttctgaaacaaatatctggaataaaattaaattctggacagctatttgggtttcaaaaccaaacattttgaggagttatcatttttagatttgactagagaattgaaatcattgatgtagaggttggaaattttatgttttatttcattttctgagttttttgttggttattgtgtgctttagtgttattattcgctaaaatattgtgaccacagttttcttccgccacaaatgagagccctcaatataaaacggggagtggccagtctaagacaatggctgttttctcttttttttcaagaaaaaaaaagataaatacaatgtgccataaccttggaataggtatatttaaggaagaaagcaaaacaacattaactcatcattaactctgttctactttttgtgtgtactcaaatataacaatgccttgacatgacccaggccacagtttaatctgttgatcaaattgtcattgtgatgcggtactgagttggatataaaccacatgtgttccctcattagaaaattatagcaattgtaaggggtgttcacgagaaactcaaacttaagaatttgtagaaacaaaccacatacttgattgtgttaagatacccaagttggatgtttctagtgctgtatattttagaggaagttagcattttggtgatttttatctattaatatttacagtatcaacaaatctttttggcataacatatattttatttcaactttgtgcaggttcgtgatcgctcacgtcttgtaaaagtgacaaacacaaaaccagcaatcagtcttctgtactttggaaaaatagtctttgctttcactctgctatttcttattggtgcaatgttcacgttggcactggagtatcttcctgtgtttatatcatttgttaattcctccgtctaaattataagttccttcttt

SEQ ID NO: 40355 - DNA, 1679 bp, Cannabis sativa
ctccaagaaaagtttagagatctagaagagtactctgaagaagatgcctctgtggaactcgtcaatggaaacaataggggaaaccctactaatgctgaaatctcaactcctacaaaggacaagggggaggggaaggtgggtgaccctcaaaacccaatagctcctgtaccttctaaaaaaagtgtgaatccaaccaatatacatttgcaaatgaagaaggccaccgatgcctctgggcttggatgcccttttgctctgaaaggtcttgttgcacaaaatggggattagtgcgaaagtacccaagtctaggggaaggaaaaactaccctattgatttcgttaactaggatggtgggatcgtgggacgatactctcatgacagttggtccactatgaacttccaaaagcgtcttgatgcgaagtatgaaaagctaaaggagaaaaggtgaggccacatagaaatgacctcaggaactatttaaacgataaggctcacaggtgcgaccttctagatagtgacacaaagaggttggatgagcagattgttgccttaaccacacttgtttaaaaaaaaggggtcctatctgattcagaagatgaagatctaaagttgtgcgtcaggcggattgcagaagcctcactcttggagaactttaagatgccctagatcaagttgtaagatggtcgcacaaatccaagaactcacctatcaaagtataataaaatgatgtaggtggcaagagtgagtgatgatgctaagtgtttatgcttctcactaacacttaccaagtccgcaaaagattaagggaaaaggctcgctctcaaatccattcatagctgaaaagatttacaatctactttttcgaagtagtttatagccgtcgggactatgacatggaagttgggtcgatcaccaatgtcaaacgacaagctggaaaaatcctaaagaacttcattcagcgaatgatggaggcatcaacaaagacaaaggtgagcaaagacatgaaactcgtagccttacaatcaggacttacagtaggctctctgttatggggcgagatgcagagaaagtgggatgagaccttgtccgagtttatgtttagagcacaaggtatcatcaacttagaagatgcttatcatcaagccttcaaagtccctctagcttcagatccttttgcatcctcactgagttttgtcctgcaagtcccagtccttggcattcgtacactctggttgtctatggaacttctacatctgggcgggtacctacccaaacccatttttctggatatggagtggcacaaactggatgtattatcgctcccaaaaagactaagcaacaagcagaagctccagaattgtgagccatttttagagcaagagaggctgaacaaactaaggtcgacgtgaagcttcaaagaaaccaagaaagagtttaaaccaaatttcactgagtacactagcttagtagatactcgagaaaatgtgtacaaagtgacatgcaatatggtccactatcgaaagcccccaaggatgcctttagggagaaagcataagagatatcaaaattagaggtgtggatatcatggggatgtaagacacaccaccaatcagtgtgactacttaaaagatgaaattgagactctggtcagagctggacccttgggttagtggatctag

SEQ ID NO: 40356 - DNA, 3163 bp, Cannabis sativa
gagcctcgctattgatctaggtccctgagactgagactcaagctcaggctttgacccatccttcggcccccatgcatactaaagagcccattcccgaagcgaatcaagcttctgcctcttcgagccaagcactcaagactctgcctgtcgaggcagggagtactggctcgaagtacactgaggaatttggtgcgacttgttggtgtcacttcaagtcgttccttcccaatgaatggatttgatcaacaatgggaaccttgaagagatgcttgaaaggagtgtcgcccatggcctcttggtaaattcctctatccttctcctcttacttccctttttaacatttttcagactttcttacacattcttcatttacttacagcaaaccttcatatcctttgtcgcccaacggcgaagtatggaaagaacaaagtacatgagagtgagatccaaaatttaatggtcagcgcaaggctgtgaccaaggaatggaacgacttcaaggcgaaggtcactcgcctaaccaaagaagttgaggaggtaaagagacccagaagaccgagcttgaagctgctaataaggaggcgaaggataagactgaggcatgccaaaaactcgaggaggaatactgataactccaagaggaacttaatgcagccaaagtaacgctcgataggaaagagaagctgagaccattgagcgagatgcaatattgttggattatgctccatctaccaagcctggatggcaaatccaggaatggatatgggttttttgggaaattccatgggtgaagtccttgcctactaggaggaggccaagaaggtagatgaggaagtcgaggcagtagcagaagaagaagaagcactactagaaaaatgggttttagtgatacacattaagtaactctaaaactctttagtgacacttcaacgcgcgtcactaatgaaggtgactggaaaggaagtttttagtgacactccacacatgtcactgaacatttttacattcactttctgcgcgtcactataggtatataaagtcaagttttgtcagactgaaaaagtaacagcaacacctatagagtgtcactatatctttttatttttttttatttattattaatatttttaaaaaataatatttaattattttaattttaattttatatattataaataataatttatattattaatgtaatatattatttttttaaaatagtaattaaatatatataattgctaattttatatattatttaattaaattttattataaacaggtgtgggttggattgataccagattttattttaaaaaaatgatactagctttttttttaaaaaataaaactcaaagtaatttttatggtgttaatgctataataactaatcaaattcctatatacttacataaaatactcagaaggtttttatactaaatgaataaacaaaaatagaaattcaaaataaattacagtaaaatatttccaacagcaaaaagaatatataattgtttaaaataaaatacaagaacaatgtaaacccataattatgggtatgagcatttgaataaaaaaacagaaaaaataacttagttgattcaagttccaatctctatccctaacaatctgcaacagtagaactgactcatcaagccggaccattttgagcccaatcgataaagatcccaagatccaccatcgtctgtagagaaattcaaccagagagaaagagagagaacaccatataccagagatctgtacacaaaaataaaaggaaagatgagaagaaaaaaataaaagttgagcaggaatctaaaaagaagatgaaaaagaggaagtgggtacctgaatattttcggggcgaagatctcggattccagctccgttgaagttgtcgatcgtcgaagacccagccatcgcctgggtcgatctcttcgaagcccttgtgttcggtggaggaacccaatcgaacggcctgactgaggtgctgccgtgcgtttgtgtcgcgagagagggggaggcgctggtgtgtaggaggagagagggggaggggctggtgttggaggagagagggggaggcgctggtgtgtaggaggagatcgtgcgtctgagggtgttggacgcagccaacgagagagaagaaagatagagaggttatctatgtatacattagggttttctcttaaaaataacatatatatattattttagataaaaataaaaaaataaaaaaaaattgatttaatttgatatataaagaaaaaattaatatattgagatggaagagagagagacacgatgggtattttttatttatttttttttaaaaaaataaaataaaagaagagcattaataatatgtgttttttttttataggaggctatatagtgacacactgtgtgtgtgagaaaatgtgtctaccaacacgctatgcgcgtcactaaagccacgtgtacgtggctttaatgatgcgcatagcgtgttggtatacacatttacatacacgcgtggcacgtctctataggccatagtttttttttatgaaattataaatttttggttttagtatttagtgacacttcatatttttagtgactcacattccggatgataaacaccaaatatttagagtctaattgtgggtgtcactaaaaatcactcctaactctttagtgacccacccttttatgcgtgtcactatatgatgtcactaaaagtccaaattgtagtagcgaagaagaaaaactgtccaagtcttttacaatgtaggcttggtttttatttattcgtttttttatttaggaaaacggccctaaggtcgagacaatggtttgtcccttgtggcacttttgtaaagataaatttgcaatgttggatgaccaactttgcttttattttatcttttattgaatgcttcgtacttttatatttgaacttaatatatttgcttgtttgcgttttcattcacaacttaaataattatattttgatcaaatttaaaatactttaagcatttccattgctcgtattttcctttgatattatttaagtagttagtaatctactatgtgcgcgagcagttattatctgctatgcttttgatttgcgagcagttatcgattctacttcgcataaccagttataatttattttaagcaaa

SEQ ID NO: 40357 - DNA, 3210 bp, Cannabis sativa
agaacagtttgaacagtgagaatatgaaaattccataaagcacaattcttagtcttccaaacactgtaaattaaccagagaagctattaagcataaaaaaaacttccttctaattaaagcgagatattctcttctttttaatccaacgaagcatactattaagatcactctaaggagaagctatgcctgcccagatcttcaaattctctcaagacacctcctactaaaattgcagtgaaaaaagaagtgttggtggttttcatttgcttcaccacaaatcaaacaagattttccaataggtataatttaccaaacctagaaagtctatctctagtaaataacctttatttagatgtcatccataatccaaacctatgtttaggaatgcaaactctgtcccagataaaataattactccaatttttctttttgtctgatctaaaaaaatcatgcatatcagcaatagagtaattattatttattaagctcctttggttcattttactcttcataatttttttggtttggacaattcattttccaatactaattactatttgatgggcaatcataatctcaccaattctcatcttttatgtagaactcattcaaccatttcacccataaattatcttttttagaagtaatggcccacacatacttccctataacagcacaattccataaagcttctttgaaattaaggcctccttcttatttttggtttacatatttctgaccaacctacagctcctggccccaagtaattttttttttccttccacagaaaggctctacaaatttaagcaacttgattgcctgtttttaagtagtgttatacccaaaattcgactacacttcaaaaagtgacacgtgtctggaatatgaaccatctgatataataaagttatatcattaaatgcaagataaaataactcgttaacaaatacttaatagaaaatattcataattcgctaactatatagtcttaagcgagataaggataaaatgttataaaaacttgtattgacgagacactgcttgcctcggagtacactgtcaaagtatatattcatctattcgaagtagaataaatacaatcacacatggcgacctcgggttatgtatagcgaaacagtcatctcgctattttaactattaaaacttaatgcggcgaaccatctgctaacacttagcgttttctccatacaagatggacaaggagaaactatggtggtgataatcaaaacccagaagggaggaatgaagaaactaataattctactggatatatacctagaaatgaagatgcatatgatccaactaggtatgtaccattagtagaattggaaaatacacagctccagcaatgcttagccgaatctaaccgacgaaaggctgagttagaaggagaggctgcaacaactagggtgaattaaggaactaatactcagaattaacctgatccttggataagaagaccacggggcagaccttgaggttcaagaaccaggagacatgaagtaaatcaaggaaatccccaaaacacccaggaggaacaacctggtggtactagggatgttctagttgatgaacaacaaaataatcaggaacaacggcgagacgttcctcaaagatcccaaggatttattaaccaatggaatgaacgtaatgatatacaagaggaaaatgttgcatggtgagcttatgttgattcactagtgatagtgtcgccagtgaaggcatcattgaacttccattaacggtaggagagccaccgttatctacgacactaatgcaggaattcttagttgtcgatcttccatcagtttataatatattgatgggtcgccctgcattatttagactagggacagtcaattcaatcaaacacctatctctaaagttccaaacacaagagggagtgggtgtggtacgaggcaaccaattgttggctcgcgaatgttatcgcatagatctttaaaatagaagagctaatcatcaattgatggtggtcataaccgaagaaggcgagaagaaagaagaggatctagaccctagaattcaagatgagaataaccaactaaaatgaattgaagagctagaagaggttgttttagatccaaacaatcccattaaatgagtgtttattggaaagaatttggatgaaaaactaaaatagcagttaattaactttctgaaggcaaactaggatcaattcgcctggagccattcagatatgatagggattgaccttaaggttatctatcatcatttgaatatcgaccctaattacccagtaaaaagacaaaaatagcaacccttagactccgagagaaagtgggcactttaagaagaagttgataaattattgacaaatgactttatatgcgaagccttttatcgctcgtggatttcaaatcctattcttgtcccaaaaccaaacggcacttggagaacttgtattgattttttagacttgaataaggcatgtccaaaagattgtttcccactgccatggattaaccagttagtggatgcaaccataggacacgagctgatgacgtttatggatgcatattctggatataaccagatcaaaacgaatgtccctgatcaagaacacacaagttttgtaacaaatatgagactttattgttatagagtcatgccatttggtttagaaaatgatggggcgacatatcaacgactggtgaatgggatgttcgaaaaacaaattggacaaaacatggaagtctacgtcgatgatatgctggtaaagtcgataaagagtaaagatcacacgagggaccttgaagagtgctttgggatgcttaaaaagtacaatatgaagcttaacctgaagaaatgctcttttggagtctccttggaaaagttcttggtttcatagtgaatgctagagggattgaagccaatccaaaaaaaattaaggccctaattgagatgtcttcaccaatgaatcaaaaggaagtccaggccttgacaggaagaatggcagcattaaacagattcatttcaaagtcaacagataaatgtcttccattctttaatgttttgtgaggcaataagaattttgaatgagcgaagaatgcgaggaaacttttaaaggcataaagaaacatatttcgacacctccagttttggccaaaccaataatggagaaactttgtacctttatttagctgtctc

SEQ ID NO: 40358 - DNA, 921 bp, Cannabis sativa
tttcctcctccctaccacaaagagggcatcccacctccttaatgtgaaatctcttcctaatcatagatctaagtgggtgggcattagagaggatgcaccaccaaagaaccttgtgacgttctaacactttactattccaaagtttattcgagagagaaggcgctacaacacaatggggggctctctccaacgcttgagagagagataagcagatttgcaggagaatcgtccatccttttccagagtccaaacccacttatcatgccccaaaccagaaggagaccctcctttcaatatagccaaaacagtctcccgatcaaaaaggttatttagcttatgaatatcccacccaccatctgaagacaatagctcagccacaaatctatgatccccataatacgaagctcgggccttaggtctgaaatcctttaggtggggaatccaagggtcttcccatattcgagtatcctttccatccgccaccaatttgcacgcacctttcatcaggatgttccttgttttaatgatgtttttccaaaaccaggaatctgagtccttgaagccacaattaaggaactcttttccttttaggtatttagcattaagcgccctgcagcacagggattgacttccattcaggatgttccactcccactttgctagaaaagcttggttcatttctctagatttcctgaagcccagtcctcccaatgattttgggagacacaatttgtcccaagctttgagatagagaccgtggatatccttttcaaacccccaccagaagtcacacaccatactatcaattttggaggccattctattagagaatttagtacttttcatggcatacaatggcatagacaggcctacaagtttgatgagggtagcccgcctcgccttggacagggttttagcttt

SEQ ID NO: 40359 - DNA, 1596 bp, Cannabis sativa
ataatgtaaaattgtaagtcaaaaaagttatatttattattatgctatactaataccttgtcagagtattatattttgtggaaaattctacaataagacacttcatttgtccccataggatagtgacattttattagtcattaattatgttgacttttgaagatttaaactataaattatggaatagtatgtacattatataaattgcaaaagtgttttattaattttatctttttttaaaaaaaaaatagaagagatattagactttttgggaagcacatattgagcttgtggcactcaactaacacttcattaataaataaagtagatagttatttaaaaaacaataactctaataatacaatttcataatgtattttttgataaataattttttctataaaaaaatacattatgatttcttaaaggagttattctatttattatttattctagtaataatatatatttatttaaaatacattaatgtatttataataaaaaaaaatcttaaaaagaaaaatatttacatactaatcaaatctatatattaaattattaattttttttccaattttataatcgaataatctttaaatttttaaaataaaaattatatatattataatattttattaattattatttattatttatttaaaatttaaaaaaaaaataaacataaacatattagtaataattttgtattaatataatatacattttaataaaaaaaaaaattagagtaatgcaaaaagtgttattgatgtttagtatttttctaggtgtcatattaccttggcacaattaagtatcatgtctcatataatttgattaataatttttagagagtatcactaaccaatcatggtgcttacacatctagatagccataagcaccactaatgcctaataacaatgctctataataaatataagtagaaaataattaaaatataaaatgaatgcttaatattttattatatgttttctatcttatagacattaaatgcagtggcatcattgtatatgagataatgtaatatacagtgcgatggcacatttatatacgcagatgtataatgtatgaaatgtaattattataattgttcatagaatgttttataaaactgtcttactgggccttggctcacggttgcactattgtgtaagaaagtgtaaaacagtatcgagtcagccatgagttcgagggttttaaagatgaattgtaaatgttctggccaagttagacgagagttgagcccaacaaggaattgtacaaaaattctatttagtcacttcggcttgtatgaaataatttgtaatattttgaaaatacttttatgagatccctgacatgactttaatattttattttaaagtaatgtttgtttttattacaagttatctgtttaattaagtgaaatttattttaaatcacttcgtttatggactccgattaacgagattagtatattttcattttgacacgtggcgttcctctagacgttataatatttatttatcttaaatatattttagttttgaactctcgtccacatgtcgtgaccatatttgttgctcgaaatgtgtgca

SEQ ID NO: 40360 - DNA, 1191 bp, Cannabis sativa
tggatagaaaagataatgaggtgtgcgactagtgtttctttctcggtgctaattaatggtgaaagatagggaattttaaaccttcaaggggtctgcgtcaatgtgattcattatctccctaccttttccttatttgttcggaaggactttcttgccttatccaagcggctgagagggctggtagtattcatgggatccggtttgggagggacggggttgaagtgtcacatctctttttcgcgaacgatagctttgtgttccttgatggtaatgaagaagagtgtgatactatgtcgcaaattctgcatggatattctaggctctcggggcaacaaatcaatcttgagaaatcggaagtaagtattgaaagccgtatatccaaccaaatgggccaaaatcttgctagtagactgggagttacacttgttgctcaacacaccaaatatttggggctgcctagttttattggtaaaaggaagaaagaggtgtttgagataattaaagacaaggtttggaacaaactaaagagttggaagtcaacgatgttctcccaagctggcgaagaaatcctgataaaagtcgtgatccaagccatcccaagttactcaatgagctgttaccgcctcccaaaaaagctaatccaaagccttcactccttagctgctaatttttggtggggagataccaaagataataaaaagattcattggggcacttgggcaaagctttgtaagcctaaagaagaagggggtttaggatttcgaagtctgacggaattcaatcaagctctcttagccaaacaagggtggtggttgatccataaacccattctcttttggctagagttttgaaacatagctattatcctaactcctctttttttcaggccaaatgcccttcgggagcttcgtgtatttggaaaggaattacttggggttgccaaatcattaaagaaggagcccgttggagagttggaaatggaagaaccatcagaatttgggaagacaagtggatcccccgcgcaaatggaaccatcctggatcgtcgttcgggattagctctaaataccaccgttcacaagcttctaaatgaggagggcgactggaataaagagactattaatctttatttccaaaaagaagatatcccatggattttgggcacccccgttgatactcaagtggaagacac

SEQ ID NO: 40361 - DNA, 1318 bp, Cannabis sativa
  modified_base (605)..(605): a, c, t, g, unknown or other
gctagccagacttagagaggccgtgtgccaagccatccaaactaaagaaccacgcgctactgattgtgatgtattcactcagcagagacgcgaattcctaagatggatggatgacctagagcacatccttcgatctcattaggtggagctagatcgctgcaacaaaaaatccagtgacctgataaggcgattcaataaaagaactgctggaagaggccaggatctcattaaagatccactccaaggaagagtagtcgacagatcagggagggtctacttataaattttccaaccaagttattcgggatccaaggcagaccatcccctacctgaaggaggataggccttgccacaaaggtctaatggcgagaacagctagatctcgacaaccagcagtctgggggtcggccagggatcttaggctcaataactgcccccattggccaacccttggttggccaaccatctagtggtgcacctctagccgacccgaggagacaactcccttcccaaggcatttgggagcaagtaacccaaaggttaatcttcaaccagctagggtcaggaacaggtggaaacaccaaaataataatttgagaagtgangatcacttcaaagacctaaatccaccaaactccagcaactggtgcaatctacctcctatcaacacaccaattgcactagcaaccgggggatcacgggcagccaagccctacctagtacagggttggccaatcatggatagctgctaaccaagaccaatctccatatctaggagtagccggccaaggccagcaactgagcacagggctggctggcctccaccatacgctctcctagattatggttaacaagaccttagcacattcgagtctgcagctcatccaaggagggctagtcagcaagtccctgcaacaatggatccttctgtgtaagcacagttagaccaaataagggacatgatcaagggcctagctggtccaaaaccttcaaaccttgagctagacaggtcaaggagatcaccattctcggcatacataaatgccttacccttgcccaagttcaagatgctgggatggaagatgtatactgggcgagaagacccactggcacacatcaagtactttgagatgcagctcgatctctaaaagatcactggtgatgtgcggtgtcacatattcccaacaactttgtcagaaacagctcagtaatggtacttcaagcttatcccaggaagattcaattcttggaatgagttttctcaagaattctacacatagttctcatcctcaaggcttataccatcacagctagaaga

SEQ ID NO: 40362 - DNA, 2687 bp, Cannabis sativa
aaggtgaaagagattggcgatggtttaggatttaggagtgagagaggtaaaggtggttggagcttgggttttggaaaagggagagtggttttggtcatagagattatgaagcttacgccaactttgttaatgggggaagtgaaggtggttaagggtggtttcgagcttgaagagcttcaatggcaggaattcaaatctggtctcgacaatgttggtctctcttggttaaacaacaacgtttagatgacaatggtttaacacaaacgacattaaaagaaaacaaactgcatggttattgattgactttaagttttgtagttattcatggactttctacccactctttagagtgacgatgctagtttggactatgctttgaaattttagtttagttttttttttttcttgtacatggtagtattgtacattttttttctctttaataaataaatttaattagtttcatttgtttgagaaaaaaaaatcttatgctattttcttattaatttcccgtttaaatatatgttttttgtttggtcaaacttgtatcttaaaaaataaacactttgttttgtcaattagtagaagaaagaaagaaagagggaataaaattttcaattggcaacattattttttttcttggctcaaattgccaacaaatattaggtgaaaggttaggtaaatattaagagagaatagtacaccaacaaaggcgtgtttcgtttattagcaaaattaagttcatcaacaagtagcacatattatacatggatgctagtggtgcctcaattattaggcatgcatgtatatgttagttcatatgtggtgtggggtttaaggcaggtctagctcacccacatattatcgtatgcatatatatataaagaataaataagaaagacaaaataggcttgaaggggagacaccaatattggaagagtaattattgaagatgatgtatgtaaatgaataaatgaatgaatgaaacaagttgactcaatttttgtcataggccacacattatctgccgatagtggccgagggttcatgccttgtttccaaatcgggcctctccaaacgatttttgtcgaagtaaaaccaccaaaagacaatcattcatcacatgcatactttttctttgttttcttcggttgggtcaggactcgtggtcaggacagagctgattattgaagtctttatatgctcctagctacaaatccaaatgattaattaataaagttagagcaactccgggactacttttgagatcaatttaatattaactttacttcaattttgtgatctagtttagctaatttaattaaaaaaattgaatttctaacataaattaattattttatttgtctgaaaaattgctttagaaataaccattttatttgttctaatataaatggaaattccaaaccacgtgtcacgtgagaggttaggccccgcaaaatattattatttataaaaaataattacattttgtgtcaaaataaaaaattgccaaatgaggaataccatctactattaaattttgtactaaatttgactcaaaaaataagttaatattatatttgactttattggttatggttacaagttttatcatccgggattggaagctttgaattcggagagcagatatcggaagcttagtgtggatctagaaaaccctgtgcggaaggtcttgtaaaattcagaaggtgcttccagataagcttatactgtgtatggaatctttatcttggatagcttgttattaatccagagatacactcccaaacaacttaatgtcagtcttgaaggtccatctgggaaggaaagccatgtatgtatccagaaggcttttgtgtttataaagcttccaaattgttcgtactgaaagtgtgtttttcaagatgacatattgttgcatgagctggatcatttaaggcggtataaatatgccacgataatttaggagatatttttagcaacaatgcaaatctatatatagctttaaatctttataatctgtgagagaatcagaccagatttggttgtgtgaaaattgtgatagtgtaaggtagagtctaaactagagagagaaacttcttctcgtaacctctgagaagtttgggaatattcttgtagccttgtaaacactaatatcaatgaagatatgtatgttattgttccaaccgagatatagatcattgtagatggctcgaactcgttaaacttgttgttattattttttgttttaccacttaatttattacttgaattattgagatctcctaggatattatttcttgattgtgttgcgtgtttgttggtactataaactgaatcgtaagtcattgattgttccgttttgcacaataaactggtatcagagcaaggtttataatcatgactgtcacaaaatacgacgatgttgaaaaatttactgaaaaaatgaatgactttggattatggagaatgaaaatgaaggctctattggttcatcaagggttgtatgaggctctataaggagagaagtctcttcctgatttgatgtctgaaaaagacaagaagagactcgtgcaaaagctcatagtgtgatcattttgaatcttggagataaggttcttgagaaaggttgcaaaagacactattataaaagtgacttttcttatctgtgtatactgtctttaata

SEQ ID NO: 40363 - DNA, 1030 bp, Cannabis sativa
tgtgctaatatattatcattccttcaaatgtaatttaaggaaacattaagaaataaaataaaaaatttgttaccaattgaacatgatccgatctgtccttccattcatgcttgatcttgctaactaaaacttgacaaactaattccattgcttttattggaaagtgtacaactgcacaccaggagaaggttgcttataacgctttggcttaagaatagatgggagttgaggcacctgtaaaatgagaacacaacactgctacaatagctccattactatcaatgacaatagctccaacacccgttttcaaaacttagacatcccaagagaaggtaatctagccatgccaagctcttgccggtgaaatcacaatcagagggagagggactgaatggattctgttgaaagccttgattctgaacatccctatattcctacaaaagattagataaaaaatgctccacatccacaaaggttagggtaggcttattgaagacaccattatttctttggttccacaccatacaacaaataacaaacataagaggaagttgatcattattcaggttgtcaaaagctcttaacaaaaggtccttaatattgcatatattgtttattgggagaatggagaaattgaaggtcggcgcgtttccatatagattttgctctggtaccctagaagggcatgagagattgtttccttctagccattacagggagaaaaaggagtgggaaaggaattttttttcctcgaaaaagttaaaagcacatgatggaaggttttccagataaagtgtttgaattttggtgggattttcatagaccatactaccttccatcagcttctaaaagtagcaggattataggaagaatgagagagtgaagaagctaagtataatatcctgataagcctaatggtaaataattataatttatatttatagtatgggttaatcaggtaataagtgggattataattctacttttcaggtagggggccaaagtgaggcttcgaaagaggccaaggagg

SEQ ID NO: 40364 - DNA, 1022 bp, Cannabis sativa
atgaattttattattattgagagagtgttgatgttttggtatcattagtgctccatattttttataagtgacattagggctaatcttgaaatttaacgagtcatgaaaaataatatctttatgtattttttaaagaaaaatatgatatttttttaaaattagaaaaaaaaaatgtataattttaaaataggacaaatattttgggctcatgggttatgtggacctggcctaacttgtctattctcaagactagatctggatagtgctttacaattggttaataatattctctcaatattattatcttaaattatatgatattagatacttaattatactaagagtagaattatactaaattataatacttttagtatttgtgttattagtggcaatctgtttcgttcacatggaagaactacacacgtgcaaagcacatatgaatattaattatgtattatgtcaaaataattattgattattattatatgtaatatgctgcatgaacaaaaagttagctagataggttgcattatcattcaggactgttcccaataatttcgatttcgattattgcaactgaaataattataatgatacaataataagtactaccactaataatatattatatttagttctatacaaataataataaaaaaggacaatatatatatatcatatttttatcaatttattattataatattttagttaatttatatgtttaaaaatatacattgaatatttttttaaaaaaaaaattatagtagtatttgttatagttataatattatttttgtatatttgttatagattagaatatcaaaaattttatttttagtattataaattattcaaaaattattgtagctataaaaaatatcgttataaaaaaaaataaaagaaaaataatcttacatgtaattttaaaagtaaaaattaactaaaaaaaattgtaattagcacctaaaattgtagatattaatgtacacctactttcacatgtatcttgaattgta

SEQ ID NO: 40365 - DNA, 1443 bp, Cannabis sativa
cactactacaatgtcggtcaacgctactgttcatggcgttgaccgacgtaaatagtgtctaaaaaatatgagtgtcagttacaaaatgacgttaaaagcatattgatttgcgtcgtttactaaaaagacgctacaaatacaaccgacgaatgaaagcaacaaaaatgaaaaatggaaatcatattcccgtctgttcattgtagtcgaataaaagctatgtgagctttaataactgacagaaaaaaaaattgtgaaagttacaagccgacgcgaaccacttctaaatccctatattcccaatatcgatcctactactgttcacatttgtcttcaacatttggaagaagaaagatctctggcgatgggcgaaattgtcgatcctccatcgtcgacctccgctcccctctctccctctccattcttgacctctactcccctctcttattctccattgttgacctcccatcccctctcttcctttcgaactcgactcgctgcccaatcgttaacgattctctctacctctctctctgagtcgcacactggtggaccatcctcctccctcctcttctctcctctcctcaaaggttagagctgatgctacaaggattttttttgttgagccgcaagcagtagtccgttgcgaacaataaaatccctctgcgagcagctagcaacatcaaccctcttctttcccagtcgtaaccaacaacacaattcacaggtaagaactaatcatattctgtaaatatatataacataaatttaatataaaagaatttgtgattttttggctaattgtctttttttatattaaattatgaatgcagaaaagttacattatatgtgtatatatatatatattaactttgtgtgaaaaaatacaatttgtacccaacaatacagaagagtcttgcatcactctaagtggagcactacttcctatcaaagattctctaaaagaagagaatgccttggaattcaaagctccaaaattttatggagaacccctcaattatcttaagtaagcccgttctttactcacccattcgaattagattatctgtatttaggtttggtcatcttcctctgaattggcttgctttaatttcatgtattgtagattatggagagttgttattagattgggtggctgtaaagtggtaagtttccacctgcacctaatggttgttcttcctcttattgtgttctgttttatgcattgtaagctatcataattatttgttttgataaactttgcacaagactagaataatctttaaaacatatggttaagggccttatggctattgttacacaaagtgctcaaggttactaaagaggaataaatattatttttttgagggaaagaaacatctagatgaactttaatgtaaaatagtaaatgtggtaatttgtttttccctaagaaaaagaaaaaaa

SEQ ID NO: 40366 - DNA, 1573 bp, Cannabis sativa
atttattggaccacatttaatattggtagatgaatttagatataattcaattagggatattagcagtaaaattacttgaactatgcgattgattatataaccataaattaattttttgacggtaaaactacctaaactgctcttccgttttggtctttatccttccgttaaattgatgttgttaagtgcttaggtgaacattctaattgtacacagtgtacatgtgacgaatttctaatggtccaaataatatttattatttaatatattataaaattatttcataaaatataaaaaataatttttaaaaaaataaataataaaaattacaactcattttctctttttctttctctagaactacgggaaacaaccaccaccacctcaacctatttctacaacaaacccaatagcccccaccaaaactaccagtccccgtcgccagccaccactgaaaccactaccaccaccattatcaccgtcacactaccattaccacctccattatcaccaccacactaccattaccaccaccaacaacaaaatttctccaaaattaaaaaaaaaaagaaatagatctctaaaaatacaaacaaacaaacaaaaatttagaaagtctcacgactccatcagatctcgaaccaccaaacgcctcgccccccaacagctccaaactcacttcctaatcctgatgtcaaagtcgaccttttccttattgttcttgccttctcccgatgctgaagtcgactagtaaaatgatgtcccggtcgcaccaccaagcccgatagctaaatactcatcgtcgacttgggacctttaggttcaaggttgacgccaaaaggagaaagaagagtgagggaggcaagcttcaaggttggggattttggggtttcaagggacttgaggtccgcctgagtgagaaggggcaagagatggtggctccagtatggtttcggcactgcacgagtgaaagcacaagagagaaatagaggtattgagagaggaaaagagagattgagattagggattttcatgcttaatgcctcctatgtgtttaaatttatcacgggagtagaaaatttgcatgtaggttgagatttataaatcgtagcccgaatataaattttttagtaaatccactatcacattaaaattaaactttaagaattaaatcccaggatctgaatgccatgaatctttccttatctgcattgccaacccaccaaaatttcctcacgagagcatctaaatcacgacaaattgaaagtagaaccttagaagttgacatagaatacacaggcaaggaggcagccaccgatttaatcagggtgagcctccctgcaaaggataatgatttaagcttccatccttccaatcttttcatcatattatctttgagtttttgaaaatcctctttttttctcctcttgaaaacaaaaagatttccaaggtgtttctcatccccagtcacttgcttgatattcaaacacttcaataaagaattcctttgactgctgtttaggttatttgaaatagtacactaaattttgacttactacaagcttggccaaac

SEQ ID NO: 40367 - DNA, 1448 bp, Cannabis sativa
tgagacccaaaccctaaactggacccagactcaaatccaagagccaaactgaaacccgaacttgggactcgaacctaaatcttagtacccggaccaagactaagattcgaacacagacatggacccaacccgtaaccggccacttgtaaaaatcccatgatccttttcaattcttcaaaacaaaacatcgaaaatggacatatacagatcgtatatatatagaaaaagttaaacaatgagagagcaaaaaatgttgattgaaaactgcaaattaattaaattagatcatttctttcaaaaaagaaaaaaaagaaaataaattagatcatgctcgaagtggcttaatgattagaagaggctattatattatataacgtgataataaatattttctcacgtgtgtttactattgataagttagtttttgactcactttttgttgttaattataaaaaaaaaaaattaggttttgtttaggtttatttttgtgtaggtttacatttattttgatgtgttttcaggtttgaatgaattcaggaggacttggagtggaagtggtgtaaaaagaatttacaaacataaaagtgttgaatttggagtgcgtacacgtaatactgttagaaatgtatattgggatgaatgctatttttgtcaaattgctttatggaaaacgtgaaaattagatgttaattgtgattttgagtaggtagatttcaaatctttctttcagtcaaaacaaaatttgtaattaaatataaaaaaaattatggttaattataaattatcattataattgtgttgtgactataaggtttgcagttaaaagtattagtcacaaaaattataatttgctgtgactaaatatatttttgattacaatatttattatgattaaaattaaattagtaacaatttgtaattaaatattatattattaagttataagtaacttttgttgtgactaaaagattatcactagaaagtaacaatttttttgtagtgtgaatagaattaacttttgactacaggaacgagaaaggagtgcttttagtcggaatgccttcgatcatggagctgtagagccacttcatgaataactggtcactaattaattatgcaattctcatattcagggttggtttgttcagtatccccaaccatgataagctttgaaagacaaattggtgagatacccatgaagcctatggcctctcagtgtggtggccggataccattgtcttccacaaattgtagttgatttgaccaagcatcaaagagaaagactgactgagagtaggttgggaaaagatattgggagctgagatgctgaagcaccattattgtttccagcaatggcagagaccgtgacttctctgataccaatttaaaacatatgaaatatatgaatttgtaaatctcaactcatttcaatgagtgagtggagtgtg

SEQ ID NO: 40368 - DNA, 1334 bp, Cannabis sativa
ttgtgtaataaaagcaactttgtaagtaaaaatgtagtcataggcgtgtgtgagtaattttgtaataaattgtgtaaaatggatttttcatgtaaaaatttctatgttatttgcataatacgggatcttattcctaattaataaatgataatgcaacggtggctctctttttttagaagttgaaagatgtgtgactttatttatttattagaataataacattttcttcttttttttaaggtaccttgtcttcatttgtcaaccagttttaaaggatatacattaattttgtaatgcttccaccctctaagtgggtggttcagcttataactgccttgcttgtcctactctacactccaccgaaagtattaactacttttttttaaggaacttttttttaattagcaagaaattggcttaattagcacattatgattaattgcatgccaaggtggattgtctggtaagagtcctggtaaaggcacgagcacgacaaatttggttgtttcgttgttttagtttccatttttaagaaatgcatagttttagtgagttaacatgttcatacgcatatgaatgtttagttgtccatcacttacaatgtgtcgtaaatgtgtatagaaaagctagggtccaccttaataccatgatcagtacataaattactgtttactataatctctattagtgtcaaaactatataaaagtagttaaatacctggtggaagaagtataagagttaaggttccgtagtaaaagtttaaagtaagacactcgattagagatgcaatagtggagaggttggttaccctatccaaactcataacaggtttttctttttaatttattttctgtaagtttcaggaatgaagtcaaaaggatggtggaatggaaggaaacctctttctccaaaattcaatgcatctttacttcatttatttcacaaaaatatggaaagagagagaaaagagaacaagacaaacaagtaaacaatcctcaaaagcaccacaccagcatagcttatcatataagcatgggcctacttttgcactattcatgcaactaaaaacccactgcagctgcaggactactaattatttcacaagtattcttctaaatgattaaggaatctctttacaccagcaaggtaccaaacctaccaaacccatactagatcacattcaaacaactggttggtttggcagtctctagcaaccaatagacaaaaagataacaataacaactgtttggcagtttctagcaatagagaatgaaagaatctttgtaaactaagttgataaatttcattatggtttggctgttggaagggaata

SEQ ID NO: 40369 - DNA, 3418 bp, Cannabis sativa
tacaaagaaataagcaagtttgcacaaagcgcaacacttacactagaggaaagatccttatttcaactagcgctaactcttcacttagagaattcttggctataatatgagcaataatatttgtttctctataagtaaatcggaacctcacattacaattacttgggatactcctattgtcgcttctaaaactatattcgctatttttagagtaatgccacatcaatgtatcttgcatcttagactcttcacacctagaattgtcacttttaaaaattctcttaataaaatctttgtcccattggccatatactagtttgagattaataactttaagacccttcggtaagtgaggtttatcatataatttgagtcttaggtcttagaagccaggcatcttccaatatatcaatctcattcccatcaccaatcctccaccttatgcctttcaagagtccttttgataatagggataatgataaggacatacatttattagtgctgaccctggttgaaaaaaaaaatttataatccatacttttgaatagtggcagttgagtaggttccatgaaaacatcttgaaattcaagtaaaatttctctcccctcactaggtaacttcgcatctagttgaaaattttgaggcagagatggatcatcattattgttacagcagtaatacaatacatttctcgaacatctccttcttgaagcaaggcatgaaattgagaaaaagtcaattgatgtgctgccgcatctgaagacccttcaagcttaactgaatttccctgccactgacatttcatggtaagagccttgtgatcatgtaaacaaggaccaagagtacgaaaccattgcattcccaacactatattaaacccccaaataggaagcacatatagatcaactgaaaataggtgaccctgtaaacacagctcaatattatgacatagtttagaacaaagtagtgaattatcattgctcatataaaccttgaagcactttgtatcctcactaacgagtagctaaagattcttgaataaaattattgttgctgtcgatatcaatgaggacttccacggtttcctttccatgagtggcgtgtaatctaaaaattctggggttaatagaattggacagagcattcaaactcacttcatcaacattcgtatcatccaactctcctttatcagattcctcaatcgaagcgacttcatcctcttcatcctcatccgtgccacacaaaattaatacatgattcttgcatttgtgaccaaaactatacttcttatcacaagtaaaatacacgccacgctcatgcatctctcgaatctcagcaagagttaatttcttagctagcaatggagaggaacctgctttgaaggatttcagactcgtcacgttcgctgtagctgagccataggccaacaaattcatagaatttgatatttgagattaagagtaagtagccgagcgagaagaccacccgaaacggacaccatcacctttagaactgtaatgaccgcctaagtttaatatattagattattaaataattagggtttaattgtgaaattgaattattaattatgatttgtataattatctagatttatttaacttcaacatgtattaattatgctatatatgtgaattcctcagttttttgtgattatgctcggttgtagtggaaggcgacgttaggccattagagagtcatgttttatatggtttggaatttttttagtaatagggcaatatgtgtgacttgtttgtattgggtattgacgggttttggaaataaccaaactacccttggttgtttttaacttttgaactttgactaggggcattatggtctttttggttaattaatattttctttttcttaccttagtggagctgatgtaaataaattagataaataataagctatagtcaatataattagttgtaacttaggaatctagaaaatacctcatcctctcctacaactctttctctctctcaattattcaagttgacagctagggtttggtgtggtttggctcatttcaggaatttcttataggatttgagtgctttggtttaaggtatcatcctctagcttctttatcttttctttctcttaagcttaaattaagtttaatgtgtaacttttggtatatttggttgctgagttggatattggtgtttgattttgtgtataaaggtattattggagttgtttatgctattttgggttggaattgttggttgtagtgaggtgtgagcaaggtttgagattctgtgtttattgatgaggtttattacttgaatttgatttattatagtgtacacagatattttggaaggtattattgaatctggggttatattatggtgttaggatcgattttaggtttcccagtgctgaactggttgaccagttcaaggggacctgtaacaaccggtcgattggttggtccctaaggaaccggacttccagttgagaactggactgccagtttttttaaaaaccctagttttccccatttttgtgttatatttggggtattgccatgttattcatcaatagggatattcctagtttagattttaagtccccggaaagtattttagcgtgtctctcactagagttataaatgttgtgatttagggccctgtgaaacgttgagctacaattctacttaagctgaccggcacacctgagcacgtaaacgaggtaagatagcataaagtatatgtatgtgaataaatgtatattattatatgtttacactactagccccgtaaaatgtgtgttataagggtattagtacagtgtagggttttagggtagttacagtgttaccaacacgagtacgtgggggtacgtcatgcatgtggtacaacactcagtaactcccgaaagtataataatggccctaccaacacgagtacggagtcgatactgtagtgcatatggtacagtggttgtgtttctgttgagaacattcttaaccagttggtgagcttagcaattgggctcaggacgacttgagcataaagtcagtatatcattgtatatatatatatgttatgcatatcttactgagtctatcgactcatcagtttgcaaccttatgtaggtaaatgtagcagtgagttagagcttgacaaggattgtacatatcgcggtagtgcaacttggagggtttcggtctacaacattttgaattatattttgtaactgcccagtagttaaaaaaatattattattacgaaactttatatctagtaaatgtattttcaactatgctttgaaactcgagatcccagtttacgagatttataaatatattataataaaattatcttcaaatttgtaagttttaaaatgcaggcattacaagaactgttgaaatttattttaccag

SEQ ID NO: 40370 - DNA, 1731 bp, Cannabis sativa
tgtcttcctctgtttcagcattgtcttcttccgcatctgttatttcttcttctgaattttcactattcgagctcataacttgggattcttcatcaatgaaatcgttaccgacctcctcctcaagggaaaactggttttcaaatccctgactgtcactatcttcaacagttattctcaatgttttttttttctttttttctttttctctttctataatataccttcgtcatcctcttagacacccttggatcatctttctcttccacttcagccatttgtaagactgaaatcttagcttttttggcatgtatctcaaaatctttccaagaaagaatgattgctaatcggaaatcattgcgatttttggccttgacagttctgagatggcagttcataatctcattgataacttgtttcgtattttcctttcttgaaagatccttttccatattagaacatcttaataattcacatagaaaattcggcctactgttcaataaaaggggcttcaatctatcttctggatctaaataaaccttcaccggcccgtttgattccaaccatagagtatccaccgaagctgggccgtatgcacatgataatttgagtgggctgggcctcgttaagcccatcaaaagcttggagaggcaatctgtatttggcctttgaaaaaaacttccccccctattcttggaaaaccacgtgtcatttggagagattaatagccgcatatttggacttctgtcaacatagcttaaatccaaaaatattcggctaaaaattctcttgatatccaccaagccgtttttcataaatttctttttattgggaagttcacctcttcttgttacgataaacatgcggcaacattcatcctcggtaagcccactatctttaatctccaataattgcttccctggatgagcgccgtttaccacaaccatcggaggtgcagtgcactccgattccgactccgaatatttctcagggacattcgtaacagcttctatgaacctatcgtcacctttcgagtcccaggtatcaacctcgtggtgaacttcagagtcgactcctccatgaatctcatcgctgccagcttcaacctctgtttccgtttcgaagtccggcgagaaggcgactccttccttctcacaacccgacaccctacccgattccttggttctcccttcttcttcgacttcttcatgatggccaggttccaagtccccggaaacccccttggaattcgtccccccattcatctccccctcatcttcgatcctctgtcctatttcaaagtcttgatgccagcatgtattgaaaaaaccactgaacctatatctcatatcattgagcttaaataactctagcttaaatacagatttctcaaaatctaacttcaaagattctggcacaaagccattgctatccccttcgagtttgatcctcacatgatggagaaaattcatttttgctgtaaccttttctacatctagcagtcccccacacaatgccccaatctttcggaataatttcatgttccatacattcaagggtatgcctttgactccaatccaagaacctcggcattcaactttgatgtccctattttgctcctccgttgaccatctcttaaagaagactctggtatctcctgttcctggaatattccagtttcctttcctcaagaatctctccatttcggtctcatcttcgcaccaaatgataact

SEQ ID NO: 40371 - DNA, 2598 bp, Cannabis sativa
  modified_base (678)..(691): a, c, t, g, unknown or other
ctcatgaggagttggaatgggtcactcccgtagacggtagaagatgaaggaagttgatttaataaggtaaccatttagatttatctgatatgggtagaccttgaagtaatcaacaatcaacacaaatcatgggtgtagaggcaagaatgcgcctacattcatatgaaatcttgaccaagcactacaacaaggatttcgagagccactaggacatccaatcctgggttttctgacgacagtcttaggaagagaatattcatctcaaaccaattgaacttggtgctgagtaatggaagtaaagacaagaggtctcaatttgaaagcctgatctcttaggtcttcacttttaatagcagcagtgagcaactcaatggccataactttttcgccgcggaccttatctagatctttagacttgggcactgtaagcttagtgcagatggattaggacatgtgttggtaatattgttcagcatttttaaaagttcatctcacacgaggcatatttactttcaacacagactctcaatctctctttgggcttgtgaagcagcggacaaagaaaatagaagtgttctctatatataacaattgatcttctttgttcctaagccaataaggagtggatttaaatttaaattttgaaaagaaagataaagagatatatatatatatatnnnnnnnnnnnnnnagagagagagagagagaaaatgctatcttttactttctctctcccttctttttatcttaaaaatttgaaatcccttgtttaaagaggaatgggaattaaaaattcctaatacaacaagaattaattgaagaaaagaacaaaaaaatctaagattgccaaaattgatgtccacctggtagtatcaagagaacaagcatattagttcgagacatggatttaacctaacacaagtttaaagttaacttgcggggaaaatgtttgtcgaaaaactaaccctcttaacatggacatcaatatttgacacatgggaagaaataaacagcctaaaattgagtagttttgtgtcatagtagtcgacctacgaggggtcctagccctgcgcccaagttgactctaggaactctgaaatgggtgtttagatcctaccaagttatttccaactcaccatcaacaagataagaagaatcaagtccaaggcttgggaattaaaagacacaaaatagaacctcagaagttaacccaggtgccttagggttttcacctatgcctaagttgacatcccaactagggtttcaatttttgggtctgtctttgtgaaaatggatcaaactttgcactttggcatgaataagatatgtcacaaacatatttgaggtaccaaatttagaatcaaaatactttcagtttgagcacctaatgcacccggtgcctagggcacccggtgcctaggttgacatattgtcaacctggggtgattccaaccataatattgaagaagtatcccgagcattatatttgtctccatccaaaacagggaaacaagttctattggaaataaacaaatcaacctgaaggccaaaatgaagacccaatgccgacactttgtcaacatgggctagttctaaaaacagttcagaagaagtcttctaggcatattctttgtattgatcaacaattaaaatttgggtactttcagggaaaaaaacagagtcatctgggagcaaaaattggaacccaacaccgaagttgacctaggtattgggccctgttcctagtttgacattttgttatcctaggctatttctaattagattttctgagaagtcttctaagcctattctccatttttatgaataactaagatacgagtatttctagaatcgaatagaaccatatggtggaaaaaaactggagccaacatgtaatgacttcatacttagaatatgaattagtaaaaattagaactaattaattatattttatgattatatgcgaatattttattatatgggccctattttaaagaaataggcattaagattataatttctcaagtactccagtaattttatttaaatctaagtgtattatatatgacataagtgagaaatatatttttgtgatttttgctctacaacgatggaaatgcgactatttggccattagagtcacacgggtttggtttagaacttttacttgagcggggaaatcataagtgatattttgaatatcgagattaggtgtggttatagtgatataccattttactcctaggcctgaagattacttaagtgagaaataaggggcaaattggtcatttttccctaagaggtggattttgtctttttgtggttttgatactgttatgccaattttttttcacctaacgtggttaattggtccacataagtcaagactaaggacacatgttatagccttgtcaatagcaggataaagtctccttacaaggcatggcaaaaccatcaagcaagaagcgaaaggtgttaagcaagccgtaaataagttgtacaacaatgtctagccagccaaagggagtacgcaagctggcaaagagaagcttatttgcccgactagggtttcaacacaagttagccagccaaagggtg

SEQ ID NO: 40372 - DNA, 1741 bp, Cannabis sativa
gttcaagatctcgactggcgactactgtgtatatccgcaaaattgcgagaacacaagctcatccctaagaacgccagtctttagtgagaaccagtatacaaggagccttctgagaaataagaggaaagaatagacaagcgtctatctaaatagacttcgaggccaacgtcaagtaacgcgcttgacaaataggctttcttttatgtttagaataagttcttatctataatcttcttgtagaaatgactttcctgaagaaaggtccaactttcaatgaaagcctaagttggtctgcgacgacttctctagttattccgcagaagaggaaaagtgacgttgttcctatgcaggtggttgatttgtcgaagaaacagcacaaagctttccaagataagaggaagaaagttatgatcgatcccgctgtcagggcccgcaatttcatagctcttcaggacaagtttgtgagcaatgagtttgtctctaaggtcgagggggttcccgctgaggacttgatctcacgctccgcaaaattggcatctcaatttataactatgttctcacgggcctctgttgcaggttctaaagagctcaatcttttgaggaagcaaaactcgcttctccaagacaacgagaagaaactaaagctagaagaggctacgaaggacaaagagattgaggatcttggaaaagctaaagagcaggcggaggaagaagtcaaagtcttggaatcatgagttgatgaactcggtcgcgatcttgagaatgagaaggaaatcgagaagaagcaatgtgatcatgctatctccaattatatctatactaccttgaccaaggtgcctgacttcgactttgtagttctcggagtagaggcagttgaaatggttgatgcattttgcgccgtgtcgcctactgagacctagggacttgggggaaatcttttccctaaggatgcagaaaatgtgaatgcaggggaagtcacagatggtgctgctagcaaggtcgcagatgatctcagcactccgtccccttagtttttccttaatttctttttgtattgtcgaactttcctttttagcggtacatgggtactcacgttttgtactttgaagaacttatttagcttccattatcaaacatcatatccttttgaggatatttcttttgcatacttatttagcggtacacgggtactcgcgttgttaagttgcatttttaattagtactaattttatttttgcaaaagttctcattggtacattcacagcttggtgtgatgatttcggggcgtttgagatcgtgccctaaaaacttcattgagatgatagcaaagatcacccctatgaacatggtatctccctcctcgtagtgtctccatagatccagacatggtacatacactaggagaacaactatgggaggaagaggaatgggattcaacatcatttacctcattttgtggctgggctcaacttcgagggttacgtcgctcggtatcctcttcctgcaatatttcacgatcaatgctttgtgtgacttgttccttatgtgtaggttgtgtaggttggttcgagtcaagtcccttctattcattttgatgttccttgcgagtacaattattagtttgtcgcccgttggttgttacttgagggttgtctaaacgcgtgtttggtactcaaggaggacgtcgggtcctgacccttccatcgaccttggccttcaaagcctgcatttgttcctgtag

SEQ ID NO: 40373 - DNA, 1704 bp, Cannabis sativa
aaaggggattacttggttcatctttcgagtattcactccaaggctaaaatggagcaaataatatgcacgctgtggtcaatttggacggaaaggaaccgagtaattcatgggcacaaagctaagaaggctagggagttgtcatcctttgctgataactatttgctgaattacagatcagctctttcgaaataccagcagccttttcaagctctggttgcaacaacagtaaaaaactgcttcaatccatctgcttcgaatagtcacaaagttccatggaaacctcccccttcaggtgttttcaaactcaatgtggatgcggcagtagaacgaactacgactactactggtttgggagctattatacaggactgttctggtttggttgttgcggctttctccaaaaaactgttgggcagctttgatccccacgaaatggaagctcttgctatgtttcatggtgtgcattttgctctaaatttttcaatttcctcatcttcttattgagacagatgcacttcgggttaaaaatgcaatatgtaccccaactgtagcttcctctgtttttaacgatattatcatggatgtttctagtcttctatcttttttccctaatgtaaatgtctctcatgtcaaacgtacaactaatatgactgctgacggtttggtaaaatttgcactatgggtagatgaagattgtttttggtcggaatgtattcctccgcctataaattctgttattgtaaatgactctttggtttaatttataatagtagtttttttcctcaaaaaaaaaaaaaaaaaaactacaaatgaagaatgtatctatcactatcattattttttaaaaatatatgcttgtacattgttgcctcaagtttctctcaatatacgtggcagctgcaatgtgagacacgtggcacgtagatgcctatcacccggagatgaacagaagatttaagtaaatctcctcagattcaatgattatgattcaagggcaggctcccagacatgagcaaatagctccacttcttctccgggaggtgaaggacgaataaaacttctccaggccagttaagttggaggtgaacagtcacttcgcatttaatgcggcatgggggaaaacgtctaggaatacccgtaagaggacgtgtcagacgtcataaactcagttttgggcgactacacaataatcaagggagctagtaacgactctattatgaagaatcacatcaattaaggagaatgaaggctaatctcacctaaaacctaagcagcctattgtttaggtagtgcatgccctattttgtactttttggaaacttgtgcatgctcatagttggcatttgaagacaagttatcccttttcttcttcctaccaattgctataaataccccctcacaaaaattggtgagggggatcggaaaaaagacacaaaaaatgttctctgtaagaaacacccacttcttaatattagagactcgtggactacggctcattaatgcccgaaccacgtaaaaactacttgcattaattatccctaagctctcattattacgttagatatttggttgccgaaaacctcggtcaatattttggtgctttcattgagagctgtgggaagcattgtccagaggacaacaacagaagatctagagcacaatggtggagattcagaaccatacccgtcagccttgtcccccccc

SEQ ID NO: 40374 - DNA, 2967 bp, Cannabis sativa
taatgttatatgtatatttttgtatctgttaaaaaattttattttcttgtagcattgttaaatttaatgttttgttagaatctgtttttattttggtatttggaactagtttcatttaatttttatgttctattgtataatttaggtttttaattggttattttggttatgttatatttttgttttgacctgtgggttatgtatgtgattcatacggttggccttaattttgtatattgtttaaaccagttattttttttatatatatatatgttcattaaaatgtcgtgtaatgtttatatatcagtaatgcttatatacctgtaatgtgtattattgacaattcttattccagttttggttctgcgtataatttggtttgttttttcagtttttttgttttcaattttaattagcattgatttttcaggttctaaagataaggaagaggatcagaagcaattgaagaacttacctaaagacgatcggagctgtagaagacgatcggaggcggcaatcattgctgaagctcagtcttcagtcgttaaatttcatggtttaggagaagacgatcggaggtgactgatccttgcgtttgagttcgattcgcagatcgaattacagcgatcaatcgcggctgctgattgtgcgattctgagagtgacgatcgaagagaaaaccgtagagattagggagagagagagagagatcgaatgagatagattctgttatgtttcagtttagaaagtatgggtttttccattttaagcttatttatatgttttttggatttccatatttttccatttaattaatttttttttccatatctttttgattttttttttgtgccataaaaaagtaaatggcaacaaaaaatctaatatttatgaaaaatcctcaataaataataataaagtgaaaacttatcaataaataatacattacaaagttgaaagttgacattgagaagaaaatatgagttaaagcattacctgtagtaatgaaaattattcatataaaataagttaaagctttaaacttaaatataaatatttatgtactttttactttttaattcacaaattatattttcactgccaattatttcttctcatttattattttatttcacttctcctaaatctcatgtgcggagaagcacagagattatactagtatacatataaatacatttttatatttaatttttgtaacactttttctctctcttacaaaaaaaagaaaaaaatcaagagcactcatcctatttttttttattttttacatgatcaataaaagtagtatattttttttgaatatcttgttgtttattcagagttaattaataaataatttgtatattttaacaagattgatttctttttatttttctgttgatttatagttaatttacagttatttttatgttgttatttaggtgttctattgatattttatagttatttttatgtgttttccattttgtatagttgttgtttagtttatgtgtatttttgtggtgtatattttcaatttattctagagaatattttgttgtatatatatgtgcatttattttgttatttttatgttgttttttagttgtttttcagtttatagttattttttaactatcactaaattaaaaagaaaaggaaaaaaaagttaaaagaataaagttgtaacaaaaaaatttatgaaataaaataatataatagtacaaatatataaatcaagttgtcaaaattaagtaaaaaagaaatcgtaatacaaaaatatattgacgagttgatattatttttcttattgcaatttagttaatattttgtaatttttctgttgctttgtagttatatttttgttattttaattttttttcatgttgtttgttaagtagttttagggttattttttatttatttttctattttactaaaacatagtatttttataattttgaaactttaagcacaatatttttataaaattaatacactaacaatgtaaaaaactttggataacagaatttttgtaaactttctcccataagtttccctttatcatatacaccaatgtgacatgatgattaattattttataaaaatagaatatatattgaaatctttatattgatcatttgatgtgtaaaaatttatatgttaattttttatcacttgatcgcattatttttgtcgcaaattcggcacataatgatttatttataatctataacatatatataaaaatgggtgattttttttttgttaagttattttgtctttttgtgcttagtactattttgtttttttttttgtgaatttttatttttcaattaattaaatgtatatacaataatcgataaatttaaatgcattatcatttaaaaaaaaatcaaatacattaatatataataacatgtaaattaaatatctttatttttgatgtaagttattttttttttctttttacttgttatttttcttaaagaggatatatatacgcttttttttattattaaataataaattatatacgcaaccacattgtatataataattgaagataattatttttcacaactctattcatataaattaaaaggtcttatttgtttttttttttcttatcatttattttaaagggcacatatataagctccttttttttttcaataataagttatacacacaaccacattgtatataataattcaagataattatttttcataactctactaatcaatataaattaaaaagtcttatatttttatatttattttttaaaaaaaagacaaataaagtttttattcatataataataaattatgggctcgtttggaacgttgtattagatcgtattgtatttgtaagaaataaaagcattcccaaaatgcctctacaccaagaccccaacgttcaaaaaactgaggtcacaaatgaccttccctcttgtgcggatcaa

SEQ ID NO: 40375 - DNA, 4395 bp, Cannabis sativa
ttttgtaccatctcactattatcgagacttgtacctcaagttgcaaggtcttcgtcaaggttacaagagtgttgatgagtattacaaggagaaggagatgactatttttaatgtagattttcattaaccaaatatatagccttttcgcaataattacactacataatttaataataataaacaccaggtattttacgtggttttgtagttaaaatctacatactccacgagtctgtgttataaggggtattctcttgcatatagagtacaattttcagtatcataaataatataattttctctctctttttgccctcgtttttcctgtagattctgcccctatttataggtatatggattaacagttatttttattcggattgatttaaatcgctcatgaaacgcagatattcccctcgtttcatttatatagaatgggataatatttaagaactacccaattgctccttgcctttatcctttggacggttatgctaactaagaaggtcgaatcctattgaacggggattttccttcttatccatcttaataagaaaaaaatgctaagtagatgaatatatgtttgatcatatattcacaaatacatttatagtagatgaatattttacttttgaccctttcactacgcattgttatcatatggtcttatatatgtacaaaaaaaacaatcatcaaatttatgacgtacgtggatggtgtatatataattttttattttgtatcaaatatgcatattatctcggcaaaatttccaagaggtttagttcctatattagctcttgggcatgaatcgcaccagacaccagttactatttctcaaaatttatattctaataaaaaaaatttgatagtagaataattttctttgtttaagatttctatcttccttttggattatgtactcccatattgacttattttttgaagtctagggaatcaagagaaatataaaaatctaagaagatttggcagcataacggcatggagacattaaattatcttattttctctttggctatatctcacttttgaagatcttttgtggcttagagcctagatcaaagtgggcgaaagacaaaataagaaaaattacaggagaagaaaaatttgaatgatgaaaagaaatagggaataaccttaatacatactctgtagaacttctttgaagatgagaatatgttgtactatttctctgtaaattttcacagagttttcttttctttattttctccccctcttttgtctgattttcttctttctctttataaactcatttttacgatatattttctcaaagagtggagaggtgagtggtaggtagttatgggttagtgaagagaaaagtggggatatataattaaaaaataatatatatttttttttctgaacgattccttttattattactatttttttatataataaatgaagagaaaaaatagttcaacagatgccccctcgagcatgcgcatggtaatttatatggacacgtgtgatgctcgagtaactttgaactttctacctctctttgtagagttcttattctaccaatcttaatttgaaaggacaaatattttgcatatttgtctttgaacttggggagagaaatttgagattttgatttggtggctgtatctattatttagattgcctacgtacccttggcgagatcaagcctttcgtagttcagagaagcactttgagtttttgttcttctttacaccatgttgaagctttatgctttgagatgtttttccaagcgcattttagcttcttgctttgtgtcatggcttttttcctttagttctcgctttctgctttgacctttgagctttttgctgctctctttttctttgagctttgtccttttcttttcgttgggatttcattttttctttgcccatttttttcttgagaatcagctttttgggcattgctcaattttcttaagctttcactttctgcaatactctatttttttcttgagtgttagcttttcactcatttttttagcattcactctttgtttgctctattggcttttttttttagcattcgctttttgttcgctctattttctttagagcattctttttttgcttgcactatttttttagcatccgttttttgcttggtctatttttttgcttatttctttttgcttttttttttcgaggattcgctttcgcttgctctatttgtttgcgctttcgttttctgcttcacgcatttttttaggttgcaatgagtaacaacctttcttctcatttaaaatgaagacttttaaaattgagactatttggatatcctcatgttggacaatcttttcaatgatacttttgagggctcaacagtttattgttgaatgagtgctatttcgatggtactgacaataattgattttgtcagtattattgacttcttttgtgtttttaagctttaggagatttatagctttcgtagccaataattcatccaatatttgttcgacatcatcttcatcaatgaacagatacttcatagtctcttttataatggactgttttggtagtattttagcttttcctttatcttcatcttcttttacaaaggtagtcattgaatcataagatgtgtcattttagcgagctatttgcacctcaatgatgcttgctttgaaaataagctcattgaaggttttaggctctatggagcataagtaaactgctatcgcggaaatgagagtttgtctacttaattgaaatgcagatagctcagataatttttttggacattgaattcaaacacttctccatgtagcaataaatttgttgacagattcatttggtctttgcttagtttcagctaggtcactaacagtggcatcccttattgaacttacaaattgagcaatgaaggctctttgcatgtcatcccatgtgattatcgatcctgttggtaattgcgtataccaagtgaatgccacccctttaagtgaatgcaaaaattgtcttatgagtaatgcatctgactgagcagattcaccacatcagagacaaactacatgttctttaggggacccatttatccaattaaacttttcaaattgtaagtttatgtaatttgggggacatggaacataatcataatgggatgggtatggtttatggtatccaagaataggcatggttattgtttcatagccttcttaaatactttctatgattagtgctttcaattaacgatgaataaagaaatcttctcctccttaccagttaggtcctaataaagaaggccaactgcgcaaagtttttgagagttgcatacaagctgataatgtgtacaagttggggatggccttatttgttatgggcgtcctgactggtaaggaggagaagactgttgtttctttatttgtgataagaatggttgataacttggaattcttctatgagtatccgtttggaaagatctccttcaacaagttgatggaaacttgcaacaaagattttgtagaggttaagaatcagatgcacaagaagattgagaagggagtttctcaaaaggaggccaaatactcatcatacgactatactatagcgttgcaatattgggcctatgaggccatcttagagttggacaatgaatatgcagtgagaaaattacatcgctttcccagaatggttaattgggagagtaaggaggagaccacactcagcagggatgaagttataagtttgttttcgacaaatgtaagtcttttttgcgctttgcagtcatatatatattttattttaatttctatctaataagacattggtttttattttcagttgacagtactctatgtattgtcctaggcaaaataaagaggtgtttgtgaggactatcaccggcagtgaggggaaaatatttgttgacttggaagaactagtgttggatgacgatgggcaaccaactcaagatgctctgcgcagccaagcgcggaagcttgcctcagcattagaagagcaggcagatgaagcccgaatatttagtgacactataccacctagaccatctcctggatcaaaggatcgtcctcttttctcgtcaacatccattccaagcacctcaaaggctcgagaaccagtatactctgccattttggcaagattggagactgtagagagggagccgattactttgagggaaggcccgagtgctctattgaatgggcagaaaaggattataggttacttgaagaccctaatgtgaatgatggaagatcagagaaggtcaaatttagaggcagagccacaacatgagggtctaagagatgatttcattctccctaatgattatagacccgatgatgtaggtgatgttctctatgtttgaaattattttaccagg

SEQ ID NO: 40376 - DNA, 2153 bp, Cannabis sativa
gagaaatattcatcaaactacgaaatattattggagtcacaaatcaagtttaagggggtgttaaaatattaaacttgatttaatataattaatttctatgattttcttattgctatagtttctagactattcttatatttactaaagtgtttagacttttcttgtttgagtatttttttaattttttagaattatttttcacttgtgtcagtagtgataattatgtagaaaaatacagaaactagtcattcaataatgtttctagattagtccatagagtcctataaatagagatataatctcatcattttgtacttagtcaaaaatcacacaaattaagatataaaatatagggacacgattttttcccgtgatgtactttcacagaatgtattccgtggtacattagatgggtctttgggtacgtaataatgggtctcagggtacgttaccatttttaaccctaattacccttagatcaaccccaaccttcagatcaaataacttttccatctaacggctaccgtacatcgcagaatacatctcgtaaaagtacatcacaggacaaaatcgtgtcccataaaatataacttcttccattcaaaattcttattattatctaacaaacaagaataatatgcatgatgggatatccacaatatatatatataacgaaaagcattataagtacaaaagataatagtacaattcatcatgaacacgaaataattaatacataacgtctacatgatcattatatccgatattaatttgtccacctgtcttgaacccacttatcaactgtgaccagcagcataaaaaggtagtagaatatgtaacataggacctaatatcacaaacgaggtaaggaagccaaatgaagcaagaataaagatagagttggcaatgcaaatttcatggaagcaaagattgtacgtagtagctaggataacccaattgcgcccaaatgaaggcaacaaacatggctgtggcaactggtttccgttttgaatggtcattaattaaggtagtgataagtgttgacaccaatattagagtcttcattaattctgtctttaattgacaaatcttactttctctattgatattctagtacttgcatggttcattgataaactctgtaatatgaacacattcattagctcgtgaagctccgacgattctcaaggcttgccatgttagagcctgcaaggttcaatgttgatgtaactgttttgcctaacaccttcctacatgtcaatcaacaaagtatcgagtctagtttaatgtaatactctttgtttaaaacttttgcataatactaaaagcattgttattgaacactagtgtttagcaccttttaaatgtgatcgccttgcgattagctaacgatactaacaaatgccattataattaatactagcgaaaataataactactttggaaaataatggtgttcacatttattaactataaatctctgtctgatatcgattatttcttttgcactcttcaactatttcgttactggttctgtctgtaaaaattgtatttctctcttctataaaatgatcccaaacgctcgccattctaacaatacaaaatgtcagacatataaatatatgaatggaatgaaattaacaatcccagctcaatatataacataaaattacaagtaccaacatattgagtgtaaataataaagaaatactacttattaaaatacaagtaaataagaaaggtaggaaatgaagatagtatattacaactcaaagtaacaagaaaataaagaacaaaaataatattaagaactatcttaattaattactctcatcaccttgcgagtgaaaagctagtaaggattaccaaagttttaacaatatattgctttacacttttatctaatattttgggattatttggcttcataatttaaaaattatttttagtttttaaaaattaatagtgtgtttcaccaaaatttttaaaacaattttcttaaaataaagataagaaaaagataaaaaaaaacagccaaaattaaaatgttgtttattctatttttaaaaataatttttatttttggtctaacatatatatatttttatattttctcacatacctggggataggtcttgggtcgagtccgagtc

SEQ ID NO: 40377 - DNA, 1674 bp, Cannabis sativa
tgcaattttacaaaagaagctccctcctaatttaattgagagatcctgagagttttaccacattgggaggatggaatgaatcaatgttctatgtggtttgggggcaagtattaacctaatattgcactggttagtattcaagagattgtaactagttgactgttgtttaactaattcaagggggtaattaaagatgtcattgtcaatgtggtcaaatttatttttccatttaattaattttattgtacttgacatggaagaagatagtaattacatgctcatcttcctgatcagtgcctatatatgcaattgatctaaaaattaaaagatactgattagacatcaacacaacatataaatgataacgtacgcatctttttatatagatgagaataattatatattaattaagattaatttgtgtggtccatgcaggaactaaatgattgattatataatataagatatctatataaattaaaaatatcttcttcctttcatttagagtaaaatttatggttaaattaaaaaaataattataactaaacatatataatttatattattattattattattatatataaaaagttagttaaatgtattaataacaaaaattataatttgttctcatgtatttttagccgtaatatttgatgtaattaaaattaaattaatgacaattatatttaaatacaatttttagtaataagtaatttttttaactgaaaataacatttagtaacaaaaagtataaaaggctgtaacaattttttggtgtgatatatatataattgcaagtgaggaaatggccataaagtagtaaaaagaagctataaattaataacacttttatgcaattctctgcatctgtccatatatcttttaggttatcacttttatttatatatttatgtagtcacctctctaccaatctaaatgatattaatattatgtcaagatcattgaccacgttcatgacatggaaaataccctttccttttctaaaaagaaaaaaaaattatatagctattaactagagctagagctagaaagaaacaaaaagaaaccccacgtatagtatatttatctaatttaaatccatataaaaaatacagcacaaatttatattacgtacaccttcataaaagatagtttaatttagtatttttttttgttgacatagaagaaagtgttttagtttatttatttttcatattattagtgtatgttgtgcttaattatttaacattatctgtaaattatcatatcgaaataaaatagtaaaatagttatcgcactataacaaaatattaaaatttattatttttaatattgtaaattatttatttttttttacaaatttattagtagctagttggtagtaaataagtaaaacgactatataaatttatatatataaacaaaactaaaaactaatattcgataccgaaattcattaaaaatgtaccaaaatactctcttttgagtttgcttatatatatatgcctgcagcagagattcacatcatataatattttatgaaattaacttattatatacttttcaatagtcttaattaggtaataacatgatgtatataaatatatatatatttactaggtgaatgtacttgccgagccacgtattgatagttttatttaagattttagt

SEQ ID NO: 40378 - DNA, 1483 bp, Cannabis sativa
tatgtatcttatatatgttaccatatttcatcacattagccatgtaagattttctaacatccctttttcaagatgatggttattttttttgcccaccaatttcggacaactcgatcacaagtaatttttttttactcactatcttcgaatcacaggttgctttttaactctattttttggatcaattttttttggcgcctcttttagctctactttttttatccgtttttaacgagtataattttgattctgataatatgttagtgaagtgagtgagaaagatatgaaatgaatgattgagctcatctgttaattgagatggcttaatgttttatatagcgaatggaggaaccgaatataaaaaataagaaagagctagccagttaaacaaagagctaagcagaaactaaaatcagttataactaaaaacaactaacaaaaaactaactggtaattgactaccattaacaattctagctcaatcctaatattctccctcaagtgacactcgttggacttggatgttaacttgttcctgagaaatgtgaactgaggaaagttataggctttgtgagaatattaattagttgtttcatgtcaagactctacataacgaatatctaactagtttgcaagaattttatcccggatgaagtgtatatcaatttcaatatgctttgttatagtgtggaagactagattcgaagctagagagctagctcccatgatgtcacaccatagtatatgaggatgtgtgaagttgatagataactcagatagtatggactcactccaaatgcgtttagttgtggccatagtaagagctctatactcagactttgtattagactttgcaattatttcttagagcacccattgaccaagttgttcttgttagtattatggtaataaatcaaatacgcagtgaaataaatatttctaattatcatcatatcatgttctcaagatcaccgtacatatattaaatttgaaagtaaaaaagatgaaaggatagttttcctctcgaagcctatcagggtatccttaagtctttttgtatattgtatccttggaactgtggcatcaaagtcacaccttattcttccagatcttccaccacacacaaagagtagtgtgggctagtaggataaaatttatatgaagttcttgttagattctcaacacatgagcaagaacaatttgttaggatttatgctctaaaaagctcataaagatattttttttttataaataagagttgaacattttcatatatacttaattgttaaattattaatatttaatagtgaataatttatatatatatcaaaaaatttcttattcatacatgaggttgtgacttgtatagtatggagaattaagattatttagccataaataaaacagtcagcaacatattaaagtttaggaatctttaatcaatggtagctagtgtagttcactgatgcctgttatttggtgc

SEQ ID NO: 40379 - DNA, 1127 bp, Cannabis sativa
gtgccagtctcttaattgttattgacaaggtgaaagataatctgtcagctttcactggtttgtgtaatatcaacaacaatcaaggaattgaaatgacagcaacttcttgttcattgagggaaatgacaacaacctttcgtccttgtgagaaagaggtaaacaatatattcttcactaatgcaccttgggttaaaggggaagctggtattgctgcagtgggcattcgtagagctattggtatgtgagttgttagttctaaaaaaattactgcagattcaactttgaaagtagaaattagggccttttttttttttgctttctcatgggcagatgaggaagggtggaggaatgtccacatcctctgagattctaaggttgtagtccaagttttggctaagaagaaatgctccctagatcggaaggtctgaagcttttttctttcggtagttaatttaattaagaagtttattgttataaattcttttttattaaacgtagttttaactcttttgcggatggtgtagctaagtatgctagagttgctagtcaaccagttgttttgtatcaaggggagagaagtccccgtatgattctcatctatctttcttaatcaataaacaagatgttctttaaaaaaaattatcatcatccacggttaaaaataaccaacttgtattttttttttcttcatatttttagattattttattcctattttcaaggacatcgtttaactctaaaaggagagctcatctagctcatttttcacattcagaaaactactcacaaggtcaaagcttctctatctaaaaattggagcttgaatacttagcctttttatgtaattatcaaatcgtgagaaataaaaactcaaagtagacgtagcttcattactttcgcgatacagagaatgaactactataaattgctatgtctatctctttgtatatacttaataaatattttattatcgtcaatctagcgagcgagttgggcttaattctttgtttagatttctaactcaacattgttcaatttttatacccctataaaagttaagtataattaaactgtaaaattactaaattttttctattttaaacattaattgttttactaaataaaat

SEQ ID NO: 40380 - DNA, 1070 bp, Cannabis sativa
ggacgttatatgtgagactataaaaagctacagtaacgcgctctaaggaatggtttagtgacccaatctaaaaggtcactaaatagtattttcttaatcactcatatttgtcaatgaaacatgtttttgcagtagtttcatgcgtgcaatatgcatgcaaatatggaatgttataatttcatagtaatgatatttttatattaattagcgtgtcatctaattaagattgatgtatagtgttaatcatatatataatataaatacgtaattagataacttatatttacgaaaaaaacattagataacttataatatactaatataaaattcaaacttaattagataaaatatgatgagtgtacaattgaatattattaatattatcctagctacaattatctctttgtcgaacgatctctagcataattaatattatatatattttattattaatttggtataaatgtatttataatataatatataatatacatatttgcacattatttttgaaaacatatagaatatattatatataataaatgatatatgcatacgtgacaatcataattaataaagggaagctatatatactcaatgagggaacagccaatttttatgagatcaaagtgttggttgggttgggtcacaaaaagttggcaaatcaattttaattacttcttcctatataaatgttttttttggcatagcgtgtaaattttaataatgggattttttatttttgactaagaaaaagaaaaaaattgctgtaataatattagtgagttttaaaaatgggaccactgaatgtgtggtgtagttagttgaatataatttaaataaattgtttcattttgttctatttaagttctcgtagcaacacttattccgggctttaaaagtggcatttctttggtagtgacaagtgctatgtgccctattaggtaagttatagtatctctctgttggccaaatattttgagagttttttcatttttacattttaaaatagtttttttttttgtatttttacaaaattctacgtagaaattcctattgcaactagcgct

SEQ ID NO: 40381 - DNA, 2745 bp, Cannabis sativa
ctcagagcaggcagaagagttatgtagatctaaaaagtcgggatattgattttcatgtctggttattgcatccacaagctgatacattcttggaagcgaaaaacagtccttgggacatgccttgttcaggttggtaaaatcattacatactcgccatttcgtttggcttggcactagtacggggttacccacccaagtcggatagaaagcttcaatgatgaacttgtttatgcgcagtctttctaactcttctttcaacacttgtgctcattccttttccagtagttttttttttttgctggatgggatgaaagtatgggttaatgttcagggcgtgagacatcacagtggggtcaataccgaccatatcctcatgtgaccagacaaaaacgtacgtctaggtttgctctcagaaattttattaaagctaattttattttgagcagcaatcctttacctgttttgagtttcttgaccaggatatctggatcaatttcaattcttccaattcttctattggcccgacatttgtatttgtttccccaagtcggggatccatgtcttcatccccaccttaggcaacttcctattgggcaatacatttccccctgtctgaactctggccaaaggtattttccttcttcaccttagttagagcaaggttatagcatttccgtgcaattctttggattcctttgagacatcccactccactttttgttgggaacttcacgcatagatgaaaaactgatgtgacaacttttacgtcagatagggtcggttggcctaacgtgacattgaaagtcgatgggacatcaattatcaataattgtgccatgatagctatgctcctcggagcttgtccaacagtaagtggtaggcggatttatataagtggtgtaacactcaaattggagaaaccatatatgagctgagtgcaagggattaagtctttaagctggggtcccatcttctcataagttgttttaaatataatattcgaggaagctccattgtctatcatactccgtgccactgtcttatttgtaatttgcacttctacgactagggggtcgttgtgtgggaagatgatgtggctagcatctactactgtaaatgttattgttggctcccctacatgtggtattttttggtttcctttcttccacggccaagactgtttcattttgttcatacttcaaggcttgggcatacttttctctagctttgcccgagttttcaacaagatgtggacccccaataataacctataaatgctcgtccactggtgggggcatcaattggttctgattatagtctacttgggtggccctttgatcctggtcagccttgacatacttttgtaagtgtgggttattctatctaattaaaaactcaattttttgcttcaaattattacattcgtgtgtgtcatggccgtaattaacatgaaagcgtcaaaactttattgtatctcttttagtgacttcttgtttcatgggagatggcttcttgtacgacaccatagactaagttgtcacatagactgtctctattttgtctgttaggactgagaaagtagtaaatttagagaaattttctctaggatgctgctcgacattgctagtgaatttgcctttctttccatcactttgcttgttgtcgttgttagacctcttctcatttgaattcgaactattgggatattgaagattctggacagacattcctgcacatatgtgcgttgttggtttttcttttgcccgatagtatccacgcactaaatagcttcttcgagcttaataaacccatttgctcgatctagaaattcagccatcgatcccacagttagccttttaatatctttccacagttctttgagaggttcaatgcccccagtattgcagctagtcttccttcttaagtcagtcccttgacctttgtggcctggtcataaattttctaatgtaagctctaagggttctccgagcatttacttggcttctaccaggtcatccaaatgtgatagaagctgatgggaggagaaaaattgtgcatggaactctgatgagaaagcattcatgagctaaaccttcctgaaggcaatttgaaataccattgttgggcgacctctacgacagtggcaggaaaaattttacaccgtacatcaccccttaccccctacagatccatctgcaactcaaaatattttatgtgtgataaaggatcctcttttcctgtatacatcttctaggttggcattttaaactttggaggtaacttaagaacttcaatttcaaggaagaaaggtgatctgcgtgcccggtcgagttcaagatcagtgagttttgggccagtcaggccttgtactatatttttaagttgatctatttgtgctttgcacaagtggatgaactttttaagcatgttgactagcttgtgtcacattgggatctttttaaattggatcttgggcatggatacctggttggatagttggtagaacgttttgtctattcagaccccttctacgatttagatctattctaagatcatgtgtggtacccaacctattaagcactgaggtaccaagtggcctcggtgtctgacttttttgggcaataggttggcctgagacttcggtagtggtgaaattgttggccgtctactgtttggtccacagtttgaacctgtggccttggattggacaactgaccactgtgagtttgtacgtgttaggtttta

SEQ ID NO: 40382 - DNA, 2610 bp, Cannabis sativa
taatagattaacttgcctgcaatcgagttaaatcggatccaggtcgtacatttttaaagaaacttagaactcgttgaagcatattgggggccttgtattgatcataaggatcaatagaatcaagtgataaaggctttgttagaacaaccttcatctcctccttactctctgtctcctgcattaatgttattccacatatcatccttctaaacttaactccataaaattaaataccaaaaataaaataaaacaaaacatttattctagaaatcctttttgttttctacaattgttcagttgttcctctctataattaataataacaccaatgtccttgcttctttgccatgtaaaatgtatacatactaaataaaaattacaaagtaaccaaagattaatactttcgtaataatatagatttaatttaaaattttatattttttgttggtaaccaacaaatatctagttgataaaatatatatatctacaaatatatattatacttaaaaaatgttgcgaagctaccaccagtaaaaataattctatatcggttatttataattatttttagtcacaaaataaattttttataattaaatattatttttagtctcaacaaaaaataataatatgtgcacacacaaatgtaacacacatatatgtggcaaaccacttcaaccaatcatttttatttataaattttggtatcacttattaaaaataacttaccatataagtgtattatatttctgtgtgattcatgtgtgtacatatcattactcattttagttatcaataagttgagtcgcaataaattttaaatttgtgactaatatttatttagacacacgtcttcctaatgatgacttagttttaggtgcgctgtggccttcctaggccttgcagagtgagggattatgtggattttgctttggcaaatgatgttggggcggtggcagtgatgttttttgattcctaggttcggtcttggcttgtggcgcgaagaaagttgtggttcagggcgtttttcatggtgaaatggagcctttgattttttgtgctgatttggctttggagctgcagtttggagttgtagatttcttcacggataatgtttagatggtcaaggctttgattgcaggaaaatgttcgtgctggaatctacatttttctctctctaaactttgtgttttgttggataatggtgattgtgttgttagttggatttctcgtatttttaataaggttgggcatgctcttgctaggtggggtttatcccaatcttgtaatggcttgttgcgtttctgggaggtgagtcctcatgtactcaccaaactttgtgtttcggcttaatgaattagagtttcttagcaaaaaaaaaaaaaaaaaatagttattgaacgcatttttattttttaaaaataaatttatcaaaaaaaaaaatctactttcatttttatgattaagaaattaaaaaaaaaaatgttactaaacactaccttaattaaaatataatttttttgtaattaaaatatatttttttggaacagtaaaatattacttttaattaaaacataaaatttagatacaatttatcaatagtatttttcatctatgtacaactatatttactatattacaatatatgtgaaaaaacttgtttacataatttaatacaaaatatataacgtacataattaatgtttaatgtattgtgtccattaatacactaaactataacttttaccatatatatatatataatatatattaaaaataaaaacatctttctatattaattgcataatattcatattattattcaaaattcaaattaattgaagctaaccctttgatttttttagttatattgaactgatagctgtatttttaagtaactcataaaccagttaataataaatataaatatttattatttttcacataaatattattttattaaaaattaatctatagaaacttatacacacaaatttataaatatgtaaagttaatatacaatgtgaatatgagtttttttttttatttttttagataattattaatatatgtttattatttaaaaatatacatcctcaaataataaaaaattaaaatataaacacttttatcttataataatctactataatatgtttattaaaattaaacacttttaaaatataaaaatatacaaataaaactacaacaacataggcatattataaacaatatcaatgtatgtttattattaaaaaaatattatttatttcattttctaattaaatttggaaataataaacaccaaactaaaatatataaaaaattatatttatattgtgattattatataattatatttactaagaattaactgaaaaaattatacagattatgtatgtttaatatataacatcattttatgtttataatttataatttttaattgaagtactaaaatgtaaacactttaaatttaaacatataaatatttatgtgaatacttatattctattatcaataaatataatatatttattaaataatatattataaaaaatatatatatacataaaaattttcacaacttacattttttttttaaaaaaa

SEQ ID NO: 40383 - DNA, 1116 bp, Cannabis sativa
  modified_base (43)..(56): a, c, t, g, unknown or other
aatataaaaataaaatatattttgtatttaatttaaaaaaaannnnnnnnnnnnnngtaagattaaatttatcaatcacccacataaaaaataaataatacttactttggaacaaaccaaagcaaaatataccacccacaatgatttttaaactatgtagaacttttttaacaaaactcatgtgggatgccagttgccacatcatctttcttttaaccttctttaatatatctattgatttgtaagaagatgactaattaactagtagcatgtaacaatctacattgaaaggtgcccttttttgggtctatggaagttaaggtttttaacggtttttctcttttttcaactgatattttcttactttttgaaaatcatccttgaagataactgctccctccaatatttcctcaatcattctccacctccggcttcatctttctgtaccaacgtcacccatattctcattttcatgaatactgtaatgaacaatctccactccacattatccctcattgatgaggaaagttctatccttacgctccctgaagttgctgcactacaatcaactgatcttcaacctgtttttgcactttttccaagggttctcaccagccagcatgtttacaaaccagggttcattgaccaaatgtctgaccagtagcaaggacgataccccgtcacaattactgaatataaaggagaagatggattatttcatattcggtttggctgtgaaggagataaacgtcgagtacttagcaaagaaccatggtattttcagaaccatttgatcatactcctggcgccagatgctctgcaaaatgtcaagaaggaaaatctgatttatactcctttttgggtgaaaatatatcgacttccgttcttaagtaagtcaaagtttcttgctgaagcgcttggtaatattattggcgaatttttagaggttcatgatgactctactaatgaaggttggggtccatttctgaggatccgagttaaactccttgttactaagccacttatgcgcggtcaaatgattaaactcccaaaaattaaggatgaattttgggtcgacttcttgaattttgtttcaaatgttgatgtttgggccat

SEQ ID NO: 40384 - DNA, 1268 bp, Cannabis sativa
aatgaactatgttgcatgttgccctgtagacattctcttgagtgttgatcaaattagtatactcaatactgggcctcatatcatttttttttcagagcttcacttcgactttgagtttttctgcttcttttgttttgggactggcttacgcctaattctggaacttccacttgttggttcgtctgaagctgctcgggagcgacactgcattccgtctgtgttactctaaaaccagagaaacttttctattggggtgcatacccagaggtagcaggcttataaacggttggtgctatgtactaggttctgctaggtagaatagacggaatcgagagctacagtgtagaactactgacgttcattgaaagtgctaaagtcactccaaattgttgagtgtatgcctcttcaagattaataaaaccttgggcccttgtcaaaaagtctgactaagtgtcagaactttgtctttgcatttcattccaaaatagggatcctgctgaaattcctgactgcaaggccactagcttcatgtcatcattgactttcatccttgttgttgcttccataatccgctggatataagctttgaggctctccctaaattgttgcttgatgtttgttagcaaattgacctccatgtcaaagtccttcgtggctacaactacttccgaaacatagattgtagatccttccagttgtggatagagttggactgtaaccttttccactagtatttgtgtgatttggacaaggtcaatgagaagctcaaacattttccatcttcattgacttgccgcttgcatcaacctattgtacatggataagtgggtcctagggtccttttttcctttgtaaagctccatttgcggtatttagaaattctttggcagttgtgctttgatgattctctttactcatggctcttgatcctcatcttccgagttggatacaaaaccactttgtttccgagccaaatggttcatgacttttgttaatgtgactatttgatcatctagctacctggtatgatcattcgagagctcatgtccacggattccattgttgatattgtttctcaaatcgcttatgtgaggccttgctttcttgccctttgctctttttttttctcgcattcaaatagtccataaggcccattgttgacatgttatctttcgtgtaacgccctaatgctaaggcacggtatagtgcttttgcaattacagtgctatctttcctaatcaaagatttttctcgaaaaacatgtcaaa

SEQ ID NO: 40385 - DNA, 1385 bp, Cannabis sativa
  modified_base (1350)..(1351): a, c, t, g, unknown or other
atttgggatcgagtctgaggtcgggattaggggcgagtccaagtctgggattgggttcgggttcggtttttaaggtctaagtttagattggagttcaaaatattgattaaaaaaactgtttaaaaaaatttgaaaatgatttttttttttgtttttaaatttaaattgttaattaaaaaaaataaaaaagtgaaattatttttacttttttaattttaaaaataaaaaacttattaaaaaagtgttacccagcttaaatattttttaatttctcaaaaatttattttaaaaatatttaaatatcgaaaacataaggtgcatcggaaatttagcatataatatgagagtcattactattctctacatatacttgaaatttttcataaatgaaaaggtacatactaccaacctacagcataaaaatcttataactaaattaatcataacaataacaacaaagtagatctaggaaatttggtgggttgaattggttggtgggattgtgctatacagtctcccaatccctctccaacctttgaaaaaggtcgggtcgggtcccacaatccaacccaactcatttaacgatgctagcgtagttgaacagggctccatccccaatcggttaatgaagaataataatttctcttttgggaaagaataatggatatttttttttaaacattgatatgtgtttatcaaatttatataaaataagattaattatttttttttttaaaaaaaaggctgcataattctcctaagcaaaactagatattattttcatgctatatatgatttttcaaccaaatttatattaaatatttaattttaagatctagaaacattcttcaactaattcctaactgaaagttttttcttattttactattatgtacagaatcagaaagaataataaaaagtatgaaatacaataatagaatatttaatgttcaaaactttgaacaatgtttttctttaattttctgtacttaatttttttatatatacatatttttttttccaaattactgttattttttgtaacgactacaaattaaaatacaatatctaaaaaaaacctatacatacaactaagtatacctaacaataatttttttaggttgcacttgtataaataacgaatgaatatcctcattcaaaaagcaaatgatgttccatgagttcttacatatatatagtaacaaaattcaaaattaaccaaacaaataaatccaaaaataaccaaacaaaatcccaaaaataaaacaacaaagaatattatataatgaaatcagcaacaataatagacattttattattattattgtcttatacagtagaacctctatnnaagaatacacttgggaccaagtaaattatattct

SEQ ID NO: 40386 - DNA, 1918 bp, Cannabis sativa
tgaaattactccaggtcaagcacacttaactgtggagttctttcgtgatggacttggttaacgtcaataaaaaataaagacatttaacatcatcactaactcttgccacttccattagatggttgtatttagacagatagaccatggggtccgtccttccatcgtattattctatttgtggcatcttgaagttttcaggtagtggagcttcgatgatctgtttgacatgtggttttaaatcctcatcttctgagtcagaaatggctccactagacatgtggttttaaatcctcatcttctgagtcagaaatggctccactatgcttccgtgtcagttttgtcaaagtagctatttgttcttccaatttcttggtatcactattcagaatcttatacccacaaattctatcattgatgtagttttggagaccattcccttgagttcttgccttttctcctttagatttttctcttttggcattaagacgcctccagaggtcaacaataaaccaactgttttcaagagaaatctcttatatcccatcatcctagttaacataatcactagggcaattcttttcccttaacaacaggcatttgcaccagagtgctaagcctatcgttaattatgcacaagtttcccttgcgagcagaagggagttcaagcccggaggcatcggtggcctactttttctgcaagggatagtttattgtgttcaggtttggaacaattttatgttggggcttgtctacttttgtcttccctttatcctttgcacgagctgaggtttcaacgttagtagggcttgccctttttatcctgttcacatgctgttttgaagtgtcttccttggagtcttcctcgatatcgctcaatctagcttgtagctgtgccatcactttctccatttggcgagagaacttttcctaatgtgccaacttcctttgggcctcagctagcttgctggatactcagaccacctcgaggtcttgctcataataatatccatctttctagtatccatttttgatttcaccattgccctcttctgtttatccattgtctttgaggccctcctcaagatgttgttcctgttgatgggttttatcaggttgttggtcgccaactttaaatgattccccatcccttacaatgctcggctgggggtgccctagatggagtaggttagcgtcctccatgatgacgtcttggcctagaggagtaggcttctcaacattaatttttttggtagccaccatttttgcatatgcaaggtaacttcaactctttctacaactctccatgaaaataccaaaatatttaccaagatttttagaaactaattaaataagagcttaagaaattaaataggcaaataagtaatcgagatggagatttttatgtggttccggtgttaattaaccatagtccacgagtcaatgtattgttcgaaaggttttgatgtattacaatgggtcttacaagttgaagaaccctagcttcttgctatcttttctcacttgagcttttttggtttagagaagaagaaaccataaaagatgtgaagtgaatcatcccccttgcatgaaggtataaatgagtatttatagctaggatctggatctgggcatacccgtgatcctttaaggtttctgtgcaaactaggcacactattgggataaatacatgagatacatgacttaaggcccactggtaggagtctggctcgtgagtgagggtttctgtatggatgaggaccacgcagtctaagactagtgtcacgtgggtgttactccaatagacaaagatgtcaggcaagcgccattggacaaaaaggaggtattcttttttgtggggtgtgcactaccatgctctgacataggagaaaagatttgattctatgggaccagacgtcag

SEQ ID NO: 40387 - DNA, 1084 bp, Cannabis sativa
ataatttaccataaatttaatttgaataatatgttcatttcaatcaacaaaatattattatcaatttatattggtataattagtgatgaaaatgtccctctgttaattttgtgtaaaaaacacagtacacaaaaaaaattgagtaatcattgccgttaaatgaagaatttgtgtgtgttaattttcatttttctttattgatctatagtaattattttttatttattttttttaacaagcaattagtagttattgtttaattcttttaaaatataaattttaattagggagatttttcaaattactcatttttatgctttatttacaattttactcatttttttttgcagaataattttgatgaatataattacaccatatcatgttaacacttataattaacgcacaaataccacttgagaaatgatactaaatctacatttaattttatctgtattttaaattgaaattcttctatatatatatatacacataacgtttgagtacaaaattacagttattgagttgtaaagatcagctggaaagtgcagaaatcgcacatgaaaccgcagtaagtatactgaaaaagctagaagattgtacatggatggcaaaggcagtgctaaccctagctgttttcgcaaaggagtatggggatttcattggatatcatcgaaacaaacacaatattaataatgatttggccacttctgatcaactcacagactcattggcttttctgaaagggtggaaaattgaattattagacaaacagaaaactgaaattcgagagctaaatgttctgatcgagaagacacttgaactgatgaatgccatgaatgagttggagaagttttctaagaataggaaggtttccatggatggagttaaagctgatctcattctccccgaagaagtggattactattgggttatcatggctgtcattgcttgtgtgaataaatttactactattctcacatcaagttaccagcagctgtaagtttttactataatattcctttttccatcccaatttataattatatgccatgcatatataagtatatttatacgtacaatc

SEQ ID NO: 40388 - DNA, 2321 bp, Cannabis sativa
  modified_base (363)..(377): a, c, t, g, unknown or other
atccaatccaattagaatccaactattagcatccaatccaatccaattgtaattggatatccaactttttgtaattgaattggattggatcagttcggctcaatcagattggattggatgatgcccacccctactattttgtatttgctgggaatatgtgcccctattaagcctgtacagaaagacaagtgattcattcctagggatcaccctagaaaaacactataaataccccacaagcgcactgaggcaggggtcaaggattctgggtccagaggaatcaaagagagaaaataggagagaaattcaccaagaacattctctgtaaataaatactatcattaataacaaagactcgtggannnnnnnnnnnnnnngccccaaccacgtaaaaatctcatgatttaaacttcatacagcctttcctacatattatttaattggttgccgaaaacctcggtcaacaagattgaattgaatcgtgcgaattggattaactattttatgaacaccactactaaaaagaccttcagaacatatcaagaatagatatcgagatggaggatcttcctctctcaaacttcttttggctgaacatcacccacaatatcgccatttataaatttgaagtaggttcttactgctaattgctctattttatatatatatatatatatttatatgttaacacagattttcgttaaagattatgagcttattttcgtaatagattcagcacagaaattataagtgatctaagaaagaatgatagaaacagaaataacaccaagtttttacgtagttttgcagttaactctgcatagtcgacgaattaatcttattcaaattttttttgatacagaactaaggttctttacaatcagtgtatcctaatttctctctaaggattttccctttcatcttttttctgtatattctacccctatttatagtaatataggtaggtagttaattacattcaaattcgaatctcataacaatattccctgaaattgtgggctttagttactctccacgtagataaatatagttaatatttgaagatcacacagctgtgatttaaaccacttttaaggggtcaacgctgatgtggattaagacacgctgcaaaacgtatctcgctgaggcgtctcgcctagaacatgaacaggttgatttactcatatgtcttcccgcaatggcatgagcaccagtgtactgagcaaatttaaggactgctctttgaccataaagccttgcaaactggacaatcatgtcccaggttctcaatagcaacaatatccctagcaacaagctagagcttaccaggagtatgcattccaatctatagcgagaaggatgcctcgttgtacgttatttatgtcctccttaggattatgcctttggacgcgaaatggtttctcgtcaatacgtgaatcaatagtttgtacatccttgtcttgcttaagactatgcagtcagcgagttataaatatactctattaacaccccatttaatgagttacttcatttcgtatttaatgatataattatcaatatactcgttaattcatatttcctgagattgacacgtgtcactttctgaagtaccaaccgaatttcgggtataacaatatatacacaaatacatataaatattatttttcaatcactaaaaaattatttgataaaaaaatatctctaaaaaagaataatatgagtagaaatcataatatattcatattcctcacttcaatatttgtaataaacactcatattgggctattttccctaccattaggtggttcaaatacctgaaaccctgaaatctacaagctcacctgagaacaacatactgaattgaaatactttcaagaatatctaccctaaaggttagattaagcaacaccaacaaagccttaaaattaaggtggtcgaaacataaaatttgctaattgctaacgtggctgtcaataaatagtaattatcaacgagttaatttcgaccaaataaaaatttaggtaaaatacatttgcaccctacctaaatccaaaccaactgtactttgggagttgggagtaagcactaaatgatgtataatagctacaaaatgaaaatatatatcaaaactttaaaaaaaaaaaatgtgctataataactcaatattttaactcataaataatgtatctccacattaagggtgcatttgaaaagctacaatgtaattagatttgtgtgtaattggaggtaattacacaatttagcatgtttgtctgaccatgtaattacactgtaactaattgagggattccaattatact

SEQ ID NO: 40389 - DNA, 2103 bp, Cannabis sativa
agcagcagcagcagaaggttcctcctagacggacttaactgaaaattttataattttattattataatcctagctcttttatatgatgctagcttttgtcttaataatcttgttgatgcacatttatcatctatatgtatggttaataagtatgttcatatgtgtgatatttatggattaagttcagctagccagctcggtcatctacaaaagattaaaaataataatgaggttgaaaacatgcttgtttgagagtaagataactcttccaagaaaagtggaatacgaatagacacaaaaatagaccaatgttaagttcacaaaacatgaagatgaattccatcatggactgttccatattatccatatcaaaaacccaacaatgatgctgcattttatgctcagcatctcaacttggatagactccccttataattcaagtactggagatgacactgtttatgccaatgcccttgtggctttgtctactcctatggagcaaaaaactccttttactatccaaattatggtgagttgaattatgaagattttgagatgtcaactcaaatcatcatgctggactacaccacaaacttatggtccataagcaataaaacggctaaatcagtcggtgatcatacaaatttcctaaaacataaaccagtaatcttatttttatcacatgtcactaagaaaaaatcttttttttgtctttttcatcaaatggggtcatccaaacaagttacagggttgtacttatcattttggttcttgtgattggtgatgcaggtttctaatattgatgaggagaaggtgtgggaacagattgaagctgtaagaggtatagttggatacaaaggcacaccccaaaagtcaagtatagaagaagttagagctctctacatcttcaccggcgtagagccccctgcatcctttgaggaaaacactgatatggctcaagttgacagcaaactccagtttcttatgtccataattggagttaaataggaatagtagtttctctctctacttctgttttagttttaatgcaaaaatatcattttccatgtgtactgtaaatttagatttttcgctttggcaaatgggattttaaaatattttgctttgtaaacttctagactgtagtatttatatccataatgtgctctcttatgacaaaagttatcctaatattttgtttataatgttgtatgttgtttatattgtcatttcacctattgttattgttgtagtcataagtaacttggggtgttttgatgtattttttttttttttaggaatatgctcaaaggcattaaaagcattagtggtgtttagcaaattgcaaggcgttacccacaatagtgttaggttagcaacactcaatttttttcttttggcaaaataaatatataacatgtgatttctttgttgatattctcatattctcctttatattttatattgttgttatttttgcgtttatattttagtgcttttattgataatcacaactcaaagaattagttacaagagaagattcacaacaattggccaacaaactaaaggtacgccggtcactggaactggtgatgggactatacttgcatctcaaatgtcagatggaggcttcagaactagcaaagcttgtctcataaggccaccaaatgctcatgtggaactagaagaccccgagaacgccaatcctcgagttgaacatcttagccaaactgtagctgacctacaacaacaactatgagattctctcgacaaacaacacgaacagttttaaagtcggtgcatggagaactgacggaacattgagaatcaaagagttgagcaggaacaacgaagggccaacctgtctcaacgaatcagagaaacttatcactccaatcgcgggactacccctcgaaggagtctttttcagtaggctgaagagatgccccattggccaactggccacgtgggaacaagtacacaaggggaaacccttaatgcactgccatgtctggtaaccgtgcaagtactaagcaaacaacaggtattgagactccccaaagggaagcaaactttgagcaagggtccagaagggctcacact

SEQ ID NO: 40390 - DNA, 2253 bp, Cannabis sativa
  modified_base (2060)..(2068): a, c, t, g, unknown or other
aaaacttcaaaaactattttttgtgctcatttctaaaaacaattttttgaaaacaaaaaacaaaaaataataccaaaaatgctctaagtttctaaattctgattcttgtatttatttttgttatgtgattactttgggcagttaatagtaataaaaaaacttatttattgtgtgattatttagttgatatgtgtagtggatttgttttacatactttttattgcaagttgcttatagatgctatgtttctatattttttagcaggtagtcttcgtctccacctttgagaacttcgatcttgtataataatggttatcaaggttactttttctatttttaatgattatttagatttcgatagtggatatggctgctaatactttatggttttgatgtttatgctcgttcgacaatggtgttcttttgattttcgtttgctagttcgacgatgatgttttggatttgatgatttgttgctaattgaagttgttctgggttttatagaaaggctagcatatcaatcctcaaattggtttgattgtttgatttgcatgggcttattcatttttgttttctattttttctaattgtattttttcggcaactgaaacttgattcacgtcatagttgctgatacgacagttaaaatttcatcttcattaacgttataggtaaaattacaaattagatgataattatgtatattgttacaaaaattcttttttctaacggtgtcataaataatacaatactatagtttgaggtagcgagcaatagtcctcatagaaaattaaaatggagaacttactaaatattagattttgggcaactatttacaattgtactcccacacgaaaaaaaattatatttatattgtcctgcttttttttttcttttacactgtaaacactaaaaaaaaaaaataaagtctccatcttccacacacacgaatagaaccaccatagtaatacgagaacagccaaaaaataactattaatttcgacgagataaagcaaaaacattaaaaccattagtactagggttgtcatggtttttctaatgttgttattaggttgttcctctgttgttttgtatgtttaagaaatgttggtttcaaattatataggttaaaccaaccactaaatatttatttgatgtaagaagaatgaaagaatcatggacactaataatcttacctctctttgaaagtgtgaaatctagaagacaaaaaaaaaaaaaaagagagtagaagttggctaggaaaagaaacaacataaccaatgctgcaaaataggcggagttgggcacaagaagagaacatatatgagaagacatcaaaaataaaaagaagcaaaacaactaaaaaataacaattgaacaatggaggaaaaactgaatatatattggagcatagaatactaaagaaaatatataaatttcattgttactataaagaataaaacagtacaataatatttagaaaaatgtgacaaagaaatgaaagaaaataacattaaaacaaccttaaaataataataaaacaataacaaaataaaccagtaacagaagagggtaaattggagaaaggtggtggacttaaaagtgcggaagagatggagccaacactttgagactaaaaagatggaagaacatgaacttagtggaagtttttgaaatatttttacaagaacctcatcacaaaacaagctctccatctctctcttacacacacaaccacactttatctttcctatattttattttttttctttctccttcacatactttttttttttttttttggatacttatataaaaggagagtgtcagattttatttgagtaatgttgtagatttgagaaaaaaaaaaagaaaaaaaaaagaagaaaatgagtaggagagatagaaagagctcaaatacaataataaatgaataatgtaaatttgttgtaatttggtcaagagaattatataaatatataaacacatatatattctcttgaagtgggagatcaccttggcttgcctagatttcaaaagaaaaataaaaaaaatatatnnnnnnnnnttttttttaaaaaaaaaacaacctgcttttagcaatcaaatcaaaattcttcacacttttttatatactaggtgattgttacgtgccaagccacgtagtgttagttttatttaatattttagttttttatttgaattaataattaaaatagtataattatttaatagtataattattaaaaataa

SEQ ID NO: 40391 - DNA, 1500 bp, Cannabis sativa
  modified_base (1474)..(1474): a, c, t, g, unknown or other
aaataatgcatatgtactgtactgtccatgtgtgtgtataattaatgagagaaaaataattcatctattattagagaaccattaattatctaatatataattgttatattatagtttgcttaaataatataattaatgtttactaagtcatttcgatccttttttaaatgaaaaaagtgggactctactacgtacatacgtgcatgctataaatcggagtaataactagggaaatatgttattaatactgtttatactcttaattataacgaattttgtataagtagggatttcactaatgacaaatattatcaaacgataaattagttaattgtactagctagtgcaatatcgagcacttattataatagtgtagaaagaatacatactgacagtcagtctggttacatatatagtaaattaatgcatgtgtaatgatagagaatcatccattatgattgactcggattggaatctacctcttcttttttagtaaaaaaaattgagaaaggcaatcacacggagttaacaggtgtaaataatataaattaagatcaaagaacttagacctcgtggtcattacaaatcaagctacccagtacagaggacaaatctaccataccagtcacattaccgctaaaagtccatttcactacattataggcagtaaaattacataatttgaaaataaacgaaaaattacaactagtcaaaaagaatttgagagcatttacattaaaatacataattattaatactccaaatagaagaagttcccttcagagtaatgattattgtcttagagtcgctttctatgatcacaaaagaatgcttctcatgcatcgctgattccagggctaacagacaagccgcagcttctccaatgagagggtgagagaagttgagaatattgctagccacccacaaaattgactccttatgatccctcgccaaggccaccacacacattgagtcgctaccaaccttcacgttacaaatgatcttgacccaatcgttcaatgtgggagaccaagcaggaggcatgcaaatcactggtataggaaacaagcaatggctaagtaacatgtagaaatatagtcaatccatgtgcttaatgttacaaatataattaacattatgaatcttataattattgttctggattttccaaatcgtgtccattataattgatgtatacagaaaaacctttttgacaccttttttctttaggctccataagaatttgacccaattccacatttgggccctagactcaggcactggcatcacgccccaaggggatgaccttgagaggtgaaaagcaaagttacattaatagtggaagagatgttccatagtttcctcctcctccccacaaagggggcaaaacacatcctcaatctgcattcttctacctaaagctgacctaatcggtaaggcgtttgagaggatactattgggttttatgccctanataaaactctttacaatctgattagt

SEQ ID NO: 40392 - DNA, 1126 bp, Cannabis sativa
taactataatttacatgaccatgataaaaaattttactaaaaaattacatcgggtactaaaacggatagagatgtatcggtacatcccttttaaggaagtgcattatagaattttcctaaattacactattgatagtttatgttataaaataatagcaagctccataaaaagtcatctcagtagatccacttatttatttccacattcagtatacaaattatttagttcattttttttgttcaagattacatgttgtacctatttagaattacttgtaaaatttttaaaaaatttaaatcacctacagtaatatagaaaaacagctacattatcgaccttgtatattatttaaaaaaaatttaaaatttacaaatgtataactaatataaagaagaaaaaaaaaactttcttgaatgtcgataatggagtgtattatagacttattgatagattaatgatattgtttggttggtttttttgttcgacaaaaatggtagttcgtttagagtaactatatcaagagttgcaatctttgacagtacccatttattcaactggaaaagataaacctatttattggctgttggtggttcttattcctaggatagaagaagggttacaacctttggtctactctgatattttacgttgttaataataataataatattattattattattattattattatgtgcagtaatttttttcactgcgttttttttttttttactttctatataaaattgagttatggagatgacaatagtggcagttaattttgacgtgagatatgatatgttgtgaatgtgattctcatatacgcccagaaaataaaatcgttgatggatttaaacgagacgcacatggaagttgatgaatcactatctcatctccttgccttgagaaatttatatgggcttcatcaaagtattattggatacaatgcttcaaatacaagcacagaaaatgtaagcaattctataattgcttctggtatagaaaaagtgagagaagaagaagaagaagaattactatacatttgctttttatataattactagtaaaatagaaactagtttctcatgtctaatttgtgttgcaattaattattcataaaggctt

SEQ ID NO: 40393 - DNA, 1316 bp, Cannabis sativa
tattattattattattatgtacaaatagattttttgccctaaacaatggcctttgtaaaagttttggcttctgaattttaatttattttttttgctgcaaaagtctcgatctctccctcgaactataaaaatcattgtaaatatcgccttcagttttcatcttttgatatgccatgtgtcataggtatagttgcaagaagagaatttatttaacaactttaaactatttgaaatccaatttattaacttcaaacatacaaatatgagcaatttttattgtagagcagaatttgttttaaaatattgtatatctttttcaaaaatattgtataagttttatgttgtatactgtgttaaattttcactgtttgttccacggttgttttttagttgttctattgttatttttaattgttctattttgttgtacagttattttaggttattttataaaaagacagtattttcataaaaaaatccgtactacagtaaaattataaatttttgcctaaaatccaatatctttataaaaaccattatgggtttagtccatatcatttacctctaaaaaaagcatgtcccactcgtactcctgagatggacaggttgaacccaactccactacaaaattttttacttttagtgacaacaaaatttgtgactaaaagtgaaaaagttgtgtctaattataaatcagcattcttatgttgtgactaaaaagtccgtggctaaaggtattactcacaaaaatcacaatctgttgtgactaaatgtatttttagtcacaataattgtgactaaaactaaatttgtgacaacttgtatctcaatactatgttttagtaacacgtaactttttgttgtaactaaaactcatattaatttagtcacaaaaaatttatgttgtaattaaaagtagccttttttgtagtgcccataagattctaacttttttttttgcattcagagaattgggttcaggcgggctggtcgggtttggattgaacctagtccaaatgttcagccccaattcccataattcaatatcaaaccgtcatttttgtaattattttttgtatgattgtaaagttaaatttgaatatcatcacattatagtattatattaataaattatttataaaaatgagcaaaatatataactaaacaggagatgtttacaataactttttgtaaacataatttaaatacaacagtggattttaaaaaaaaaaatcaaaatgcaacagagaaggatccttcatttgaaaaaaaaaataagatacactaagtaaataatttcaaataatacatttcca

SEQ ID NO: 40394 - DNA, 4446 bp, Cannabis sativa
  modified_base (2937)..(2940): a, c, t, g, unknown or other
agcccacatccctacttggaaatggccagccaaggcctacaacacagcacagttcaggccgaccttcaccatacactctcttagagtatggccgtgcagaccctaccacattagaatctttagtccctccaaggagggccagtcagtcaaatccctacagcaacagacccttctatgtaagcatagttggaccaactaagggacatgattcaagacatagctggtccgaaacctttagatcttgaactagattggtaaggggatcacaattcttgacatacacataaatgcccttgcccttgtccaaattttcaagaatgctctggtatgtggaagatgtataccagataagaagacccattggtggacatcaaatgtttcgagatgtagcttgatctccagaatattagtggtgatgtatgatgtctcatattccaagccaccttattagaaacaactcaacaatggtacttcaaacttgccccaggaagattcaattcttgggtcgagttattgcaagaattttacacacaattctcatcctcaaggcttgtactatcacaactagaagatcttgtcgaagtcaagcaatgacaaggagaacctttgaagaattacatctagagattcatggccgaggccacgaaggtcaaaggccttacataggagggcagatatgcagccatactggagggcatactcctgttgagtgacttctggaaagacatctgaaggatctcaactaacaacatgaaggagttcctcgatagagctaatggctttatcaaacatgaaaaagctacatgacaggcccagacactgcatgtcaacaataagtagttacaagacatcctgcagtctcatgacttaccaagtgcacagacatgtaccaataactcttcccaaacctctagtggaaagaacattagaaacaagcacaacaccaataggtttgggagaaacactggaaaaaaggggaagcttaacacttctcgcacgccacaaaattagaaggacaaggaagagaagtacacttgcttcacccacctgacggagaaacctaaggccatcttcatggccatttagggaatagtcccctacagaaagccctttcccatcaaaaggtaattaagcaagaaggacatgtcaaaagttctgtcagtttcacaacaacttcggccatgacaccagtgagtgtgagaatttgaagagggagattgaataccccataaggcaaaacaatccccacttgcatcgttatgtgcagaacgactagactcaagcataaggtgcctagaacggagatccaatgccaccaccagtggcatgacacttagggatcatcattggcggtccccaaattacatgtgagaccagcaaaggtagagagcgctatgcttgaacacttcgtcacaagtccaagagtgatatcttggcagtcaaagaaaggggctctaagcaaccaaagcttggagagcccattatctctttcacagaaggagatgctgctcaagtcagtttcctgcacaacgaccctctggtcatcactgcacaaattgagagcatgactgtggctagatgtatggtgggcaatggagcctccttaattttttttttttcaaatcaacatataaaaagatagggcttcaactcactgacttgacacactacaattaggtgatgtatggcttttttggccaaggcatcgcacccatcgggtatatcagattgccccttcctattagagaaaatccaaccaccagatgtctaatggcgtaatttgttgtaattgacgttccctcatctttcaatgccatgataggccaaccaaccttgtaagacttgaaggcagtaacatccatctaccacctctgccttaaatttccaacaaggcatggggatggatgtttgaggggaaaccaacagtctgcatgtcactattacaacttggctttgtcaaaagccaaggaaaaaagatacttgccaagaactcggaagaagagccaagcaaagtatgaagtccagcccaaagcggggacatagatatagatcctcgctttggggatcttgtaggcaacttcacacctgtagaagagttggaaagaagtggaggttgatcccacttccctaataagaaaaatgaagatcgagaaaggtttagcgccaaaaataaaattattatagataaaatttttaagggcaaacctggacctctttgcatggtcacgtggagacatggttggaattaactcctccgtgatgacccatgcgctcaacatcgatccgaacatccgacctattcaacaaaagaggagattgttggacaaagagcgtgcttgagtgctcaaagatgaggttgagaggctacgaggccatgacttcataacgaagacattctatccaccactttgggtaggtatccaacccagtattggtacccaagcccaataagaagtggagagtgtgcattgacttcaccaacatgaacaaagcatgtccaaaggacttctttccgtttcctagaattaaccagcttgtagatgccatagctggccatgaaatcttgagtttcatggatgcgtattcaggttacaagcaaataaatatgtatccacaaaatcaagagcacacaagcttcatggcagattaggcatgtactgctacaaagtcatgcccttcaaggtaaaaatgtaagggccacatattagaggcttgtgaacatgatgttcaaagatctcatcggccttaacatggaggtgtatgtagatgacatgcttgtcaagtccaaaaaggctaagggcatgttgaggacctagacgaatgcttcataatcctttacagctacaacatgaagcacaatcccttcaaatgttcttttggagtaggctctacaaaattccttggcttcatagtagacaagatccaagcccttttggnnnngaagtcgcccacaaccatcaaggaagtacaaagcctaccaggacgcatttgtacactaagcaaatttgtgtccaagtctacagacaaatatgtacccttcttcaatattctcagaggtaataaaaaatttaagtggacagaagaatgtaaaaatgcattccaggagctaaagaaacaattggctcaaccacttgtgttgtcaaaaccgttagataatgaagagcttggcatgtacctagcagtcacagaacacgatgtgagtgttgtcctcacaagagaagaagatagtgtacaacaccctatatactacatcaacaagagactaatcgacgctgaaagtcggtatccactcatggaaaatctaacttatagcttactcttggcttccaaaaagctaagaccctacttctaggcacacccaataaaggtgtacactgatcaaccattgtagtaagttttgtaaaaacctgaagcatcaggctgactactcaagtgggtcattgagcttggctagttcgacataacataccaattaaggacagccataaagggtcaaacccttgcagatttcatggctgagtgcacaaactcatccctcaagattcaggagaaaagcaagagccagagaagaagcaagagcaagagtagcagtaagaacctgaagaacctacatggaaactccatgttgacggaagctgcactgactaattgttcggtgcatgcatttcccttataacacctgggggaagcaactgcgcggagtaatcaaaataatgaggctaaatacaaagatttaatagccagcctcaagctagcacacaaagtacgggctaaccacctagacatatttagtgactctcaactagttgtgaattaagtcctaggtgaatacacaactcaagttgaaaaaatgggggcctacttgagaaaaatcagagacctactaagtcagctcaaaggctacaaaattagacagatccccaaagagcagaatgctacagtagatgcagttgcccgtctgacaagtagcaccattgatgataaggcaaacttggtgccaatataattccttaaagaaccctgcattaccatcccagaagaatttgacatgttggataacactccaacttggatgacacctattgtagcttacctccaaactggagccttgccagaaggcaagaatgaagcaaaaaagatgagaagaaaagctgctaggtatctaatcctagatggagtaatgtacagacagagctttccatgcttctcttaaggtgtttcaccaaatttaaagctgagcggctaatggttgaagtgcatgaaggcttctgcagcaaccctgttgggaggcaaagcctatccaaaaagatactctgaaaaaggtatttttggcaaacaatgatcaaggactccatggactatgtcaaaagatgtgacaagttctagagattcttgaaaattctatgagctccacctaatgagctcacaatgatgcagtctccttgg

SEQ ID NO: 40395 - DNA, 1361 bp, Cannabis sativa
attttctttcatttcacttcggaacccatcaccatatcgatgtagcgttagcagtttctcatattatttattaaataaaattatatgagactggtattgaaatgtactaatcacgatatactacctcttatcctgcttatgaaatcccttatagtgtggttgtggtttgtattttttgctaaacttgtgtaatttacgattttacatttaataattgcagttactattataaaaatacttatattttttaaaaatataatttttatttttgaacattattattgggtacaagtgatgtcgatcactttttataggcaatacttcatgattggctaactatattttttaaaaactattttctttatatgaaattaagacccaataattaattaccctataattttagcaattcttttattttttttatacctcttaccaaatacaacctcacatttttcctaagctttatacacaaaatagagtaagaaaaagagaactatctctttgtgctgccattgctaaacaatgctaccttcaactctcctaaacccacactcttcccagctcttctctctcctccccaccacacatctttctctctcatcattatcatcaaccccatcatcttcttcactcaaattcccaagaaagtttcaatctttctccccatctttccaatcctctagcttcattcaagaagatgatgatgaagaagaagaagattatgttattggagactgtgttgtattcgaggaaggaatattcgaagacccttttctcaaagaagaagctcaacccaaaaaagaatcttcagcaattagaccagagaatttggtcccagataaatggagagaggttcaagcagagattaatattaccaagaaagaaaggagaaaaattgcgcaggaattacagtttggtactcgcgtagagatgaagaggaaagggttacaacctttgaggaatgttaatttggaggattacttgtcttatcgtcaagctaagttagctcagttgaaaccccttgttttggatgacccttcttcttcattgattgagactgagattgaagaagaagagaatggagttaaagggtcaaatgggtcttctttgagtggacatggacgtgttttgcctaagaatccaaggtgggctgtgtatggtaagggtttggatgatgttactcagttcttcaatagtgggaattatgacccttctcagaagcaatctgaaggtaccttaaattactctaagttatgttatttctcaaattttagtatttcacattgttaatttgacaattttgactttagttcaagattggtatatgtgtgtgtttttataaaatttacttattgtta

SEQ ID NO: 40396 - DNA, 1948 bp, Cannabis sativa
  modified_base (193)..(212): a, c, t, g, unknown or other
aaagattcctaaaatacccctaaaataaaatttcactcattctctctgactttccctctctctctcactttccctctctctctctctctctctggcttagaggtgaaaagaatgagctataaatagacacatctcccagcttgaaactaggtgcaataatagcaccaactaactaactaacataattgaaagnnnnnnnnnnnnnnnnnnnntaatttgatttagaggatcaactaccacaaattttcaccttgattctctgaatcaaactggtagcaatcttttcacataagccttgatgatgttgatatctcaatatattcagcaagtaccaatgatcaacaaacaaagacaatgcatcagtttgctgaaggtgagaaccttagttcccatgtctgcagggttgtcacttgtgtgcaccttttccagctctagaaccctgtcctcaatcttctcttgaatccagtatagttaaatgtcaatgtgcttgctcttctaatggtacacagggattgatgtatcaataataccgcactaataaggctacactatttttagttttatttgcaggtatttcatatatatacacaaaccaacaaaatgctttcataaaaaataattctaatatagtcagtttattcatatttttacatttgttgagttcgcgttgattgacagtgttcttaaagttctttatttacaaaaatattgttaaactataactcattattcatcagtgcaataataatactttgttaaatcttttcttaatgatgtccaaaaaaattgttcatacataggttcacctacgttgtctatcagttgcctatcagttgtgctactaaaaatattattgtgtttttaaggttgtcaaatatattatagatgcctgacattatatgtgttatataaatagctaatgttgtacatgtatcttcaatgctctattgcatttaaatttttttacaagtttcttatagttagctgaccatatttgaaatttttaaaatttcaggaaacggaatcaatctcatttctcatacagttcaatgggcagtttgtatgatcaagtaatgaattatgtgaattaagaatctaatgaaaaatttatctcaagtgattgcgaaatgaagaacatgtgcacaagttgaagcaagtgctagaatgcaacaaaaaaaacacttaactgcaattgaaagaccaagtgaaataaagttaccaatcgttgaggataggacgatccaagtctattcttttacatataactaaaattaaaaagaacctgacttcacaatgtatctattgtgtgaaaatggtcagcaacacaacaacaacttattagttgcataacaattattttaaggttgtatatcatatccaaaatattaacagaaacataaaacattatcaacatcatatttgacacattaatgtgaaattctaaatattttcttattacattaactattatgttcaatctttatatatgttgaaattgatcaagacaaaactgcttttctagtttcataatgttatttttgcaattaagtcatttagtattgctatagctggatcagtggtttggaatattttataatatcttttcccttttggtggtgtaatccaattttttgtagttcctgcttcaatggttttctcaaagttaattttcaggttggtgattttatttaaatttatcgtcgggcaatactgataccaatccccataaaatattcttcctcctttcttttgcttcctttgttgcttttttcttcctcattattctttttctctcttgacgcaaatcgttcctctaattttggtaaataaaataaaataaaaaaaaagttacgtgtgtccaaaaagtattttggtaaataaataaaaagaaagtataaaaatagtaaaatttaataaaagttgctttttctataatatatgtgttcat

SEQ ID NO: 40397 - DNA, 1902 bp, Cannabis sativa
  modified_base (1850)..(1852): a, c, t, g, unknown or other
aagcatcatgttcaaaatcattgctcgcgaaatgtggacaaacctccatgatcatttcaatcagagtaatggcctgcgcattctccaacttaagacctcttttaacaatattaaacaagaatataactcggtcaccacatgcttcactcatttacaagccctatgggatgaactcaatgagtatcaaccaagtactccttgcacttgtggtgccatgcaaaaagatcaagattattatgctcaagaacagatccttcatttcttgatcggtttgaatgaatcttattggggaatacgggctcagatcatcctctttgatccctttccaccactatctaagattttctccatggttgttcaacaagggcgccaacgttgtcttcgcaacaccggtattgttgttgctgtccttgccaaactaaaaccgaattagccttctcggaacaagaagcctcgccctacatgttccaattgccttcaaccaggtcactttgttctgaaatgctattttctctatggttttccacctggatatggtgacaaaaagcaaaacacgcctactgctcgggcaaactaagtttcggccaatcctaaggcccctattgctggcttttctcaactacaactcaaccagcaattgatctctttactcaatctgcaacgccaaagcgctccatccaccagcaaaaatcttcccgtggtctctaacgtctttggtaatgataatttttttcttcttttttatggattgtagatagtggaggtactcatcatatatgtcattctcttcattgttttacatctctaaacactaatcatgttgctaatatgttactttacctaatggtcaccagattcacataaacaaatctggcactgtaaaagtatctaataaactaacattgaccgatgtgttatatattccagaattcaagttcatttattttatgttaatgcttaccgtgaacattgtcataataaactcacatttagttttaatcaatgtttgattcaggatccctccctgacttttacgattgggatagctaagaaagttgaccaacttttattctttgaacaagagcggcattttctcacttccaatatttctatctttgcaaacactacttgtaccttgaaggagctctggcatcttcgccttggtcatccttctatgaacattactaatatactaaataaaagtttgtaattctgtgaaaagcctttggattatatgtgctctatatgtcattttgctaaaaagaaaggtctccttttatttctaacaataattttgctaatgctgctttcgatttaatacaacttgatatatggggaccttttcatattattggcattgaaggttatcgatattttttaattattgttgatgatttttctcgttccacttgggtttacatgctaaactcaaaatctgatgtctctttcattattccacaatttttttttcgcttattgcaacaaaatttttagttcccatcaaagcagtgtgttgcgacaatgctaaagaactgaatatgacaagcttttacaatagcgaaggcaccgtgaagtacagctcttgcattggtcgccctcaacaaaattttgtttctgagcgcaaacatcaacacatattaaatgtcaatagagctttaatgtttcaatctcatttatccttaccttattagacttatgtcataaatactgttgtttatctcataaatcaaactccatctatattacttaactaaaagactttatttgaagttctctttaagaaagctcttgcttatgaacaacttaaattttttgggtgtccttattttgcctccaccttggaaaccgannnacataaacttgatccaagatctcgtccttatgtctttattggttatccac

SEQ ID NO: 40398 - DNA, 1946 bp, Cannabis sativa
aaaatgaaagaagaaacaaatagtgaaataagtttgagagaataatggatggatgttaatggctgaaaattctataaacaatggtcttgagtattagtggaaagaaaattaatagactcatgataaacaatggtcttgagtattgttcaagcatgttcaaggatttatttgtcaaagaaggcatatcaaggcatcatacagctcaaaagacccctcaacaaaatgacattgtagagagaatgactagaacactcatagaaagagtgagatgcatgctgagtggagctggtttggaaagacaattttcgggtgaggtagttaaaactacttgttacttggtaaataggtgtctatctactgtaattgaatttttgacacctaaagagaaatatggactagaagagctcgtagttgtgatcacctgaaggtgtttggatgttcggccaagacaaactataaccaagagcaataaattttttatttctaggctattgagatagagtgaaaggctataagctttggtgtcttaaactaggatttaaaagatgcatcatcagcatagatgtcatctttaatgaaatggacgtgtctacggaactacagaagaaaacagccacacaagctcttgataacaatcgacaggtttagattcaacttgaaaatggcacaaatgaatatgaaatgaggataaattaatctacatgcattgaaccttctacagcatctcaaggtgaacttgagacatatcaacttcccagagatagaaaaagaagagagatttactctcttgatatattgggcttttttgaactagctaacttcactgggtttgctttattagtggcatgagattaaaattgtagagccaacatcctacaaggaagctataaatatcagagatggtgccaagtggctccttataactcaagaataaatgacatcttttatcaagaacaagatctggtgataggctagttttattaggtttattttatgaagtatttagaggtgtgtttcaattgattatattcatttcgtgcataattatgcttgttttctacttatttcaagtctaaaaggtaaaattcataatatgaattgaaaataagaagaaacatgttaaattagacgagtataattaatttatcatagaatttgaagttctatgatataatggcgtaaaagattctaagttttggatattcaacacaattcgtttgtgatcaaaaattaagtctcatgattcaagccaatttttgactatgatgcgttcactttaaggaaaaatattgtaaataaaagttataaatctctctttcagcttttaaaaacatcttgaatggtctaattatgagcaaaattgcacttgttaaaccattttctaagttcttatatgtattcaagaagctccacattaacatttcttttactgaagccttagaatgtttagttatgtaaaatttataaaagatattttgtctaagaaaagaaagatagaagactatgaaattgtggccctcactgaagaatgaagtgcgccattttgcaaaaaaaaaaaaattaccttaaaagcttcgtgattcaagcagctttaccatttcttgtatcattgggaagtttgaatgtaatcactctttgatttgggtgcaagtattaatatgatatctttatttgtgttcagaaaacttggtttgggggaagcaaggtgcaacaccctactagcttaagtacgttacaatgttttcttaattactgtgctaatatttgttaatcaaagggttttcatcacaaaagtgtgtttaataaaaaaatttataataaataaaactttaaacatggatcatatttaaaaagtgtttgcaaaacttgagaccccaaaatctatttttcaaacatagacaaaagacaatataacaaaagtgtcgtctagtgataaacaaaattaa

SEQ ID NO: 40399 - DNA, 1611 bp, Cannabis sativa
aattattttttaatgcagtaaagtatttaacattttctaacagttatgcaaagtgttgtaaataattacaatgtatacactatgtcaaaaatattataactatccacatattgaatattaaaatatttttatattaagtataaaattatttaattcattttacttatatgaatttttttatatccattaaaattgattctaaatcaattatttaataaatatactaaatttcaagatataaggagggcgtgcatgtttctcctgcttttcccatggcgaagaagaagagggtcatctgaaagcctgtatctacgagcacggtgatcatcagagctgatgaggaacttccttctatccttgaagagagtacaaagcagatcatcggtgaagaattttacgattcaatcgatatactggagaatgaaataaggctagagattgaatctggcaatatattccctaaaatggttagttgggcagaggaggtcgagaaaaaagattatcaatcaaatgcgagtgaattgtggagccaattcaagactagtcaggtacatactccctcaaccagactttcttttattgaaccgatcaaagtagattactagcttgttgctaaactggacttagatgaaatcaaaattgaggcttcatactagaagaatgatactgttttgtattgttttgggtgttataatccaccattcaaggtttttgaaggttttgttaaaaagagtttggggtaacaggggagttgagaaaattgttcgaatgcatttaggcttcaccttagtcaagttgagagatgaggttactagagacatagttttggaagcaggagttatccactttgacaaaaagccagtaattcttcgtcctttgacagcagagatggattcaactcaattggttaactcagttcttgtttggattcgcttaaatagattaggtctccaatattggggaaagaagaatctcagcgcattggttagtactatctgtaaacctatcatgattgataaggtaactcaagaacgctcaatggtgaaattcgctcgagtacttgttgatatggagatctcagaggagccaccaaaaataatttcctttaataatgaaaggaaacaacttgtggaacaacaagtggaatatgagtggatcccctctaaatgctcggcatgtgggaatttgggtcatattgtggccaattgtaataaggagaggcctgtggtttggaagaggaagcaacctagggataataaggctaaacaggaagaaaaaaaggagcaacaaaatcacgatgcagggatagttattgaaaagaattttcctggtgataccgatgcttctactgaagcactggagggaaaactagatcaagaggaggttaattctgccctggaaaaacctgatggtagggattcaggtaattctaacacctggattactctcaaaaggagagggcagaagatgaatttgaattcaaaagtggaagctcctaaaacagttagcaacaatgggtatgtagctcttcaaggagttgtaaatgaggtaaaggttcccaactctaatttgatttttaatggaagtttgtaactgttggaaatattttcc

SEQ ID NO: 40400 - DNA, 1430 bp, Cannabis sativa
gggatgtgatcacgaacaacgatgaagaaataggaaggttgaagtgttgtgagaggtaagagtaagaagaagagagatgacagtctctaagaggttcataaaattacatttaaatagacgaaagataactattttttcttctttataattaagtaagctcatgaacatgcatagaactcttcgctaacatttttccagcgataaaagagcccttatacattcaagcaaataatttttatctaaaaacaaaataattgtgtcatatttagatcggtttaatacactatagtatagtactttttaaaagaagatctttattggtaggaaaacttttattaattcataagatatttagttgttctacaagtgagttttaagtaaagatgctattagtgtatttttatacagtactctggttattttattattgatttttttgttatttatatattattaattatagtatttttttatttatacccattaggctttgattcaaggggaaaaaaaaatcaagtattagtttttttttttttttgaataaaattcgcaaactttattaaatatcacgatggattacatccataatcgtagcagggattgtagattccctgtacgtacaatcagctaaagaatcgaaagcccttgcaagatggtgagctacacgattcgcggatcgtttgacaaaacatacatcgacattacttaaacttgaaatcaatctttgacattcagaaatacaaaagccaaaggaagaacaaaaggaaatagaacttctaatagcttggatagtgaccaagctatcagattctaccacaacattggagagatttctttcctttagccaacttagaacctctttgagacccattgcctctgcaaattcagcagatactttgccccatctgctgccattttttgcccacaaaagcctgccttcgttgtttctagcaacccaaccaaaaccatatcggttttggtctttaaaaatagaagcatcaacattgatcttaatcgtattaccaatcgatttcatccaaagctcacccccctcattcggttttaaattcaattgagagggaacaaaagttctttcttgagcgttacaccattgattaagattacctcttgctaatgccaatatatgttgagtttgtctagaaatacctttccaaactttatcattccgagcttgccatatagaccagcacaacataattgcctgttgatattgagcatcgtcccatgtagcatctgcctccataaaccagtgcccgaatgtctggtttattgctgcactagtcgaaaaaccagctgcacaccagcagcctgtaatttcaggacaaaaaaccaagcagtgaatggccgactcgggatcaattaagcacctgggacagctcctttgtacatggacatgtttagtgatgagt

SEQ ID NO: 40401 - DNA, 1905 bp, Cannabis sativa
  modified_base (820)..(822): a, c, t, g, unknown or other
tattttattgttttgtttctgcaaaattgtgttctgcagtgacagaattacattttgctacggcatactgtgatagttaaatattttattgtttttctgttataattggcattttcaactcaatttttcacgtttgaaatgagatttgagcaccgatttaaaaccgttggaatgccctttaaaatcatgtttcttttttggcttgtaactcttgtaaatcgttggaaaaagtacaatagtgtttaaaattgttgggaatagtccactataaccgacaattttaaacactcacttaattttattagtgatggactccaaaaaaaatagtttgaggaccgacgagaataataatttttgtaatagtgtaaacaggagtgggcacgtcctacatgtaattgatctattaatgacctatttcaagttaatttgattaagactttcacaaattatattcgtgttaaagtcattgataattctttaatgagttgacgtgtttaaacaatatacatttatgaacgagctacacatgttatgtcatgccaatttctttataaacgtgttatgtttgagatttttgccccctgaacttttaaggtcattaaaaatatctcctgaactattgagattgttgaatttaagggcttttgtctaatttcatttaattttactatttcaataattatttatgtactaaatcatgctcttcagactttgatatctaccaaatcatgcctcgaactttgacatgtactaaatcataccccctgaactttcatccatgttaaacttttttattgaaattggacaaaagtccttaaannnaacaatctcaatagttcaaagggtatttgtaacgatcttaaaagttcagggggcaaaaaacctaattagccattcattttttatacgattattaaacggctagtgtttggatcaagcatacacttgtaatacatgtgtcttgacacaacacgaatacaaccactgaacccatattgccaccccttgtctagccaccccttctaatctgaacctccctcttttgggaaggaaagtaggaaaggtaggctatcttttaatgaaggctttttaataaagatttggttgtgctcatattataaatgttgtcaaacataagagccaaccaagactcctaataaagctttatattcacaatttcttattggcctaataaataatttttaattcaacaataagaaaaagaaaattacaaataaattttctaaatcctaataaaaattacaggcagcattgaattttaaaaaaatatatatatttttctgcatggacacaacacaaagatctaactctcaaaatattatgcttcttaaattaataacacaaaattcttttgtaggtcatgtctaagattcaatcttaaaagattggttggttaggtacacatgaaaagtacctatcaaattgatgttactagtcggtgctatttttccatgaatatgaaaattttaaatatagctaaaaataaacatataaaaccaaaacgttctgataaaaataaataatattaaaaaaaattatatttatgcatgagggctatatatataatatatatataacataaaagtatacctaacaacaggattaatattaataatatttggttttgttttgttgtgtttatgctgtcaataaataattataatgtgttttttcattttgatttgtttgaagagaagtgttctatgttatatttatatagggaaatttatggttattgagttgcatcgatgtattaatttattttgtgtttttaatatttagatagttttaattttaattttttatatgataattaattaagaaataatataaatttcaataaattaaaaaaattatgtgacaaaaattcaaaaaaaaaatatt

SEQ ID NO: 40402 - DNA, 2450 bp, Cannabis sativa
cttgaaaaggaaacccaggtacagcgtcgtagttggggggggggggttgtgcatgtccgttatgaacatgaaccacaagtttttgtcttttaaacagaaaaggatgatccattgatttacaaagaagcaatggatgaccctgactcagacaagtggaacaatgccatggatcaagaaatggattccatgggcacaaccaaagtctaggaatatgaaacttcacctaaggatgtttcaaccattgggtgtaaatgagatttcaagaagaagacaaatgctgaagggaaggtggagacctttaaagctaggctcctaaccaaaaactacacacatcaagaaggagtcgattatgatgaaaccttctctcctgtggaattgcttaaatttattcgcattcttctttccataactaccacttataattatgagttatgggaaatggacttcaagactatttttctaaattgaaatcttgacgaaatcatttatatggaaaactaaaagggtatgtgctatcagaggaagataaaaaagtatacaagtttcttaaatccatttatggattcaagcaagcatctagatcttggaatatcacatttaataaaactattaaagagcatgacttcgaaaaaaatgaagacaaagtctgtgtatacaaatacattaaagataatgtgctggtattcctagttctttatgctaatggcattgtacttattggaaacaatgtaaaaatactatcagatgtaaagaagtagttagccaaacaattccaaatgaaagatttgagagaagtaagctatgctctcgacattaaaatttatagagatagaaagaagggagcattagcactttctcaagcaacttatatcgataaggtgcttgaaatattctaaatggagaattccaagaaaggacacttaccatctagacatggaattactttatgcaaggatcaatgtctgaagactcctcaagagatggagtgttaaatgccaaaatattacatatttaatagtgtaaaaatacgaagttaattaaattttaaataatattttcataaaattaatattatatatttttatattgagaatattttattttagattaatttatctttgtttataaataaaaattagtatttatggcataatggagaaaaaattaattagattttcaaataaatagtttcaataatttaaagtgatatattttatgttgaaattattttattgcatttaattttgttatgtttgattgagaaaatagcatttggtcaaaataggaaaaagaaatatgaaaaagatgataaaaatgaagtccaaaatatgttgaaagagcatttttgcaagtaagaaaaaccattgcaaaaagcgcaccacagaaaggcccaaccacccctttcttcttctctaaggaacagcctcgccacgtggcaggctgtgatttgcgtgccaaaagcaaaaacaagagtagcaggctcccttgtctccctgtactccatgagcgcgtgtagagcagtgtcacctccccgctgcatgtgtggctcacgcacctgccttgatactggggctttttctgcccgtgtctcccacttgcaccagcgaccattttgtagcattttctccttgcgacatgtggcaccgactcaaatatgacatgtgccactccaaagtttacttatgggtaattacatttttatccacatgtaatttgtaataagtttaattgcgcattagtccttttactttcctataaatagaagcttcagtttttataattcaaaatagtttcagacaaaaaaatccagagaaaatgctcgaagtgcttagtgttagtttaccattttttcttagttgatttttctatgggtttcaatgttcccttattattaaggtggacgatgaaacttagtgtatttaattaagtatttatttttattttgattctcaatacaatatatgcttatgatttttgcttcttaaaataatttctatcatatttaatatcacatttttttatagttagaaattattaatgtttggttctatattttattaaaaataatattctttgattttttgtatttacattaaattatttcacatttaatgcttagaatttataattttaaaagcgaagaaaaatctatttttttgttagaaaataattggtttgatactaaatatattatgagaatcaacacaaacataaatatttttatatgcatttaagtggattctgaacccttaataatatctcaaaatatcactgaaaatatctgttactgtcatttttaccgttaaaatattttattttattttgttaccaaaaacgtcactatttttgaaactaggttagagttttaattgcttagattaagtaagtactttcttcaatctcacacaatttccatgggttcgatctcgttcttcacagtctctacacta

SEQ ID NO: 40403 - DNA, 1979 bp, Cannabis sativa
caccaaaggaggaaagcacagcatgcccacgaagtaaaccaacttcgcaccagcaagcagccgcaaagttgcacaaaaccagacaatagctgatagtttcagccgattgattacacccagggcaaatagaggggatgaacatgcctttgaatgagctgagcacgagttggtaaacagttagacaacccttgtcaaagaatttcttttacctttgagggaaccttcaacttccacagctcattccaaaaactagagttgccattaggggcttgaggatatttcaaatcttgaatcaatttgtaggcaaatttgacagactacttactagatgtttccttgctccaataccaagtattggtatctcctgaagaagcaattgggatgcttaaaatcaactctctgtctttactattaaacaaatcaacaattatctcatggtcctagctttttgcatccacgaccaacaaacaacagactttttgatcccacaaacttggatggaacgatgtgacaaagggattatcactgtcgggtagccaaggatccttagtgattgatacatccttgcccgccccaacaatcaaacaacccccttttaagataacatctttagcttcaagaatggtcctccaaatatagctaggattacttcctaatttagcatcaaagaacgacccacgaggaaagtatctagccttgaacattatgaaaagaaataagaatgtggtgttgggttttcccaaagagaaaatgaggaaaaaagttgagagttgggatagcaaatttctgtctcgtgctggtaaagaagttctttcgaaatcggttgacaaatctctgtctaactatgcaatgattgttttcttaatccctaaaggcacttgtgaggaacttgaaaaaatgatgtgcaagttttggtggaaatctaactctaaacaagggaatggtattcactagatgagctgagaccatttgtgtgttccaaaggatcaaggggggatgggctttcgccacttgcatgattttaatattgcacttcttggcaaggagattattattagagcatccctaatggtaaaaaattaagggatgcttgcttaggtggatagatgaagtggcaaaatattaagatgatataccattggagggaaaagaatgttattctaggaacatgtgtgaataatgatacacagtagcattgatgctatcattatttttctaataaaaaattaaaactaaaatattattattgctaaaaaattaaataataatgtgtgagattataattatagtatttttgaagagtgttataccattggagtgattttagaagtaagaatgccaaaaatgatatggaagagagacaaaataaaatactatatttttgaatgatgtggagatttttagcatcattaaaggatgctacctgttgcctcggatttaaaccaaaatgcgtggcagcggttgcatgtgacacgtggatgtcaaggacacatcatccgcgaaattagccaagttatatatagacaagctagtgcacttcagggagtgagccctcggagaagagcataaggcccgcctttatttttcgggagctaaagatacgcacgacaaagcatctccgggagaaggagaatttgttcggatagtcatttcatatttaatgcggtatggggaaaacgtattagaacacccatgaaaggatatgacagacgacgtcagcctcgtttacggtgaagggaggataaaaattattctcacctaattcctatgatacttacgacatatgtcatatatgtcttatttcatatctcttacctaggggactgacactaaaagacaagtgatccttacaaaactctataaatacccaggaacgaaagaaaaaaggggatcgatcaatcgaagagaaaaaaagagagaattcaccaaaaacattctctgtataagaactctcattaataacaaaaactcgtggacta

SEQ ID NO: 40404 - DNA, 1471 bp, Cannabis sativa
taaaacatgttgtaatatataaaacgcttaaattaaaaaaaaaaagaatatacttaccattacggagatttagtaccacaatttagatatatatgtttgatcatatattcataatgatatatttatagtagatgaatattttgttcttcaccgtttgactatgcatttttttcatatgatctcatgatacagaataacaatcatcaaatttatgacgtacttgtatggtgtatatatgattttttttttttattttgtatcaaacatgcatatgattttggcaaactttctaagccgtttagttcctgttttagttcttgggcatgaatcgcaccaggcatcagcgtaatgttcttataaaactttgacagcgatttctcgttatttaaaatttttatttcttatttgattatggaccttatattgacttattttctgaagtctaggaaataaaaaaaaaacatataaaaatcagcaatacgaaatttgacagcataacaattctctttgtttaagacttatttttctctttgattatacacccctatattgacttattttttaaagtttagggaatcaaagagaaacataaaaattatttatgagaatttggcaacataagaattcttttgtttgttttttttttttttttttggttaagatttttatttttctctttgattatgcactcccatattgacttattttctaaagtctagagaatcaaaataaaacataaaaatttatgaagaattggatagcataacagcatggagacattaaattctcttatttctcctttggttatatctcacatttgaagatcatttgtggcttaaaaagcctagatcaaagtagaacaaagaaaaaaaataagaaaatttatgagaaaagaaaataagataagtgagaaccctaatacttacccatttagaattttgaagataaaagtatatcgtattgtttctctgtaaattttggcagagttctcttctctcacttttctcctcctccgtctgattttttttctctctccttataagctaatttttacgatatattgatcaaatagtggagagctgagtagtgggtagttatgagttagtggagaaaaacgtggagatatattatttattaataatatataattttttcttttttttttatatgattgattctttctttttattttctttattattatatattttttatataataaaataaaataaatggttcaacagatgccccctcgagcatgctcgtggtaatttatatggacacgtgcgatgctcgagtaactttgaactttctacccctctgtaaatttcttattccaccacacttaatttaaaaggacaaatactttgcatatttgtttttgagcttagggagagtaattttaaattttaatttggtggttgcatttgttattatttagactacctgcgtacccttggcgggatcaagc

SEQ ID NO: 40405 - DNA, 2372 bp, Cannabis sativa
gatgacaccccagtgacacaagagattttcctgggggaaggcatacaattgatccaaatgatgatgttcccctctctaggcttgccaagaccatggataggagggatagggctctccgacaatgtttggcacgcggaggcactgctagtgatacttctttgttgattaggcctagaggccaagattttgccaggcctgctcgctgcccgtctgcttctagaggcaagggcaaggcagccattagtgatagcaactcaaatgatccctcctccaaggattgtttcttggactctagttgatggtacaactttttactttttcttgcattcaatactaataacttgtattctcactttgttactttctttttgtagacatggcttccaggatgagggatcttacaggagagccttcaggcagtgcttcttcaggttgtccttaggcttaggtggcccgaaccactagatcttatgatgccactcagtttccactacttccccctcctctagtgcctgctctagctgatcaatcggtgattatggactagggccgaccctaagcataggcgggctaggcccgcgcctagggcccactcattttggaggcctaaataaaaaaaatatctcttaaaaaagatacatatttttttttaataatttttaaaaatgccatttatctttatagtaagggtccattttttttttgcctactgcccattctaactcagggccggccctgttatggaccctccttttaggaggactccgcccccacataggccttcgggaaaagggacccacatatcttgtcaaggaccctattcatccattagttagaagactgctgaggctgctcaaaactatattagtagggcttttcctatcattaacggggggcccctggagctgaaggacgaggaattggagttcctgacatccagcgccctttgggacatatcatctctaagttgtatatttgattttactcaaatttttgcattgagaggggctggctagccaagtgtgcaccaatcaggggatgaccagctagggttgcaccaatgggaagttggtcggccagaagtgtcccactaagggctgggcggcgagggtttattttgcttctaacttggtttttcttttgatttcagaccatgttgaaggtcaaccttactcatgcaagggccaagggctcttttgaagttcacctgaagaagttggagcccgagcttaaagttgagaaggatgcacacgctaagacacaaattgacttgtctgctcgcctgagaaaatcccaggacatgaacaatggcctagaatgcttactttatttcaggaaccaagaagtgaccaagctttctattgaagccttcaagttggagatggagcttgagaacaagtatcaggaaaagcaactagcccttgatggataacaagacatcagggacgagtatttgggcttgtccttggaggtcttgtaagggtttacttgcacaacctcaatatcaacctcaagtatatagggtctccttttcactagagatcactcactcagggtaaggagctctatgagagcaggatgtaggcagaccaagctggctagggggcaggccaaattatcagccagattgaagggacttagtctggtcactttgatgaggccatagcgggccaacccatggaggaggtggtcggccagtctactaatcttattgctggccagcctatacaaaggccatggtcggccaacttcttggagattaggatgctacaactttcaactcgattccccttgctattgcacatgattagacactttttgttagtatcttatgcttatgcttatatttcacattagtttcatgttcttgtatggcctgttggccctttactttcgaacactacttatatttggccttaaggccttttactttggacatataaccaatcaggcagtctttaatcctgacattcttcttttgctagacatgtaagtatttagatttatttttttatgtctaacaaagtatgcatgcacttacttagcttttaattttttacttataccaagctttaaatttctctgcttaagtttactatgcgtattcgatgcttgtacggtgtgggtacaaaacgaaccctttatgtattactttaggtgacatgtcgcttgagatagtatctgcacacttatttcgagattcaaggctcatttctcaaccaactcattccaaaaagttttaacatatattcatatatatatatgatataaatatgttttgtgataatttttaacatctagaaacttcctcattcgaatttatgacatccatctataattactctcttgctcgtttggtacgttgtataagg

SEQ ID NO: 40406 - DNA, 1817 bp, Cannabis sativa
tcacctggccaagtatagcaaaataatgcaagtggcaagagtaagtaaagatgctaagtgcttgtgcttctccctaatcctcaccaagtctgctgaagactggtggaaaagattggcttgtagatcaattcattcctagaaggatttgcagtccgccttctagaaacagtttatagttgcccatgattatgacatggagatgggctccatcactaatgtcaaatagcaagccgaagaaagcctaaaaaacttcattcaatagatgatagaggcgccagctaagataaaggtgactgatgatatgaaacttgtggccctacaatctagacttgcatttggcaccatgctatggtgagaaatgcaacaaaaaagggcagaaaccttatttgagttcatggtaagggccaaaggttttatcaatctcaaaggcacctatcaataggcattcagagtccctccgacaccaacccctactgcttttgccttgggattttcctcacaagttcctgttgccagaatgcagtacactctggcagctacggaccatctgcatccgtgtaggcacctatgcaaacccatttttccaggtatggagcggcacaaactggatgtagtgtcactcatgggtagtcaaaagtaaaagttccagaacaaaacatgagtcatcccagaataagagagggggaaaagacaaagccaaagtgaaactttgaagagtaaggaaagagtatgaaccaaagtacacatagtactccaatctggtggatactcgagagaatgtgtacaaagaaacttgcaacatggtacactacaaaaaaaaaacccccacggatgcctcaagggggaagtttaaaagatattcaagtaagaggtgtgagtatcattgtaacaccccactagtttaagtatgctagcgtgatttcttaatattgtgcactcctttgctaatcaaaaggcttatagaaaaatgtgaataattaaaattttcttaattaaactttaacttgaagatgaaaatactttacataattcgggatcccctttttaaagttaaaattattttataaaatgcttagttatagaagttgtcacctagagactatcaaaataaagcctactaacccaaagatcaaacattccagttagaccgccccgatatgtacaatcttcctttactcgtgctcactgctgttcaacgttagctttgcctttacctacacatataaacaatatttgttagtcaacaaactcagtaagaaaaccataatcataacataaacataaaccagattataaccagtgcccatacacctaattacaatcctatcccacagcccatgcgtactaagtctagaacattcatacaacaatacgatttaccataatatcagcctatactcgatactctagtcgtatctatatgatagcgccaatctatactatatatgccaaaaatatatttgtcggtatttagtgcagctctatgtacactaatactaccattactgatatgttatatattattcataaacatgcacgctaaatatggaatcacatatgatattattatactaatcttaccttgattttgaattcaggtgtgtcagtcaatctgagtgaaattttttgcttgattatttacaggcccctaagtcacagtatatgtaaaactgataggtgatattccaaatcacttttcagggacttagactcaaaaccaaaagttttcctattgataaaatagcatgacaataccctaaatatcaagcaaacaccaaaaaaatgagattctttagaaaataccacaaaaaatagca

SEQ ID NO: 40407 - DNA, 1290 bp, Cannabis sativa
ctctctctctctctctcttttccattgcattttcaattcaattgtggaaaatcaaggcttggaattggtttgattaccacttgcttgggagtttagagaattgcggtagctaacttgaacttatttttgagtaatttctgagattaatagcttgttttcaatgcttgatgatgttcatgagattttgatgcatgttgttatcttaaggtgaaatattggtattatttgtgtatttgagctattgggattatatagattgcatctagattgttttgtgtgattgtagggttaaaaatatggtttgaatttcttggtttgatgatgaatttctgggttttctttgagatttaaaagctttgaagttcaagcttgagattatgggtaatggtgtagtttgagttctatccttagttatgtgtatgaattgttgatttgagctttgtttgctttgaatattgttgtaaatattagatatgtttgttttagttttgaaattctgattatgcacaatttggatgagtttggtatgaaatttaagttgattttcgaaagattgaaaaatggcattttttgggatttctagggccctcaccgcggccacggccttgctcgccgcgacgaggccctactttctttaagatttttcaagtttttgtttttgtcataacttttgactttgataccgttggaaggcttgttttaagctccatatgcttatctgtaattggaatgtaaattatgtgattaaccctatttatgaaaatctcgagaatgcgtgactaggattactggcacttgctcaggaacacctaggggtttggaatctccacatacttggattaccaggtaagacagtaagttagcacgtagagttaagtgttgtggcactcatctatgttattatgtgaatgttaaatgagaaattggaattagagttattaccctaaaataagcggttatgtggtctagagttattactctagtattcaaatgattatgaatgcaatattatgttgtatttggtgatataaagattatgtggttaaggcataattaggttagactcggtaatcaaaaccgagataaactattcttaggccttattgtacatagacgtgtgaacgtaacatgtaggtctgtgtcacatagatgatagatgcagtggcatcaataattaagtgatcttcaattatattgcatattattatttatattgtcttgttggacttggctcacgggtgctctactgtacaggaatggataaatctatttgtgatcagccatgagttt

SEQ ID NO: 40408 - DNA, 2722 bp, Cannabis sativa
  modified_base (27)..(37): a, c, t, g, unknown or other
aggatgttaatgaaacatacatggtannnnnnnnnnntcctggtaaaatatttccaacgataccagcatctcataaatggtatgtttgaaaactagattggaaaaaacatcgaagtctacgttgacgacatgttataaagtcactaaaaagtgagaaccacacggagtacctcgcatagtgttttggtatacttagaaagtatgatatgaagcttaatcctaataaatgttcttttggagtttcctcagggaaacttttaggcctcattttaatgcaaacggaatggaagctaatacaaaaaaaaaaaaaaaaaatccttaatcgagatgccctcacctacaatgccaaaagaagttcaggctttaacagaaagaatggtagcactcaatagattcataagtgtctcccatttttcaatgttttgtgaggcaataagaaattcgaatggaatgaagagtgcgaggaagcatttaaagagataaagaagcatcttttaacacctacaattttggctaaactaataactggggaaatgctatacctttatcttgttgtctcagaacatgccatctgtgcagctttagtgcaagaagaggggaaaaactagcaacatgtttactatgtcagtaaaaggttactcggggcagaattgagatacccacctttggaaaaacttgcactatgcctaattcacgcatctctcaaagggtagatgcctgaggaagattaataaaatggtcgattgaagtgggacaatttgaagtaacataccacccaaggatttcaatcaaagggcgggctttggatgaatttttgatagaaggagtaaactcaggagaagaccctggaatagaaagcaaggcagaaacatggaaactatttgttgatggggcttcaaataagaatggctcgggggcaggagtaatagtgatgtcgccaaaaaatttcaaattccactatgcactgaggtttcagtttgaaacttcaaataacgaggcagagtacgaggccttattagaaggattaagaatagtcgaggcactaaaagtcaaaaacattacatgctttagtgactcatagctaatagtgaaccaagtcttgggagaataccatggaaaaggcctaaaaatggctaaatacttagagaaagttcggaagaacttatagaagtttgattattttaaaatagaacgaattccaagagaacaaaactctaatgtagatgccctagcaaaactagcatcacaatttgatcttgacaagttaaatttggtactgctggaggtattagatgagccaagcatatgtgaagaggaagatgtcgacatgatggatacttcgccaaccttgatgacaccaattgtcaagtatctattaagtggagaacttcctacagataaaaccaaggcacgcaaactcttatattttgattccttgttacacgatggtcgagggaaaattatacagaagaggttattctatgcctctattacgatgtgtgtaaccagtagaagctagtgaaataatcagagaaattcatgaaggtttctgcggagatcatgcaggttggcaatgtttatcaaaaaagataatccgtcaaggatactacttgccaactatcaataaggacacacacgaatttatcaagaaatgcgacaaatgccaaaggttttcacatatacctcgaatactgccgaccgagttaagaatgatgacctcgccatatccatttataatatggggaattaacctgattggggctttacccacagggcgaggtggagcaaagtatgatgttgtggcagtcaacttcttcacaaaatggatagaagtcgaacctctagtatccatcacatgcaagaaggttcttgattttgtcatcaagaacatcatatgtaggtttggcattccaatcaagatagtatctgataatggaactaagtttgatggtgaattattcaccaaattttgtgaaaggaataaaataattaagagcttctcgttagtattgaggcctcaagcaaatggacaagtagaagctgttaataaaaccttaaaggatactattaagaagaagttagacgctgccaaaagaagatgggttggcgagcttccacaagtgctctgggcccacagaaccatagagaaaatagcaacgggacacactccattttccttggcatttggctcggaggcaatgttacctgtagaggttaatattgcgactcacaggcgtgaattctacaatcaggagcaaaaccaagaactttttaatatgtccttggatctgcttgaagacaaacgcaacgagtcacaaataaccaatgttgcttatcaatattgtattcacgaggtactttagcaaaagagttcaaaaaaaggctatttaaagtaggagatttggtgttgagacgtgtatttacaaacacgcaagatctagcagctagagtgttcaacccgaactaggaaggctcatacatcatggaagttgtagttggaactgggatttataaattagcttggcttaatggctcgctaataaagaatcactagaatagttagcatctacgaccttattactagtagtttattatacaaatgatgtattaatatttgtaataatcgttcattattctgaataaaagttgaatttttcaattaattttaaagattaatattttttaaaattacttgggggcatatatgttggaaattatttta

SEQ ID NO: 40409 - DNA, 2947 bp, Cannabis sativa
tgtttattttattgttttagaaattcatattaggatgttgatgaaacatacgtgttagtaaatttagatcctggtaaaatatttccaacaaaaggagcctaggaaattcattgcccaataaattgtttaatcctatttctaccgtgatctttcaaacacatgaagaacttgacaacaaaggaaattagtcctcttcctctgaccaagaagagacttctgaaactttgatcccaagattaagatactagtgatgagtctcaagatttagatactagtgaagatgatgtattcgcacattttgtggctcaatctgctgaagaagtatattcttaaaccgggcctattgtcgaaagtgatgacgaaagtgatgaagaagaagcagctacaataaaactagaatacactcatcatcaaaagagtaaatattctaagtttacttttactgacattcccctatctaagtggagagaaagattccaagaattccaagcttggcttagcctggaaacataaaaaccacaggcagaaacagggacaatcctcttgaattttgtctcaagattcaccagacctttgcaatattggtagacaagcttaggcgaatacagacaaatgcctttcttgcaactcctatctgtcgcaaacgccctatatatgctatctctatgttgagttttgtggccaagacgcacaagtaactgaaagacatagagtagagtttttcaagctcaagtactattcaatggactaaagagactttgaaaagcattataagtgaatgacttaacgattctaccaaataggtggcattaatgatccaaatcgaaagtaagccttcctttcctctattcgagagacactttgcgaagaaactttcaggctactctcagaattcggaaaaagcctaacggatgctacaattggagaaatttcccaactactcttaaaaacccttgcaaaaatgtgctcccaaaagaaatttctcctggaatttatgaagcaatcccaaaaactaggcaaagtttgtagtaggaaagattttttcatcaaatgcccttttgaatctttgtgttcttacaagagccctttcatgttctcaaagcacaaaggacgcaaaataatttttttacgaaaaaagcgcgacttttgggaaaaaaaatatgattgatgctatgtgtgtgtgtggaaaacaggggtattatgcaaaacaatggcctaaaggaaaagcaatcaagcttctctcacatatccaacaaaagactgggatatctttgaaggaaaataacatagagtcaatcttctccgcagatgatgaattcaactctaaatctctttatgcattcaaacaatggagtgactcagacactctacaatgttatcaaatgtccactaatcacatgatgcaacaatcccatgtcatcactgtgtaagttcttccaacaaaatatgccaaaccgataaaagtggaaggattattcgactatggagcgtcatacacgataataaactctgatattcttcctaaagaatattggaagaaagagaaacaatactttcatgctacaatggaagtatttgtagcatggaagtattttttgcagagaactcatcagcaaaccgatttggttgcagttcttcccagggtattctattactaacaaagtcattggatcaaaattacccaaaaaagacttaattgtcgaatttgatctttacataaagaagaagggtttgcgtattcttcctagtggactttgttactgttatacccaaaattcggctagcacattagaggaagatacgtgtcaagctgggaaagtatgaaccaagacacgtaattctaattgtatttgaagggaaataactcgtacttacagagcgtgtttctaagtcgaatgattaaatagtctactgcgagataaagatatacaaactgtcgttttgtgcattaacgagaaactatgtaacttcaagcgtacaagatgaggcactaccacattaagtggaggggatataacgactgtgaaaacacttagcatataatttacagtatacaaactaagtatagcaaacagctgaacaagagcaattgatagcgaggcgtccacctcgccataggaagacaagctcatgtcaaagatcacctcgtcactaaaagctgtgattgtcggatagggtgttaagtttccagaataaaagcgatgagatttccattatcaaccttggaaagaaatatgacaagctccaacttattatcgctgctatattcccatcgagacgtcccaaaacaatacattttgcaacatatttaatacatatttattttgactctgtaaaagcggattaatcacagctgtgtgatattcaaataataaccgcatttattttacgtgatatgtaatctgaccccatgattttaggagagaatcgttgtaaaaataccagtcaaccctataattaactgcctattatgtgattataaatagaggcaagttagatcaaaaaggaggacgaaaaaatcataagaaaaagggccctaaaagaccatcagatatctaataagattgactcgtggctatgcagaattttaactaccaaaccacgtaaaaaatcctttgcgttcatacttttccttttactgtttttatttttctgtgtgagaatatcactatttggctcatatttggttaatgaaaaactgcgttaacaaagattgggcttctatttttagtgtatcgttttgtaccctaaagacccaacaagaagaaaaaagaggaagtaccacctccatcatcatgaagaaagcagctgtcatttttgaagaggggtaattacagaaagtacagagaggaagaaatgagaagggagaccccaagtgcaaaagaagagaaggacacaagcttttttttttgtttgcatttctcttccctttccttttatattttgt

SEQ ID NO: 40410 - DNA, 1953 bp, Cannabis sativa
tttacatttattgcgaattccggtgttattaattgcatttattattgtgattttggtttaaatctcatttattacgactccgcgtcggttggctaaaaatcaagtcgacaacacaaaagtaaaataaaataaaattaatatataaacatcacgagctatatcacgccaatactattcttttgaccatatattgttagaatttaaaataagttgtgggattttatcacaaaatcaattaataaaaaaattacagattttatatatttattattttggataaataatattttaaattttatattttgtaaaagttatttattaaactctactgtttattaaataataaaatagactttattttttctaaaatagtaaaaatagaattttaaattcaattttcgagaatttttttttaatatatcaaacatgaagatatttctcattttgtattaagtctcttccttcttttattagctgtaatttttctaatgttagtagcacttgtaattatgttgcccataatgtggctaagtgggtttacacccaccagttgtatggctctatttcgatttcctccttaccggagaacctatattttgtaatgattgcgatcgaggtttaacttctttatttattaatgatgagtatgcttattttcaaaaaacaaaatatgaagatatttcttaacacgaacagatataaaaaaatataactaattttattataacaatctttagattatattattattaagttttattttaataaaacattaatttaagattttatttatactattttaaaaaataggagaattacctcatatacggtttttttaacttttttttctttcaaatttacggtttgggttactaaagtggttgtagcgctagttgcaagaggagtttctatacgattttttgttgcaatttaggttgcagtgctagttgcaatatgagtttttatgtagaattccgtaaaaatgtaaaaaaaaaaaaaaaatgtaaaaaaaaaaacaaatgtaaaaaaaaaaactgttaaaaaaaaaaactgttttgaactgtaaaaataaaaaagtccctaaaaaatatagctagaatctattttattatttaacaacataaaaaattcaattaataatcaatatatcaatatatatataaaggaatggaatgaggcggtgacatgacactctaaaatatatctaaagttatttttctttttttttttttccttaattctccaatttttaatattttattagagcataaatttaaaatttaatattttactattattttttaaaacacataatatagaaaaaataattaataaattaatattttaaaacacatactattatctatcgtaaattaattattttttaaaaaaacacataataataaatataaactaaattaataataaataattaataaattaatttttactttgaaaaatatagaaaaaatattttttttaaggaatttattatgaatcaaacattatgaattgaacaacaaaaaaatatgtgtgagattatgtagaagagaaacatgtgtgagattatgaatcaaattttttcataatgtattatttttatatcccgatcatataaagttgatgtcatcattgtagttcctattgatatattcaaattaagcttaacactcaatttaactttctcactacaacaaatatgctaaatagcgacagacaaaatccgccgctaataatggtggtattagcggcatgtccgccgctaatgtggcagtttatttattttttaataaaatattattagcggcggatagtctgctactattgtccaccgctaatagtattagcgacagggtctgccgctaatacctcaccgctaataaatgggacgaatttatccctcccattcagttcgaatattattagcggtggggtattagcggcggaccccgc

SEQ ID NO: 40411 - DNA, 2676 bp, Cannabis sativa
  modified_base (2278)..(2278): a, c, t, g, unknown or other
atcaaacaagtataatttttgattaaaaacctatctgacgggaaaggaaaatcaaaatttataactcgcgtataaaattgaatactaacggtttacgcgagctagggatgtgtaaagcgagacatcacaacgtcttgataaagtacttaaacctagaaaatggatagtaacctaactattcatacgagtaaatctgaaatatacaaagtgatgaaatcattaaaggtatattcaagtttccttaggcagattataactgccataacgaggcagaactaacaactgcttgaaaatcaaaaagttttgtagatgactaactacttaaataggaagaatacgagcaatggaagaacccaaaagtacttaacatttgattaaaatatagttgtttatattgttaataaaaacgcaagcaaacacaattatattaagttcgaatgaaaagagtacaaggcatttaagataagagaaaacccaagttgggttacaaacttgtctttacaaaaatgccactaggggcaaaccattaagtcatcttcctaaacaaataatgtaaggggggttagtaaacttgagaaatatcgtctacacatagcttggagaatgatcagctacacataactcgagaaagaccatctacatgtagaaggtctcgacctctacatagacctcattctcatcatcaaaagattccatttcctacagcagagacctcattcccagcctcaggaaatttctcgataccagagagaggttggcacaaaggtcttctcgtgtaggtttgggtcttgggttggttggattctcttatagaaaccacgccaactttcctcttggattcatccgaaaccatgccaactttcctcttagattccttgtcagcttgaggaggacctctaagatccaaagtaagatccatgtccatgtctgtggagatagagataaaagatcaatggagcgacaaaaaatatatatataatcacttgtgaggatctcccataaaaatcaaaggggttcccttggtttggatttatcggaagctcctcagccttggaatccttcgtttccaattcaaattgagattcgaagttcctaggaatgtatagagaagagaggaagttggcaaattttggtgttatgaatctagaggaacaaatttctgaactcagatgagacatcttgacgagagaataatgatctaatctcaaaatggatctcaccgaaaaaccagaaagtgtgttgaatatggaaagcttaagccgtcattttatacacaaagtccagtgacaagaaggccaaaggttgggaaatctaacggttgggagtgggacagaagatgagaagacggctcataatgaccctcaaaactgtacaaccgccagaatcaaaggatgcgtttttccaaaaaagggattatgacaaaaatgccctcaataattattaaaaagcactttttactaaaaagaattttttttaaggggcaattgttatacccaaaattcgtaccatctcagtggaggatacgtgtcaagataaagggaatacagatagatgatgtcacttttaatggaataactccttaattgcgtaagtagcagagtatattcacaactcgcttactgtaaagttttatgccaggaaaagatatacaaattgttgcttagtatattaacaagaaaccatatgtcgttagcaaggcatcaagtacgttacatctggaaagacgaaagcgatgcatatcgactgcagaaacacttactgtataacgtacaagctaagtataacaatcagattggctcgataagcgaggtgcctatctcgctatgggaaggttcattcctgtaacttccccccagtaaacttctaacatcttctaagtgaggcttacaatcctgacgagtcagaagctaacattccaataagcctcaaagaactctttgttaataagaaccgtgattgtcacaaagaagcgacaaggcgtactttgttgaccttagaaggataagaaaaaaaaaagggctccagctcgctatcacggtcactggaaccaagctcctgtcgagacatcccagaacgctacaattaaagatgtgtttaaatacacgatcattttgacccagtaaaagcgggaaaatcacagctatatgattttcaaataataattgtgtttacactagatgatatgaaatcgaaccccatgatttcaggggatattcgttgtaaaaagattacagtcaactttgtaattaactacctactatatgattataaatagtgncaagtaagatcaaaaaagggacgaacaatcatacaaaaaagaccctgagaaaactatcaaaaatctgaataagattgactcgtggactatgcaaaattttaactgcaaaaccacgtaaaaaattttgtgtgttcatactttttattttacagcctttattttttctgtgtgagattgttagtgttaggctcaaatttggttaacaaaaatctgcgttagagttcccataccaatgacatttcctgctaaatgttgccaaaaatgacctcagcacattgcattggttcgatattcaccaaaaaatccttgtcacctgcatatgtctagaacaaccactgtcaaaatactatattttagaagcaacacttttatcaaaaaaaaaccagctagacattttt

SEQ ID NO: 40412 - DNA, 2920 bp, Cannabis sativa
ctgctcctatattaaatcaaaaaattagaacaatatgacactaatattgggaaaatattgacaaagtcttaataatcttgtcttgcatattcattgacaaattgcttattctttttgatatggacattcatccatgtatcgatgtaatttgggttctcctataatttatgaagtaaacattagagattatacaatttaatataacttaactacaattatatttgaacttactaattcatgacgcctctcaaccaaagattttgttcctttggttgaaacatatttcatattttctcgatcatcacgcatctcatttacatcattctcatcgactaccacatcagctacaatagcttcctcttctccgtgaaaaacccactgctcgtagctagtttgaaaaccccaacgcaatatgtgtccacgcacatccactggagtgtgtcgtttgttgttgacgcatttcacacaaggacatctgattttaccgtcagagcccttgtgttgttcagccatttctgaaaaggctaagatacctctccagtaagcaggatcagtgcgatcccgtaaaaatatccaacccttatcgattgtcatctatgttaaaaatcgagatggttaattttaaggtcttatttttgaaaaaataaaaattgaatgttatgaaaatattattatgaaaagcattagaaaaaaaatattttacattttacattttattattttttaattgattaattactctaaaaatatatttaataattattatatttttaaaaatataaattttactattctattttaaaaattaaacatttattatatagatttattcatttaatttataaaaaacattttatttagttaattaaaatattcaattattaatttcctaaattattttttatttcaatttctaattttaaatttttttataattattatttttttaaaaaaatataaatgttactactctatagtaaaaaaattagtttagcttaatttcttattatattatttttatcgaaatttcggcaacataacagcttaaaaatcataaacccaaaattttaaaatctacaaaaacattgaccaatcattgcagaacaatatgtgcacaaaaaaaataatccacccatccgaccgcagtacatttaatcacagaacttacttcacgacgaatgaatatttaagatattcaaactcttctatatgatgatatacatatttaagtactatgtattttctaatataagaaatgtaaaaataattacaaacctttgaaatacaaaaagattattatagagactttagtgggcagcagcaatccgctggagtaaaacgagaactaatttaaaaaaaaaaaaaaacaaaataagcaaatgaacatatatttatatacacaaatatacataaatttattttatttaaatatatataatacacacaaacttatattcatatatctcttcttagatgtctaaattaaaactcgaatccctttactataagaaaaaataaaatgtatattattgatatataaacactgtatatatatagaagtcaaattaatgtgtattcattgaattaattaagcaaatttgaagaatctatataaatgttaagaaatcgagccataaaattatttctacatttatggagtataattccaacattctttcctgtttatatttttgtataatatataattattatctttatataataaaagtagctatttaactgttccctcttaatttaacggtgcttttaattttctccgttaattccttattagaaaaaaaaaattcttcgttgatctattagtttaattaattataattattttattactttaatcttttcaaataaataagattaataatattaagtgtttttttttttgttttaacaattttatcgaaagtcaagtagataggtataagtttatcgccaggctcaacgatttgtattttagggttttgtgatgaagcaattcttcaaacaaattcaatacaaatcgaatatgatcaaataaaccctaaaactttctcgaaacggctctttatagtttccctctttcaagacacagaagcaaccagtagcacagtcaaaagatgaattaattttgattgagttctcctatagagatgaaataaagccatggctttgtccattgctcccagttacgtgctattaaatatttttgaatatttcaatttgaatgattttcgatacggatacaccaatatacttttcttgtattttatttgttttggatacctgtatgattgaggagaagattccaaagtagcaggttttagagcaattgtcggtaggagattcgtcggtgctacctcacctatttaaatatttgtttcaaaccatgtaattttattgctcattagtctttcagttgttcatacaattaatgtgctttttaatttattatcatgtctgtaccgactacctttttgatcgctcttgaaattacacatataataagcatgttacttcagtgactttttcggcaccgacgactactccgacgacttttccaatgccggcagtaaactttagtgacttttccggcacgagtgacaacttcggcgatcattatagttttatttattttattaaaaaaaaaaataaatataaaaggaattttaatattttttatgataatttaattaagtttttatatggttttttttagaaaaaaaaaccatatttttagtttgattggttagataatgctatatttagtggcatttactttttatgccatatttatcataacattaataattttttctcatatttttaaaaatagccccaaaattaatttcatttatataaatgaacataaataataatcaatttcatagaaaaatttaacaaaaaaaacacacacacaaattta

SEQ ID NO: 40413 - DNA, 1995 bp, Cannabis sativa
attattattttttgattaatatttacttattttatattacttaattttattttatgttaaagttcttaaaattaatttagactataatatttttttaacttaatatataaataatataattttatttttaaaatctaattatttaagtactagaagttaacaataataatcatatatatattaaaaaaaaaggtaaagattaatttagacgagttaacttaaccaaatcgaccaaattattaggctgttaaacttttttaaatttttaattaagcatgttacaattaattttttacaatctaatatttatatcaggttaataaaactatatcataacccgaccaaatattgctctcattccaaaggttcaaaacccgaagagaaccagtcattttagacccatttctctcttgcaatgttgtgtacaaggttatttccaagatcctggcaaacagaataaaacctttgcttccttcccttatttgtcctactcaagccgcctttgttccagggagaaacattcatgacaataatgtcattgttcaggaagtcattcattccttcaaccgaaagaaaggcagggaaggtttttttgctattaaaattgatcttgtcaaggcttatgatcgcctgagctggcgttttattgaccatgtgatggagtgctatgggacccctgtgagcttccgcagttggatctcccaatgcatctccaccacttctttaaacatctgtctgaataggggtcaggttggaaagattgttccttcttgtggtcttcgccagggtgacccactatcgccctatctgttcatctgggcagcggaagtgctttcaagctaatcgctgtgctgcagagttttaatggcaaaatatttaaaagggaaggactatctcaaatataattataaagactctgactcttggttctggaagagcgttgtcaaggcaaaatcaatcttgaagagaggtgcttgtaagcgggtgactaatggagagagtactgctgtttgggtggatccctggattccccactataaaggtttttgtccaaaaccaattaggagaggtgagactaatctcaaccgtgtgtctgatctgttactatccaatgggcgatggaacgttaataagctgaatgaaagcttcgatcatgaaactgttgctgttattttaaaagggggccacccctctggtcatggctctgacagatggatttggactcgtacaagtaatggaatgttcacgtgcaagtctgcgtatcttgttcaagcgttagatagagccccccagtgcgaggttgcaccgaatctctagaacaagctctggaatagcaagaatagcaagatactggaaagacacaaggtcctgtggtggtgtattctgtctaatgcgcttcctataagatctgtgatcaatagaagattccacattgaggacactagttgccctctgtgtggatcaagggaagaaactatggaacacttatttcttgtgatgtggcctttcacctctagcgctcttctccttggggtttctatcccatttgtgatactgggatccgagtttgggattggatcaagttcatctggggactgaactgtagaggggtccgagttgaagatgccttcttgtatgcctccataattgtggatactctttggaggatgcggaatgacaaagttcacaataattaattgcctggttggttgatggatgtgaaaaaatgtgttgatgatgtttgttttacctatgttgatttacgtaatcatttattacctagtcctactttacctcccaaggaagcttggtcccctccccccgggattggattaagctgaattgtgatttaaaagtggtctttgacactatgtgtgttgcagttgtcgccaggaaccagcttggaactgtggttagaatttagacggcgcgggtggatttctctgatgctctttgcggagaagctgaggcgtgctgtttagcggtttcgacagc

SEQ ID NO: 40414 - DNA, 1393 bp, Cannabis sativa
  modified_base (857)..(858): a, c, t, g, unknown or other
atattttttccctaatttttgtagagaacatattttttccctaatttttgtagagaacgactgtcccccttgcctttatataggtccacccatgggtataatagttaaactacattcttacacatatactaaaagtcaaagttcaaattcgaacaatatatatttttttattttgaaagcaagaacatctttatttttaatttttaaatttttctcacagaaaaaaaaattataatacgcccccttaactttaattctggattttatagataaatatacaatgaggactaaagagagagaggtttcgtttcgtaaataacttggactatttctgcatgcagccaattttcatggttcgttctctgtctttgttttgatcgtgagtgattcaaagcgtaatatcatataaatctatgtttatataatgtaatatactatgtatttgcaagtgaataattacagaaagaagaaaaaagactccaagtcatgtatatatgaaagcaaattaataacaactcttttacttgacagattttaattattagctaatatcttcaagcaatatatatgcatgttatgtgttctcaattactactttttgtggaaaaatactttagaaagaataatgatcatttaaattttgagttttttgcggcaaaattatttcactttgtataattgtatttaattttccaagctcaaattttagtggtaaaacccttcaaattattgaactagtagcaaatttaaggtgtcatgtgtcactatggactgcttatgtgtacactcttgtactggtacctttatattggtacacctaatattattatttaaaaattattttcaaaatttatttnnaaattaaataaaattataaaaaaataaaaataatatttaaaaagaaataaaaaatgttatgaattttaaaataatttaatattttcaaaataataatattaggtgtaccaatataaatttgacatgtgtacaaattaagtgtacacataagtagactatattgacaattaactgtaaaaaataaatgacactttaaatttataagcaattcagtagtttggagggttttaccgtcaaaatttaaacttcaagggtgcaagtagaatgatagttgagagggtttacccgcaaaaaaactcttaatttttagagtcatattgtctaagttttgttaattttatttttagtttttttttaatttgacaaaaatattttataatttaattttctaagatgttcatttggttttgatatttttgtattgattgaattatgtatagaaggaaatatgattagcctttttatttatagaaagtaaggtataaatggtaagtttgatgactcaactaatttctatatatatccaattgtgtat

SEQ ID NO: 40415 - DNA, 1085 bp, Cannabis sativa
tcttccgatctattaaagaatttgtatctgttcaattctattaatgatgtgattattcatgtatcaaattgtgttccgcgaactttaaaatatttcaaattatgcccttaaacttttaacgacgtgagacatccattaataaaattaaaaagaagtctttaaatttaacaatatcaacagtttaagaataatttttaatgttttgaaaagttcggaaacataatttaattcatatcaaaattcaaatgataaaaatctaaattatcctaaaatataatttatatttttttattatataggaaaataatagtaggatgtttactatttttggtatacaaagaaattgcagtttaatttttttatgacaaaaatattaaaaatattattcaaataactagtatatatgtgtattttactattttttacacaaatataactaattattttaaattatatttttaatatcgtaaattatttaaaaaatttctaataccagtaaaatatttcttataactatattatagaatgcaatatatatatatatatatataaaaataagatataattttgctatgtgccaaaaatagaaactaggtctacaaaagaacaaaagtgatatcccatttaaaaagttcccttaatttttttgtcttccaaataaccattcagttaaatcttaacagcattaaattaaattgttttaacttggatattcctaataattttccattttagaaaaatattcctaataattaagtcatttttttttttttgaatggataattaagtcatttttaatgataattattaagtcaaaggttaaaatttatatttggattgtttttttaaaaaaaaaattactgtaagctttttttttgagataaaaaattattgtaagttaaatgaaaagcttattaatggtttttttttagaaaaaaaaatggtatatcgtttatatttatttttcacaagggatattggtggctaaaccagctgaactttacgatttgtaacgcttaactacaaaaatcaaatttttggcggctaaactacctaaactctggttccgttttgctctgcacacc

SEQ ID NO: 40416 - DNA, 1666 bp, Cannabis sativa
tgggacgtttcggcactcacttggcatctaggttgacgattctagacgctgagtgttaacctgggcgttgggttgttaactttgtcgtagggtgttgattgacgcgattcaacttgcgtttcgaatctattttaaagatctatcaatcatgtctcacacccacatcgcaattttgaagattttggatccataattcatcatcaacaaagttgtgatttttccaatagataacccaaaaacagtcagtcgaacgagattcaaagcccaaaaattgaagattttcaccaagagtgaattttcaccattgaatcatcatcaatgaccaagatcatcccaaaataatttttttttcatattttttgtagtttttaattattattttaatagggcctcctctataaaaggagggttcatctaattcttttttcacattcttcaaagtcttcataaaatcaaagcatctctatctactttctctctctaaaaattcgaaccccacaattagctaatttcttgtaattctcgtgagaaataaactcgaagtaaatttagctctattaccatcgtgacttggagaataaactactatttattttgtgtctctctaaattatttacttaagctcattaagctcattatttatctcgttaatctatcgagctggtattggccattttcaacgtcaacaatgtaattaaattaaatatttattttacatttcaatcaacatttaatttgtacaagtgcaaattttaaattttgctatcgaaagctggctaattatcccaacaagaggatggatggagatcattggtttgctatatcaatttaggggctcattgttatttgatagaatttttggtatccctttaaggccaatagggtcgccggtgggttaaccaatcaagtcaagctttgatatacaaagctagcgttacgtggattaaagttaatcctctcacgctattcagcaagactatgaaggaattccattaaaaaaaattatttatgttgtatcatatatgttcaaaaaaaaaaatagtattttcgttgccaataaaataataacacgaatacattttttttcgttgctaaagatacaagtaataaagaattcttccatgtttttctctattattattactttattttggtcgaataaaggtgatgagatgaccatgttacataattacattaaacacaaatttatccagtaacttcaagtgccgttgatgttaaaaaaaaaataaataaataataaaaaaaaaaaaacaagcaaataaaaatatcaaaaatatgcagatagtagagaccaatttgcttgaggcagccttgaagattgtctaaaatatcttgatttttctcttcatttttatataataagaaactcatcaattggcaattataacatcaatacaccatacactaaataaattaaagtaaaaaatgcctaagtagtagcctaattctattcggcaacagtaaacaatctatcacataacacaactgtcctcagtgttgttacacagaaatattatagccaaaaccttggcttttgttgtatcaataatgtaaggttgccggctggaatgagaaaaaaacaatatagaaaagtaaatatcaaaatctaaaagacatgcaaaagtaaatgatcacattaagaatc

SEQ ID NO: 40417 - DNA, 2337 bp, Cannabis sativa
gaggatgatttggcgagtttagcaagtgatgatgaagaaggtggtttaagaaaaattcaaccaaagagtataatccattgtgtgataaggagacttttaactttgacaagagcatgttatttgctaatgtgattgtttttacaaaagcccttaaggattactttcttgcacaaaacaaggatttcaaatacatcagcaatgactaaaagaggtgagagatatttgtaaagggacatcatgtaagtggttaatatatgcatctagggttagtacagatgggacaacatttagggtcaacaaactagagaaagaacacacttgtggaatagtgttgaatagtagactagcaaattcagcttttttgtccaaacacttcctcaaaaccattaggttgaatcccaacttacattatatcgggttcaaggatatggtttccaacacaaagtactctaaagtgagtaagtggtccttttatagagcaaaagacatggcgttagctatgttggaaggaagtgttgttgagtagtatgctattcttgatgattactgcaatcaattattggctactaatccaagtgttgctttcctattttgttttatgtttttagttgattacgattaatttttgaagaagtataattgtcaagaaaataaaaacagaagaaagttgagatttattcctatgaaaaacacaaattttctttttagcacatatagattagacatatagagtctttaacggctcttacaacagttttaaccccactgtttagaggagttctgcatatgctaaaatcagaatgaatcaaaattattgctatggttgtgagataatgttgttcatatttatgaatatagtttggtttttttaatatttattgacactatagttatggatgagaatcagccaacgcatgagataaacgtttagttctgtccatttcaattactatttttctttcatgcctcgtctctaaaataaaacctcattataatatgaataagatctgttagatcagtataaaccatttttctttcattcttgattacaaatgatttcacattaaatatagaattagtgtactctgtacacaaataagcattatgcaattagaggctttcacagttcaacaaaatcttgtcatagatttcctaaatattattgtgttatcgtggtgtttctaaaattttatagctaatatctccatagtattatatcataattttcaatgaaaattacacatgcatcttaattatagacatttcatactattctcattcataactcaagccaaattagaagaaaagcaaaacgataaaagtaaacatttcaaatgtattgaaagcgtgctggctggtatccttttttaaaccattcatcttgtaacatttcaatgctcttctatggttcaatttatgttatacatttatgtactattttttttaattgctcaagataccatgtttctttttgtgtttgttacgttcaactgcttatgttgttgtttaataatgtaggtagtactactaagatcaagactaaaatggttggagaaaaaaaagtgttcgagaaagtatatatttgtttgaaagcctgcaaagatggattcagaaatggttgtagaccgctgatttgtttggatggtactttcctaaaaggttattgcaaggggatattattggtggatgttgggatagatgctgagaatgccattttccttattgcttatgctgtttgtgagaaggagacaacagattcttggtcgtggttttgtgatctactgaagacagatctggaaagtgaaagaccaaatgtatacacattcatgagtgacaagcaaaaaggcttggacaatgcagttggaagagttttcacaggttcagatattagacattgtgttaggcatctttactctaatttcaagaaggattttcctagtttgttgatgaaacaaatgttgtgggttgttgcaagagcaacgactattgctgaatttgatagaagaatgatagaaatcaaggaagtcaatgtcgctgcatataattggttggttgcaaagccacctacagaatggacaaaggcttaatttttctgaaggtgtgaagtgtgatgttcttttgaacaacctgtgtgagtctttcaataatgccattactgatgccagagacaagtcaatcataactttgttggaaaagttaaggtattggctcatgtgtaggtttcaaaagaaaaggaagagtgtcactaggtggaatgaactagtaggaaaaaacatcatgaagatcatatagcagaacaagaagtctgctagaaattgtttggtgacaagggcaaca

SEQ ID NO: 40418 - DNA, 3398 bp, Cannabis sativa
  modified_base (598)..(604): a, c, t, g, unknown or other
  modified_base (790)..(793): a, c, t, g, unknown or other
gtacccattgatagaaaagctcacctattgcctaatcgtagcaacaagaaagctaaggccttactttcaggcttatcctgctcgggcatacactgaccaaccattacgtcaagtatttcaaaaatcaaacacctctggacgattgctcaaatgggcagtcgagttgggccagtatgaaatcgtcttttagctccgaacaacgagtaagggtcaggccttagcagattttgtggttgaatgtacgggttaagaagagagtacttcaaaaaacaacctagagccagtacaagtacctcatccgagtaatagcaaagacaagccaacctggaaattacatgtcgatgagttggctacggatcaactgtctggcgcaggaatcgctcttgtcacacttggggggaacacttgcacaatgcagtcaaatttgggtttaaggcatcaaataatgaagctgaagatgaagcccttatcgctggcctaagacttgctcgggaattgcaggccgaacacattgagctctgcagtgactcaaattagtgctaaatcatgtatttagggagtacgaggctcgggggaaaagatgatagcatatctaagnnnnnnncatgatctgctcgcacaattcaaaagctatgctctcaagcaaattctaagagaagaaaacacaacagctgatgcactagcctgacttgcgagcaacaacataaatgataaagcaaatctgatccccatccaatttcttaaaaaacctagtatcactggcatggaggagattgaaatgattgatacnnnnccaaactggatgacgccaatggcagcctacctcattactgaggaactcccagattataggaatgaagctcgaaaaatgaagagaaaggctacacgatacatcattgtagagggagttatgtatagaagaggattctccgtgccactactatggtgtgttacacaagaagaagctggacgacttttgtcagaagtacatgatggattctgcggcaacgatgcagttgggcaaagtttatgcaagaaaattctaaggcaagagtatttctggcagaccatgattgaagactccaaggcctacgttaacaaatgtgataagtgccaaagattttcaaagatacctcgtgcaccgcccaacaaactaactagatacaaagtccttggccttttttgccatttggggaattgatctaatcagacagttacccaagggcaaaggcggagtacagtacgcagtatttgcagttgactactttaccaaatggacgaaagtcgagccactagcaaccatcacatctaaaaaagtgcaagaattcattgtgaaaaacataatattttggttcggattaccgtacaagatagtctcgaaaaatgggaaacaatttgatagtcagtccttcactaatttttgagcaaaccatgggatcataagaagtttctttgcagtggcacatccccaagcaaatggtcaagtcgaagcagtcaacatgacactcaaagataccctaaagaaacaacttgaagatgttaagggaaatttgtcggaagaacttcctgaagtattatggtcgtaccgtgcaactaagaaaatagcgaccggacagactccatttaccatggcatacggttatgaagctatgttgcccgtagaattcgaaccaccgtcccacagaagattgacatataaccaagaagttaatcatgcactcctcgcagaatcacttgaagaagttgaagaaaaatgaaccctagcaaacttgaaattgatagcccataaccacaaggtagctcggtattttaaaaaacaagtgagagcacggaaattccttgtgggagatatggtcctaagaagagtattttgaacgccaaagatagcacgacaggtgtgctcgaaccaaactgggaagggccatatcaggtgatcgaagtttctagaaattctgaacttggtaagtatgacgaaaaaaggcaactcgttctagtaccaagatatgtgaatggggaacacttaagaaaatactaccggtaaaagtaccaagtcggatgaccacgttaagtacgaaaaaaaagaacatttactcttaagtgaatcgccttctgggcggaccttgccaaaaggttcagataaaattacaaagtactcaggtcgggtgacaacttatgaaagtacaacttttaatttttgcaatttgttttgtttatgctaagctaaagatcagactagatcaatataatagcttcaatgtaagttactacggtaacaaacatatttctgaccaataaataaataaagatgtttatttcaattcgaattaagtcaagtttattagcatgttataaatttaccatccaatgtgtacaaaaggttcgctcatacctaaagccccgaacaaacaaaaagcatacttgtgaaaaacaagtgaccaagagtcataagtcttctcggtcacttgggggcacctaaccctgtacaaagcatttggtaaaaaacaaaaacaaaacaaacatagttacacgatgattataaacaaggaatgaaattcattaagaataacaaagcactcaaatccaggattaaaggttgcccggtcagccagttgttcaaaaaatgaaaaatattccaagtttaaagaccgcttggccgatcactttatctcaaaagaaggcctactggacgaacagacataaaaaattatagtaaaaagaaggcaattaaacagcaagagttctaggatctttgtacgggtcaattgggtctaaagggctggaggatcagctaggtttgaagaggctggaggatcatcagtctgggcagaacgagcctcaacattctggtcaatgggagaagcggaagtggtcgcctcagggttgtcatttgccgcctgagctgtgcaatagtcgagaaacatgtctttggaagccccaaggtattcaaaattcaccttgggattggccttctagaagttataagaaatcttgagatcaactgtctctaaggcatccactttcttcccaagcttctccacctcagatttcttgctcttaacctcaatctcaagttccttttcccttgtctttttgtctttaagctcatcttccaacctgcgaaaaagagtccagagaccctttctttcgtcctagagactagcaaagtcctaagacaaagaagcattatctgcctcaagttgctcagtcgaaggcatgtcctgcagtttcctggtcaactcggcaactctggtctcaacagcaagaagtttcttattgacctttccaagttttgcccgcacagtctcaagctaggtccgtgcatcttcagcatccttcttggacaagtccacttcccttcgcattgtgttggaagtggcaaggttcttgacagcagccga

SEQ ID NO: 40419 - DNA, 2107 bp, Cannabis sativa
atgtcaacctaattgcattttggcatctataacattacattagtctttttcactattgagtgttctatgtaaagtgtatgaagacactatttataataacatgaattattccaactatagttaccaactaattttaaaatgaaacttatacttttcaaactattatctaaattcttttttttttttaaaaaaaaaaaactattatctaaatttatagtcaacacttactaagttatataatttagaaaaatatatataattcattgaatcatgataattactattttaaaatttattttgctaatattacttatttcactatctattttattaaatgataatttaatcttgaattaattgatttttttatcaaaataaaatttaataataacataaactggaggtgttaaatgactggttatattttttacatatgtttatattagaaattggcttcaagttggttatattaaaaaaatgacgaaaatggagctcagtactattttatattattttagaaaatacaatgctcaatttgtcatttaacaaaactgaatgtatgattggtaactttattaaacacgtggtctaaaataatattgacctatttttttataaaagcatttctattagacattaatggtacctagcaccactacgaggtggcaccttgcgaatggctatcgacattgcctaataattatttaattagattattttggacccgagacttaattctactaatagcgatatgacatcatggatggtgttaggtattgctggttaattttaatttgcatttatcttttaaaatataagaggataaaatttgtttttaatttgtgtgtgtgcgcattgttgtaaaatcatgtttgtcatttagtccgacccatatttatctgtattttttaaaatacgggtcgtgtcgtgccgcatcacaaaaaaatatgggtcatgtcgtgccaataattttgaaaggtagtcccggcacggtccataggccagtattttcgtgtcatgctcagattcgtgtcgtgctttattcgtgtcagcccatattttttaaacatgccagcctattttgatatccgggttcaaattcgtgctttacattttcaattttttataattactaaactatatatattttataactttagttatatttatataacatatcaataatattttacaaataaatcatatacaaaaattattaatattagaatttaaatatttatttataaatactcaaattttcatatcacaccaaataaataaactaaaatataattttagtttggcatgttttaataattttcactataaatttttaattatcagtattatatttaagttttattattattttaacttatttttaattgataaatatatatttattattaataataataaaatttagggtttaataatatgttgtgtcatattttcttagcttgtcgtgtgtcgtgtcttttaggttagtctattcgtgcttatatgtcgtgtattttatatttctcgtgttgtgtcgtacctcttgtgcttctcgtgttgtatcgtacttaaatacatattttctgtgtcctgtcgtatcaatttatagcattgtgtccaagccctttttttacgcttaatcgtgctcgtgccttatagtttcgtgctgtgtcaaaaaaattcaatccctatttataacactatgcacatataaaagagtaagagaagtactacactaccacaaagtatcataatattgttattggtattattaaattatcgaattctatatgttgacatgttatttcatggtagtattatacaatctagtaatacttaataacaatacttttgtaaaaaagtataatatttagacacataaattacacacaaattcttattatatgtacagtacaaataataaacatatgtacacaaagaagcatttttgttgtatattacttgtactactaatatgtacgaatatatttcatatattttgtcttacatattatttttctgtacaaatttttatttgggataatttcacaaatacacaaaaacaataaaaaaattataaaagtacgattttacgaaattttaaata

SEQ ID NO: 40420 - DNA, 1749 bp, Cannabis sativa
  modified_base (1660)..(1669): a, c, t, g, unknown or other
taaactgatgaagtgtatatcttgctcttaaagataacacatacattcatcatcaatattatttaaacatgcatcatttatgattttgcctaaaatagcaagcaagatagttctagaattaattcctccatcattctacttttctatttaacaagtataaactacactcaaataatcgaaatttaccaagtatggtaccgtattcatttttatggagactttaaagttaaatcacaatgcaatcttaccaattaattagatccaacaatagccaaaattttcttccaatcatgctacatactcctagtattaatgtatcatcggctcataaagtgaaaatataactcataaaaaccaactaacctactctttactggacataaaaatacaaatacaactaaacacatgacaaatataacaaacataaagaaaactaaacataaaacaaaaaataagaaagccccccctaaacttattaaacacattgtccccaatgtgcaaaataaactacaagaaataaaacttatctgacactcccgccaaacatatcaaaatggtggtggcggtggcgctttgatgtgaaattttggaaaaaaaatttaaagtggacaatattttaagcagacataaatttcatacaaggtggatctaaggatccaaggtaaggaggtttttttttttactaaaagtaaaattaggttgcctcttaagagcgttgtatctaatgtcattaagctgaaggttgagctcctctttaaattggtttcaagagaataacagaattaacttgatcaatatgtccttcaagataatgctataaccattgcccattgactttgaaatggcctattttatcactatgagcttggactgcagcataaggaagagatgcaaccattgtgaatggtcataaccatcttgattttaattttctcaattttttttttaaccttgaatcaaataatagtactttatcccctggttaaaagtctttctaaagaattcgtttgtcatgaaagtctttggacttctctttataaatctttgcattctcatatgcttcatttcgaaacttatcaattttattcaatttcataagtctattcttactaccggtaaatgacaaacctttctaaaaaccaaccgatatagtgacattccaatcagagtcttgaaagttgttcgataagcccatagtgaatcatcgagtcatttggaccaatctttccttgaagtgtttatagttttttcaaggatgctcttaatctctctattagatacttcaacttgactgttagtttgaggatgataagccaaagcttgacgatgatgaaccccataccaagcaaaaagaacattgaatgatttattcccttcatcactaatgattgcttagggagttccaaattgagagaaaatattcttgtagaggaaattaagtacaattttactgtcattaatagtagttgtgctgcttctacccatttagagacataatatacagcaaacaatatatactttttgttgaaagatgatggaaaaggtcctataaagtctatcccccaaacatcaaagaattccacttctgaaattccagtcatgggcatttgatctcttctagaaatattacttgtgttgggaatattttaccaggatttannnnnnnnnncaagtatgttgattaacatcctaagtatgaattctgtaaaacaatgaaaataaacaccgtttaagatctctagcccttga

SEQ ID NO: 40421 - DNA, 1341 bp, Cannabis sativa
taagaattttgagaataataaaatgttgttttatattttaaaaaatagtttttgtcaatattttttcttcactatatctcacatcatttttatcacattattttctctctcgtcactttctctctcttcattttctctatcatcactttctctcttcccactttctctttctataagttcgggtttctgttccacagtagggtttaagtttaagtctagggctcgagttcgactcggggctaaggttgggtccatattcgagtctggggtcgagtttttggtaggggtattggcctgtgtctaggggtcttgtctggggtctagatttgggtctaaaactagaattgaggttcggacccagtgctgggtccggatgctgaagtctgggtctggatttgagtttgggtctagatctgagatcagggacaaaagctagtgtccgaggtctgggtcgggtcttattcatacagaggtctcaaagtattaaagtgtattctttttaaataaaataaaatgaaaaattatttttagaaaacaaccatacactacttatattttgaaaacttaaaaaattaatttttgttctcatttttagaaaataaaagatagaaccaattataccaaacatgttctaaatcacaattgaaaatgattatcttgaccaagtctttaaaattgcttacttatcatatatttcaatacatttcagacatattttagtgaaaataatacatcttttttttttttgttttataatttatttatagttgtcatgatgctatttttttttagttattttaatttatttatagttgtcatgagttcaatttctagttattttcttactttttgttgaacaaactctatttttttataattttaaaactttaaaaatgtatttttataaataaaaactttataattttcctttttgaataattatgattagtgaggtggcaaaagagtatagcaaaagaacaagagaaatatgtggagtgttaatgaggggaatctcagagacactaggattggaaccaaattgcttagagaaagctacaaattgggatgaagggttacaatttttgcaatcaaaccattatccaacttgtccaaatcctcaccaagtaattggtctcccacctcacactgatccaatgcttatgaatctccttgtccaaaacgacgtcggtggacttcaaatcctacataaagaaaaatgggtcaactggaaagccatgcctaattccatcattgttgacattggtgatcaaatgcaggtaaatttataacatctcgtaaacgtattagacactataaatgccttttaatatttttgatata

SEQ ID NO: 40422 - DNA, 1413 bp, Cannabis sativa
gagagagagattgaaagagaatgaaaaacatgaactaatttttcattaattcaaaacagaggaatacaagtatttatacacatgattcaaggaaggagaactacctaacaaactctcaccaacctctaactgaatttgtaactaactcaactaacactactccttacaaaacaatcttaataatagacagtggagtagcagtggtgaaacaggtaatttttcttttttttttttttcatatctgaggctttcttctgggaattcgatcaagtgagttcttctacctctctctcaacaccactcaaataaaatgagtgctgtagaaactcaattgccttaaaggatctgatcgcaaatagataaaggccaaacgacctgtttagtcaacaacaataaaaaagacaaacggcatttagaagctacaatttaatgttcaattacataaaattatattaaatctaataaaccacccaaactctaattgcaagaaataccctgcatcagtttttgtgttgacttcctttccttttgttgggttgtgtgtagatggtatctttggaacaaagatgaaggtgagcttaccttgtccagttttccttgtgtaatgtttgttgttggagttatcgtttttgacctattctgtagagatcacttactagattttcactttctatttttcttattttataggtcagtttggttaatgatggaccagtcacaatgcagctagattcgcaattgcctaaatgagcacagtgatcggaatcattgatccgcacaaagttctcatttttttagtataatttcaatttatatttgactgttcaaatctttgttaaagagtacatatggctttttttttttctttttctgatgagaaggtggtgcccaaaggcaagtacataagttgtgttgatctccacttggtatatacactgaatcatttcttcaatcaaaatttttgatagtttcagtagcttctttacatatgcataaataaataaataacactatagggttatgggtttttcatacatatgggaagtgagggtatagtttacttttttatggcataaataaataacactacagggttatgagtttttttttttattttttttacatttatatgggtttttttatttttttacatttatatgggttttttttatgccatatttttataaaaaagaaaaaaaaatagaaattccatatttgtaaaataataataagttttgccagaaaagtcgcaggcaccggaaatgtcaacggcaacggaaaagttgccggaaaaatcacggtcgccagaaaattcgtcggaaaagtcgtcggaaagtcaacggaaaagtcaatgtcgctagaaaaatcaacgttgctggaaaagtcactggaaaagtcaccaaagtaaatgtc

SEQ ID NO: 40423 - DNA, 2088 bp, Cannabis sativa
  modified_base (66)..(71): a, c, t, g, unknown or other
  modified_base (1380)..(1381): a, c, t, g, unknown or other
  modified_base (1602)..(1616): a, c, t, g, unknown or other
gacttagccattaatttgaatgtttaagaccttcgtgtccacgtgtccctgtctggttggtccacnnnnnntgggcaaaatcaggggcaacaactcatatatataaatatttacatatataacatataaaaaatagtatttcaagaatacttactcttaatataaaattaatttgtgttgttaattgatccaataatattgaccaatattcagtatgattttctctatttatatacatatcactttgaatgattagcaattataaagtatttattaattatattaattaatcaaaaaataaaaaattaggagaatgaaaaaattgtaggaactcaatagataaaaaaaaatataaatagtagttaataaatttttcattaattttgatggaagtagaatatgtataggatattaatttagttaactgtataagtgaggtttgagtgtatatttaattcagatattacaaattttttattaatattattaaatgaaaaaattatagaaaaactacaaaataaagtagaaaattagaaagagatgaagtcacctcacttatttttgtttcaggattatatgtagatataaaaatttataaatagagataactcaaagagtgtttttgcaaggccggttgatctcgggcaacatcatgattgcttatgagattatgcatcacttaaagaggaaatgaagagggagagatggttatattgcactcaaactagatgttagtaaagcctatgacaagcttgagtggggttatctccgagctatgatggtaaggatgggctttgatggtcgttggattaatttagttatgcaatgtgtatgttctgtttcctataccatttcacatggtgggaaggagttggggcccattgttggtcaaagagggttgcgccaaggcaatcctttatcactgtatctgtttattctttgtgatgaaggtttctctagtttgttgcagagttatgaacaaagtggcttactcacggggtgtaaaattgctcgatgtgcgccggtaatctctcaaaatgaatgaaacttgctaaaaccaatcgaagaattggaagaggttattctcgacccagaaaatcccttaaaatgtgtatacattgggaagaacctggatgagcagctcaaatagcaactaataagctttttgaaggcgaaccgagatcaatttacctggagtcatggggatatgatagggatcgaccctaagattatctgccatcacttaaatgttgatccaaactacccgacaaagagacaaaaaaggaggcccctggattccgagaggtaaggggcactaaaacaagttgttgacgagttgttagtcaataattttatacgtgaggtgttttatccctcgtnnatagccaatcctgttctcgtcccgaaatctaacggaagttgaagaacttgtattgacttctttgatctgaataaagcgtgtctaaaagatttttcccacttccccggatcgactagttaatagatgcaactgctgggcacgagctcatgtcatttatggacgcatattctggatataaccagataaaaatgtacgtcccagatcaagaacatacaagcttnnnnnnnnnnnnnnnactctattgttataaagtcatgctgttcgaactaaagaacgcttgggcaacgtatcagcaattggtaaacaaaatgtttgcaaaccaaatagggcgaaacgtggaggtttacgtcgatgatatgttggtaaaatcaataaaaaagtaaagatcatacctcagacctcgcgaaatgctttaaaatattaaaaaagtataacatgaagctaaacccgaaaaaatgttcctttggagtctcctcggaaagtttttgggattcatagttaacgcgaggggtattgaggcaaatcctgaaaaaattaaggcattaatagttatgccatcacccacaaagcctaaggaagtacaggccctaacaggaagaatgatggcacttaacaggttcatttcgaagtcaactaataagtgtgtgccgttcttcaacatattgcgaggcaacaaaaagttcgagtggaaaaaagagtgcaaagag

SEQ ID NO: 40424 - DNA, 1818 bp, Cannabis sativa
  modified_base (70)..(97): a, c, t, g, unknown or other
aaattgaaaaacaaaagtggttacggaacacatttttgtttttcaaaaataaaattttactttcattttnnnnnnnnnnnnnnnnnnnnnnnnnnnnttaccaaacgacaccttagttttattttagttgttttttttattctaatttttcaagatcgggcttgcaaatatacccactattgcatctggtgttgaggttgtacagaagatggttagtttgttttaatccttttgtctttttgttttgtttgatttgatttagtattgttttacagttattttgccattgttatttatttgacgtcgatttcactatttttgctcaatcgtaccgaaattaatggttgtttttttgagtatttttgtgttgctgtagtggttctgtgtatgggtgtgaaagatggaggcattgttattgatattcgacatctacaatataaaagaaaaaaaaagttcaagacagtataaaagtaatatttactgtgtggcagtaaaattgtaaatatttacttcaaattcagtgtttttgtaagttttccgatttaaatttaaaagatatatttttaaatcttaaaaaaataataaagttaggtagaaaaaaagtcaaaagaaaattaattgaacattggcaacataaaatttttatattgcaaaagagaatttaacgatgaatagttttctacaagttttaaaatgagtgcacctacgtaaatttaatactctaattttggttcatttattgtttgctgtcttatatgtctatatatattatatagaattatagatgataataacaaagtgggaaggataaaaagcagggatttaaacttacatattttacattgtagttgtgctatcaatatatctaaacaaaatcagaaataccacattccacactcatcgttgatctttgtcgaaatctaagtttgtgtaaacaaggtaacaagctcaggctgtccatgggaacggaattcgaccccacattcattcaagcgccagagcacaggcccaaggccacagtcgtcgaggcccaaggaataccagtgattgacctttcggccaggcccatcgatgacctcgcgagggagataggctgcgcatgcagaaagtgggggttcttcaaagtgatcaaccatggagttccaccagaggttcgacggaagattgagtcagcggctagggagttctttgcgaggccagaagaagagaagatgagagtgaagagggacgaggtcagggttttgggatactacgataccaaacttaccaagaatgttagggattggaaggaggtctttgattttatgctggaggatccaacctttgttccggcctcggtaaatcctgatgatcaaagagttaccacgtggcataatcaatggcctgacaaccctcctgtgttaaggtaatttttagtgcttttcaaatttttattgaattatttactaacaacaatactcttttgttttaatagtaaacaaagacgtgatacatctgcaaactatttttatttaatttaaacaagtggcaaagcacgctgttatttttttccctttcatttctttttatgaataaactagacaacgtatccgcgcttcgcgcggtcttttaataattgaaagcatcattttattttattattttctatttattgcctcatatattttttttttctctttttgcttctaattaattttactttgtaaatcatgtattctgcctagattttttattttttatactaatgtcctcttgcaaaatagaagtacaacgatatgcgttaaattttaatacatattgatttgaaattgatataat

SEQ ID NO: 40425 - DNA, 1614 bp, Cannabis sativa
  modified_base (27)..(40): a, c, t, g, unknown or other
tcatattaagatgttaatgaaacatannnnnnnnnnnnnntagatcctggtaaaatatatccaataggttcaccttcgctttgccttacctcgacaaggtcttccagttgggattttatctgagtcaaggatcataaatttataaatttctcgatagaattcattccaagaattgaatctccccgattctagcttaaaataccattgttgggttgtttcaaataaagttgcagggaagatttagcatcatacatccctagtaactttttggagatctgtttgcatctcaaagtacattatgtgagctaggggatcttctctcccgatatacatcttccataccgacatcttgaacttaggcaggggtaacgcattaatgtatgcaaagaatggagatccccttgacgtgtctagctctaggtctgatagcttttgggccggttaggccctttatcatttcttcaattttatttaattgtgcttgcacaaatgtatttgatgtggtggacacttgctcaaatggcctcttttgtccgggctagagctcttggtcgcccagaccctagctgcgaccctagccggtcatgcctttgctaagtagttggccttggtcggtcagccctatactaggtagttgggtatggccggccaggcttaggctctaactggtttatgtcccttggattgccagaccggtttatcgtgccaattgggtgggtttgacggttgtaccaacctaaaattattgttcagttgcagaacaaagttactttggttctcgcaactcaagttgatgttgtgatgtttgtttccgctcttccaaagacctagtctgtcaaagataggccctataacgacttgttctcgaatattttgtggaggagcatcactatgatggccgatttgagatgcctctactctaggaatgtcttgcggtcccctaacacctcctggtgcaaggggctggctactccggtcatatggtctgtttgtcaagatttgactgtcttttgggaggggaaggtctatcctcttgctcgagggacctagttagatagtttcccagtatcaacctgcccatagtcactgcctgaactgttgatgagactcccttgcaaaggatttcttattagatcatggcctcttcctataattctctcatttaaccgccttatcaggtcatcgacttccctattgcagtagtggaactctacttgacggggttagaggatggccttttggacgtccattcatcttaggaatttgcatctgttgggttttgtgccctaaataaaacccatttcaatcatcagatttactaattaataaagatgagaaatcgcattttatgttgcatggttcccatgatttatttcataattatttttaatatgtaaattctattaagtccagaacatatataaatatgtatttatttgtttatgattatagtgtcgtcagcacagtggaatataatcatgaatatatgttcaaaagtttaattcccaatatttctcagttgactggatttagactggcatgataatcagcgataaggtatacttacaccttggataagtgttatctcctttccagggcattggtaaagtttac

SEQ ID NO: 40426 - DNA, 3102 bp, Cannabis sativa
  modified_base (3054)..(3065): a, c, t, g, unknown or other
tgtggatataatgtaagttatttatgaaataaaaatatttttaagttcggcaatcttggatatccaattggagaccaaaaataccacaacagttttagttagtaaaattgatggaattattgagataagttaattttaggaatatcgaggtattttatggtacccggagttgaccaaataccttaaaattataaattttttaatgactaagaaataataagataattattattattattattatattattatgacattatattattttattattattattaatgaaattttaaaaaacacgtatcagtgaagttatacatattaagttttaaaacttaatacaaaaaaaaaaagagtaaaacgaaatcttttcttttgtgcgacaaaatcttcttcccttttaatatattttcttcgatttccaacccaaaatctaataattcaagctccatagtagcagaatagtaaatcatcgaagagagaaagcttaaggtaatgattaatttcgttttaagttgaaaataattagttttatatagtgactttgtgatttagaatagttatggagattctgacttcatagaaatgttcttgggtagctatgggactagtttcaatgtttacttgttgaatttgaggggactttgagttagaattcgagtttggaactttttaaagcttaagtccgagctttaatggcattttctgtttatgggctcgcttttaattttggctacgttgggactgtagtatatatggaatttatgtgtcatatgaagtttggaatgatttggataggtttcggtagtgtttcaaagagtgcaaaatttgagattttcgtactagaaaatggtctgccgtttttagaaattctagggagatcagaaatcgtatttttgtcataacttttcacttgggtgtccgttttagacgttgtgtataccgtttcgaagcttacgatgagctctacaatatggtgtatgttttagagccaaaatataagtttattttagtgtatttacaccgcagcattttgtaaaaaattctagattgtcttatgtgaatattaagtagtgttttggaatagacacttattgatttaccattattatgacatagggcccgagatcgtcgattattcttaaagtaggccggccaacatacctaaactgaaacttgaggtaagaaaagtatattgtattacatagcatattatgttgcaatgcaattaatattgttgagagtttattgatattaaggttaagatacagttattattgttatgtaatgaaaagattgcctaattaggtaatgtgatatacaggctcatttgattaggtggtgtgatatatggattccaagctatggtatgagcttgcctaattaggcaatgtgatatatggatatcgagagaggtatttgggttgttcctgtgagacaaccttgataagtcatgactataaactgaaactgttattacgtttcttcctgtcagtgatgcctgattaggcacgggcggcagtgacatgtgaatgacaggctatggcacgggctcgtctgattaggcgatgcgatatgttggtgcgaggttttggcatagggtcacctgattaggtgatgcgattatgcgatatatgggtaccatgttttggcacgggctcacctaattaggtgatgcagttatgcgatatatgggtgccaggttagacgatgcgatatgttggtgccaggttttggcacagggtcacctgattaggtgatgtggttatgcgatatatgggtaccaggttttggcacgggctcacctaattaggtgatacagttatgcaatatatgggtgccaggttttggcacgggctcacctgattaggtgatgcagttatgtgatatatgggtgccaggttttggcacgggctcacctgattaggtgatgcagttatgcgatatatcggtgccaagttttagcacgggctcacctgattaggtgatgcatttatgcaatatatgggtgccaggttttggcacaggctcacttgattaggtgatgcatttatgtgatatatgggtgccaggtttttgcacgggctcacctgattaggtgatgcatttatgcgatatatgggtgccaagttttggcatgagctcacctaattaggtgatgcaattatatgatatatgggtgtgaggctatggcactggcttgcctgattaggcaatgcaatataggattatcaaatcaaagcattgacttgcctgataaggcaatgtaatgtaataaagatggttattttatgaggtaacatgtatataatttatagtattatatgaatatgaattctattattggtataatggttttgtgttactgaatatctatactgacgttttattgtgacagatgttagtagttatttggatctcatcttatgagtaatgcgcgatcgtttaattttgattgtctgagtataaatgataatatttgaataataaattatatgattattgttattacttttcttattgagtccttgtggctcacaagtgctatgtggtgcaggttaaggaaaagaaaagctagttcaaccataaggtgacagtcttcttaagaaatgtacatattgaccctactgatctatgtgtcgagtttttaagagttgttattaggctgtatctaccatgtattttgatttagtattttggcttattgtcgtatttcacctttttgtacaacttttacaacaaggattctcgaaacacagttttagtgtcattatgatgtctatttttagtgttttattttagtaaagtttttaatattaccacagattttaataattaattattttattagtactaaactagtttataaaaccacacacgtggtatccctataggatagggcgttacacccatctttctgtagatgaaccctgatgatttctagggaggcaaacaccatatcgaccaagacctactcaaactcttgtacgaagatcatcctcgactccatgcaagtttatcttcatccactgatatgttggaatttattttacnnnnnnnnnnnntctactcacaagtatgttttttaacaccctaaatatg

SEQ ID NO: 40427 - DNA, 1394 bp, Cannabis sativa
ttttactcacaaattttgttgtgactaaaagtaagattttttgtagtagctataacgattctaaatacacttatatataccagactttatacaaatgatcactcgtccacaacttcaaacacagctaggagagatgttaaaatttctgctaaaatcagttagctccatgttagctttaatcacttttttaacctcaacaattttttttcaatagtagttacacccaagtggagagttatagctccaccaatcttcatttttaagatagacagcatgtatccatctcatccatagacaatctttcttcaaggctatatcccacacatgccttcccaaagtaccaaaattccattattgctcaatgttcctaaatctcaaacttgtcaaaacttttggtaaacaaatctaatgccaagccacaagaccaaaggccgtcagaggcatgagtactcttccacaagaaagctctacaaatgttattaatgttttttaagatgtatttaggaataatcattaattgaacccaataagtgtagatagccatcaaaattgaattaataaaaatacatctccttacataagaaatatgtctaaactctaaacctagccactatcttctcaataatgctatcacacttattttttgaaattttcttagaacaagtaggaatatcgaggtagctcaaaggtagatggctctagacataatcggaactctaaaaaatatgtttttgattttatttatacaattttctagtatattagtatattttttataaaattttatgttttttttggataataataattttattaaataatatgtaatattttaatatttatgaaatttactttttatatacttaaatttttagtataaactttcattaatacatgggtagagtctctggaagttcttatcctgtccttaatgagaattatgcaaggatagatgagaattaaaattcttaacgggaacaagatgggagaagcactccttactaatttttcatattgtgtgcatccctaatctagacacaatatttacatatataacattgctaaacatgagaaatagatttaagatattttctaaaatatataattacttttgtttaaaataatatatatgaaagagtattcataaattatgaatgtataaagtactaattaaaaggattatatttatagactttattagtatttatatatagtacttttatgttaatagatagtagtatttttgtggattgtcgtgtttaaatttatattttttttattatatcgttgtttatatttttttcatatcgtgttaagtttaaatttatatttttttatagagcaatttgcggcgaaatccccttatgttttgatttttatacacttaaccccct

SEQ ID NO: 40428 - DNA, 1393 bp, Cannabis sativa
aaaaataactgtggaacaacagtaaaaacttaacacaatatacaatataaaacttacacagtatttatgaaaaaaaaattgccccacactaaaaaagttataaatttgtgtaaaaactcctttaaaatatgccacatttttggaatatattttatatttttatattgccatattttatttttttttggtccaattatgtctatacctttttccttttttgtctatacattcgacaattttgaaatcgtcagctgtatttcctctgtcgtcgtcttctttcatgggaacgcgatcagaaccaagcccttgctaaagacatctgatcgtcaaaattgacatagtaattgaagagatttagaaaccagaagataccagagagaaaagaacaataatggtggaacaagtgacaaaagttttcttaaaattcttgagatatcgacctcgaggattctctttcagatcaaagtagaacaacttatgctccacttgcagagtcttgcatacatagtagctcgaagtcatgatttccttttattgatccttttttatttatttttttaggatctactttattagaaaattaagagataccaacacaagaaggaagatgtgtatctttcaattaataatatttttttttttttgtctatccttaaaacatgcaaagataatttaagaaaactagacaataatcttatacttggctgtaaagatgcaaaccatgattaaacagatccagtgtttcaagaaactaatcttacagagcatggccttcaaaaaaagtcattcgattttatcataagccttgctcatattaaacttaagagtcataaattatctcttacatattctcttccttttcaaataatagaatacctcgaaagagaccatatatttatgaaaaatccgtaaatattaaagcctaaaatattcatctcaatccattcaatctgccccaacccatttcctatattgttgcattaagtaggattgcattgtacactaaaaaaatgtgaatagttttcaaaccgcaatcattggttcaacctattaaaatacatctaaccgagtccatgtgtacccttaaattataaatttttatatatttgtgattataatattatcattattataattagaatctcaacaatttatagttcaactagagctacttttcttcacaatacactagtacaactaagctacaattattttttcttacaacataattgtatcaaattggtcaataatatcccttgaatcgatatctcaaatcgttaagtttgctcactttgcaaaaagaaaaaaaatatatctattctatataaagtgtacctatataactgaaattcttagtttatgagaaatccatgggtgactttttatttttatt

SEQ ID NO: 40429 - DNA, 1901 bp, Cannabis sativa
  modified_base (67)..(68): a, c, t, g, unknown or other
aaaacatgtatgtttattatttatttttaccatatatagtttgtacataaaaattaagaatatgttnntcatagttaataaaatgtatgataaattgtaaatgatgttttttgcacatataatgcaattaagtattataatgtataaggcgtgcgtccctctcttgaaggaaaaaaccctaggcgtgcgtctctctcctgaagaaactcacggactgaagaaattctagatgtgcggctgcgactgaagaaattcacggactgaagaaaccctagtcgtcggtaagtcgtcggccggtggcagttcttagatgatccagctacttctcacaggtgtgcagcgtcgtttctcttctgcatcagtgaatcctttggggcggcgtcttctccgtcgtagttcctcatcggtcggcgttgtttctcgggtgtatgtcttgtctattgtgacatggtgtgttgtctttgttttgtgtttgatgttgtttttttgggttgatttttgtgtctaattttctgcaagtatcgggttgttctcttgaggttgttgggcgtttgaatctggtttgcttgggtgtgtgagttttcttggggttgttcctggtgcgttttcttcgggtttgaatctggtttctggaacgttttcttaggggtagaatctggttgcttgggtgtgtgagtttgattcgggtttgctcggggtgtgtctgggtttctgggttgttggtgggtctgtggtgttgggttgggatgcggctgggtgtttcttgtgttcctagggtctgtggtgttggtttcgggtgcggctgggtgtttcttgagttcctggggtctgtggtgttgggttggggtgtgactgggtgttgtgttcctggggtccggttgaagttaggtgggtaaggactctatttggtgtggtccgagctgggttgtggaaggtagatatattgggtggggctttgttttgttggtatggttattatagggtcggggcaggcacatataaagtgtcatggcttctagtagtacattgtatcaagaggtggatgaacaatatgcgaatatttcacttgagggagaggatgatggggagttggggattgatttccttgtccctgatgatcaagctttgaatgttgagttatgtattatgggtcgattattgactggaagagccattgactttgaagcaatgcgccatgttatggcctttttgtggcagccaggcaagggggtttatgctaaggacattgacaccaaccgttatctatttcattttttccatgaaattgatttagaaagggtggtagagggaagcccttggacgtttaatagagttcagtttgtttttcacaagctaagaaggagagatgatccgaaaagggtagtgctaaacaatctcgacatctgggtgcaaatccatggtctccaaccggggttaaagtctgcgagtgttgtggagaattagggtaattttgttggtacgtacgttaaggctgatcctaagaatttttagaatgtgtggagagattatatgtgtgttcgggttacattggatattactatccctttgaaaaggcgtaggaagctccgccagactgcaatggaggatggtttctgggccgaattcaaatatgatatatccccacattttgctttatctgtggtataatagggcactctgagaagttttgtcctaagctttttgatacaacagtcgagatgatcataaagtcgtatggtgattggatgaggtctcaaccacgacgacgaaacaacctggcgggctcttagtggttgcgtgatgggaatgagacagatgagatgtttgctggaagattcaatggtggtgcggcgactgctttggggatgttacatcaacagcccagaagtgaggaggttgtt

SEQ ID NO: 40430 - DNA, 1101 bp, Cannabis sativa
ttgagatagctgaagcgttctttagttaagggcttagtgagtatatcagctgtttgatcaactgatggaacaaaccgaacttcaagttgcttggctaaaatttgatctcggacaaagtgtaggtcaatttcaatgtgttttgatctggcgtggaagacagggttagcagctaaggaagcagccccttgattgtccacccaaattacaggagcagtaggtaaatggatgtgtaattcagagagaacataacagagccatttgacttcagctgctgtgttagccaaagctcgaaactcactttctgtactactacgagcaaccacattttgtttttttgcagaccaggagatgatgttgtcccctagaaagaccgcatagccaccagttgaacgtctgtcatcaggcgaactggcccagtcagcatcggaataggcatgtagagacatgttaagaacaggtctgagatgaatgccttcatgaatggtgccttttaagtaacgaaacaaccttttgcatgcttcccagtgaactgtggtgggagcatgtataaactgactaagtttatttacaataaacgtaatgtctggtctggtaagagttaaatactggagacccccaacaatgcttcgaaacaatgtgtgatcggcaaacggttcgccattggtcaatgtaagaacatgagccgagcttgttggattggaggtaggcttggcaccttccatattcaatttgagaagcatatccgtgatgtattttgactgagacagaaagaaaccagtcgagtttcgcactacttcgacaccaagaaaataatgcagggcacccagatctttgagagagaaatcttggtttaattcatggataagactggtaatttttgtagtattagggcctgttattaggatatcgtctacatagactagaaggacaatgagttgagatcctgaaccatagatgaacatagaggagtcagcccttgaagcagaaaaacctttactgagaagagtagttcgaagcttatcattccaggcccttggtgcctgtttgaggccgtaaatggccttgttgagcctacatacatgacttggatattgtttgtct

SEQ ID NO: 40431 - DNA, 1629 bp, Cannabis sativa
aaatattgaactaatcttctacccatacagttattaaggtattgatattttgaattaattattaaaatgacaaagatgttaattttaataataattcgatatttatttattttacacacactacacactcgtgcacataatatgtatacatttcacctttgtttatatatttacatcaacgactgcttttttttttcttttcaaataaatactttggcaatcaatcagcatcaagtccaatattattttattttaggaaaggttttatacaattgtaaaaaactgtataaatatatataaagtttttataatttagtagttgttaagaatttttataaatgtataaatagaacttagagagtagtctcttctcttatttcttctagtttttgtttatagaaaatattaaagagaaactttgaacaaatcgcagtctttaggagaagatttttttaaaatctcatttcagaaagaagtgagcacatatcttcgagaaaagattgttttaggacttacttcgggagaaagtgagcacacgtaggactaaatagattttactacttggtgtgtttcaaaaattaaattagcaagataaattacaaacggttgtggacaaattattaaaggaagtttagatttatttaagcaattactctaagacatgacacatgtgaactgtttttaacaaagatgagttccatgcatgtcaaataaatgtgatcatttaataaaaattttgagtggtatcattctcattcataaaacatagttactatattttttgagaaatactaaaataattacttgaatcatatcgctattcatataattaagtgttgagtctcacgtaatttaatttaataattattacagaatattattaatcatttacaaaataatgtggtgccagacaccactatacctaatatcaaatcacataattttctaacaaaagaaagtttaaagatctccaatgctaaaaaataataaaaaataaaaaatcataacaaagaaagaggttaaaaattaaactttagaacatggaagggcatttttttcctgcagaaattagaactaaaaatataaaccaaataatgtgtgtttttgtttttaatggagcatgtttcacctaatttttcttctacctacctaattgcttctaagcatgcacattattcacaccacatataacactgacccttgcaattcaccaacttcttttcaagtgggaatagatgaatactatataccaaatatgatcacactttaatttgtttcttacatattaaaatataggtgctaagtaaacatattttaatttgatatttaaataaattttattttcattttatatgtgcaagttattagaatgtaattagaaggaagactttttcttaaaaaaaattagtacaaattaaaaataaaatttagtgtacattaaaatttgtaagttttttttttttttttgatgcaaataaaatttgctttaaagttagaagaccccacacatttaattaaattagtacaattttcaattcgagatcatgttaccaatagcatcacgcaatagttgttgagccccaaataattgtaaaatctcagctcaaacttcttttttgccattttttt

SEQ ID NO: 40432 - DNA, 2475 bp, Cannabis sativa
  modified_base (2145)..(2146): a, c, t, g, unknown or other
aaactatgtattttccccactagtgggctttatggaataaaaccctaacgcgacccaaattcgcctagcccgataagcatagtttcttataaatatgacattatatcttccatgcaaatggttcacaacctgaaaaatacatactagagctataaacctccactgcttaaaacttatcaaattgtctcgtggactaaggttcactaacgcctaaattacgttaatttgtgcgttattctcgttttaatcctttttctttagcttattttttcgtaataatttatttctaaaaatctcggtaatattttagtactttcattgagagttgaagaaatttcttacaattttttacatctacaaaaatagtggccatgagaaacacagtttcatgacctcttggtaaaacagatcgaaataccaccgaataccccattattgatggaatcttcctcttttgactaactcttaggcaatgaccgtgagaggagaggtggcctcaattgtgagtggtaattgccttagaaatgtcagccaacctgaaaaaattcatggagaaaatcttgatggagaagaccaatgcatatactacaaggatagatgagaagatggttatgatgataaagaggaggaagactacgaccataaaatacggcggatccctttgagcacccagaggtaacttgcttaaaataactggtccaaggccaaagggctaaaatgacacaacaagaagaggttgttggaagttattttactaggatctatagttactaacacatatgttgattataaatctataatataacaacctaaatatgaataaatcttaaaataatgaaataaacacataaaggttagaaaacctcacattggttgcagcaaaatacaatgtcttattctgttcagttatctaacccttgatcctttttgttgcagcatatgctcaagaactgaaccaaaaccctcttctccttcaattgtgttcatcacagtcttccacagaggcctgagtaccaccttgaatagtgtgggctggtactcaattcacctttcgaacaatcaaaagccacagtgtatgctatttttaaatttgtgaatgaaagagaagaggaagataagacaataggttttcaatcttcttcactttctttatatagctatcacatagggttaggtttaggtgagatggacttaaaataaagacttgggttaaaatctaactctaggcccgaattcttcatgggctttaaagttagactttccattttatttcaactaatgaaactaaagtgtcttttctaattttaacacttatatcatctaattatttaaataacaactttattttaataattataaataattatcaaataaaataaaatttaagtacatttatcaattagacccacaaagtgtattaattaataaataaacccttatttttcttttcttcttaaaattgtccaaacttggtaaaaattctcaaataagacatagtctatttttgaattctaattgacttgttagaccaattaattgagtccacaagatgttattatctcagacaatgtagggaccatgagactatgtaaccaagctcctaataagcagatcttgaaatttaccgagtaaatttcctaacttattactttctcttaactccactatggattcagaattgcactcctgattacatagaatactctatacaacaagtatattaacactataatttattcgttgtttcaatcacaacaatcattaatcctctatagactgttacattgagtaaggacaaaattatcattttacccttcaatgtattttatctttaaaacacttaactacttataaattatatttagagaaactaatataattaccgaaacattcaacaatttaacgcctttagctaagctcaaaggaaactatcatttcatttctaataaacatagaagctatagatgtccatatttatgattaacactcctaatcaattacactaccaagttcccaagatgtaagtatggactagtcctataggtaagctgttaatgaacaagttaaaaaactcgtgcaatacaattaagctagagctcaacaatctcaagtttgagattaaatgatctatgatcaactaagtgnnattgacttagaaaagatataataataagtttatgatatcttttccactgttaatatcggtccagctccatgtatagccaatacattcattcctagtttactatactaatgccttagaaaagacattccactcaactaagtgtaattaaactttattgctgatatcacgtcagtgtaaactcagtgcaataataaactgtgaaaaaataatttgaagaatataatcacatttactttctattatgatgacatcgcagtaattgtaattaacaatatgtttggtgttgacgctaaaaagtgaacaacaccaactcgctagattggcgagat

SEQ ID NO: 40433 - DNA, 2034 bp, Cannabis sativa
gctaataaaattaaatgattgtttaaaatcgtcaaaaatactccactattcagactgttttaaacagtcgttatagaatccacaattgtacaaaacagtcacaattttataatttataatttttaccattttcaaaaatatagagtatattttgtcatttgaaaaaataaagtgtctaattgataatttttgtaaaacacaatgttcaaaatagtatttaactaataatttcactaaaaaaaaagtaaacaagccacccgcccaccaacctagtgagaggaattctaacaaagctcaaagattataagcgcccaatatggctgcaccacaaggttatgtatttcaaacatatatataaattgattaatttagatataaataatgaactttttttttttttgaagaaaaataatgaacaattttaatgtcaacaaacattagtaagtttcaatgcttaaattttatttaggtattagaccatcatcgagtttagcaacatatatagtttaggtttcaactcctaggatttaaaaagaatgttgattaatgtttcttttcacctgtatttatataaatagagagtaataatactaagttttgtttaattaatttttttttagtaaaagaaactattttgtttattattattttttttatggaaaaaaaatgttattattttattagtttggtatacgttgcacattttcctgattcatgactctaacaaagtgtcagcccactaaattttctgttgtaggcctaagaccaaaatatcaagaaaagcccaagtgtgtatgcgcatatccaaaagcccaagccaagtttctttatatatttatgggatttatttacgggttcttataaaaatactgaattttagacaaaagtttacaattttactccacacagattttttttacaaaattattatccttttataaaataaccgtaaaataacaaaacataacaattagaaaaaatagtagaacaactaaaaaataaccgtagaataacggtgaaaattttaccgcagtacacaatataaaacttacacagtatttttgaaaagaattctgtccacagtaaaaaagaaaaaaaataaaaattttagtatgtggtgtaaaatccccattttttaaggggtttttctaaaaaaaatactagatttcgggtaaaagtttacaaatatcttttgtaaacttttttcattttacagtattttcataattttgtttttataattaactacaaaaagacaaaaataatacaaactattagatgcgtttctctaccaggccaatatttatttagctctttataataaagcatcaaatatggagtattcttttgttttttttttttttttataattacataaatactattttttttgtaaaattttatatttaaagattttatttatatttttacaatgttatataaaaacaatacgaaatagcaagacataaaagtaatagaaaaataacattagtggagttatgagtttttggaaggatttatggagtttaaaagttccccctaaagtcagcaactttttatggagggcggcttcaagctctcattaccaacttgtgtccatttggaaaaaagacacgttccagttaacccaatatgccccttgtttcccactatagctgaaactatttttcatgcgttagttgggtgtgttcatgctcacgcttgctggaacaggacaagtgtggatgttgacagcaatatgaatgatgatttcagcaattgtggctgcaggtgctgcaataccgcgaggaagaaaaggcgagttggaggaagcggctatggtaagctgggccatctgccgtgccaggaatgactttgtttgccagcaaaaaagttggattactgcaaaaatgtggttacatcagcaagaatgctacttaatcggttcaaagacactcaaaaaagaaaggatctttctttgtctttgttgttcgacggaggccgtttggttaagcattggagtgcaccattttcaagaaagatcaaggttaatgt

SEQ ID NO: 40434 - DNA, 1394 bp, Cannabis sativa
  modified_base (859)..(863): a, c, t, g, unknown or other
tgactggatagattcatgtttttccgaagaggtatgggagcagcgggaaccccaagattatctacgctcgccttcctttgcccctcgtaagagcagaggtgtcagcccttggcagggttatctctgttatcctcaacaacaaactcaacctaagggtttttgctagaacctcttctggctagatctccaaaccgggcatgtaggtaagctatgacctttttccattttataggcgagttcctctcttcattttctaggattgtaataacagcaacagtgtaggtctaaatctttcctcaactctcaatgaaatcactaaaatatttaccgagatttttagaaattgatcaattagagcttaaaaaagaagtaaaatagtaaatactaaacataaggttttttacgtgactcaagcattaactatctttagtctacgagtccattttattggccttattggcaagtaataaatattacaagtgtttacattattgttatacccgaaatatggctagcactttagaagaggatacgtgtcaaattgagataatacgaatcaacaaatataatgataattatatttgaaaatagaataactcattaaatgcggaactgacagagtatatttacaacttgctgactgcgaggtcttaagcgagataaagatatacaaactgttgccttgtgctttaatgagaaaccatacaacatcagtagtgcaaggcgaggcatcaacctcgctacgtatgaagagacatagacgtgacatgatgactgttaaggcacttagtgtataatagtcgaacgaatccaaacaacaaataacgagttatccatctcgctataggaaagcacactnnnnntaccttcactaatcagctccaaacatctttcaatgagatccatagctccgacgagtcagctctctcaaatagaagctgacattcaaatgatgttgattgctgaagttcaccttgtcaccaagaactctgattgtcagatagagtgttatgtcttcaatagcacaaacgatgagatttacattatcaaccttagaaagacatgggaaaaggtctagctcgctcccagggttattgatgccatgctcttagcgagatgtcccagaacgatacgctttacaacgtatttaatacatgtttccattgagccggtaaaagcggaccaatcacggttgtgtgattttcaaataataatcgcatttattttacatgggaggtaatcaaatcccacaatttttaggggatgattgttgtgagatatcagtcaaatttataattaactgccctcctgtgtaattataaataggagcaggttacactgaaaaagggacgaaaaattcattagagaaaaaaccctagaactgtatcagaaat

SEQ ID NO: 40435 - DNA, 1365 bp, Cannabis sativa
tttatttccttaaatagaaatatatttcctaaaataaaaatattcttatattatatgtatacaaacacattgttgtgtgcaatgtaatgatacttacattatatacaagatggaatatcaatattagtttatttgatgttatcttttgttattgaaaatcattcaatattagaatgtcttattctttgcatgtaaatatgtgtgtatatctgtaatcatattaaattctaggttgctttctataggtaaataaataaacacaatttttatttaagtttctaaaattaatttattgatttggtttcagagtcaagtgaattgaatttacccaaagcaagaattttttttgtttgaaatgatgaatcaatgtgtacattttccttattctctctctagagcaaaagccctaattaacctcgaacccaactcgtactaatttatcaattgttcgtatagatggagaaccatagccatggttttatagcagagcgacttcgatcgttttctcttgttcgagcaccttcataagactgatcatagccttggtgatgttcatatttctctttgttatattctattcttattcattcttctttgtattttgaaattttattttttcaatgaaatttttcatttgcaataaagatagatttacagttcatggcttctattgttattacgggtgatacatgacatttttcacttttttttggattgcaaaacctgtttatgtgggctcaactctcaagctcttttcattcttcctattttattaagtagacatgtgttgctttctttggtttattgtaagtattaaaaatgtaattcaagtgatgcaacagaaggttttatttggtttaacaatgtccaaacataaggtatataggttaagcaaggacttgagcgtagttttgcttgttgaatatgtatgtattatatgcatacacacacattgtgtgcaatgtaacattatatacaagatggaagaccaatattagcttattttgatgtggttgggggattggctttggcctaattcctttcaattgcttcttgactgactgcggaaaaagaggcagagaggtttgttattagaaattttttatgccattctaacaagtgcaatctatggaatttggctaaattggactttgtgtgtatttgagggaaaatgtttagctccaatgtatagtagaagcattaaagagaacctcaaaactagattgagtctcgttcaagataagaaactttctagtaattaaatcggattgtgcttagaaatactaagttagcgtttggttgtgaggaatgaaaatatatgaataggaatgagaatgggaataggaataagaatggaatagaata

SEQ ID NO: 40436 - DNA, 1864 bp, Cannabis sativa
ggcataaaacccaacagtcttctcttttcagttatggaggaagtttttgctgcttttgtttgctctaaggctaagggtgtcattcgttggtttcatttattagttaagaggattggaactgtttgctttctttttggccacctgggtcaccatcagcgaggggctaagctttcttcctcggtcacgatatcggactcgcatggttccacatttacgttgtacaggccatggatggactcgtcattgtatgaagactacttctctggtatcaaagttgattcagtccatggctctgctatttgggtggctggacaaccatggtctccggtctctgcgacgccggtggccgagggtatgagtggtgctcctcgggctggcaagcatgctggtaatcgtccttgctcagtctcgcatgcatgcggggccttgtgctatctctgttaatgtttatgcaaatggtaatatggaaagaaatgatggaaataataatgtaaaattaccttttgtggagagaaccgttggtggaagtggggctttgattgatgagctgtcatttattttgaatggggaaggaatagctggctcaatgcccaccatggagaaaagtagggtgttgtgtgggcccattgaatgtcacatgggtttgaagattgggcctagtactttgggccttttggatcaatcaaaaaatagctctacttttggacaagagattaattttcaacaagatgagagctaaaaaattgggaaacttacaaaaatattggattttgaccaaatctttacaaaaatactgtcacacggcaaaaataactttttatactgccttgggactttttttttcttttatactgtaaacactgaaaataaaaaaccaggtctccatcttctacacccacaatcagaaaaaacagccaaaaaaataaccattaaatctatgagatgaagcagaaacattaaaataattaatattagggctctcatggtttttctaatgttatttttgggttgttctactattgtttcgtatgtttaacaaatgttgatttaaaattacacatgttaaaccaactactaaatatttgtttgagataactagaatgaaagaatcatggacaataatagtcataccttctattaaagtggtgaaatctagaagataaaaaaaaaaagaggatagaagttgactaggaaaaacaacaacataacaaatgcaacaaatgtgggaagctggggcacaacaagagaacatacaggagaagacatcaaaaatgaaaagaagcagaacaactaaaaaataatagtgaaacaacaaaggaaaactgaacatatattggagcatatgatactgaatgaaataacttacatacaaatttcattatttctattactattaaaaatagagcagtacaataatatttagaaaaatgtgttataaaaatgaaagaaaacaaccttaaaacaataataaaataataccaaaataaaccagtaacagaatagggtaagttggagaaagatggtagacttggaagtacggtagagatggagccaacgctttgagaccaaagagactgaatgacatgaacttagtgggaatttttgaaagatttctacaagaagttcatcacagagcaagctctccatctctctctcacacacacaaccacactcttatctttctcgattcttcttcttcttcttcttcctccttcacatgctattttttttttttttttttgttacctactacaagaggagagagttagtttttatttgggtaatattatagacttggaaaaaaaaaagaaaaaaaatgaagaagaaggtgaatagtggagagagagctcaaatacaatgaaaa

SEQ ID NO: 40437 - DNA, 1546 bp, Cannabis sativa
  modified_base (1399)..(1399): a, c, t, g, unknown or other
tagcttatatgtgaaatatgttatttttgtaatttttgctcgacgacaacggaaaatgcaatggatggctacgatcacatggtaggtttacaactttatttctttgtgcgatatatgttggaggaaattgagtaccggggttgagcaaggttatgaaatttgacaattttgtcccttgacttttttttgcctaatttaagcatcaagggatatttttgtaatttcaaaaacgagggcttaagtggctgttgtaggaagtggcagatggccaattcattgttattcagcctttagtttattcaaatgagaaaaatcaagaaaaagaccaaaaaattgaagaagactctctccctcttctctttctctctcttcgaactagccaaagaccagaagaattgttgctgattcaaggtgtttctagcaagcaattcagagataatcaagttttaggggcaaaaaccatagtttctagcaaccctaaaaccatagttttgtacttttgaagcttttaagtttggtttgggtatgtgatttttagttttaggggttgttagggtttaaaggttgtgtaatttgttttctaagctaattttgagttgattctaggtcttggatattggttttgttgtgttgtgatgaaattgagcaagtttgagctttgaaactcaaactgaggtctctaatggcatgttgtgattcagtgtgtcttttcagagtgttattggttggaatatgttgtatatactctgttttaggtactctggaagattttggtagcatttggttgagttttgagcaatatttggttttttggggggagactggtacaaaccggttaaccagtttaccactacctgtaaaaccgattaactagtttcggcaggttccccagacaacccattttctcaattctgatccatatcacggccttagttaggtgtttccctatttcctaagatagtgtaatccttactgattataacaaaaccttgggttgttggttcgggttttccggattagggttttggacatgtgagttacccaattctaatatgtgattagggcatccatccagcatgagactttacgttcaggtcggccaactcacttgaatttggaaaggaggtaagaactgtgtatattgtgtaatataaatatgtgaatgtatgtatatgctaagtgtatatgcatgcttataagtttgtaacactaccaacaacttgtacggttatgggtacagagttcattggtatagtgtatattgttaaggagtatgttatggtgatacccgcacaagtacgagaaggtacagggtgtgtgtggtatatcactcagtggtactcagggtatgaaacaaaccctaccaacacttgtacagtgaggtatgtagtgtatgtgntatagtggttgtaccctagtatggaacgttcttactcatctgttaagccttgtaaataggtatatgggaaccttgatacaagtcggtattgtattatatattatatacttttcttacatagtttgtcgactcatactctacttttat

SEQ ID NO: 40438 - DNA, 1166 bp, Cannabis sativa
  modified_base (617)..(617): a, c, t, g, unknown or other
catagtcataatcggcctattcgatggagagttctctcgttttttctagaaccgaggacaatcacgaggcggcgaacccggagcacacatccacgaaccatatctcccacggtcgaaatcgggattatcctcagcaaagtccctcaaaggacaatccaaggccttatgcccaatgatcccacaatcaaaacaaaaatcaggtaagtgttcataccgccacacgtaaaccccgtttaagaggttcgatgatgttaattcgcactctcaccttcatggtgccattgacaatcttgatgtcttcaagcttcccaatccgcttcccccattctcttgcaaataactctgtcatacaagctaatgggacattgttgatcgatatccaaaaagatgtaaactcaaaattcattttagaaatctctcccaatcccattggcttcacaaaacaaatcagttgtttatcaattgtccaggggccgccaccatacaccctctgcctatcctcccgacttccaaagaaaaatcagaacacattcttcgaactcagttcttccacctgaaaccgatggttaattttccatatccctttcatagctttctcaataccatccttattggcnggtctagggccaataactttaccaacaagacataaatccattctcttcttcccttcctcaataccgggcttattcaaggaaagaacagggccattgccctcatcaagaaccaaaacttcagcaagtcgattaaccaactccaaatctattgaacacacaaacaaaattgcagcaattcccagtaaaatcacgttcgtaatggccgacttcacccttcccatgaagggactgcgattcctcggtagtttcacagctccgaaactaacaggataatagtagtttttttattttttctaaattttgctttttagacgttacatttttatttattcatttatagcaaaacgtaatttttttatacacatatattcaaaataaatatttgtatacaaatttaaattaaatatttttataatttttatattatttatataaaattattaatttaagtgttaaaaattgacattataacttattcaatatttataataatactcacatagtttgtaaacaatgtgagactcttacaaaatatatgtatatatacat

SEQ ID NO: 40439 - DNA, 2235 bp, Cannabis sativa
tactattttagaaaatagaaggtccattttgtcatttaacaaaacacatggtccaattggtaacttttgtaaaagagagggtccaaaatagtttttacccaaaacattgctattaggtatcagtggactattatattaaattatatcggacccgatacttaattagatcaatagggatattaatacataaaaagatattaagtaccattagtgccctttagcatattttttttttaaaaaataatttttaaataatatcgctagccaatcgtaaaacattacttgtaggagatatcattgatatccaataacaatactcaataattaattggttatggatatgggtagaatttgagtcttgtgaggtcaactacgacataaacactagtcatagtcattaataaagaataatatgaaaattttgaagttatgagcagcattcctagtatcttctttaataaaactagaaaattaggtaggttgtcatgaatgtgattccctactttatataaatatattttttctttttctttttctttttcattagttaatggtgtgtcatccatgcttgagccaagttggcattgaccccacttaaacttttttatcatttttatttcttcaattaaactaactaataaataaagaaaataaatttgaaaatttcttgtcttttagtgaaatgtattattttttttaattgtatttttggtctcactattttgactaacaatctcaatagcaataccaataatgatgctcttaggattcactttcctcctcttcaagtagatgtttattgatgtggactatgactattagactattagtggagtcaagagtatgtttctaatttttagggtttttttttttttcttgaatagtattattattgggtatcagtaatatctattacattctataagtggtgtctaatgattggttaacgatattttttaaaagctattttcttaaatcatatgagactcactacttaattacactaatgtatgatactatactttttaacaattctcttttcataaatatagaaaaaataaatagaatttacttttatatgacataaataaataatgtacaaaaatacgagattaaaaaaataatcaaagtttaaaatataaacaaaaaaaaaaaccataaataaatttgttaaaacttttaataacaaatatcgccaaaaagtcgttgtagaagacacaggcactgaaaaagtcaacggaaaagtcgctaaaaaagttattgttactgaaaaagttacagtcgcatagaaagtcaacggagttgtgtcgtcgtcaaaaaaatcaccgaaattaaatctctcatatataaattaaaatagaatcgattttataatataataaataaaaatcagtaagaaacaataactcaacccggttaaaattaaaatagttacggttctatgacataataaataaaaacaaataacacagaataactcaaaccatatgtaattaaaattgaaccgattttataagataatgaatacaaacaaataacacagaataactcaaacaagttataattaaaaagtacagagaaaattagttcctaatagactgaaacataaaataaaaataaaacttgttccacaacaaattgagtaaagatgaataacacatgatatctcataaactggttataattaaagaaaaaatatggggatcaatactaaaaatattaaggcataaatctaaattgaaccgattccataataaaatagataatacaaaataactcaaaatattagataaagaaatctattatatttattaactagttaaaaatttaaaactagttccgtaaagcaaccaagataaaaatttactaacaaaaacaaattaaataaaataaataaattaaaattagtttcttgaattaactaaacaaaaaattagtttccaaaaaatctaaattaaaaaccaattccttgaattgattaaataaaaaacctgtttctaaaataaataattcaagagccattttttgaaataactaaataaaaaataagatgagacataaattaaaataaaattaattctatagcaaaataactaaaaacaaataaaacacaataactcaaaaactgattataattaaaaggaaaaaaaaaagagaaaattagttataaaaacactgatacataaattaaaatagaagctgttccacaaaaaaaaaaaaaaaatgaaaaaatga

SEQ ID NO: 40440 - DNA, 1313 bp, Cannabis sativa
gacgaaattctcatcaaattttataataactagtcatataaaggagtctgcattaatattaattaaaatagtattctatctagctatataccatcattcttttttataaaaaaacaatcattgttttttaggaatataagtacctcacattttataattttctgaaaaataggtttgttacctctctgtactttcaataaatatattaagagaatggctactgtcaattttttataacttttatgtgaaaatatatgttagaatatttttttaaatttttttaatgacagtttttttaaaaaaaaacgaatgaataatttataatcaataaattttttactattccaatttatgttcaaaaaattttaaatatattttcagtacataagtgcacaactctttttttttttttcttgttagtgtaactagtttgaagttctatgttgtatccagcgatagcttactgtacaagtaagtaccagaaaaaattaaaaactttgaagacgggaaactaataacaaaacaaagtttattagaaagatgttgattttgttttttttattagagcatctttataaatgatgaaaatgcaaattataactcattttgttaaaaatgtattctaataatatgctaaattatgatataaaaatatgtaaagtttacatcccttaatattttttaataaatattaaataacatattaaattttgaatatgaccacaataataaaaaattaatatcacaaaattatttatggtacaaaatatagctcaaattttggagatggtcttacatatatataatttaaattctaacttcacaaaattagagatcactttttacacggttgtttcggaactctcgaggttatatagtaataaaataatgataatcataaatattctagtctcagattttattggaaagatatttcttattattattaattatttaatttatttttgttttaaattagaactctaaacatgggttgttagtaggaccttaaaccaactcacttgcatgtgcgccaggtgtaattagactgcattgcatcactaaataaccattaaaactcagctttaatatctcaattaatcttgtcgcttttcttctctttttttggttattattatttaaagagtactttatttggaagttttttcttaatatgaacagccatttcaaaaacaaaaaggtaaggtttttcgaagaaaagaaaaaaaaaaattgtaacgtttttgtaacagaagtgagtgaatactctatcaagaaactataaatggtattattccataatttatttgttt

SEQ ID NO: 40441 - DNA, 1647 bp, Cannabis sativa
attaattaaaatcaattatgaacaacatttttttttcttttctattacatgaatgttaattacgtctttattacaagagtgtaattgattttgtcgaatctaattcagtaataattcgatctgatccagatcatgtaaggatcaacctcgtcttacctcactaaattagttactcgaattagattagatccgacccgatttattcagatcagatttgatctgacgcgggttttttgttacaattttaattttgtattagtattatttaatacaattactatatttagtattgagttgtattaatagattgtgtaaagttataatatattttcaataaactcgactccaacaccaactatgggttgagtccgaatctgggtcccaattccaagtcttgtttcgggtctagatttgggtctgggtctaggtccgggacggggtccaggtctaggtctcgagtctcaggtccaagttctgtgtttgggtttgagtccgcattcggttctcgagtctcgggtccgggttcgggtaatattctggtttcgggtctaggtttaggtcctgggtcccgggtcctggttccaggcccggtcccaggttcggcttcaggtcttgaaattcgggttagggtcccaggtcagggccccgaaccgaaactcgagtttggatccgggtctaggtctgggtgtctagagctgggtttgggtctggtcccaggttcgagtccgggtctgggttcgaggtccgagtcttgaatcaaattttttttaatatatattgaaaccgaatcgaatctgattcgacccggaaaaaattaggcagggcagagcagacttgatcctagatccaataagtatctgaatgtttcagattagaagtggtttgtcagatcagaactccgatccgctctaactaaatggatatttttaacatacctaattaatttcgatcattgtacctatcaacatttataaagtaattttaaactaaagtattttttttccaaatttttttgttatgttagctaactttggggaactttagccattggaaaccttatttgtttgggttaattagtgatgtttttactcctatattactgtcatatacagtaatactatatgattgagattatattatatttatataatacaaaaagatcaaaggaagtcctttagtaatactatgattgaaaatttgaaataatatttagtattcaattataacattaattattttaattagaataatttatttggttaatttctatgaatcatggatatatatacactataatgtaaaaaacaaaataaattatttcaaagttactggattggtacctttgggaaatatttttcattttattatttttcattaaacattaattataaaagcttaggcacatcaagcgcaatatagcttgaagagcataagagggatcaatcttaattcaaagagcactaactttgtgaaccaaagtgtaaataattaacatgtaagctactttattaattttacagaatacaaatgagatacaaacaacagaatttaatgataaaagatttttaatatctttcattaaagtttaatataaataccttttattaatttgattaatttatatcagaatattttatttttctttat

SEQ ID NO: 40442 - DNA, 2817 bp, Cannabis sativa
ccctatccctccattctataaattgacgcatcttctcatgaaatgcaaggtttatagtggcagagagatcctcctgatcatggtgcaaagcgttattatggccttgcatgagtccaagcgttgtacggaggatttggatctcattataatctctgattatccgctaagcattagtggtggacgagacctcagtattgggaatggattgatcggctgctaaactggtgttcccaatctcttgcacgcctggtgtgatcccagtcagaggggaagtcacaccatggcccatagtaggtggctgtgtaattgcatgtttggggtctgtccctggtggtcctctcgttgtcctaggggtctgcacgttaggatctatcaccatcgggtcaccctgatcagccaggcctttacgggtttgcaccaccatcttgtacgcctgttgaaacttaagaaaaatagaaaactttggtatttgctctcaatgagagcaccaaaatgttgacctcgcttttggccaacgacagtgagtcaattaataagcgattaagagtataattaaaatagagcaaaaacaacaaagtattaaagaacaccagattttaaagaggttcgcatccgtgagtgcggtaatagcctacaccccttgagttatattaacttgagagaaagaacgaagtgtttttctctctaaaatctcttacaataaatctctgagtaattctcttagatctctctctatgaagcaattctttccatccctttcatagtgaggctaagtcactatttatagggccttaatgcatgagggaaggtttcctttttccttacaatgtataaaataggaaagtacatttattacataattatgatccacaaaacaagaaactagaagaggtttccatatttctcttatttgatcccatgattttagggattgccttcgtgtctgaacttcacaagatcattatgaagtagttaactcctgataagtagttcagaaagccagatttatgtctacccagatgatctacctttcatcctgctcgggtactcaaaagtttatatatgcagatgtacaatatggagtcttttcggaacattcacttccgcccaactgtgagaaatgcaggacacgtgtcacttgagtattcttccatgtcattatgcaaaaaaaattggataatacattcctacaaccataaaacaaacttgtgccaacaaaattgggatcatcacagtcacaaagttgttcaagtttttgaatttaccaacagacagggaattacatactttcaaacagttacacctaatgtcaaatatgatcacaatttaatgtgtcaatgaagaaccattcactggaatcaaaacataatcaagcaaactatgactttaaaacaagcatgtggaaccccttaatatagccagcagccttagaattcttaggttcagaaaagctattctccccttttctcagatagtttccaaacaactcaaaaatttgagttgcaaaacaataatcagttgtattgattttaagcttgatagattcgtcatacttaatcttctttttcagatagtaaaataagacatcaatatgctgttaatgattgatattttcggcaactaaatcattaatgctctaagaatgattagaagagagtaaatgcaagtatttttatgtggttggggcattaatcaatcttagtccacgagtctctaatatttaatatgcaggtatttcttacagagaatgttctgctctcttttttttcaatccctattacaaatatggttgggggtatttatagcagttcatcggagaggaaggaaggcctctattgtcttaagtgtccaccttggtcatgcacaagttcctaaattgatgaagtagggtatgcgcccctacctagtaggatgcgtagggtttaggtgagacaagcccttatccttccttgattgatgtgatagtacattatgtagtcgtcacttacatctttgattagcatgtaattgctaaagaatgggtttaatccgtctaacatgtattttcatattcgtccgtatacgtttcctccatgctgcattaaatgccaattaataatgcatctccagtatcctaagtctagaagggttgggtgttacccagcttctagaggtgaacaaaagatggatccctccggacctagccatggctccaggaggaacttttaggttgtctcaggggtcctgcctatgtaagattttcctttgactatcttcgggtccttaagcctaatctaccacatgtcgtgtcatgggatcgccacgtatattgggagaaaattggagcaatatttacccccaagtcttatttaaaattttgtaaatgagacttgtatattgcttctattctcagggagtgacgtggcaaataccctgcatgtacaagggctatttaatttttataatcattctgccttgtttttggcaggcaacgattcgattcccacctgtttgacagacccccttcattagtgtagatgtcagagaggtactcaaacgcttcaactgccattttcttttcatcttatgattttatcctgaccattgaatcaatggaatttgaatcggtttgaaccctcgccatacgatggcactcaattaatgtcggtgcttaccctgaagggcctataaaaacttataccttttgtgactgggttgcttacacactgcatttcaacttctaggctttataaaccctctcgccgaaattccagactctcccaatttccttctacttttccttcgctgttgccaggcgaactactaccgtcgtatggc

SEQ ID NO: 40443 - DNA, 1923 bp, Cannabis sativa
cggactcgggccccaaactcgaacctggggcccgtacgggtccaggtccggggtcaagggtctaggtttggggtcaagggtcttgggtctaaggtccggggtttggcttcgagttcgagtctgggtacggggtttgggatctggggttcgagtccaggtccgagttcaaggtctaggttttgagtttgggtaggctctgggtttggatctagagtccggagtcctagtggggtccagggctgaggtgggataagttcatgttgtggtatgatgctaagtattttctattctcacttttaaaaacgcaattataaaaactaaaaattaaagacacaaccaaacaacccttaaattattttgaatttctcaaaattttacaagatatcttaaataactacaacgtaaataaaaaaattagaataaaaaattctctcaattactcaaacagatagacttacctagcatccaaaaatatattgaaaatacttatgtgaaaattccatattatatggattcttacaaaacttgtacaaaactatttttttatcgaatgaaattttttatgcgaaaaattaatatatttatatatactggaaaaaacactataattgattatgcatctggttattttcagataactattaccttaaattctttttcacgtttttttttattttctcataaaatatattttttttaaaaaaatatatattttaataaactttactaaaaacccacaaaaatcaaaattcccatcgttatcttaaaaatgtgcatgcagtcaaaagtctactacaaactacaaaaagaatcgtgttttacagtactacctatactcctctaactctatgtttggtgtagaagaaagatggaaggaaataataattttaacagaaggagagtaaaaaatggtttgtttgttggagaataaaaagtacaaatgaaagagaattttgaagagtgaaataataatgatcctattactgttcttccctcttaaatgaaaaatgaaagataaaatgagagaaattttttgtaacatgttaaatttgaaattatttattaagttttgtttctaattcaaaacattaaaaaatattaaattataattttatttcatgcttattttaaaaaaaaaaattacatagtactaacaaattaaaaaaaaaaaactacaaaaatattttacactggaaaaaatttatttttacgctttggatttttttatttacaaaattatattttttgagtaaaaacaataaaatgttttttttattgttctataatttatttgtagttttattatttgttgtcatgatgttatttttctgtttatttttttttttgttttgttattttataatttatttatatttgatttatacttgttgtgagattgaatttttatttttatttttttgttagttgtttttttattttttgctgaacaaagtgtatatttgtaattttaaaattttataagcttacttttgtaaataaaaaattttgggacataaaattataaataaaagagtaaataccattttacaccctgaattttacaaaagttactaattgggctctatgttttgttaaatgacaaaatggactatgtattttttaaaatattacaaatatcaccctggactgattttttgtcaaaataaaatttaataataatccgatgtaaaaaatgtttacattttttgtatctgttcatgttaaaaattgttttcaagtttgtcatattaaaaaaaaatgtcaaaaattaaacttagggtcctattttaccattttagttttagaaaatacaaggttcattttgttatttaacaaaacagatggttccattagtaacttttacaaaacatatagtttaaaatggtatttatcctaagtaaaacattaaaaaaaaaaaaaata

SEQ ID NO: 40444 - DNA, 2404 bp, Cannabis sativa
  modified_base (2289)..(2292): a, c, t, g, unknown or other
acacaaaataatagtatttgtgtgtcttgtgtagctttagaattattacttaatgttgattatatatgtattacgactccaaaatgtgggatagtgtcatataatttaaaatttttatgtccggctaataataatatagatcgttataatctgctatcacagtatatagaatagcattagtttgcattattgaaataagaattggaaaaaattgaaattgatttgcctatattttattttttgattaaatcttgtttataatttgttatttaattcttggttagaatattagttttacaatctatttttggattacgaaataaaaacaagaatttaattgtttggtgcttaggtacgtcttagtgggaatgatcacctgagtatatatatatatatatatatatatattacttgtaaaaacaatatgtatacttgcgtgttcgatttatcgcaataagtttttgacgtcgttgttggagactattttaattaatatctagttaaaattctattataatttagtttcttttagtttaattttactaatattttattgaatgagtttgtcttgcgagatacgtaaaaaatgctacatcaaaattaccttatgtatttttcctaacaatacagtgagtcattttacgctacttcagggtgatttaatgatctggtagagagatgttaccacaatttctcaagacgatctcataatatcttattttataatgggttggatgatgtaacaagaagtttggtaaattatggatcagcgataattggagaacctttgttaataacttagaccacttaaggctaattcaagtgacaatagaaagttattgggggtgcatgtgtgagggtcataagatcaaataatcccatcttgtgtaactcatcaaaaatgtatttattaaacgctttaataaaaaaaaaagttcataactcagagggaattctaaagaaagttgagcacgtatccactgcaattttcaaacccaaagttgacccaaaagtggggcaaatagcagaaatttcggcccttatttaaaaaatatagtatttttaaaatcaataaaaaatatgtatgttttcaaaaggataaaatctttttttacctttaagctaggtgaaccataagcacataaactcgaagagccccatatataacttttaagcactttaaaattgaaaaattatgtacattaaaaatatacttagtcaattaaatataattagttttaagtcattgatcaacaaataaagttgtacatttgggatggaggggtgtctccaatggctaattatgctttggtattggttcttcatttttttaaaaaaaatcaattaaagatagctagtgaactagcttaagtggtaagtgttcaaatcctattctctatacaatttagtgcattttgtttcaaaaaaattcaaatcaaaaagacctccttaattttcaaattttgtcccattagttgaagttgtttatatttttgtacttatatgtagatgtttttttcctcaaaaataaatgtccattttaccgttaatatattaattaattttaattataataatcatacattattattttaagttagccgttgttataatatttgaattattttttccacattatttctcattttattcatatatgataagattgaagcgtgtttaggtataacactattcaaaacaagaaaattagttcatttcgagaatatattgctcaattaaatttttgtattatataacaaaataaactatagtatatgtatttatatatatatatatatgtgtcgtgacatcaataatgttatttattggctcatagttattttattttcttccaaaggaacaaatatgattttgtcagttcatagatttatcatatgtaagatgagtatgacaacaataaatttaggtttttttttacttatgtacatctccaaaaatattgtataattattgttattatgcagcacaacataaatgttttttagaaaaaaaaaattgaaaattttaaatatatataaatagttaagagttgtaataatttaattaaatatatatatattgtaaaaatactgtaaattaaatttagccttgattaattcatgagaatcaataatagaattaaggaataacagaagcgtatcagagttcattgaatcgcttaaaaaggatatgatcttttgattttgcagtaaaatcgatctctgtaacttttgtcttttgatgatgggatttcaagataatggaaagatacgatactgcaaattgggnnnnattaccgtttatattaccaacagacaaaactgttagtaatatttattgattatttctatttggcccctcatcaaattaaaaattgtctttgtggtatccacatattaaaatc

SEQ ID NO: 40445 - DNA, 5080 bp, Cannabis sativa
gtttgggtctgggtccaagtctagttttgcgtctgattctaggtgtgggtttgagtttgggtcccgagttcgagtccaattttggattcggtttcgggtttagttttggtccttgttcgtgtctaggttcctgtcctagtttgggttcggggtaggttttttgtccgggttttggtccaacgtcgaattcccaggtcaagggcaggtcctggttccggtttgagtcccgaattctgatttttatttgggctctcgggcctaggtccattgtctaggtcccctatctaagtctgattcctaggtcctagtcttggtcaaggttcgggtttgggtcccacagtcttggtttgagtccaggtcccggtcctggttttggtccaggtttcggtcccagtctttggccgagttcgggttcggttccttgttagggtgtagatgctggtttgggtcccagtgagggtttaggacaaggccaggtccatgtcccgatccaggttcgggtcccaggtccaggtcccaaacctagtcaaggtctcggtccaagttcttgtccgagtttgggctatggtttgtgttcagttttggtcttaggtttgggtcctaaacacagttccaattcttattcttgtccggcatcgattccgagtcagggtcaagtctaggttggggttggggtccgagtcttagtcttagtccgggtaggggtttttcggttcccagactgggtctaggtctgagtaaaggtcccatgatcgggtctaggtcttcgtctgggtctgcgtctgagtccaggtcccatgtttcgatccctgtttgggtttgggttggtattcggtttcgggtttgggttcgtgtccatgacaaggtctgaatcccagtctcggtcaggggcttattctgggtctgggatcgagtcccgtgttcaggttggggttcgtgttcgagtctcagtcctagtgtggatccggggccggactaggtccgagcttaagtttcagggcttggttatggtctagttcgggttcgagtccttagttccgatctaggtctgggttccgacgccgaggtctaagtcccccatcaaggtccgggtcctagatcccagtctgggtccatgttcgggttttggtccaagtccaagtttcaattttgatttagtgtctgggttcgggttttggtctgagtctgggttgcggtttggtttgagtctgggtccgggtcttggtctaggtccaaatctcagtcttggtctgggtttaggtccaggtccgagtttgggtcccgggtgcagtccatgtttgggcatgggtcaaggtctcggtcaaaatctaggtcctcagatttgatcccgatctgggtctagatctgggttcgagtccaagttgtatccaagttggatcgggtcccagctctaggtctaggtccgggtttgggttcagatcttggtccaagtctaggtacacgatcgtgtctcggcccgagttccaatctcgattcgggtcttgggcaaggtccgagttcggttttaggtctgggtccgggtcctggtcacagtcctagtcttgttcgagggtcctggtctgccagttcttgttcaggttcaagttttggtttctaggtttaggtcagggtccgagtttgggtcctggtctaagtctcagatctagatccctatcacgtttccctgtctagttctggttcaggtcctgggtcccaggtccgagtttggtttcggggccttgattggggtgcggttctaggtcccgaccctagttctgtgtcctgagtctggttccatgtttcggtctgagttcgggtcctgagtcaaggtttggcttgggatactggttggggtctaggtcggggttggagtccgggtcctggtccgtttacggttctaggtcaagcctacttccagtttcggttccaatttcgggtcacaaggtacgggttcgggtacaagttttggtctgggactgggttcgggtcctggtctgggtttgggtacggggctgggtcccagatccaggcattgactacgggttcaatccaagccccgggtccagatctagatcctgatcttgggtcccagcgtggttccatttcgggtgctgggtcacgagatgggtactaggttcaagttcaagtcaagttcgggtcttagatcgcagtcctagttccgttgcacaggtccctatcctgattttgggtccaggtccttggtctcgtcagggtttgggtcccaatctaggttcgggtttttgtcctagtcggaattttggtttggttctcggtctgtgtttttatttgggtttgggttcaggtctgggtcctggttttggtcctggtcctagtccttgtccggttctaattttagttgcaattatgagttggagtttaggttcgagactgtgtctgagtttgggttcgggtctgaatctaagtttaggtctggatcgggctctgggtgtgggttagtgtcttgggtgtgggtccaggttcgggtctgagtaccaggtttcgatctcgatctgagtccgcatttattttcgagtctaagtcctggtttctgatcccgatttgggttcgggtgcaggtctaggtttgggtctgattcttggcctcggtctgagttcgggtccccagtttcggttcgggtccgagttcgggttttatcctggtgtgggtgcgtgtctacgttactgtcctggtttgggtccaaggaaggttttgggtctgggtctgggtcaaactttggattccttggtccagttcagctcctagttcgggttctagtccttgattcagatctgggtctcggtttcggggtcgaggtccctggtctaggtcccctatccatgtcctgctcctaggtcctggtcggggggtccaggttcgggtttgggtcctgagtcttggttttagtccatgtcccagtccatatttgggtccatgtctcgatctcagtcttggttcgggttcaggttcgggtccttgtctgggtctggatcttggtttgcatctcgggtctcaggtctcggtgagggtttaggacaaagtcaggtcctagtcccggtttaagtctgggtccaaggtctcatgtcccagtcctagtcaaggtctcagtccaggttctggtctgagttacggttacggtttgggttcggttctagtcttaggttcgggtcctagtcatagttctagtgctaattttgggtctgagtttggttcttggtttgggtctgggtccaagttggggtcggggtctgagtcttagttcgagtccgggtaagggtttttcgtatccctgtctgggtgcaagttagagttcgggtccaggttcgggtcctgggtcttggtcctaggttcatattagggtctgcgtctgggtccgggtctaggtcctgtgtttcgatcccggtctgggtgtgggtcggtattcgggtccgggtctaggttcatgtccatgtcaaggtctaaatcccagtttaggtcaggggattggtctgggtgcgggatcaagtcccgagttctggtttgggttcacgttcgagtttcaatcctactctcggtttggaaccgggtccaggactaggtttgagccttagctccggggttgggttctggtctagttccggttcctggtaaaggtccaggtcgtgctcctggtcacattctagttcaagtttcggtttagggttcaaggcttaaggtttaggggtaagtataaagagttaaggatttagggtttaaggtttagggttcgggtcacagggtacgatttaaggttcgggtgtgggtctgggtccgagtcctagtttgtgtctaggtccgtgtttgtgttcaggtccgagtcatgttcccaaatccaaacacccaccacatgtcgagtcttgttcgagttctggtacaagttcggtttctggttcgggtctaggtcggggtctaggtccaattcaataatttagacactgactatgggtcgggtccaagcctcgggtctaagggcgaggtttgggtctaagttttggtcttgggtcctgagtcatgggtccgagttcctgattccagttagggccctaggtcccggtctaggttagggtcctagtctgagtgtaggtctcggtctgtgttcggtactgatgtttgtctcgggtcttggcctggtttgggtctgggtctcgatttttttcttaggtcccggtcctaagtctcgctcccagtcccgggtcctggtctctgtcctagtctgagttctcgtcccaatccaggttcaggtctcagtcctagtccgggtctaggtcccaatcctaatctcggtccgagttcgagtcctgtgtttgagtccgagttctagtacgagtccgggtctaggtctaggtttgggtccgggtttcagtctgtgtctggttccgggtcttggtttgggtttgggttcaggtacgggtctcggttctggtccaggtcttgggtaatgagtcctgggttctgggttcttggtcgtaggtcctggcgaaattctgggtctgggtgtgggtatcgatcccggtctaggtccagctccgtgtttggtttcgcgtttagatcttgttttgggacaggtccaattccttttccagggtcttgattccggttctttttctgattttgggtctcgggtccaagtttgggtttgggtcctggtctagaaattgttccaagttcaggtcttggtacagttccaagatctagacaccgactactggttgggtccaaggcccgggtcgtgggtcaagatctagatcccgatcatgggtctccaactcatttcaattcggatcttgggtcacagtccgtgttcctgtcagggttcgggtcttcgaccgagactaggtcgggtcttgggtcccagtcccagtattaggtctcgattctacttctaattttgagtttgggtgctcaacctaggtccgactatgggtccaagcgcgtgtctgggtttaggaacgtgtcccgagtcccgatctgagttttgattcgggtccgcatcttggtctgggtctaggtctgtgtcctagtcagattccagttctcgactcaa

SEQ ID NO: 40446 - DNA, 1220 bp, Cannabis sativa
attcatctcattaagcaaatctgaaaaaaaaaaaaaaaatcaataacagatcaaagattaaaaaagtatacaaaatattaacccaagatctaaccacctgaaaaaaaaaattgaactatgaacatagagatgtgcgagagagatctgatggagagagcgagagaaatagtgattcagggcttcaggttcaactttgttcacttctctccgagagagatatagaccatcaacattggtgatggcctgagcttcgggtcttcagtgggcaccgcacgagcgaagaaaaagggaaagagagatcttgtgagcgagaaatgtcggtgacagcctgagctccgatctgcagtgggcgttgcaggaatgaagaagaaagggaagagagatcttgtgagcgagaaatttggtgatggcttgaactcttgcatttagttggcatcgcacgaacgaagaagaagaggaaggctgatctggtgagcgagtgaaaaaggggaagagagaaagagggaggctgagtagttttgatatgtgggtagggtttttaattttggttttatattattagggtaggtttttgaaatgggcttttttattaggcttttttgttctaaattaatgcattgtaagtgtcagtttataactgagacaaaaggatcttttagtctcggttataaactgacacttatgctcaatctatatgtatatatttttttaaaagtttttttggtcttagttataattttagtgtcagtctactatacgacactaaaagtcattatgggtgtcaattataaaccgagaccaaagatttaggattttctttagtgttgggttttacaaaaaatgtcattcgaactgacactaaaagtctattttgtagtagtgtccagaagcatcaccaccatctttacctaactcatcaccatcatcggaatcagtatcaatattctctggatcaggtaattctttgtcatcattttcgtcatcatcgtcatcatcaaaatcttgggtgacaaattcatcagatgacttaacctggttcaaaaacagtattgcaactgaaataaaataggataacaactaacaataacaggagaaaaaaatatgaaacaaaaactgtaaaaataaatacctcaactaaaggtcgaccatgaatgacattaactttttcttgaatatccttaattacagtcatgacagacttgaaattaaggtcaacaaaa

SEQ ID NO: 40447 - DNA, 1789 bp, Cannabis sativa
atgagattgtaatctcatatttttgggaattgagatgtttagtgtattgagttttgttgtggatgaattttctaaactaactacatcaaagtgttaaatttgcaaaatagacacattggatttatattgtgatagtttttggtcacaaaaaaagagtgttttggaaaaatagcttgaaattctttatcaacaaaagagttaatactaaactctctagaccgattagaccctatattttataaaatgataaattagacggatacaaaatagtagcttaatttttgatattttttttttaatataactaaaatgaagataatttttagtacggacagatacagaaaatgtatcaaattttgtcataataactctagatcgaattattattaatttttattttgacaaaatattcagttaatgatactattttgaaaaagttagggtctaatttgtcatttagtaaaacaaagagtccgattaataatttttgcaaaagtccaaaatagtatttatccttaacaaaataactttaaaaaacaatttattaggaaaataaccatttatagacgcataaatgcaaaatgaacatagatttatactatgtcggataaaataagttaagtctagtttcttttgcaaattttagtatttcatattgttagtttgccaaatttcacacaaaatgactataacagtcgttttatgattgcacagggtaatttttagtcatttatgcgaccaaatgtgattaatttcctagtgaagttttaaaaaatttcacaatgactatttttacaaaacactttttcagaggaagaaggaagatattaggagttcttcaatccagtcaaggtcaaaagctcatgatgtaattaagcgtatgttggctagcttgggtgatccttacacaagatttctttcacctgatcaggtaccaatgattatacttatttttctgttcttttcattgggctgcttgtaactgataaacaatttgcagcaaagtttttgatgagagaaaagtagaaattgtgatctatttacaatgacttgtatatatatagccttacaagtggacagtgctagatatatgcagtagtctttggtttattagtgacaatattgctggtgattctcaatcacttgccattttcatttacaagttcatcctgattttgttgttgttggaagttctccaaaatggcaaggtatgatgtgagtggtattgggatgaacatcaaggaagtcccggatgaaaatggtggcacaaaattgagggtactcggacttgtattggatggtcctgctcacttagcaggtgtgagacaggtaaatttaaaacaataatagaatttgtggatggtttctctttttttgttttgctttcctttttgtgcgttcacttttgagtaccgtttatgacttttatacttatgatttcacgtttaaattctgttctataacactttgattttattagattgagttggagaatgtttgaatttggttattcttaaaggtttaatgtggaattctcattatcctgttgcacatcagtatgtggtgaaatcgtgaatatcttttacagtcgagattatattgacaaaacagcttagatatcttcttatttcattctacttcaatagactatcactttctcaatataccaacttgttggatttgatgataatatattacgctaataccatatattgcgagtttttttttttttgtttttgtttttgtgcgtgtaaacttgtatgtgtaagaggttgctcctttatttttt

SEQ ID NO: 40448 - DNA, 1420 bp, Cannabis sativa
atagatagtacattatagtctgaagaattaattgtttttttctctaacctgaaaaggatgtaggcatcagcactttgattttcatatatcttttgaatgttctatgtctatggatgtgctcaggagttttatgaaacgttcttcatgaaaaaagatgtaagatatgactaattggtccataaagcacttacagtacttatttttcacccagtcacccaagggtaaatttttgggcattcgataactatccttatgacaaactagatttctataattcctttggtcatccaatttactcaattctttaattgtagttttagatccatttttcatcattctgaaaggtttaagccaaattacatccttgataacatgtttatcatttcaagcaactaggtttggtctagcggtttgggccttgggaaatgggatgagaccataaaccttggatctcttggtatcattctcttagtctcaattaagcaccaagcgatgttaacatgtttaccatttctactatttgtttccataaaatttcctttgtccactgagctggtagagggtacctcataggactataaactaaatgatgagcaaaatcttctatatccttagcataaatgcttgtatgggaatgagtactaaattctaataaagggtaaggaagcttcttcatttaggataataaatttttgaacagcactagatcacaatctcttaaatagagatggaaattgggcagttaatgtacggggaatgcaatccctgcccccatccctgctacctatttatgtccccatccccgtctaataaccagcaaatttggggtaggggaatacccatcaggtatggggaacccatcgggtatccattaaggcaatatagaaaaaaaatgtaataatttaaaataattgaaaaaaaatttaaatttaaattaaactaatattctctcaaatatttattatgcattcattattcatagaagataaaagacaaatcaacctctaagttgaaaaaaaaaagataaaaactaattttgtctcgaagtttgaaaaaaaaagcataacctcaagtatagtatcatagtctcatacctctcaagtctcctaacaaattaaaaagtaaataaagatgaaactaagaattgagaagaaaatatcttaacacttgtaatctacaatattcaccactcaccagtttactactgtcattagatcttcataatttaagcatatgatatataatttttattatggatgataatcaaaataagtttgatttttattgatatatataggttaaaaacaaaaaggaaactatatatatctatatcggggtctcatatggtgcggatagtatcatccccgccccgccccgccccatccctccttcgggtattgacattgtcccccactaccac

SEQ ID NO: 40449 - DNA, 1322 bp, Cannabis sativa
agactctgaattggatccagaattggaaaccgaactgacccagaatcagaccgagattggaacccaagacttggacgcaaacccgatcccaaaccgagactcgaacatagacccagacccgagacacatacacggaccctcacccagacccaaactgggatccaaacatagacccggagtcgaaccaagactcaaaccctaacctgaacccgaacccaaacctaaaatatgagccaaaattagaactgaaccaggactaggaccaggacccaaacttgggaccaaaattggacccaaacccagaacagattctgaacaaggacttgggcctagatcgagaatgaaacctacgacccgtgaccccaactcaaactgggacccagatccagaccaggacctagaccaagacccaaaccaggaccaagatcaagacctagactaagacccaaacccagacgtagaccccgacaaggaccaaaacccagacctaggacctgaacccgagttgagacttggaccttgactgagacatagacccagacacatacccatactgagacatagacccagacccagactggaccgggactcggacctggaccaggatttggaccagcactgggacctaaactcaaaccttgatccaggaactagactcgagacccaacccaagaacccagacacaattcgaaactcgggacctaacccagactcgaaccccgacatgaactcagacccaaacttacacgcgtacctagacccagacccaaactgggacccagacctaaactcgaactcgaactgagactgggaccaagactcaaaacgggacctgggatactaacccaaacccaaacctacacccagaccggcacctatcaccaagacctagatggtggaagcagacttgggatccaggccctagaatcgggattgtgaccaaggacttgacaccggacccagattcggacctaggactcaaaccgagaccctagacccgaactggaaccagaccgggacctgagacagggatcaggacatggggcttggacttgacccgtagtcggtgtaaagatttgggacacagacttagacccaaactcagacccataactagacccagaaccaaaccgagatccaaacacggactctgacaaggactcagaccccaacatggacccagacctgaacagcaggacccgaacttgggactagaaccagaccaaaactttatcgtgacctagacccaaaccgagacatgggacctgggaaccaaacccagactaagacttcgacctagacccagatcgggactcgagacc

SEQ ID NO: 40450 - DNA, 3104 bp, Cannabis sativa
ccttataactgctcactttagggttataacactaatcccatttctcatttaatcaccattataatatcaaatatgagcgccaccgcgcgtaactctacatgctaactactatcttacctgatgtcccgtatacgtggagattccaaatcctcaagtgttcctaaccaagtgcaagtgctggtaatcctagtcacaatattcgattaacaaatagggttaatccctaaacccacttccaaataattacaaaattggtattcaaatttagataaacatatagcgctcaaaacaaactttccaacaatattcagaacacccaaaacggagtccgaattaaaaagttatgaacaattgaatatggcattcaaatctgcccaaaaacacaagacgggtcgcagctctccccaagtgggtcgcggcacctaggttgaaaacccaggatttccaagggggcaggccacagcgcctaatgagtggggccgcgacgcctgggttccgaacctataaaaccctatacaaccacacgatttcaacccaaacatgcaccaaaatctcaacaaaaacatgctcaaacacaaacttatttctcacaaattaaagccaccacaacatagaattataaacacataagtcaagctctttccaacatcaaaatgtgcattaaagtcataacatcaataatcactaataagctccaaacttgagctaaaattaacataattctccattcaaaagcttgatcaccaaagccataaacttaagcttgaaaacaacaataaatttagagcgaaaatcagattttaaacactaacacaaccctaaaattctctctaaaacatacccaaaaacaatatccactaattatcaacacaatcaagcacacaacatcaaaattaaaccaattcacacacacatgcatctcaagaacactaacaaccaaaaacatgcttttcaacttgaaattttagcaactaaactcaagataaatgtggtagaaaaactacctcaagctcctcacaaaagcaagcaccacaatccaaagctccaagcacaaacaccaaattcaacttgaagagaaaagcaaagtgaggaaaaattgagaaagggagagagaggtgtgttcggttagggttggaaataaccaaaaaattggtttctaaatttttgtaaaaattccttttgttgataattaattaactggtcaaaagactaaaatgcccctagggccaatatatcacataagcatgcattcaagggtaaaattgccatttaatcacattccacactccaataaattttttattattcaactaataataaaatgccaaaataaagtcccgaaatacccgattgtgactataccgcgccgacttgtcagaaaatacctgcagaaggacaaaacaaatatattatatagtaatatagtccataagcacgctataatattaaaattatagttttacctttctcgggtcaaaattacaaaaatactcctgactcaccaacaaggtcttaacatatcatgtacaagtataattcacatatattaaattacataataatataattccatattaatacgcatttaactagttggagtttgctaactgattctttaatcttgggtattacaaagtggcaaggatgatttatgatgcatcaaagtcgggttgtcttataagacaattaattgattgtgtaatgtgtggttatgtataaggtaaatatctatttattatgatgatgaagttgttggctatgaatttctatgattttctcgtattgcataatgtatgtgtttgtatctacctacttttcttgttgagtctttgtaactcatgggtgcttcgtggtgcaggtaagggggaaagaaattgtggttcagccatgagttagaggtcttccagcaatgtacatatcaactgttatgcctcagcttctagtggacaggatcaacccttttgattgtattttgaaaatataatcttatgttgtaatactaattttggaatagaatgtaaatgttttatacatgggatccttgaacttaacagtggttttccttttataaaagttatgtttttattttaactaaaagttttaattaaatcgcacttttctcaaactaatagaatagactaaaaataaatttgtaaaagcacacacacgtggcgtccctgtgggacagggcgttacatcatggtgtcagaacgaccaaggtttaaagatcctgaagactagttcgatatgtacattgactgtgaatactcgttcgactcatggtttagtaagtgtcaattgttagttatttaatagactatttgttaattgtttgaatttcctgcttatttgagatatgtaagctgttagaggagcatgattagttttgataaagattgataaatatgtatatgcatgtgcggtaatgcttattagcattaattatggtttgaaaatttaattgatagaaagacatggtcgcgagtgtactagaatatgtacccgaggcaatctaatagggttaaatgtgagcttaccaagctcggagttggcgttgagtgtgaatcctccaccaccaaaagattaggagcaaatgtatgttgtgatgcaagagaccatctgagttgtaaagatagaagaatttcacggttaactcaggtcagcatggtgacaaagtgtgataccaaattggactgattggcaaagtttgcctttaatatagtggctgctaagaccgctaggaaagttaaattcattaagaggttagaagaccatatcatgcgagatgtggttataattgccaaataacctgggtttattcaaacctatgctcatgtgattgagttggccattgctgctgagggtgcaaaagaccagattcgtaagagaaatactatgagaagagattcatcgaagcaaacatctaatgttggtctcaataagggtgttgaccctagtgattgcacgaaaaggcctaatgaactgtcagctacgggacggaataagagattctaaggtaaccaaggtttttgacgtggttgaaataaaaattggcaaacttatctagagtgtctgatgtataagatatgccatcagggcgaatg

SEQ ID NO: 40451 - DNA, 1766 bp, Cannabis sativa
gagccgccgagggcgagctttctccatcgctagggctagagctattactccgcttgttgttgttatccaagtgatcaaatttcgacctgggcggagtggagtcggaggtgatgagtataactcgttcgtcggaggaggaggaatgggtgtcgtcgatacgaattctggcaccggttgtgtcgcggatatggcggatgactgaaccgccttttccgatgagtgctccggtcttggatgccggacagaggaggcggaagagggtgtccggcgttggggacttgaaggggagaggttccattggggggattgggaagagagagagagaggcggcgctacagaagtgagtggttgtgggtttgactcaatagtgaatttgggtttaaagtttaaacccaaaaaggaatattattgagtcaaacatactagattgacttttattttaatttatattgtttattaataattaattaattaattaattaaaacgagttaacacaattcgaaattcgcacgagaggtagtcagtttaggttttctttaaatgggtttagattgtgttcgggttgacacggctaatacgaaagtgtcctattaatgacccatttaaaattagagaaatgttagaaggcaccagtgatacttaacacccttctatatattattatcgctattggtttatttaagtatcgaacctcatatagtttaatgtaataacttttagagagtatcgctagtcaatcataaagcgagatgtctagaggtactagacaccactcgtaccaaaaaataatgcttctaaaattattttagttctttaacttatcataagtgtggtgaatatatcataaatgtattattagttgatatttttagccaaaactttaattttatttaagtagtgtaatattaatttaatgttatttataattaaattaaaaaataatatcaaattctataaaaaaaaaaaagttcattctaagtaagaacttaatttttaatatatagtataaacaaatactataatttttttaaaaaaattaatgagctcctgcaaatgtcccaagcaaatgagtatatatttgggtctttctaatactatgggtcaaaataaaatggttgttttggatttcttaagaaaatggaaaaaacttcaagattgggactcgaaggtattatcatgagctggtaaagaactgttgattaagtcagtagcacaagctatgttatgaatgtgttcttaattcctatggagagtagtaaagacattgagagcactatggccagattttggtacaaaagtttttcgagtgaaaataagagaatctcatggatgtcttgggagcgtatgtgtcacgataaaaataatgagagcttgagttttcgtaaccttcgtgattttaatttaactttataaggaaagcaaggttggcgttttcttacaagacttgagtcaatcgtttattgagtttttaaaactcgacatttccctacaggaagctatctttcagcctatcttggaaataatccaagcttttgtgtggcgtagagtttggaaaactcaatctcttgtttgtgtaggtgttcgttggagtgttggaaatggttctacaattagtgttatgggggagccatggttgccagatcaagaccaggccttcgtgacttcgtctcgtcctgccctccaacaagctacggtgtgtaatctaatgagtattgacaaaagttcatgggatacaaaatttttagatgatttgtttgaagaaagg

SEQ ID NO: 40452 - DNA, 1941 bp, Cannabis sativa
tgtctttcaaaatagtttggagaggttctgattgagatggagctgtattaggtaattggtttctgatatcacccggtttgacttggctaagaactgggtaagactcaatttgggtatagtagttggctatgaaatccactacttggtaagcttgtttacgaaattcttctggattgaaaagattgccatttgagtttaccaagtcaaagctacccatttcaatattttttagagagagatagagaaagagagaaaattattgcttgtaatgaatgtatggagtggagaggattttataatacttgagcttggtctatttttatatataatattatatatatgtaacgtgactgaattggtttatttttttttttatgaactaagttggtctattaatctatttattaaacaaggagcaataaagtattttgtggaaaaatattattatgttttaatttatttatttatttttatcttttttcaaaactctcttatatttacttttctttataaattggaagtcttagttagatataaccgttaaataccaatgaaattactattgtattatgtttgaagttttagtattacatatacacaagtgtacaatagtcatttatttaatatttaacgataatatttaattgacatctcaaattttaaaaaaaaacttaaaaaaaatttatttaagaaaataataaaaagattatgtgtataaaaataaaacattaaaaaatttcacgacaaattttataaatataatctataaatagctttacaacaactctcaccccacaatattaaattatcatagtcaccgacaaaattgattttgtgatatcaatattcttcatttcttgatctctctatcattttacccaaatttcaatgtgtagtattattattgaaataatttaatatatcctattatattttattttaataaaaattaaaaaaaaaattaccaataatttatagaggaccatgtgatagtagtactaaggagaggtatttatcaaactattcatactgcataaattgcacgcaccgtattacactgcataaaagatacaatttaaaattatttacagggtataatttacatttttaaatttaataatttaatccacaatgcactatatattaaaaattactaatttttacaattacttttaaataagaataaatatgtgtaatatagtcataattatgtatttccacaaaatattccaaagaattgatggattgggcaattatgcattaagagcaagtgtaaggagactgcatatacctatatacaccgtgattcaacctctactgagattccatttgatgcaccattttaagattttttctatagtgcacggcatatatgtgtgcactgtagccgcgccatatatatatttaattaatatttacatatatttatattattatatctataaaattaagaatttattttaaaagattttataatatatatttttaaaattaatgtacgaaaatactcttatttgtttcggtacttgataattttttttagtttattttttatatattcgtgtatattatagtttttaaaaatattttataaaattttgagaaatttagaaaattttaacacgccgaaaataatgcatttctttaaaagtgacacgctgatatactcctacctatttcgatatttgagagacttatttaatcttttttatcatggtcatgtacattatagctatttgaaatacactataaaaaatcttattttataaaaaagttgtggctaattataaattatcattattgagttgtgactacaagatccgtggctaaaactatattagtcacaaaacttacaatttattgtgactaaatgtatttttagttataatatttgttgtgactaaaattaaattagtgaaaatttgtaactaaatactatgt

SEQ ID NO: 40453 - DNA, 2461 bp, Cannabis sativa
  modified_base (2314)..(2324): a, c, t, g, unknown or other
taattttgaagccacatatttcatctagagaatattatagccaattacttgcaatggaaggaagacggcgacaatgaaataacgtcgacagactgaaaaacactattagttccgcaaagtccttgcgtcgagacatataatcaaaaaatttaaatttgtacatttcgttatgggcaattaactcataaataaatttaaaaaaatgtaaaggtagctagcaatagcaaagtcccaagtgtataataacgataataattgagaaaatcccaaagaaaatactttatcgatcatgtgtacacaaagtggatcttgtttgatattttctctcttcatataaagccaaaactcatacatggacacaatccaatatatcaatctctacaaacccaaataaatctgttttttttttttgctatagatgatgttgtaccgttattgtgatgtttcaatttatatttagtttttatgccttggcaaagttacgttcttaatttccatatatttcactcaaaagtttcttattaagaaattacataaaaaatttaagataagttttactttaaaaatataatttcaattgtaccatatattttagtttgtgttattttgttaagctattttaccatattatttggtttttgtaatatgttgttggctcgtataccatattatttgcttttaaatattttttaataatttttgaggaatattttttctattattttatattattattttttttattatttatttggtaactaattgagttttgttaatttttttgacaaaatagttatttttagttggaatttgatttattaagtttgattaatcttttaatttttaattattatatatggggcaggttttattgtttggtatatttctttcttagaagacttaacttcttgtacatgggacataaaaattagtttcaatacattgctaacaaaatgagtgaaaaaaaggcttcaaatataagtttttcttattaaaataataatattgtgttttattcttaatttaaaaattcataatattattgtttgtataccattttttttatatttatttatttcgcaagtgattttggtccaattgtttatttattttagatgtttttttgaacgtggtcttaagttattttgcctaaatttatataaatcgtgttctttgtactcatattctaattttagatatttttgactaaataattctaaaagttactcgacgattatttagatcactaaaaaatatatatatttctttataacccacaccactcacttttatatatttttttttcttaatttaattaaaaaaaaatagtttagtaataatgctatatatgtatgttattacaattttacagtcatggttagaaaaatctggtcacgcgtagagaattctatgttgccggctgtgcatggcttttcaagaaaagcatatatataaatataaatgaccagccaaggtggtttgaccaccacatcattttattcatttatttattttggctattaatatttaaaaaaaatttgacttgtaaacttcttcgtattatcaagtttatttgccgattaatttataagctcgcagccaatatataaatgtgtacttttttttttttttgttttggttatgttttggaagtaaaaggagcaactttaatcattcaaccacaaacaacaaactacaaagcaagctgccaaaaactgcagacacaaacttacaaaatgttaattaaagacaaaacatcaactttcctgagataagaaaataaacaactcttaactttgacaattaacttgatttgattacttcacaccttataagtagagctataaacaaattcaaagatacatatttatttttattacaccaaatgcagtatataataacagttactatagtattcaaaacagcagccacaaggcttttgatgaatttcttacatccaacctccacctctagcccaacaaataactgaccaaaccaataattttgtacatcctaaatcaccatttttgtgtaaacacaattaattagaagacatgccgatgagtctcattagaggtcgcacaaaccgggcagcagcgagagtttataagttcaagaatcttctaagatggtcccttgtgatgagtaaataattgttaatagcttgtcaaataataaaacggtgcttgggaacactatgtttgtgctagaccgcatgggaataggacactctatcacaaggaagaagagtgtatactttatatatatacatataaatgtactagcaaaaattacgtgcgaggcacgtatactnnnnnnnnnnntagtttttttctatgttatttgaaagtgatacaataaaaagttaaaaaaaatattttattagttattaggtgagattatttgaataaagaacaataaataattacgtaaaaatcaaaaataattatttgaataaaga

SEQ ID NO: 40454 - DNA, 1505 bp, Cannabis sativa
  modified_base (38)..(43): a, c, t, g, unknown or other
cagttgagcaatatttttccatctctctctctctctcnnnnnntctctctctctctctctcctctattcttcatgcggtgccgaagctcaggcgagccactccaaaaaccactacccgagaaccccagagcctatctctcttcctttccattctatctcgacgcaaccacggccaaggccacgatggccgtgcacagtcatcggtggtccaagcggatccaaaaaaccatcagcaagaacccatatccaagatttgtttgtatatttcagtgtaatttttagttcaaattttgttgattttgtttgataatttttgtatttagcaattatatttttgggatttgtttgtctattgagtttaatgtatgtatcttttattttgtacactgactgtaaaattgataaattattatgaaaattgtatattttttatggttttaacaagttgttgaaaatgggaaatgttcattttaaagttgttataatgccgaatttttatattaatgagtttgataggtttagtaattttgaagttactaaattttatttttaacaattatttttttattcaaaaatattcatttaatctcgcttttaaaccgacactaaaggaaaaaaaatatttatgtatattttaagtgtctgttttaaaatgacaccaaaactcatttatctcagtttataacagacgcttaaaatctgactttttgtacgtgactatggaataggtgtcagttctatgaaccaacactaaaggtataagtgtcagtttaaaacttacaccaaaagtgcagtttgtagtagtgtttgcactgtttgttttcttattttattttacaattacagagttgtgttttataactacaggataactgtttcaataaaatatttattaagtttcatataattataattcattaattagataataaattggttatatttaaatatggaatttcaacaatcttatttcagaaaaaaaaaaattgtgagtaaataaaatctatggttaaaagttttagtcacaataataaaaataatttcatttttttttcagttttgttgggaaaaaaattaaattttttgttgagataattaatgacacaagtgcaggtatataatgccttaatatgttcctttgaagacaaattgtttaatatataagtctttaaacatggacaaagacaaattttactctactttttccaatagatcagtattggtgggatggaaaaaatattgaattgttggagccattaaaaatataatgatgaaaatcaacattatatgaattatatatagtatcacttcttttataaatattctcattataataattacatgtatgaattgttcgatattggtttcgcaaaagtatgttaaaccaatgaaagaaaaacaagaaaacgcaacgcaactttcttcacatatattgacgagagagagatcgatgccattgtgatagtgcatttatgcgttccaataaaaataaataaaacatgtat

SEQ ID NO: 40455 - DNA, 1801 bp, Cannabis sativa
ttggagattgttgaggatttagaaacaatggaacagtgtaaaaaggcaatggaacagtactctgatattatgccttcgcctactagtgagatccatcaagatttctctgcctggcttacaggggcgaatcgtgcttctcaagatgcgagtttggggaagaatccttctcctccaattctcagatccaatatcgcacaaaaactagagtcctatttcgaaaaatcaaagacgaattttcttgatacacaaccgagggttgcagatactggtgcgaatgggaaagtgaaggttaagatcgaatttgaagacattgtggagaaggttaattactggaaaccgtctcttgtgtgctatgttaattgagctaaccctctagtaaacatacttgatggatttgttcgtagaacctggaaagatgcagcggtgaaagttggattactagctaagggcattagcattatcagattccagaatttggaaacgagggacaaaattatggagcagggctatgtgttctttgacaggaagccaatggtgatgaaaccatggaaatcggtggatgatttcactaaggaagaagtcacttctgtgctaacttggatctagctgaaaggattagatatcaaatattggggggactcttccttgtacaagatagttggacaattgggtgaaccactcgacaaagttaccaagaacagggatcgactacaataccctaggattttaatccaggtgagtctctctcaagaattcccaaaaatgatttcgtttattgatgagtttaatcatgaaattgaattggaggtgaagtatgagtggattcctctggtatgctataactgttcaggaattggacatgatactcaatcttgtaggaagaaagagagtaaggaagagcaggtgaaacagatatggatccctaaagaaccaaaagagaagatggaagatcaggtagatgaaaagggatttcagaaggtaacaaaaggatagatcaggtagagagtgttgctggaataggtggaagtagatactgaaataaaaaatagttttggcacactcgaagatgtaacaggagagatattaggagaagagtgtagcataggagagggggagatccctctacctctaatggatagattactttgttggaatgtgagggggattaacagccaacaaaaacacaatgaaatcaagcaattgattttttcaaagaaggttgggttggttagtctcttagaaactaaggtgcaaaataagaatatggggaagatgtatagcagtctatttcaaggttggtgtttcactaataattatccatggttggataaagggagaataattgttgcttggcaaccctctgcgttttctgtaaacataaagttttgttctagtcaattggttcattgctatgtgcaatcaatgcagcaaaatgggaattttttttgtaactttcatctatggtttcaatgatgagcagaaaagagaagaattatggggtgatttggagaagctagctgctagtatacaagagcattggattatattaggagattttaatgagatattatatgctaatgagagagtgggtaggaaagctcaaagtaatccttctcaaagacttcgggactatatggaggtttgtgagatgacagatatgaagtactcaagatctttttttacttggaacaataagcaaaagctagatgatagaattttttcgaaaatagacagagccatggttaatttgaaatggcgttgtgccttgcctaattcagaagctgtgtttcttcctgaatta

SEQ ID NO: 40456 - DNA, 1184 bp, Cannabis sativa
aggactagcattaggaatttaagaagttggaaacacaacagtaggtagattagatacatgatcaggttgtacctgatgtgttgttgatggtgagattgctagaaatgtattttcatcattgatcacatttcgtgcaatgaacaatctcccttgtggattttcacacaaatagcccttgtgcactgatgaatatcctaagaagatacgttgttgtgacctgaactccaatttgtgcttgttgtaaggtcttaaatgagggtaacatacacacccaaatggctttagaatgttgtagtctggtgtttgtccaagtaaacattctgataaagattattgatttaagacatgagttggcagcctattgatcaagaaagcaactgtgtgaaagacatgctaccaatatttaaagttcaaaccagattgtgttagaatagagagtcccatttcagttatgtgtctgtgtttgcattttgccctcctatttttttcactacttttgggacatggatgtgtgaagacaatcccttgatcatttagaaattttgcaaatggtcaatatttccctccccaatctgcctgaactctctttataggaagattaaattgcttctctaccatgcttttgaacttgatgaacatgtcaaaagcttgagatttaagtactaaagtacagatccaagtgaatctactgtgatcatttaaaaaatgaacatagtagtggatttaatgtgtgaggggccccataaatctttgtgtattagttctagtggttgagaagctcttgaggtcgaaatggtaatttatggcttttgcccatttggcaggccttgcaaaagtctaactggtccaaagaaccagtgtgatgaacatgttgtgagaccttgcttaagactggtttggatgggtgtccaagcttttggtgccaaatatttacattagtagttttgctagagtggtaaacaagtggacaaagattggaaacttcagaagctgtagttttattcatttgaattggattacaagtattgtcatttgttacatagctattgtcaaatgactagtacaaaccatatcagtggggttacacacataagccattggctgtttcgaattgttcaccactggatctttgacactgtcttcaagcacataaagtccttctttaagtattcccttgagcagca

SEQ ID NO: 40457 - DNA, 2226 bp, Cannabis sativa
tggtggagattgcaagtcttccaggtcagtagaaaaagtgagttgttgttttttgtgttgttcctttttggttgtttttatgttgcttaatagttgattaactattgtgtttttctatttttgtcaaacaaggcttgtggcacatttgttgttgcttttgcggagtttttcatccatggaaaagatgttgttaatgactttgatattgaaatttaccgcactcgtcttatggccctcttgtttgcctatggtcaaagaaaaaatgacaaaaatattgacagtgaggatgagaagcagaataagtcttcgaaggctggtaaagggaagaagtaggatcatttgatggggaactgatttatgaacttgtttaatttttaaatgttaaatgataatacttttttatggatgctattgttttatttcttgttttatgttatagtttattttaggtattactgattttaatcttttatttttgttttgagacaatagttgttcgttttttgtaaattgggatttgatgtttttgttgttagttcaagttttttaattacagtgtatattttatatggcacccaatttttttagcaattgttatgcaatgttataaaaattattccaatataggaaaacttcttaattttaaccccgaaagtgtaatgaacttataataaacgttttaaatatatttttttgggctttcaatttaagaaaaaaaatctactatgcaacttctaaaaagtaatagggtatgaatcttaataggattatatttttagcatggcacacaattgtgaggcaactgttatgcaatgttaaaaaaactatacatgtatgcgaaagcttattaaactaaacaccaaatctattatgaacttacaatgaacttttttaaatatattgtatttctcatacaacttaaaaaaaatattattcaacttttaagaaaccaatatgttaggaaccttaataataatgtatttttaacttggtacacaactgtttaacaactgtaatgcaaccttaaaatactattttagtattaatagcaatctacccaaagtaactttttatgttgtaagagttcacaaagaaattttaagagttcaaataaatgtcatgtctccatttaattgcttagttgtgccctgttttcggttgtgacctttttggccacgtttgctgcacctattatgtttttttttttttttttcattcacctataaaccttttttttccttagtcttcctgatctcactttctagtttggtggcagaacaatgatatctttgatgttttgaggtacatcacatgttgtgtgaatatattgacccattatatgtttcaatctatgttttgattgtttaatactgtgaacggtaattgtaacaacattcaagttcatctctttcatcacagcaagagcatgagcacatggtagttcatcttgttggaatctattgcaactgcatatttctttttttagattgaccatctatgaccttatttattgtaccacttcaaacatgctatcatttattggtttcacctacatatttggtaatgtgtacttaataacaaaactaaaaagaaactacaatgcaactgttatgcaacttattgtttaatgaattcttatatttttcgtcaatgagtccacaatattgttgattaacttcttctaagcagtaggtgtcaaaattattgttgtctttagtgctttttttctatttatgtatgtttattgttcaaaaaaagctctcaatgactccattagtgccgtgattggtagttctctagttgctaagtttgttgagtttagagatttagctatgttagaagtcatagttgtatacttgttatgtttgttgtgataccttgaccatttgtggtatccaacttgttgtaaatagggtctaacacgcttgtccaagctattaagctctctcatatggtattcaaatttcctctttgtgtatgctttttctgatgcaaataatggtttattgagtttgcttgcattcttcttaaaggttgctcaatacgtggtatacacagtcccctgagttatgtctaaaaatacgtgagcaacagccttaattatgctctcatttctatctgagatcaagcactgttcttctcttaccccatatgcttccctcaattttgtaaaaaactattcccatgagttcttattttttgaatccacaacagagaatgctaggg

SEQ ID NO: 40458 - DNA, 1232 bp, Cannabis sativa
tcaacaacaacccacgatccatgcttcttgggattgaaacttgcgtcagatgcaaccttctgttaaccacttagcaaccttcgtctgatgcaacctttgatcaaccacccagcaaccttcgtctgattaaaacctttgtctgatgcaacattcggccaaccacccagcaactaaccagcaaccttcgtctgattgtgtaaatgatagtgtaagaagtattttgataattaaaagtacattaaatgtataaatgttgtccacaccttatggaagtatttttataaataaagtgtcaatttatatttttcatgtaataatttcattttttttttgtaaataccatttcacattctatatattttgtaaatggtaccgattagtaaatctattaatttaatgataatcaattcagacctataaaaaaatagaacataatcatatcttgaacctaattttgatcaaattatttttaatcctaacaataaaaatttatcttcataaccttaaaacttcaatttcataactccaacaattgtgattcaatttttattctattcctaatcctaaaaatgtttgcctgcacttaggtttaggaaactattaagttccatttggcataatacatgatttaaaatcttatttaataatgaaaattttgattaataatttttacaaaatataaaatctaaaattaaatttatttttttttattctgtgatgtaacctcttattttttttttatttactttaaaatatattaatgatgtatatatgtgtatactcatttgacactttatatttttttaaaataaagatttggtaccatgtacttttaataatgttcatttgatactcttaaatattaaaattatacttattttgtaccctgtattcaaaactaattgataaaacattatcaatatgatcaaaatatcttcaaccatgagttatagattcaaattaactatttaattatatataattgaaaaaaattaattaatttgataaaattttattgatgaaatttgagtttaaaatgtcatgtatatattcaaaatacaggtactgtacaagcattatttaaaactatgagtatcactttatattttgataaaacacaacgtactaactttatattttactaattccatatatagttatttacaattgccctcttaactaattttttgttcaaagtttactcactatattttacaatttctccttctctc

SEQ ID NO: 40459 - DNA, 1288 bp, Cannabis sativa
tattttgaggtttaaattttaaaattgattattttattttttaaaaattatggttagatttaaaaatttgttaatttctttaatatttatacattatttaattatgatatattttaaataaaattgtagccttctcttttaatttgaaatattgatttacgtcgtacaataaaatgacgctataaataaaactgacggcaaagaaagcaaagaaaaattaaaagtggaaatcttatctcctcggttcattacaagcggttcattaaaatcacgacaatttgcctaatttagtaaactggtgcattaagttacaaaagtatatgctggtagatgacacgtgcaattcttacctagtatataaatagggatattttgatattctattttgctgaataatttgatcggtgaaaaattaatattaataattaaatgttttttttactgaaaaatatgaaaaatgtgaccataatatttttttactctataatgtgtgtttataattttgtaggcagactcttataaaaacttgttgtgtacaagtatattatcagtttgtagaaacttctgggatatgtttaaaatttagatgggctcgagatattgaatttcaagtcaaggaatttttctctgaacaattccgtgtatcataattagctataggtgatctagttttgacattaaaatcttattcagtatctctctctcaaatgtcatcatcatatatatatatatatatggatagacaatgagttttttttggatagaagagatcctttctcctatttcaatggtgacacttaattatattttcaatctaataaagtaatatataaagtgatatgtataaaaaataataataaaatatataataataaatttttaactaattaataattataatcaattttttaaaataaatctttttataagaaaactaacgtaaccatctacgggtatatagatttgatgtattaaggacagtgataatatctaacatgcatgtcattttatttttttgaacattctaacatgcatgtcaattagtggaccattctttaacttatttctttattctaaagtttccaaattgagcgcacgacatgcatgattacatgaataaaacacactactaattataatatttgaatcttaagacagttttcaataaataattatactgcaaacatatataccttagatagtgacataattaaaagttatcacttaccctcaaattttaagtatggcatatcaccgtgtaggtaatggaacaaattaatagatgagt

SEQ ID NO: 40460 - DNA, 1180 bp, Cannabis sativa
aatattagtaaaattataattttagtccaatttcatctgtacagattcctttagtgtcttaaataggacacatgtaagagtcagattctaaattattgaatctagagaaacatatagtatgagttactttcagatctttttttaataaattcaaaacaaattatgtattgacaaaactagacagaaaaattacagtactaatcttgaacacttatgccgctaaaaaaaattattaaatttacttcgcttactaattcaaaactttaaatacttataccacaatcactcctatttattttattaacaaacacatttccccttcattatcattctatcaaaataaatctcacaacatttaacattaaatcattgttagttacatttaacattttcataattttaagtgaagctagcatttatttatttattttacaaactaattaaaatttaaaatatcaatgatagacactattctctcatttttttcaataaaaaaactttcaatttttacacactggctaaattattttaattacatacttaagaataaatattgtataattttcatctaaaattagatttaaaattacctaagtataattttagaaagtttcatatacattgttttatcaaaaaaaaaaaaaatcttactttttagaaaattgtttaaagataccacttgtatctattatcttcttcgatatcataccactattagtataattaagtatcaaatatcatataagttttaaaaataatttttaggtaatatcgctaactaatcataatgtgtcacttataaaactactggtgcccaataaaaaaagtccacttaagatgaagaattaaagtcacacttttatatatttaactattaagataaaaatttccaaaagagtgtcccaattatttttctatgtttgcaatgtgaacactaacacatcacttcattaaaaatgtggaatcttcaacttcaaccctcctattcctatatataacacactctactctctactactatacattactcataaaccaaactctctctctctctctcattgtgagcatggattctccacaacccaaacccgaactcggcccgcccgaggaggagtcgccgattgaggaggtccggctaacagttaaaaacacggacgacccgaccctacccgtatggacc

SEQ ID NO: 40461 - DNA, 1578 bp, Cannabis sativa
gtattttgtgacatgaatcactttagaaacttggatttaaggaaatataaggcttgtttcgcattggctttttgctcaaaactgtgttttaacaaaaaaataagttttgaaaatataagacgcgtctggttaatattttttaagaattgagtttagattcttaaaaaaaaataaagaaaaagaaaaaagtacttcaacactccacacctcgacatgaactctaacccaacaaagaatcaaatattggaccctgggctcaagcatggactccggacctggacctgaacttagatcaggactcagacccagacccaaaaaaaagataagagaaaatgatgagaaaaaaagtattatggggaaaaataaaagaatttttatgcaaaatactatatttcttttaaacttaacatttatattgagataaggaattttttataattatattattcattattttttttaattaattttttctatttattttagcttctacaattttttttattgttctttccttctctctctctgtcttttctctccagtcaacctctcttcttcttcttctttttctcatactaatctttttttttttatctttatatatataaatataataagtgtaacccttaagatatttttttttgttttatttttgtactttttcacaaaattttattttattatttttttttaaaaaaaaaatattacaagcactcattctgtatctttttctctcttttacattttcttactacttacacttaaagtatttcgtactattttttttaattaatcacattttgtaaaaaatcttacttaattacttttaacctttactaaaataaaattctttcgcttacatattttttctcatatatatatatagttttcacactctttctctctcttacaaaaaaattaggagcactcttcctatatctttctctttcttacatgattaacaaaagtagtatttttttgaatgttttgtagtttattcggagttcatctatgaatgctttgcatatttcaacgatgtcaatgtcttgttctttattttgtcactttgtagttgtctttcgttgttttataattgttttcatatttttgtttaattattctatagttgtgttatagttatttttttgtattttttttattatacaatttttttgttgtttttaatttatgtgcatttgttatggtgtatatttttagtttattcttcacaattttttagttgtatatatgtgtttttgttttgttatttttatgttgtatttaagttattcttaagtggttttctgaatattttttggttgtatagttattttttagttatttttttaatttatgtatatttgtgatggtgtatatttttagtttattcctaataattttttttgttatatatatgtgtttggtttgttaattttatgttgtattttagttatttttaagtggtctaatcttaaatcttaatcaaagaacattaatgaattacatgaatttaatgttagacagaataagcaaaaagatgggggaggggaggcatgcttgtaaatgttgactccacct

SEQ ID NO: 40462 - DNA, 1807 bp, Cannabis sativa
taaattgctaacagaatagtggttttgggggtttacccgcagaaatttaggttgtgggggtttagtgaaactaaaacgaaaatattggaggtttgccgccatttacccttttttttatatatacatatgataaataattatttaaattttattttcagtattataaattattaaaaaaaaattaaaattttataaaattttttaaataactacaatatatactttagaaaaacatgaaaaatttcatttaatgccaacacaaataaaaactataataatataaataaagtgtgtactaaaaaaattcaataattattcttatggtaaaagttaaaattagttgaaagtaactttttttcatgatgatgatgagaaataaattgaaaaaggcctcaatccccaaaaattctcccttcttcacgtgccacatgcatgcaacattccattcagtctttcttagagtcttcattaatcatgatttgggctggccttcccattcaattcaatccattttttcatatgatttttctttggagaggtgatctaaatcacactatgaaaatcatcaatgtagaagaattttcaatcaaataagctaattgtctagctaaaaatatacaaagtcagcatataagtcactacaaataaaacgatttatataagacaaaattatttcggaaatttagacaaaataacttgagaccactttcaagacacttccgatgtaaacaaacacatggatcaaaactacctacaaaataaatagatgtataaatgtagattagcacactatacaatgatgatgttgtgaatttttaaattaagaataaaatgcaattattattataacaagaaaaaacttatctttgaaacttttttattgtaagagctaagtcttctaaggtagaactatactagccactataacctacaacatacataatatttaagagattaatcaaactaaataaatcaaatcccaaataaattaactattttttaaaaatgtaacaaaactcaatcgcctaataaataattaatatgaaaacaatgatataaaatgatagaaagaaattcctccaaacttattaaaatataattaaaagcaaaatttaaaacttatcggtaaaaatctacaatagcactctttgaggttgaatccatgcgcaaatgagctaacaacaaactgcaaactagctaaataatatagtacaaaattgccaaaacaaaatggcacaaactaaccaaaaataacacaaactacaaacataaactataaattatctccaaaccaaactagataataaataaatatacataaattattttttaaaaaatacgaaaatttataagaaaagaaaaaatcatttattaatataattaaaaaaactcaattactaaaatatttaaagtaagaataatttaaaaatattaaaacctaataaaatataattaaaacacatttaaagatataaatataaataaaatactaattattccttaaatatatacatactataatgactttaaatatgtatactatttatcttaaaaaaatagtttaagaaatagtaaatgaagataatattaaaaataattaacataaataacctatgcaaaatagtaagaaaaatgactaacaaaatttagaaaaataaatttttcaaagaagaagaataaaattagcataaaataataaattaaaaatattctaaataataagaaacttaacaaaaatagaaaataaatccacagagtaaatgtacaattaatgtatataaatatgaaaaataattaaattaaatta

SEQ ID NO: 40463 - DNA, 951 bp, Cannabis sativa
aaaaaaataactaagagcttacaattgaacatcaacaaatactttaacccttagctattatagctcatcctatactccaataaattcttccctaaatttaactcaatgaatagtaaagatgtaaaacatatttttatatatttttttctttttctctttcattcctttaattaattttctttttttattattattctctttactcatttttgtattttttttttatggtcaacaagacccatttgaaagaacaatcggaggcccttttaaaagaagagaatagattagagtgtagcagttggagattttccgttgaggctaataatctgaatccatggaaaacaatcccaaaaaatgtataaaatatgtgaaaaattacagtactggatggggatatagtacagatctccaaagaaaaatggtcggcaatggaaaagacttgtggatcttcgacattgatgaaactttgttttctattcttccttattacgccgaccacgggtatggattttggcagattcaaggtggtttgagttcgtcgtgagttgccttcggtggttccataaatgaatagtggttgtagtgatagtccatttttcatgcgtgatggcgacttggcgagaaactctcgcttaattaataactgctttgattattattattattatttaattaaaatgtcttctttaattttttatataatcctactatataattattattctattttcttaaaatttattgaattaaatatttttaaataataaaataatatttggatacattacttttgttatgaataattttaaaattttactatttcaatagtattaaaaatattgtattaattttttactcatattgttaatttaaaaatcatatctatttaatcaatgagttatattttggacggttttacttttcttatagtatctcttcttaacaatttgt

SEQ ID NO: 40464 - DNA, 1539 bp, Cannabis sativa
ttttcactaagatgtggtttcactaagatgtggcttgctaagatgtggcttgattgtgaagaaataggattttagggtttatttgttaatttggcctgtttgtttaatatatatatatatatattatattaatgtttttttaaatgattattatattaatgttaatgttatatatataagaactaaaaatcaggttaaatcagtttggtcggtttaattgggcgggttgggtctattttcaacccgcccaagtaactgattggcggtttagaattttgttggattatttcggtttatatttttaatcggttttttcggtctggtttgggcgggttaatcaggttgggctgtttataaaagttcttgtacaactctagttgatagtttataatcattgatatgtgtagtttcaaagcgttagtaaaatgttaatgcaattgcaatgcaactgcgcatgaatttaaaaactactagaacaatgtttctatatgtacgtggttctagataaatgaaattttttttcgttatttgtgatttgacatgaataaatctaccattgaaaatttgaaaaacaacattaatgcaataggagaaacattagctagtgtattgaaatattttttttccagtttatacctgatttggattgatcagggttgaatttaagtttcaaactagtttttttgcccaattttgcataaattcgaaattgtatgtgtttagatttcttacggtcttctgtcaccaaaatttatggtgattcttcgtctggcttgatttttttttagttggcctactggtttgtttgttgaaagttgtcgttgttagagaaggtgattcgtgaggttgaatggttagagcaagaagtatttttgtaaatttttattgctggactatataaatgttttagggtctgcacaatatatttgtgtaataattttgccattttagtatatacatgaaaaaagttttttttttataatagaaaatttaagaaaattttatatatataaataccctcttaattttcgattggagtatattataataccattgtattgtaatacattcttaattttatttatttatttattttatcaaaatgcatccataatttttagaatcattagcatttttgtctcttaaactttcggtactatgtgattttgcctcctaaaatctatgacttgttcaaaattctctttaaaatataatagctacataattatgtcccttctgttaggttccgtttattttaccgtcaaaaattaatatttttactccccgaactttgaccaatataaaattttgcccccttttattaaaaaaattaatttaaaaattataatattctattaattctgaaaaaaaaaataataaaatgcattaaaaacttgataaaaatattaattttattttaataaagaattaaattatttctaaaaaaatattctcaaacttaattttatttataaacacctatcataaaaatcaaaccaaaattattgagaatctaataaataatttaaataaagtaag

SEQ ID NO: 40465 - DNA, 1779 bp, Cannabis sativa
  modified_base (171)..(171): a, c, t, g, unknown or other
atttcattgatgaaaaaaatgacaaaaagactaaagagaacttaactctaatcttattaaagagagaacaagataaaagaatgcaagaatgaaccttacctctggtgttgagaagaagatatctgtcaccaatttttatctaaggtaacgtgtaaaaattcttctagactnattagaaaatattttgatttctgatgattatagatacttttggatcaggcatgtgatttggaaaaatatatttagttattctattatttagaaaggaaaaaaaaaacaataaacaaactaacttaccgttcatcatccatattaaaaatagtcccagaaccattagtaggaaaaatatgccaatccagttgaatggcttgtcagaactcttctctctcgattgtacttcttggagtagaagtataatggtgattaagaggattgcttttccaaatgccattgggattttcctatatgcaaaggaaagtttcatttgatcgatcgagaaagaaagaaagacatagaacaatcctttaggtacatatcaaatctttatcgagagacattaattggaaaactcaaattagagagagagggagaacaatctatatatttatataaaggaaagcaaaaaataaattacgtgatattttatatgatttttttctattttaacttatttgtgaggctttctcattttgtgaaaaaaagtttgatgataaatggtttagaaacaatatcacattatttaagaaccattttgtatgttgtcctatatagaaataagtttattaatcttcactttgtcacaaaattattttttttatcccatatagtggttgaataaaatgtttttattattcaatctaatttgtcttaactaattataattttttatttattgttttatcaaaattttagtaatatgaaaataataatcgtaaaaaaaaactactatttacaacatggttatttgacaccttagttaaaaaaaatctcacatgtttaggactaagagtgtgtatcataaatattatttttattcaacacttaatttttaatattaactaaaaaaaaataggtaaaaacaaatctatatgtgagttgggatttggtttaggaatttctttccttaggtgtaatagagtttatagaatattaataaacaacaaataaaataaaatttaaatatttttttgggaatatacttatttagtaccttgtgttttcataaaaagcatatttggtaccttgtattttcaataatacttaattggtacctcatatttttaaattgtacatatttagtaccttaaagtaaaatttaatcaatacagttttattaatttaatcaaacagttctcagttatatgtaatcaaataattaaatttgaattcataattaataaaattttaaattgatgattgtattgagaaaattttatcaaaaaaatttgaatttagggtactaattaggtataattttaaaatacagggtactaaataagtattattaaaaatacaaggtaccaaacttgtattttgataaaacacagggtaccaaatgtgtagacaccctatttttttattattatatatgaataaatataatatatttttaatagatcttacatgtaattagattaaatcggtttttaattggactttgaaagtttcttccaataacgaatccaattaaatatttaaaatatagggtaaatagcggcataagtacctaaagttttaaatttgtaagcagcataaactcaatatttatttttagcggca

SEQ ID NO: 40466 - DNA, 1888 bp, Cannabis sativa
gaacccaatataaagctcagcaacgatgatggcacccctctcccaaatccaaatcaatataggagcttgattggcaaactcctctatcttactatcacaagacctgacataagctttgctgtcaatcgactaagtcaatttcttcaaacaccaagggaacttcatatgactgctgccacaaggatccttcactacctcaaaagcactcctggccaaggcttatttttctatgccgattgtccaaccatccatttccaagcttttgctgatgcgatgctgattggggagcatgcctcgacactcgacgatcaatttctggctattgtgtcttccttggacagtctcttatctcttggaaatccaaaaagcaacctacagtctcaaggtcttctgctgaagctgaatacagagccatggcaaatgccacatgtgaactcacttggctccacaacattatcaaagatttccacattcaagctcaacttccctccacactcttctgtgacaattctgcagcaatacacattgctgaaaatctagttcatcacgaaagaaccaaacatgtggaaattgactgtcacattgttcgtgaaaaagtttcaaatggcagcatcaaaatgaaccatgtctcatccaaatccaacctagctgatgtactaacgaaacccctatttccaactttatttaaggacattgtatccaagatgggtgtcaaaaatttctacactccatcttgaaggggcctattaaactgtttgtatttaaactgttttgttctgttattctgttagttaaattcaattaggtcggttagtcaattgggatattgtttagttcattttgctgcctatataaacaacatctctttccttgtattcattttaacacaattcaataaagaaatactttcattttctctgtttctctgttctaatagataaacttgtaacaacatgatggagatcttgagttaatgggtttgattcttttttaccaatagagaacttttgagacctaacctcttctatatggtgcttagatctttcagtgttaatggagtgaacaatggacatgattatagtttcttcttcttgcttgataggttgatgattcatattctctacgtgactgagaataagaactatcgttgtgtgattatatgatcagagttggagagagagagagagattttcttcatctatttctttgaagaaaaagtaattaatgaacaaaaagaaaaaatgttagtgagagtgagagtgagtatctgcatgaaagacatttcacagaaagtttcatcattttagtcattgattgaataaggttcaaaattgtcaggaaattacaaatgtgccatttgcattctccaacgcacactcacttcattttatgctaaaatttaattttatcatacctttttgttatttgcttttttttttttttttccatagcttttatgaattttatttttattttttattttttaaatgattttttttcaattttaataataaaaaaaataatattacaaaaatatttccaactagctaaaaaataaatatacagctcaaataataaaaattacacaaataccacttacacacaccttcaacccataatccatgcttcttgggcaactattgcgcaatcattgcgcaactacgtagtaacccaacgcaactgaaacaaaaatttaaccagaaaaagaaccaccattaattctggcgacttcacctaagaagaagactagaatcaatcgaaattgtttcgaattgataaaaaaagtgtagaaaaactactacgaaactaaaattcaaccgaaaatccagtttaatttgcataaaagctaatgtcctgacttcaatttttagatctatgaaaggcagat

SEQ ID NO: 40467 - DNA, 1450 bp, Cannabis sativa
caatattcataaagtgactctccagtaacttgccaaattccacatatttcttttctgatgcttccaactttagaggctgggaagtatcgctccaagaaaatagacttcatatcattccatgtctcaatagtaccaggtggtagatagtacaagcactctttagcagcatctttcaaggagaaagaaaaagcccgtagtttgatttgttctccagttgctaatgtaggtttcatactagagtcgacaatgtgaaactccttcagatgcttgttgaggtcttcagcaggcaatccataaaaagctggtagcaagtggatgaggctggatattagttcaaagttgacatccaaaggtagataatggatgcacaatggttgttggtcaagatttggcgcgaccaactccttcaacgtcctattttaagccatagtcttgtgagaagtaatcgagtcgtcagaatctgactcgggatcaattgatagtggttatttgacaggaccaagtggttgaaagagtgggttgtcggtgatagtcttcgatgatcaagaagcaaataatgactcaagatattgtttaacccttgaaagtctctcttgcgtatcgtctgcactagacatgtacacctgagattatcaatgtaaaaaaaattagtaaagctaaaattaaatatgaataataaaataaaataatagtccctagcaacgacacatttgatgggtgtcgtaagccacaacaatttactactatttatttttaatacctccaattattttagtataattgtaagtaagggtcgatcccacgaagactatgtttatttaattactcaaagaattagtgacagaagttagaaaatgcggttttgaggtttatagtaaaatagcataaaaataaaaacaatttaaaagtgagactgtgatatgagaaactagttaaaggttattcgctaccctcaacaatcattcttaattcctattaatgaatgtaatttcaatttttaatcaaactattaaccccgcatataaagctaaagtagtcaattattcaaatctctctattacatgtaatcaaggcgaagccttcaataattaaatcttttgtctaagcagtaaatccacgaagcatgcaatttatttaacttagataaagctttaagatttatggagatagattaatctagacaataaatcaatgaaacatataatttatttaacctagatttcattctttatcacaattaaaaatacctctgacaatattagaaattacaatttatcacaaacacttagaatcctaaactattaggtgaatagtaatcctaagatgacggtagataaaagcaaaacctaatttagtagcaatctaaacaagattaaaacaataatcatgacattgaacaaataaagaagaatagaaataatttgatatgatgtaaacttaaaattaacat

SEQ ID NO: 40468 - DNA, 1195 bp, Cannabis sativa
gcatagaaattatgttttatgtttattgtaatgttattttggggatttttttgtatgtttttgtcaggtgtattattgtttatattattatttgttgttgttgttgttgaaaatccgttaagcgcttattattttgttcactacttagggttatttttgtatttttatttcaaagtaagcatagaaattatgttttataattgttgtaatgttattttgggattttttgtgttttttgtcaagtgtattgttgtttatattactatttgttgtgtttttaaaaatttcttaagcgcttattattttgttcactacacaggtttatttttatattgttttcaaagtaagcatagaaattatgttttatgtttgttgtaatgctattttgaagttttgtgtgttttttttttttttcaggtgtatcgttgtctatattactattttttgttgttgtgatacgatcttggatcgttcattcctcctcacgtggatagccactttgggtataatttgagagataccatataacacttttctcctaattttagattttcaattgaattcaaattttcccgagagcaaacacacaaagaggagttttagcggtgaatgaaccagtcttcgacgtcctactctaaattgccttttgcctgagaaattgttattttccaaatcatccaccccaagtgatcaatcgtttctagaggagtgaattggcgaacatcgattttaactctaaaatggactccttgattgccctagccaaccgtcttcgtgcccagtgtgcttgcttgcctctaccagaaccaatcagtttggtaccgttgattccaccataaggtatgtattcatttacctccatgccttttaaactcagatccaacaaatattgagaataaaggagcttcaacaaattgtaattgaaccctaaaaaatagggatatttatttattgtcactccatttacggagccaaatgtaacaactttctccttataaatagtgaatgaattcataaggggaagggcaaaaaagaagaagaaataagaaagaagaagaagaaaaagaaaaaaaataattttttaattttttttagattaaaaaatgtgaaaaaagaaaaaaaaaatctgattttttttaattattttaaatatttataattattttttaaaattaatattacgtggacagtccac

SEQ ID NO: 40469 - DNA, 1347 bp, Cannabis sativa
tttttttttcagccgatagaacaatcccaacttatataatataaaaacgagagatttttttttaattagataaaaaaaaactaagcaaaaaaactcacaattttcataatattacccatgggtaatacccattaatacacctatatatataactaaaacttataccgtcattataataaattattgtggtcatttctacaagcggtgtacaaaacatggattaaaccaaatcatttaactccggcaacctaagaagtcctgacagttaacgggataacacgttaaattttctaccagtagttcaatagtttggagagttttaccgcccaaattttaacttgaaaggttaaatgcaaatgaaataatagttaagagagttgacctgccaaaaacactattacaaaatatatatatcgttggtgaaaccctattttatatctctaataatgattcaataattttctttctaatcctaactacgaaaaagttttaccaaaatccagatgagagtattattatgtttatttttacaatatacaagattatttaattgaaaaatacaaaaatctaaaaaagtatttaccttaaattatattataagttatataacacttattctttctaattttcttgaaatgctataacagatcctcctcctcctcctttttttttttttttgagatacattacagatcttacttgacttaattactatataaaattatagcaaaatggtgttttaattaattagtatatatatacacattataacttggaagaagaaaatacttaccccaatgggaccaaatccttgtcttgatcaagattgttcattataatttactcgatcgattaatatatataaaaactgcaatatcattatcaaaactacgattagcatacaaagtaatttataactacgattaatatatacaaagtaatttttagacatttatatatatatatatatatataaatttacattatttatacatgaaacagagagagatatatatacaactcacgaagaggctatgaaaagaagagatcagcaagttaaaatctaattttagagcaagatatatagaaacatttattatatagacaaatttttggttgttatacacatttattgttaaaatttgggataagatgaattgaggtttcatctcaaaacaaaatgttaatgtgaggagtagcccattcatcttatatgacaatttattttcacacataagaaatgtgggactaactaccctccatcacgtttaggccaaatatcgaaaaatttgtagattttaaaacaggtcaaaaactcaacattggaaactgacacacattggccga

SEQ ID NO: 40470 - DNA, 912 bp, Cannabis sativa
aaaacctgccaaatcttttgtataagggtaaaatcacaggttgttgaagaatctttgcttgatgatttcaaccgatagaaccttgttaaagaaaaaacaccaagagaggaaaaagaaaaaataaagattacactaaactcttgctaattatatcgttccatacttaggaggagtttataaacttattgaataccacaaatggggtaacatcccactcctaaagggttccttataatcaataagaaaatttctactagattaagtgtcctacttccagagagctttctataattgtcgaggttgttctttctttttattttttgtggtttgcagaggagcacttgcactaaaactttagatttataaacttggtcattatattcttatgtaacctcaagtgtttatatatcaagtcacaatagtgcttaactcttaaagtcttcactgagtatcttcgtctttattgtcacctttaagaattgttgtgagtaatctttagaggctcgtcttcttactatttaatgccgaccaaatcattaggcttaatcggtctgtgccttaatggagagaattgattatagaattcttcttttagtcttccccaagaattaatatatccaggagaaagcttgagataccactgttgtgctatttttggtagcatggctggaaagattcgacactgagaatcatctcgaatgctttataagtcagtttgtacttcaatgttgtgtatgcgggagagagggactcctttaccagtgtgtgggtgccacactggatttttgaattttaaggggatctccaaagccttgacttgatctgagagaggtgaacatcgctcatgttctagctcaaactttgttttctttggagctatgatactatttaccaagatggcaagagtatcaa

SEQ ID NO: 40471 - DNA, 2648 bp, Cannabis sativa
tggatgattactgctcacaggtatttgcacgtttgaattatgcatattttactccagtttgttgatattatatctgcacacaatgaccgcactttaatattttattttatgttttatcctaaccaatgttgtactgttgtttgcatgaactttttaagttatgctcattgtataaaacatcactgtatgcagatagctactaatgtagatgagtgatgatttgattagggtgcacgtaatttatacttaaaaacttacacttaattatgtagcatatgtttaatcacttatttcaaagggccaccacaccatgtacaattgatggttaaaagccttgtttttggtgtgattattttgttatgctgtttggttgcaagttggatttgatattgcattccatatactgtaatcaccaatcattattactgtcataatcatatactgtattataaaataaacagagcatgtcaagaattggatgctttgtgaatcgaatttgtcatgggctccacagccttgatgaaattggggacgaagttaaacatgttgactgagtgtttacacattgcttcttgtcattttacttttcaatcctctaagaaagaggaagagtgtgaagtagtgagataaactcattcaagtatctaaaccagaaagttttagtaattagtgaacttttaattttaatatttgtgctattgtgcagtgttctatagtgagcatctattgaaatggctgaaatgggaagtgattgaatctcatcaaaatataaatatggcgggttaataaaacgtttagctatcagtagtgatattcgagtgatggaatctgaatttaaaatttctactggtgtagcagtttatttgtcctctatggtttaggtcacagtgatatttgattgtttttccaagagattaaagttacatgttttggtcaggttcccgttcgacacctggtgtttatggttcatggtattggccagagactggagaaatctaatttggttgatgatgttggtaatgtcagacaaattactgcaactcttgctgagcaacaccttacttcccaccaacgtggcactcaaagagttctttatataccatgccaggcaagtgaataattatttcagtctgtttgattcctgaaattggtagaaaatagataaatttgacaaatgtcactctatggatatcaagaaacagaaagaaacaatctttcccaagttttcgagtaatttggcgactcccaagtcccaaccagagattaaatctctaatctctcaatagcccactcagctatatatacatttaggagccttaaacttagtgacatggacttatctgattaatttgtccagtcagtattaataaaacctctcattaatctagtcaccaataccaataccatagaactaaaccagtcctaaatacaactaggatgctaaattaatgaaactaaataagtggtgtgtggtgtagctcttctcctagagtacgtgtactgaatagtaattacctgacagaaaaaatacttatgcctgcttcatgaagagcttactagtaagtacaacatctgattcaaacatgtcccactaataatttagtatgaaagatcaggttaaattttcttttttgtatgtgtgtggttggtttgagattttcctcttttatttatttatttaagttgctgaaaacagttatgtttatcttgatacttaggtgattgaattactctgctttatgttatgtttgattcatgagtagctgatttatgtatcagtttatgtattacatttatgactttgacacactcagctgtcatctttttcacatttcagtggagaaaaggtttgaaacttagcggcgaaagtgcagttgacaatattacattagatggtgtaaggggattacgcgtgatgctgagtgcaactgtgcatgatgtattgtactacatgagccccgtctactgtcaggacattatcaactcggtagtgtattcttaatttataagttactgcttcattattaagtgttaaaggtgtcctttaacgtattttctatgttcgatttcctggtccatcattgtgatgtctttattgttgggttcttattgactaatgtgttaaaggattatgtatatcatggcattcattattttatgtttttttcttcctcacttctcatattttaacaaaaaaataaattgaaaaagtgataggcatacagaattaagaaaataaaagatggtatgatatcatctgtatgccccgggggcatcctgctcagattcttcttaaaaagcgcaaaaactaacctagctgtattagatgaactatctgtcaagctcttggccaattggacttattcaattactatgtctacagaaccagttgataattcccaaatgcgatttaatagctatatttcaccatctcagaggccagctacttaatttttcttttattactgataatacattggcacttttcatccagccattattaggttctctctcagagctgttttagctatctttttttctgattgcttagttgcgctttttgcttgttgatatggcatataatgcactttgtcagagttgatgagaggaagacttatcatgagctgatgaatagtttctttttccct

SEQ ID NO: 40472 - DNA, 1202 bp, Cannabis sativa
gggtaacgttgttcatattctgtcagttgacgggaggcataagctataacccagtcagcttgcgtcagaatacatcccagagcctatttggatacatcacactaaacgatgaacttttcttgatttgatggccaagctaacatcagtgttgttaataattgttgcttcaagtcttgaacactcgcttcacacatatcaaaccatacaaagcattgtttcttcttagttaactccgttaatagtttagagatattagaaaatccttcaacagaacgctgataataccctgttaaagtgagaaaattttccacttccgtcactgtcgtgacctcggccaacttttcactaatttgatttttccctgcgttaacaataattccatctttctcgacaatgtgtcctagggatgacacctcccatagcaagaattcacagttttaaaaattttgtatacagcttgtgattcctgagtcgttgtaataataccatttagaaatgttgctcctgctcctcttctatctgagagtacacaaggatgttattgataaccattataacacggttatcgaggaaatccttgaatacgctattcatgagattcgaagaggctgctagagcatatatcaaaccgaatgacattaccaaaaactcataatgactatacttggtccaaaatgcaattttttttggaatatcttctaatcaaattctgagctgatgataaccaaatcgcaagtcgatctttgaaaatacagactttccatgaagcgaattgatcaaatcatccatcctagaaaaaaatacatattcttaattgttaacttgtttagttctcatttgtccatacacatctaaaggaaaccatccttctctttcacaacaaaatcggagcttcccaaggcgacacactggatcgggtaaaccctaaattgagcatcccttgaaggtatgatttagctccttgagttctactgaaaccatcctatatagcgcttttgaaacaagtcccacactaggtgccaaattaatttcaaaatctatttcttgttgaggcgttaatcccgacaactcctcgagaaatacgtcgagaaattcttttacaactctaattacctcatgcccaaatgtttcaggtctgctggagtcaattacaaccactaaaaatcctacacatccactgtgtagtaaatctttagccctta

SEQ ID NO: 40473 - DNA, 885 bp, Cannabis sativa
aattaatacatatttatatacatctatattttttaagtcagatatatatatttatatactgatttgtatatatttatttatgcacatgtagcaaaaaattaatggctttaatttgaagttagttgttattgtataaatgtaacgtgtaaaaacttgaattgttttaaaaaatttaatattttttcaagttaattgttattataaaagattaaaggggtaaaaaatatttgttattttaaaaattaattagttgttttaatttagtctatgttaaattataaattgtaattattaaaaataattgtataaatttaggtaaataaatgttttggtataagtttagtattgttagggaagaaatgattattacagtagaatctctattacactttgttcaagtaaattatattataattgagaggataaaaaatgtacaaaaataagtcaaaacccagaagtttgaaattttttgttttagggttaaatttcacgaagcttcgaatgagcaaggtcaaagacaaacaatgtgcaatcaaaggcaaatgtcagaaactgtgaagctatgcagattattacagagaaaatcacaaagttttgagcctagattttccatctatcttctacaacaagtggagaatgcatgtatgaaacccagaaattaaacatgcaaagtaaaaagagaaggaaattgaaaacttactcactaatttgacgcctaagttcggtccagatgaagctgctcagatgcttttggtggcgacagacttgaagtaaaaatcttttttgctgtgagtttgtttagtggagaaattcgtaaaagtaaatttatgaggaagactcagccttatttataggcagagaggtgaaaaaggcaatcatttcaaa

SEQ ID NO: 40474 - DNA, 1413 bp, Cannabis sativa
tataatctgaaaaatatgtatcactactgtagctaaaattatagatgttgcattaatgttgttttcctgaaattcaatcctcgatttattcaattccgattgcaaagcataaagtaaattcgcattcatctcgtgccacagatatggcaacattattttaatttgttttttatttctatgtaactatgttagagttggctgtctgttttattaacgctctgatgattgacgtatcagttgttatccaaatttctacactatgacgtggcatccatctagatgacacgtgtaatataattcataaccatagcggatggtttaactcccagtaggtcgtacaaaaaattctgatgctcaaagtcacacatagatggtaggatgtctgaacatatcatggatatatatccaaccatcttcagtaagcagctagctcgcatgcaccaactaaggaatgcgagagcaatttctgagatatatctcgtatatctccaagcctgtaagtcatgagacaatttttacatttatgggatagactcgtgtcttcagagaatgaaggcaatcaacataatttttttttcttctttgtaattgtggaaataaactacttttctattttatatattattgaatgagggaaaataatttcatgcaatttattcagtgagaacacccatgagtgaaacctcgatctatgagtaaattgctcagagatcattgtaagagcttttgagaaagaagaaatcattcttgctcacaagtcaacacaacaaaaaggagagtaggctactaccaactataaagggtcgaacctctataaaattttgtgttttccttacattaagctatttattttctattatttaattcttctaaattgctttaatttgactcacattcattggctaaaagtgagatcaacattttggtgctttcattaagagaaaacacaaaactttttgccttatctcttttttagaacacaagatggttgtgcaaacacgaagggaaaatcagattgatacaatcaatccaatggtgacggatccaagcgtacagacacctataatcccaagagatacaccaaggatggcgtctagtcaggttaattcttagacaccaacatgtcgataaactgtaggccaagaattgactatccctctggctgggttcactccaagcatgctagaaactggaaatactagcactacaaccgagcatgctactcttggaacgaaaatctcatcctctacaaattctagaaagctagtcagagatgacaccgaagtacaaaatttgtgagatgtattggggctaatgcaaggccacaataagactctacacccttaccagcaagatatccgagcagctataaatctttcttttcatgagtaaagatgaaatttgaagagagga

SEQ ID NO: 40475 - DNA, 1372 bp, Cannabis sativa
aaatactataaatataaaaactaaaatctgttataacaagaaagaaagaaaaaatcttctcacccattaattataattccatatcctaaatatatagattatagtgagatatgcattcatttcatgattatcttgttatcttttacaaaccacccctcatcacaatattgtatatataaatatgtacagaagacacacgatattattaaaaacactatattgcttatacaaacacgtatatatattactactattaattattaaccatggaaaaagctttgatttgctcagtgctactgatgatgatggtcaatatgatttcatcatcatcatcatcgatagtattatctaataataatgataataataataattatgatgagaaaatcggaggagtatttgtatacaaaacaacggtaaaaatctttaataacttgaaggatggggtccaacttacagttcattgcaagtctgctgatgatgatttgggagctcatgttgtggccaacaatggagaatacgagttcaaatttagaatcaatttcgcaggtactacgttgtataactgtggtcttacatggattggggcaactggatcttttgatttgtttaaggcaagcagagattccttaagatgtgctaacacgtgtgtttggagggctcataatgatggtgtttatggcttcaaagaggatagcaccaaacctgatattatttacaaatgggcctaatttcacttattatttttaactaccaacatacaaccaattcatcattgtttatatttttatatgtactgttccatcaatgaataataattaataagttgtattgcggattattgtttgcccaagaaattaataatataattcctttcttctaattttaatcaccatttatctaattactcatatactatatatttatatatcaatattttagattgattggtggtgcaataagcttcacgcaatatatatacaatatttgagaagacaagcaaaatacacccattaattaaaatacacccattaattaggtgttgagagccttaagcaaaataaaaaatgaggctttttccttttataaaaatttaaatattaattaaattttgacactatcaatctaattttttttttaatataacagttaattttttattatatatgtaaactatcttcataaagtaatatttaattattaagagtatttcataaagtgctatatattttagtatttttgtagaaaaataaaaaatagaatattaaaaataaggctaattagttatttttaactttaacatgtactaaatcatgaccctaaacttttttagccgtaaagaattccccaactattaagattgttagattta

SEQ ID NO: 40476 - DNA, 1669 bp, Cannabis sativa
aagtttgtcccccttcttgggggcagataaaagttcataaaagtataaaatttcagccggactgggcggggcccagttcttggcaacgtaaaaatgtacaagcctgaaagtaggcggtaaccttggggaataagttgggcgtctcttcgtccctcaggaggcgatgaaaaacctcagccgcggaaggcttgatcccgacgacagtaacaatcttctccaattgatgagcgcatgtcgaagtcgagtgtaactcgtctgcctcccacctagtggacgggcaagtgtatttctcgtggactaccggacctttcattacttcctccaaggtggccagtttcttgggtaccttatttgaagattttgcttcgattgaagtaggggcagacatggtctgggtttgatgaagttctaaaatctcttcgtcaaagccaaagaaatcgtgatcgtgaaggtcgcggagaaactcactcatctgaaaaagaaatctagcagttagcccccaaaccaaaccctaaaataaaagaggggaatgggggtcccctaactgctggaaggaggccccctccggatgtctgccaaagatgagaaatctagagattctcctaggcaaacatcgggtgcaaatatccaaaaggaaataataaataaaaaaagagaggtgaggaaaaagggaagaaaaagacaaaatcatgaaaatcgcttcacactctcgacggtctcttggtgaagaaattaatttttggccctaaaaggaaaacgacagtaaacacacaaaaaactacggcatacgacggtcttcacgatgaccatcatatataccacaaaaatcaagtacgatttaaacgaggacgctgttctaagttttgccctaacatgcatgtagataaatactaagataaagtacactgagagatttacacaatggtgatgggcgagaagttgatgtggtctgatggtaaaacttggacaggaaacgatggaggaatatcagtaagaagtcgatgacttctggaattttttttcaaatgtgctatctgagtcgaaatggcagagtggtgaaagtaacccagcaaagagaaagtgctagcttttataggacagagagggtgcaaggcagctgtgatcaggcctcatcgtacgatgggaattggtatcgattcgcattttgtgatccaacggatgggatgaatgggtgtaacgaggagaaagggcggttaaaacatttgagcagctctctgacaccagcattaaacgtgcaggtctatcaatagatagaaagcgaatcgttgcctgcaaaaagaaataaatatcaatgatgacggtcataaatgcaacccatgcgcctagggcacgtgccactgtatttataaaagagaccgtaggtcgcgtacaagcctcatttaccatttactaaatgagacttgggggtaaatgtttcctcaaatttatcccgaaatacgtggcaatggctgcatatggcacgtggatttcaagaacacctcacccacgaaaaattggctaagtcatgaatagacaggaaagtgcatctcaaggagtgagcccccggagaggagcataaggcacacctttattctccagaagctagaaatataacaacgcatctccgggagtagaagatcccgtttgagcagtcatttcacatttaatg

SEQ ID NO: 40477 - DNA, 1600 bp, Cannabis sativa
  modified_base (1481)..(1486): a, c, t, g, unknown or other
tggaccgggggtgatgaattgagtatcatctcatgtgatgtgattttcttctgggagcttcgatctcctaatccataaccacatcaccaccgtctgataagaatcgtcagatatcaagggacccacctgaccacaaagtagacagacagagggattattggagggccatcaggctatggtgcgcgcgctggcccgtgccaacccgtgtggtttcggcgtaccacgtattctatatttgtatcccgcgcacgtggtagaggcgcatcatcatcatgccttcctttccatagtcctctcagagcgcagttctgaaatttagtgggtcataaaaaaaaattattaaaataatatttttaaaattattaaaaaaactgtataattttaaaagataaatattttcttggccctgggctaagtgggccctagacacagtcctaatccgcctatgcccagagccgagtctgctctgagaatgtttatggtatgtggaactcaatatcaagtactacttattctactttaataaatattataaaattcaataactaattataaaacaacatttaagcaattataaagcaacatttcaccatactaaacaatataaatgtctcataacaatactctccaagccaaaggggtggcacaaggtgtacacacgttagcacaactcattttcatcctctcacactaaaattttaccaaaaacatcacaactatggtggaccaacaaaaaaaaggaaatattgagtattgttgttaaatactataataccattagacattaatatctaatgaaattttacgtttacttattagcagttttgtaactagatattcaattacagaaaaagaaaaaaaatatctctccctctatatatccatttcaataatatcttgatatttaaaatgagatatttgcctcaaaagtttttaaattattacatttgcaatactaattaattgttcaatttattttctataattgcaaaaaatattcaaatttttacatttgtaacatgtggcttatttatttattgtaaaaatattgaaattattatgtttgtagaaagttattcttttggtactaagtatgtctacatatgtctaaatggtattaaatttgcttatcatttaggtaaaaatactttagtacttaagtgctattaaggaaatttttatatattttttatgcaaaaataataatttggatgcttaagtactaaagacataataatttataataaataatttaagtactaaaatgttatatacaaatataataatgggattttttttcatttttacacttcaaaatagttttttttgtattttaacggaattctatatagaaactcctattacaactagcgctacaacctaaatcgcaacaaaaaatcgtacagcaatctacatagaaaccaccgatgaaaccactttagaaactcaaatcgtaaatttgaaagaaaaaaaaattaaannnnnnataatatataaagtaattcccctataataatttgaacacttttactgcaaatatccctcttaaaaaattttaacgccccataatatacagcactttcttattaaaggagtttga

SEQ ID NO: 40478 - DNA, 1541 bp, Cannabis sativa
acttaggtttaaaaccaaaaccctatctactgcaacttaatatggaaataccataaactagtagggaattaaccaactagaaacctgaaactagcacgagtcaacaacttgaatttttcgagaaatcctgctgcaaaaactggttacccaattttacaggtatgtaaaaccggttagccagttttcccccaaaaaaccaaacaatttcaaaccctaaccaaatcgactccaaatcttaccaaaccttccagacctgcataatataccccaatagacataaaccaagcaataaaactagcacccaagctcataatcgaatttcacaattaaagctccaagtttgagttctaaaactcaaaacttgggtaaatctactaaaataagcttaaatcaacatatctaaacataattaaacatctgaaaataatatcaaacaacttcagcaaaaacaacaatcaaaatcttaaaagcatgcataatccttttttcttacaattcaagaaatcaaagatagagttgcaaagaggttacctagaactcaagaacactcaatctatgttgcaacaagcttgaatggaagagaaaatacagtagccctagctgcttctatggggtttcgaaagagaggcacaaggagagagagagagaaccctctccttgaattttcttatttttgtaaaaaaataaatgaataaaaggtttttgttttatttaatatatcagccaacaataaaacttaaaatcagatttaataaacctaattaaacccatgtaaaacaaatattggcaaaatgaccattttgcccttaccactctaaaagtcataaaaggtcacttaggggtatttttgtcaactttaatatctcaactattccctacattcccaatgtctaactatattgccccactatactacaaatactaggatgtgattctaatagccaaacactatgttccaatgttaccgggtacaaaacatgcaaaattatgaaatgctatatatgacatataaaatgcattttaaattcaaataaattatcataaataaataattcaaagttaataaccaatttccacaattaaaccttaagtatctgctaatttctaaattaaaactaagcggtctttacatttagtttattcgagttattgtactagttttgtgcttattaagagaacaatttttgattaatttttttaatatattttattgacaagaatttttttatacaaaatataagcttaaagcaattttaaaaaatctctcttaatattttcttaaattttctttttcacactattttttttataatttcaataattattttaattttattttcgtattttattttgacatcatgtataattttttttctaataaaatttcatataactctttattttttaatcttaatatttaaaatatatatattttttattttatatgtatgtttttggagagtataaaaaagaagaaatgaattaaaaaatcagtataaataaataatatatattttaaacaaaataaaaattattaaaat

SEQ ID NO: 40479 - DNA, 3435 bp, Cannabis sativa
aagaggagaatagtttaaatgtgaagtcttaacaaaattaaaatcactttcaaaagggtatattttgcaaagaatgtttgaatagaagtttcacctaacatatcatgaattaaatgcctatgatgttttaatggtcatgtatgagtttttttgtaaacgtagtctttatgaaatttgcattgataaagtattgtcttcttgaagatactgaaaaggtttcctatttgtgtcaatgtcattttactatctgtacagatttccccttggcatgatattcctttgcatttgggagacaacattttcaattttgttgttgaaatacctaaagaatcaagtgcaaagatggaggttgctactgatgaatctcacactccaattaagcaggacacaaagaaaggaaagcttcgatactacccgtaaggcttcgcttaatatgttaattttctctatgagcttgctagtatatatgtgccttaatatatgtttctcatatttgcagttacaatataaactggaactatggattgcttcctcaaacatgggaagacccgacattggctaactctgaagttgaaggagcatttggagataatgatccaggtttcaatttgatgttttatattcatttttctgcatgtccttgttccgtgttaagtctaattttcggtttatattaaatttacagttgatgtagtagagattggtgagcgtcaaagaaagatcggtgagattctcaaagtgaagcccttgggtgctttagctatgattgatgaaggtgaacttgattggaaaatagtagcaatttcattggatgatccaaaggcgtctcttgtgaacgatgttgatgacgttgagaaacatttcccggtatgtttatcttctacttatttatgttttaaggagctgaatcaaactgttatttaatctgagaatataagaagttttagaagtagttttgggaaaacggttcttggtttatctctacatgatgacatgccttcgaatcttgatttaaatgcatttgtttgtttcctttgaatatattaggatgctcatgaatagacaaaacaatatcataaacatccgagaatttaactttctcccaaatttctactgttccattttcggtacctttgaaagttcttccatttctctccacaacaaaatagccaaaaggatggccacagtagctattgcccataatctagagcacctcttattctgtacaatcttcgaacttcgatataggaatgaaattacaaatgggatagagatagccaatggggctaaatgctaaagcattgagtatttgcagggaactctgacagccataagggactggtttagagattacaagatcccagatggaaaacctgctaacagatttggtcttggcaacaaagcagctaataaggtatatttcaactcaacttttcatattcaatatcagaggctgtgcttgtgcatatacatatttatataacaaaattgtattatgcatataacaggattatgctcttaaagtcatcaatgaaaccaatgaatcatgggctaaactagtgaagagatctattcctgctggagaattgtcacttttatagagagagcatttgattatgaactacacagcttttcaaggatcattcacttttaaaagtcgtgtattttttttattatcttgagtaataattattgaatggggtccccattttttgccaattgagcttggattggataatctcctctaatttcaaggaaacatgtttgaagaacagtactgctttggaagtgaagctataatgtatggtctttggtggggttttctctgttcacaattgaagctaagctacctttaaattctacctctattagtagaataacatttcatttcttttaataaaaatgtgattagtttccatgtttactacttatactacctcacaactcaatgaaggttaaatcggaacaatgtccaaattgtcaggcggaagcaaaactgcacaaatcttacgcgaagatgatcgaacaaactgttaaccacaccgattatcagaaatagtaaaaggcagtgtcaaagagggtgcaaaagacttattgttacaaaataaaatcaagcaaaccactaaatcaaccaaaccttcctttagtcttatagcttacatgttttaagttgatacattagttttaatcacctaatattagtagaagtaagagaatataataattttctttaattacatagttaagcttcttttaataaataatattgttatgttaagttagataagcaaataatgaagttaactcttacttaaaacttttgttacaaaagaaacaaattggtcatgaattaacataacatattcttgaagttatgtaatcctccaacttggatttggatataaaaaaaaattaattttttttatttttatacaatattttataaaaataataaaaaaataatatttaaataacatcaaaccaatataaaaaaaatatacaaataataaaaaacaaccaacaaaagtacaacatagaaatacaaaccgtattttctgtaaataaaattttaaaaacagttaaaatatttaaaattctatatcaccttagttttgaataaaaaaaaatgttaattttttgtatttttgaaataataataaaaaaagaagtctttattgggcttttggttcaatttagtgggccaataaactgaggtgagggcccaattatttgaacaaaccattccctattatgacatgagatgaaactgaaagaaaaggtttgctggtttatttgaagcatttggaattgggagaactcagaagaacagagaactgaactaccaattcaggtaattctctttctactcctttttcaatttattcttcaataaagtttttccctttttaaaaaaaaattataatcactctcctcccctttgtgctgttcacaagttctttaatttttcgaggaactcagaatttgattatatatatatatatatatatgtgtgttttgtatgtatgagtgttttctgaattcataaaaccattaaaatatcacccattaattattgaaacatggtttgttcaaattttatttattttttactttttatgatacaactcttttttcctttcttctgggtgattccattctcttgagtaaaatccccattttcaaaattggaatcattgtaatgtaggaattctatgcttgaaattgtatgattttctgtatttggttatttctgggcatagcctagtgtagtcaagtcaagtgattagcccaatctgatatttgtgggcataaatttgaatcttgtttcaaagtttgctttttagtattaaaaagagaaaaatgcagtaaaaatacccgaaaaaaaaggcagtttttttaagttggagtcttattagcatgaaagtgaacattttg

SEQ ID NO: 40480 - DNA, 930 bp, Cannabis sativa
taaatggtagagaattgagtcatatataagaacatgagctactccactcattgtcaattggttttgagatggaaccccataattttcaacaagaaccatatctatattagagaaagcttaatctatgaacaaaaatatttacttctagttcaagattcaatagggccaatcatatatatttatatatatatataaatatttatagtagcttatagttaccccaaaaataacatctatagcagcagcaagccaagaggatagaaaatgattgcacatgtcacaatcaacaatattaattgataacttttgtctatgatatttaataaaattagagtcctccattgttgctatgtgatgtgttccttcacaccttaacccagttaaataatcatctattaaaaccatacaaatttgaataaccatttaattttaaaggaagatgaaattactatccatcctaacccaaaaagaaagaaactggaagaaatacattaccttaaggagatatgaagaaaaaatcagagctttctcattatggtgaaggagaatatcatgtgaaagattccttgagcattctcaagaaaaagaagatgccccatgtattgtgaaagtagagttctttgtaaaaataatcaatttttttttgttataatatttattaagcttattaattggttatttttaaattttcaaaaaataaaaaataatattaaagagggcattttggttattttaaaaatttatttcattaaaattaagttgaagagaccttaaccatcttcaatgagagagatgtaaaagttgagctatattttgtacaaaaagtagttttgtaatatttttacatcaatttttattactgtactccaatacataattgtaatcttgatacaaaatttaatatattatttaatgcttatttaataattt

SEQ ID NO: 40481 - DNA, 1891 bp, Cannabis sativa
  modified_base (995)..(1001): a, c, t, g, unknown or other
gagataactgcatgaaggtcaatcataaccgacaaagaacaaatttatatatatggaaatagacagacagcgttaattaacgagaaccaggaaaaaatataattggcaaagtaacaaaaattaatattttccatttagaaatatatatatattttaatttaatcgtgtagtgttgctaaagggtatctatatgtatcttctttagttgtgaaacttttatttattatgatgatgacccacatcatttttatttgtgatttaaaataaatgcgtgtgtaagaacttgtatgctcctaaaatgtatatattcacaaaaatatatattggaaggtatctgtttaattcttttcttttttcaaaaacaaaaacaaaaaagaattgttggaattgtgaatagtgaatagtggagtgacaagaacaccttgttggcttttggaaatttcaggtgggaaattgtgggatctgaaagcggtgttcaatatggcccatttccagtgcctcataaaggactaccagtcagagtttggagagaatctctatagctagctagctgcaactgcaacctctctctcttaatcaactaaataaaaacaaaaataatatttatttaccaatttttataatttctttattcaaatttttgttatattatatattatttgattaataaaaaaaaaaaatccaattatgatatttaaaggacaaaaagatgccaatgttttattgtattttttattttttaaactaaaaatatattcctttaaaaaaaaaatatattaataagaaaactaaaagaaaatatttaaaaaaaaagaaattaataagttttattaattgtaataacatatatataatgataaaaatatattatcaaaaacattttgaccaaaaccagataacatcttaattcttagaatttatgtaaaatagaagattatattgtcaagtctaatattctagctaaaacgtaaaaaccaatatatatatatatatannnnnnnatatataaatatatatacataaatcatatcaagcaatagctacatatatatatgaatcaagatccctgtcaaaatattgtattctattatgtataattaatatgatgatcacacatcatttaatttatttttgtaaagtttactcactaaaacttacagagcaaatttgttaactacaaaaaatggtagaactaattttttttaaagaaattattatcataaatattaaatataattaaaataactaaaaaataataatgacatattattattttttatttatctgaatagggacataatattaattataagaatcattgaaaagaaagagcatatttataatttttcttctagagtttgaaatttttaggttaatatgaggtataaaaaatttataaattatatatttaaaaaaaaaaaaaaaaactattgttcagccaaaataatagtaaaaaaaaaagaatttaaaaaaatgaaaacttgtagttaatggaattgttccgttagttttagtgagtaaattacaaaaataaattaaatgatgtgtcattacggtattgattagatatggggtggaaaaaattatccccgctatacatgtctacgactccattaccattcattaatatttacatatttcatattaaaagaagcatgaattttgttaatcatgtattatagctaccttaaaaagtaaatcaagatgagtaatttacaaggttcacctgtaatggaaacgcattccagccaattactcagatttctctcagaaacaaggataaataactccaataataattaaggtcaagatacaacaattgaccttaaaattttgataattcaatcaaaatctagatcgatctaagtccctttaaatttgaagacaagct

SEQ ID NO: 40482 - DNA, 1435 bp, Cannabis sativa
tgtcaaagtttggggaaaaattgctaattagcccttttataatctttattaaagtaaaataagtgggactcgttatgaaattgcatcaatagcaatatcacatctcacaaaagtgttagtcaccagatgtaccctttagcaattctccttaaataataattataaacaactgttaactatttgtagtactagtcatcatgatgcctaataacaatactcgttaattttataactattataaaatattgttaactattcgtaaagtaccacttcgtggtagtgttaaatatcactagtgtctaataacaatactccttgattaaaataagtgaaattcgataataaattacactaataataatatgataaactatatcgtgtggtactaaacaccaaagtgttttttaacaattttatgttggaaaagtggggcctagacaaaaggacaaacttcaattattagttgacaaagagaagaaatgaaagttacatacaaatatgtttttttattgcataagttagagttactaatcaagttaagcccataatcatcgtgatcaagaaagtggattatgttatggttttgttcaattcataatgtttttgccaaaattttattttatatgaaaaaagtagttaagaactttttaaacaacataatgagtgttttgtgtgattgaaaactttctcaaactttttcttttgggattatttattgtttatctttagatttaagctagtttcaaattaatcatagatgtgcattttttaaataaataaatagtcaattttcttcactttaattttaaatttaattattagcatgactctacaattatttttgcttatatttaaattaattaaatttatttatgaaaaaaaaataaaagaattatcaacgtccctgaccaaagccccaatgtttagtctctcactgccgtgggaaaggaaatggtcgatgcagtgattaggcaaaaaatcgttgaagcttacttcttgattcattcattgattagtgggtcggacaaagtccaacgaacaaaggtagggtacaatttaaattattttcttttatggagattaatgttgaccgtgttatctgctgtgagattggttccatatttcccacaaaattatgaaaaagagttattaaagacgttcaaatgtgtaaattgccacacctcaaaccaaaccgtattggacatgaaaaaagagttgattaatgatagacacacacttgataggaattttctagcaattaatgaagaaaagtagcaaaagaggaaaatagtagctgatacattgatatgaaagataaagagaacaaggtattgggtattcgagagacccaactgtctaccaagagctaatgttcactttaaaaattaattctctacccaaaatccctttgaaactctcatatatatatatatat

SEQ ID NO: 40483 - DNA, 1443 bp, Cannabis sativa
atttaaaatataattattaatttttaaattttaactttaatttgtagactttaaagtattgtaatatttaaacctatcattagttatataaaatacatgttccttttgccaataaatggtaatattactaccgttctcatcctctcccataatattcctcagcctcgtgcccaacaccaagttttctgatggatcgacctccacctccgtcctaattctttgttgttcctttgataatctacatgtatctttatcctaacaagagccggttcaaagtcaagaccttggcccaaaggctctaattcttccgccatctcaatcggtattggagctctcgctaattcctctgcaacaacctcattgttagcaacctcctgctcaaggttcaaagcttgaaactgacattcaacatcttctttattcggattttttaagcaatgttttatttgagtaccaaatctcacccatggtccatacatcaacaccgttctattgaactcgtctgtgatgtggtgtctccttcatttgcaactctgtttagaatgacccactaaccacatttgaaaaagatgcatggaagattctcatacttgaagtagcaccagaggctaacttcttcctccatcagaaggaagagacccatcagaagaagccttgataaatgaatttccacccagaccctgatgtaatccactgtcatgaatccatttctccacatacgatcaatactaaccacggttcctatcttattagcaataccagtagcatttttgttagtaaaaaaatgaggagggacatcatagaatcttacccaaaaaggcattatatccatagccgcagagctccaccttctgttcgttgacattggcttgagcatcaaatgtctattgcacacagaccaagggctccgagccacacaaaatatgcttcgctcttattcaaaaaatacagggtatatatattgttagcctcttctttaatactccacccctcagataatctccattttcgtactagaaccgatcgaagaagaccattgaagatacatctcctggaaatgattcttcccatcaccgattgttccacaaactccttccctacctctttatcaagagataggattagagtttccataacaacaatctcatgttgctccaactctttgttttcttttctatccattgttgacacatgtgcagactccatgactaaagatgcaccgaaagagaaaaccacgaaactagtgtatcagaacacacgggtaaaaaccctagatcactgcaaaaggatcaacaaatattcttggtgttgaaaagtaaaaccacgacataaaaaaaaccttgtacggaaagcattttttctctgatgttcccatgacgtacggttttattttcttagtttttaaattaaaatattgtttatatatggtggcgtttggtaaca

SEQ ID NO: 40484 - DNA, 1582 bp, Cannabis sativa
atatggaagacaagcatatggctaatcgctctcttcttcgtggtgtttggtttcatagagattatgtatatgtcatctgttttttacaaattcacccaaggtggttacattcccctggttttttctttgttcctaactgtagtcatggctatttggcactatgtccacaagcaaagatacattttcgagctcaagaacaaggtttctactgactacctaaaagaattggctgccaaccccaacataagccgtgtcccaggaatgggacttctatactctgaacttgtacagggcattcctccaatctttactcacttcattaataacattccctccattcactctgttctggtctttgtctccatcaagaatattcccatcagcaaagttatacctgaagagaggtttctctttcggcaagtagagccaagagagtatcgcatgttccgttgtgttgttagatatggctacaatgacatcattggagaacctaaggagtttgagctccaattggtggaaaatctcaaggagttcatccggcaacaaaatttccccattgaagctaccactgatgatgttgatactacaacaactgttatgcctgatacatctagtactgctatagcgagcaacaagaaaacaaaaagagcatctacatcaacaattcacattgaggaaggattgggagcaacgccatcaattgatcgagtttcattggcttccaccacaccatcatttaataacaagtcctcaaactcttcaagtcgaatagtgtctgcacccctacggggagctgaggaggagatgcagtttgtgcaacaagcaatggataaaggagtagtttatctcttgggagaggcagaagtggtggctgctcacagatcctcatttctaaagaaaatggtagtcaactatggctatagtttcttgagaaaaaactttaggcaaggagagaaagtcatgtcaatcccttctacaaggcttctcagggttggaatgacatatgagatatgatcccactacaattatatggtaactgtgtttggtgtgtggatgaataagactaaagactctgagtgattaattgatttcagacatataacttatacttgcgcttgctaattaattaaagacattctacttgagctttgttatttaaagtgaattaatgaaacagatatttcttcccccttcccttactgtgtcaagttttggcttttcatgttaaacattattatataaaaaataaaacatatacagtagatttgccaagcgaaataataaagacaaattaagtgtatatgtgaacgacgaaagagatcgcaatacctccagccattgatctttgagcttcaattctagtgtagtttcaaattgggtaatcgagcttccaagcgtctctactctttttaaatagaatttactattagtacaaaatgagtgaggaacttggggactaagaccctatatttataggtgatgaaatactccataagtatctgtgccatattaattatcagaatattttgacaattgatttgagaaatgaatgattcattagattgacaactgaccatatata

SEQ ID NO: 40485 - DNA, 1756 bp, Cannabis sativa
  modified_base (1575)..(1579): a, c, t, g, unknown or other
tcatggacaataaagttgcacctcagacaaaattgaggtaatttaaatgcatttttgagaatatgtttactaattaaattaatttttttttattattctccatggtttattaaattttgcgtttaactactattgcagtgacaatttgggaatgtacgtcatagagcatattgagcataagttattggatcgaccattcgatggagtagatgatgaccatatgtcgctcttccgctagagattgggagtaaatttattctatcagaacttgtcatgaactttggatattttatttattatatttgttgaacaatctttacttttaggcttttcgatttgaacaatctatttatcagtaaaatcattttatttttaatggtggtttcgatataactcaataggtctaatatagtgaagaactatatgaaacttttttttgccacggatgtttaacaaagtccaaaaataattctccaagaaatacataacagtacaacacataataatattaaatttgacattcatgttcatgctacaaattgaaaatattttacaccacaaatattaataacaatacataatagtccaacacatacgaataaattaaaaattcatatttaacctcggtagtcgcaagtgcttctatcgtgccccttggcaccgctgttgtaacaatttcgtggtatgataatccttaaaccattacaagcagtttggtttgacttaattcttccaacaatttgcttcttgggttgccctactggttgcttctcaataggcactccaactgacatattctttatgtcatcaggcaattcccaatcatcctcgtcaccaactggcataattgtaccttcatatgtgctcctctaatattgtattgtgtaatatggcgagcatagtgcatacatgctaatacttcgctgctgagctgcagcacatgcatgaggacaaggaaacttcatgcactggaacaagccgcaagtgcaagctctgttcctgcaagtccactacgccaccggtctcaactgttcctccaaggtgaagctagaacgtgcaaggtccacatgtgtcaatgcttaaataccaagatttttcaaatttcaatgccaagtcctcctccatttctggtgttaggatcttcgtccacttgtcagctttttcctttcgtgtagcaaaccactgttcgactttggacatcaagaatgttgcaacaacagtgatcgggaagcctcttgcgtctttagttgtgttgttaaagctctcagcccagttactcgtcattacattgtaacatacctttggaaagtacgatcgaacccatttttcaaatccaatttcctcaagatattgtgcaaccgcaacattcattgcccaaatgttctcaaattctctgtgaaactctaattttgaatacgtgtaggcacacgtgtaaatgtgattcgtgaagacatcagtcttgaacttgttgttgacgttgataataatgtggttgtagcatgcagcgtggtgtgcatcaaggaacacgatatccaaagcacaaacaatgttttgatgcctattcgaaacaaaggnnnnnttctcaacatcaccaatcgtttctttcaattttctcataacatagttccaaaattgttgttttcaatatcaactatagcaaaagctatcgaaaagagacggctccctgcatccagtgccactgcacacaacattttcccaccatacctagtcttcaagaaagacccatcaatgcata

SEQ ID NO: 40486 - DNA, 1136 bp, Cannabis sativa
ataagttattatcacttaacaaaaaaaaaagataacctcaaaaagagaaataatactaacatgcaccaaatcaacatttttttcgaagagactcgaagagactactcatcaccaacgctaatatgagtttagattgtttgttacctgtctttggaaaaaacagttgctcctgcatttactaataactctgccatttgataaagcccttctgaagcagctatgtgaagaggtgttctatgatcataattcttcacattcgggttaatttctttagccaaaacccttctaagaacatccaaatcccttttagcaactatactacaaagaaaattaccagtgtcattgattgtaagggaagcaccggcatcagtgagcaaagattcaactcgatcatgaccgttctttagggcttctagtaaaggagtgttaccaaaattatctgttgtaacaaaataaattaattattagttactatagcacaaaaaaaaatcacaatgatattttgtaacacaaaattatcttaaaaaaccaacctattttattgacattaactcttttttcaattaggaaagcagttatgtcttcatatcctttagatgctgcaacatgctaccaaagaaacaatttcgagattagacaaaagtataatttaattgagattagtagttaatcgagtgttaatttataccatttttctcgagttaagacttgataaaaagtataatttaactgagattattaattattcaagtaatgttttattattctttaaatgttgcaacatgttaccaaaaaaaagaaagaaaaatcaactatattgaatcttattttatacatacatgttatttataggtttgatataaaaaaaatatttattaaaaaacagaggaaaaaagaaaaattgtcataatagtcttgaaatcttaccaaagcacatctaccattataatctgtattatttggatctgctccagcttcaatcaagcgtttaactcggtaaagatcgccaacataggcagcgcagttaactctcgtcgccaattcaagttcatgagttccaatataaattgtgatatccgattccaaaagcttttttcgaatactcaagtcttttccctatacaaattaagaaaaaa

SEQ ID NO: 40487 - DNA, 1738 bp, Cannabis sativa
actgttgaatgtttacttgatattaaagctatacgatgaacaactaaagtaaactcgttggaaatggttttaacagttttttttttttgccttgtcttcagtttcgatcacctttttaataactcaagaagtaactaaaattatatcgcacactgcattttgaaatcctctgtatcttttatttacttatgcatttttcttctttaatatggttgcaggtagctttggatattgactaccatcacaatatgttgatatcccaccaaaaggtgaacccgaaggaagttattgttggatggtacgtcttttattgtatatgcacttatacacaaaatatatattagttatgtttttttaagtatttctttagtctaatgattgtattccttctcacatggtatgaaaattttgacaatgtgtaagtgttgttgtttctgatttatttagcgttttaaattttaagcgagaacgcttgtcactggcataagtgttatctttgtcatttgatgatgctctttagatcatcaagagttgtgtctatagtgcctatcttttgaatcacttctgaagatgtaaaatagtttgagtttccttttcttatttttgtacatgaatgtttttgtttcatgattcatttagcagcctcttctaaaataagaaccattttccgaaatctattatgtttatgcaacatttttttattcttaaaaaaaaaaatctcaaaactttcatttttttttacaattttgcctttgttaatatatgcaggtattcaactggcttaggggttactggtggcagtgcattgattcatgagttttattctagagaagtacctaacccagttcatttgactgttgataccgggtttagtaatggagagggtaccataaaagcttatgtttctgctaatctatctcttggagaccgacaacttgctgcgcaatttcaagagataccattggatcttcgtatgatcgaagctgagcgagttggatgtatgtatttacttaacattaccactcaatgttttattaagttcttgttatgctcttcatgtgcatttgaagttttttttttttggattgataaaacaactattatgtttgttaaatatgctcattatttttctgtgaatgtacagtataatttatttagatattgtctattctactttatgtgtgatcaaatcattttaggaaataagaaaatctagaagaatgcttacttcgttaaatttcaaattaaatttctgattaaggttgttgtgatgtgggatcgctagcatctgttaatgactatctgattggaacctataattttaaataatgccagatgatattctaaagacgacagcagttgacaaaatcccaactgatctggaaggaatggaggccacaatggagcggcttttagccctcattgatgatgtttacaaatatgttgacaatgttgtggtaaggttttattgatttttttggcccaccacacccctttattgtttctagttaaatgctgtaactgttttccattcaggaagggcaaattgcaccagataacaacatagggagatttatctcgagcactctagcatctgttcctaagttacctccagcagctttcgataagcttgtcaatgacagtctgcaggtaaaaacaaatgcgcgaacttttttattatcagtgttgacattaagtacatgggtgcacacgggaattttaaggttgatccaaccca

SEQ ID NO: 40488 - DNA, 1805 bp, Cannabis sativa
aattagataaaagtccttaaatccaacaatcttaatagttcagggggcatttttaacgaccttaaaggttcaggggcaaaaatcctaattagcctataaattatgggaaaattgctcgtgaataactttcacaaaaatctgaccagaaattattgttttgtagcatgcttttaaatgaaaaaaaaaaaaaaaaaaagctaacggggtatttttcttattaaatattaagtagtagtaattataataatcatagtaatattattcagcatccggttgttgattagtcatttttgtctgatttatcatccatattatacatttgacatatttcatatttgtttaatatgtatttattgacagtaacatgtgttaataaaataaatttttggtgtggaataaatgtgtcggttcgactttattggttaatggttattgtgatttttgtttgccataagattttttttttttcttgacaaaacataagattttataataatgatgataagtataaatagtataattataattaagctagctagcttctcttttttgttttgataaaaatagagctatatatagagatcgatgtaggtttgaggattacatatctttttttatgagtcaggtaataaagctgtatttagcagaagattctggaagagaataataattatagcaagctttttattttatacatgtaacgtcattttgaggtaaaacttctttgtttctttctctaccatgagtatgaattggggaattgagatatttattttttattttgttctcttattcttagttttggaggaatgtggtgcgatcaaaagagattttaagaaaaggggcgtgcaagctaatatccgacaggagaaagacaagtatttgggatgacccttgagttattcatggtacggatttttaccttaagttcaattatcgtcaacagcggggcttgaagaaagtgtcagatttacttttacctgacggaaattgggacagacacacccaagctacacaacctttttgaccaggaaactgttagtaacatcttaagaggcggtaataatccgagtggccagaaagggataggtggatctggacaaaagaatcaaatggtctattttcaaccaagtctgcctatcttattcaagcccttgatcgggctcctttgtgcaacattgctccgacactatagaacaaagtttggaacttaaagattttggagcaacacaaggtccattggtgaagtatcatttccaatgctctacccttaagagcccctcttgctaagagaatgggttttgaggaggtttactgccctatttgtggggaggctgaggagacaacatagcacttgttcctgtattacaattttgccttccatctttggcgatcttctccatggggagttatgcctgttctggattcaggaggccgaatgtgagactgggttacttttctatggaatcttaaatctagaggagttgatactgatgagctattcctctatgactcgattgtggtagatacaatttggaggacccgcaacgacaaggttcataataaatcaataggtaacattaaacactatattgactctatttcttcttgttagacagattatgactcctgccttctttcccctccacaatctgttgggactcaggcttggtctccgcgcgcaggaagattgggttaaaatcaaatgcgatgtcaaagtcggaggtgaaactatgtgtgttgtggcgattgcgagagaccataacgaatcagttttgtgggtggcggcaaaaaggctacacttc

SEQ ID NO: 40489 - DNA, 1454 bp, Cannabis sativa
attggttgagtgttttcaaaaacaaaatttgaatactattttgagttttaggctaaaaaatgaaaacaccatttttatgttttttgtgttttcaaattagtgttgttagtctcaaagtattttttagaattacctctaagttcaatggtataaattattgttaaagagataattggtgcatcaaatctcctcttaataaggctataaattattgtattgatcttatgatctttgtgccttattaatggaattctttctttttaaaaaaaaataaaataaaataagtatcttcaacggttgcactattttagcatattttttcactaatttattgtaacaatttcattaattcatactaaatatgtcatcaaatgaatattttatgtttaattttatattatttacattaataatcataattaatataattaatttatgatataatttatatattatcaataattatttatgattattttttaaaataaataaaaattatcaaacaagagctatactgagaaatgagaatggaataattagaatagatatagtctattaattgatttacttttagggatgagattcattgtatattttgggtaattaaactcttaggaaattaattgggtgtgtaataattttctttttaaaagtcaataatctaaaggaaacgaattgaacatttttttctttttcttttttaattataagggaattgaaattggaaacaaaaataacaattcaacttttattaaaaaaataataatttaattgcaaattgagaacaagaatcttgaagacatcaattatgggggaaaacaatctgcaatattctatgataaattcaacatttaactaaaaaaaaaattaccaaacttaacactccaaaatattttcttatatcttttcaaaatatatagtatttaatatacacgaccattaataatacaaaaataataatcaaattcagccttttccctaactctatataaagactccatataacaatgaaacaacaacaatttacatatatatcttgtatttttagagtataatttttcttttaatttgagttattaatataaaatatgggcaagtctctatgcaacattctcctagtgaccatccttgttctcattgcctcaagtaaatattctctctttttctcttatttccattcattatctactttaattttaattattttttttatatatatataatttttgtgttgattaattaattaattaattcaggtgattataagatgggaatgatggtaatggggactagaatgtgtagcacagccataagaggatacacatgcaatgaaggaggatatgacttaggatgtgagaatgcttgtcttaaattatttaaacaaagcaaatcaatttgcataccaagtaactctaatggagcttttacttgtgtatgcaaccatccatgttaaa

SEQ ID NO: 40490 - DNA, 2143 bp, Cannabis sativa
  modified_base (1805)..(1805): a, c, t, g, unknown or other
gagagtgtattaaaggttaggaataacgtttaacaacaagtagtgatgtgtagcgatgtattttataatatgctatacgtttgttgtctgtatatgattttggcgatgcttatcgacattgtttgcaatatttatcgatatatttagaaaagagtgaatggggaagtcagaaatgacatttaaaaacaagtagcgatgtttagcgatatagttgccgatacgttgtaatgttgcgtgcgatatttcttgacatatttgtgatctaaattaattttttgttccatttttgtttgcagattcaattgtctttgtagttgtactgtatgattgggtttgggcaattgaaggtttcaactagatattcaataacccaaaaagtaagatgatgtttgaggctgacactactttatagaaaatgcatgaaattttgtatgaagagttggaagtagaaccttttgtatatgaactgaaaatagaagtgtgttacatgtacatgaaagacaatatgataccgctgaaggttttagtgaaaaatagtcaagtaagatatgaaggcaaaaatgagtgtggagaacttgatgccactatttgtgactaaggttaagaggcatgagaatttggagcctaatccgccaactgtccccctacgaagtgttgttgggactttttcccaaaaacagatcatgcggtaggtttgaatgagcagacccctactaatatagatgagcatagaactgataatgcatttgatcaatttgatgagtttgatgctccttcttacaacaatgatcccgtggtagatttaaacgagaatggtgatatcgagttccaggttgatgaagctgtagaggtacctactttgaggttataactacctccaaggaaacagagtgcagagtgagaaataaaaaaccctcgtagtgaaaatcaccaaacaccaggcactagtagcagtcgaccaattcctccttgtggtactgtaccatcaaattttgaagtttgtacaaaattcaaacctcttatgtggacaagggaagacatagaggaaaataatgtttatacaacttctcttagtgttacaccttcaaggggaatacatattggcaagttgtacaaaacaaggttgaattaaaaaatgtaatgggacgatttgcattgcaattgatttttgagttcatggtgaggaagtctgacatcgatgtattttaagtaacttgcaagaatccaaattgcaaatggagattgagggggaggaagaaggcatgttgggacatgtttgaggtcattgtgttccacaataaacacacatgtaatctaaattctagacatgttgataatcgtcaagcaacattgtgggttgttggccaccttattaagggaaagtacgtattagatggaactaagtacaagaaaaaagacatacatatggatatatttgacgaatatagaatcaagattagttatgaaaagatatggaggtggagggagaaggcacttacatatgttaggggtatgccaacacaatcttatacgaagttacctggttacttgtacatgctagaatagaagaatccatgtactattagaggacacccaaaatttatagtagttctctccccatgttgcgatggtagtagagctacgtctacttcgattttttatttctcacaagaattacagaaaaaagctaagtgtttaagctttagtttctagagagagaaactagagagagcagttttgaccttatgggtagttttatgaatgtaaaaaatgaggttatagagctctccttttataggtgaagnaggcccacaaaaataggagaaaattacaaataagatatttttgaccattgatgatgatctaacggtaaaaattagctcttgttggtaacttggagcttattttcataattcccttgatattgaattttaacgacgataactttaaaattacgtctggtgtgtgagacatgacttcatagagcatttaattagcttcaaatgaatcacgtcaattagatcaaagttgagtgagttatggttgttttactgaaggcagttcatgacccagccaacagattgacatccaacgaccaagttgacatcccaatgaccatgttgacatatgacatcaacctgga

SEQ ID NO: 40491 - DNA, 1201 bp, Cannabis sativa
agactatggtgcatactttagattattttcaagtagttatgaggttactttccctttctcatcagttgtctcaactgtgatgaattcttgcggacaagcttttatttgaccattaaaatagcgttccaacacaaatgatggcaaacaccatagtcttccatagaaagaagttgtttcgataagcttgagtgaaaagagagagtcgccgaggtaggtgtaacaacattatggtcagcttgagaggtctaactctgtcgagtcgacattggcgaggacctgaatgctctaataccaaattaaattttgtaagaaatatactgtgaataaaactcagtgatatgaccattatcatcaataggaattaatctattttctttactttaatttcccatgaacacggttgtgtatttttcgcaatgaatcatgtttacggtgggataattgaaaacaaaacatatacaaatattatatattgtaagttaaatgaaacagttcattttgtttataaaagttcatacgatgattcaactcaaaatgaaagtttggaagatacatatacaatcaaaacatgcattgtagtagttgatttatgtatgtatcatcaatctaatctataaagtagagaggttatttaatttattcattttataaaattacaagtgttatttattagtgtagtttctttcttatgagaaacagtttcagctagaaaccagataagacctagcaatacgaccattagctcctttgggaaagaaacccccagccacacgttcattaccatttccatacacaattctaagtatctcggctggtgtccttccatacgaaagcgagtcttgatttgcagagagtacatttccagaaacttttccttcagcgcctaaatctattggtaccacaagcccttcgtctgtcacatcagttcgtcccaactgttccttagctcagaaattcgttctgtgaactctgccacagttatgttataaggctccactgtcatctccttacgctcatacaacaatgctctaattacagcgtcttgccctgattccacacccaaaagacccgccaaaagctgaacgaacaattaatgtaaaataattaaataattaagatttttgtgaaatattttgaaggatagagaaaagaaaactgttggtagtgctctaacgtgtgtgtttttcttttttgtggtagt

SEQ ID NO: 40492 - DNA, 1582 bp, Cannabis sativa
  modified_base (1528)..(1528): a, c, t, g, unknown or other
atagattttaaaaaagagggtaaaaataaaagagaataatataaaaaaagtatagagtctaatttcatctcttttcatttggtatttgcacaacaaagtctttaaatcagcccatttcagtataaaaagaagtctttgtttttagtttttctatcttgttttaataaatgatgaaattttattaatagcaattaattaaaaaaaaatagtctcaattcaatttggacatcttttccgttggaaacatgatcatcaggattataattaaaaaagaaaaaactaaataatcaaccgtctttctcagatcgtttgacaaaaaaactaaaaataaaatcagattaaaaagattgcaacatcacagttaaattcaagaacacataatatattcagtttcatctaccacttagaagacacaatattagaaactgttgtagtagattcattcaacctcgcaacttgagcattcaatactattgtgcaaggtacataactgtactactaacaattctttcagtcgcaaagaaattattaatctcaaccacttacagtaatttgataacgagtcatcgaagaacaaagaatatcacaaactaaacaataccatgtcataaaataaaacactcaaaattatgtcacaaggacaagactaatcgtagtagtgaaaattgaatcgcaatattaaaacacccaagctgcacctatgcctatgaaaggctagcgggcctggccgaaaaaaaaaaataataacctcatatagctataaatttaggaacaagaaaccctaattttttaaaggtttttttattttatttttacacttcaaaacaattttttttttcatttttacgaaaaaattacatagcaaccaacagagcaacataaatcccaaataaaatcaacattgcaatgtacataaaaaccacagagcaacccaaactgtaattttggcaaaaaaaaaaaaattaaaaatagtatataggataattctcccattttcaattagcctattttaaactgcttttagttatccaaaattaaaaaaaaaaattaccagtattaagaaacgagatttcatattgggattttttcaaaaaaatgggaaaatatagtagagttttacttttttatgacataaataaataatacacaaaaatataggattaaaaataattaaagtttaaaatatggggaaaaaataataaatgaatttgataaaacttgtaataataaggttcgctggaaaagtcactgggaaaatcaccagcggtggaaaacttgttggtgtcagaaaagataccggaaaagttagtgtcacaggaaaagttatcggaaaagtcactaaaaaagtcactatcgccagaaaagtcatcgtcgccggaaaaagtcactgaaaaaatcaccagaagtaaatatcttagatataaacaaaaataatactggttctataacaaaataaataaaaataaataatttaaatcggttataacataattataactagttttgtaacataatgaataaaaacaantaacacaaaataactcaaatcagttataattaaaatagttacggttctataaca

SEQ ID NO: 40493 - DNA, 1557 bp, Cannabis sativa
agggcacaaaacccaacactaatctctacccttaagctcccaaacaccattatacataatgaacgcaaaaacagttgaacctgtcatccacaaatatataaacaaaattaaaatttaaaacaaaaggctaacagaaaagtgataaaaaatcctgataaaaccataaatctgtcaagcatcaaacacaataagacctatatcggaccccatataataaattcaaataaaaaactatcagacacaaccatcagatgcatattagaccaatatcggaccccataaaataaattctaacaaaagactatcagacacaaccatcaaacccatatcagacctatattggaccccatacagtaaattctaacagaaactatcaacacaacaattgtacccatcagacatgggatataaaacaaaattctgagtggcatcaaacataatatcgaactaaccatcagaaaattaaaaggaatcagaccctatcggactcacccatcatgcatatttacacatcatccctaatcttagaactgatctaaccatcagaccaccatcaaacctctatcagacaccatcaggaaagacgaaaaaaaaccaaaaaaatagaattacgcagaaaatttgaccaacaaccatttcacttaaaaacaacataaaatagcagcaactaatagatcaaccattaaaacaacattatatactaaatataacaaccaacaacaagattaaataaaaaaaattattacccattgaattcgtatataatgttctgtcaaaaaaaaaaaaagcaacctccaccatagcactgagcttgtagtatagtttgtatcaaaaatttgtgttatttgataataaaatgagtgaaaagaatgatttttatgaggggaaatttgaatttccatgcttaataaagtcataaattggccccctaaactaatactatgcataattttttaaatgggataactttttcctaaaccccaaaatacccctcctatttttcccaaccgtccctctctcttcctcttttttctctcaaatttcctagggacccaaaacccataccggctaatatccctttcttcttcgtcgaaccaccccaccgacgcccatccaaggccatccctctcttcttcgttgaacaaccccacccacgtcatccctctcctcctcgtcgaaccacccacgcacggcgagcaccacccacgcccatccatacccatctcgaccgaaccattatcaacgatccaccacgcatgcatgccggccgaacaccaccggagaagaagaaggtccgatgtaggcccgataataggtccgatgggcatcacaaggggtagtacgatggacccgtttgggcccgatacaaggcccgatgccacttgaacaaatgtatgatcgtccgtgtgctcgatgcccatccgatggggtgcccgatgcccatcctatggtgtgcccgattgtagggctgtacatcggtcgatttagtcggtttatactatatattttccaacccaacataaagatcgggttataaaattctgcatgcaaactgcc

SEQ ID NO: 40494 - DNA, 1416 bp, Cannabis sativa
tattgaaacaaatttattttaaaaataaaatattgaaacaaaaaaaacttgatttaaaaaaatccaatattttgatagagaacatgggagaatatttaactatgtatcttgttttctattttaaaattgtatttaaaaaataatataagaaaataatttttgaagttttcaaaaatacaagacgtatgtagttaatattttctaaaaattatttttagattttttttttttaaaaaaaaacttcaatattttgcacctcgacatgcacatacccaaattcctacgcggccccaggcatggatcttgatccctgacccctagccccgagccactgacccttgacctcagatctcttactttgaccccaacctcaaactaagacctggccgcgatccctgtctgaaaccctactttggcctttcatcctgactcgtccgggcctcggccccagacccggacaaggacccgcgattctattgggattttatgccgtaaataaaataattataatataatcttattagttatcaatagaagataagaagtcatttatgtttacatgtattttttatatttatggtttaatataaaatttatgttaaatccagaatatttagttattgacaattacaatgatgtcaacacagcggaaggtaattatgattatatgcttcaaaagtttatgtcccatgattcatcaatgcactggatttacactgatgtgatagtcagcgacttacttacaccttagataagtgttatgctctttccaaaatattggcaaactatgttagtatcagatgtatagagtatacattagactgcgaccaatattgatcttggaaaagatgttataatcttaccattgtatctttctaagtcaatgtcactcattgatcttagatcaaaagatcttaatcttgatatggttaagtttgatctcaatagtgttatttatgttcttagaattgttcattaaaacctactaattggtttgggtaacacatacatcttgggaacatgatagtacaattgagtgagagcactaatcatagatacataatctatagctttcacctggacatagaagtgaaatgatgatttcctccaagcttggcttaatagtgataaatggaagagctcttatttcagtagttatattagtttactaaaatatcatttataggaagctaagtgttttaaggaaaaaatacattgaggggtgaaacgataaatttatccctacttgatataaataatctatagatgatctttgattattgagattagaacgatggatatataatttcataacttatctatatagtggaacatatcgagcgttctatataattaagactgcaattccaaatctatagtggtgcaaggagaaattaataagtttgagaatttact

SEQ ID NO: 40495 - DNA, 1434 bp, Cannabis sativa
  modified_base (501)..(502): a, c, t, g, unknown or other
tcttggtaaaataatttctaacaaatataccttaattaccaacagtgctataaaattaaatcagctaataaagaacaaacataggtataaattttttaaaataattaacaaatttatgatctgatccattgagccctagatcactgctatccaattgaatggccatttctatccaattgacaatttttattgttgttggatgagtttctgtttgcaacaagaaaatgatcatacaattacaagcataaattattaacctgatgtaaagtacgtaaaccaagaatgccagtaacaaaaatctaaagtccaactgcagctttcactgattcaaaattcaacctaattcatgtacaacgaagcatataagcagctagattaagctaaaaagactaataatttcaaataaataaataaaaacctaattcatctcaatcgtatttttagaatttattttattatacgtcacccaataatttctcaagaattctgttatatagccannttttatatagaatagatatatgtgtttgaaattcttctaaaattttaggtaaacgattttttttactgatggggttttatttatttttgttgttgtgctcaataagtatttttccattgaactatgaatatgtcaatataattttattatagtattgaggattgtggtgttaagtgatgtatattaatctaatcttttgtaagatattattgtattattaatagattgtactttttagtgaaagcatggaaagtctaatttctagatacaagtttgcttacaactaaaactttagaaagaacatcatcaatgatcttgaaggtttataagtgttatgagagtataattttaaatttatgtttgtggattgattgcaaaattaaactttatatcattgatttatgttcttgatagttggctatatgttttggaaggttgtaagtgatgattggaaagtatataggttaggtgaaagcatcctttcacttaaaaatagagaggaatttctgtataatttagaagaacattggttcaaaatggttcttttggctagtataatttagttagtgtcttggtaagatatatatactatacaatgatatagtaattttttttttgaaaggattgaactatatactttttgtctgccatatatatttttgtgtggctgagggtgtggaagggaagagaaagttaacatatgggatattttactttcataccaatgatgattagtcataaacttgtaattaatgaggttgtgttgtcatgcccctaattttaagctttattatgtagccaactgatgaggaccctcaaatttgtcttattcatggtccacccaatataaggttttgcaagattagattattaaatgaatcagctttaaaaaattgaagtaaattctgtataaccatggcatgtcatctatt

SEQ ID NO: 40496 - DNA, 1880 bp, Cannabis sativa
atagaatattcttaaatagaggttctactgtattaagaattcatttgtaattaccacctcttatccaaacatacattgtattttaaaatatattataattatttgactgtgtaattactaccttagtaattacactgcctagtatatataaatatatataaattgaattgaatgacatcccatatactctgtttctcctcagctttaaaaataatgactaaatcagtcatgttttttaagggtgatcagttgcctacaaacagtacccatcagtaagttttcttacaaaatgttctgcatgtacaacttacaaggtcacttattaaaacaaaacacatgaaaataacaacaaccggtgacctcccactttaacacaattaagtaaactcatagttattttcatgtgttctaataaccggtaatgttatcaccataataattatcacactgtaaagaatttctctccttttgtgaacttgtttatttatttttcaacatataattttaacatttcatttaatgtattaataatggtgtttttttttgggcaaagtgcacaaaataaattaaagaaaatgcaatgttcaattttttttttttttttttttaaagaaaatgcacttttcaaatattcaaaccaatcaacacacaagcagtgatccatttaagactttttgcttatccttctaattagtacacattgtgctttttttttttttgtcaaaaattgcgtgaaaattcaaattgttttttttatgaactgcctagcaatcacgtcattcgaaatcataaaccttcaaataggaattttttttttattattttaaaatagaataattattctatcaaaataataaaaaaattatttttttaaaatttaattttaataaattaaatgcaactaaacaaaacaataaaataaaaattatttcactttctttcttatttattcaattttatttcaaacattatctaaaaaagtcattataggaacgcaagtaaaatgttagattaaattagtagatattggaagcatccttcacaaatttgttcattatgaagaaaaatcgccttagccaatacaataatgttgattttttaatttggtttatataatgatagtgatgcccaacattattctttcttcattaaataatgctctctttttttcttttaaataattcttttaaggataaaaatcgcaatgataagtataaagttgtactatgttgaaaaagttgtggacaagaagttacagctattgccatatgttaattttctttttctttctcttaaatatataaatgcttaatttattaaaaaaattacacaatatattaaaattttaaaaaaattacactctttaaatttttttatttacaaaaatattcttttagcaaaaactataaccgttttcgttgttgttttattgtttatagttgttatgaaattaattttttattatttttagttgttttatattttatttatagttaatttataattgtcaccatattgatttctttttgctttcttattatttattgagcaaaatatatttttgtaattttaaaatttacaagcctatttttataaataataattttaaactgtaaaattataaataaaagataaaaaaatatttttgaaaatcttcctaaattatttgtcttatatatataatatatataacaatttatttttaccaagactaaccaacaatatattgtatattctaaagacaaaaaaaaaatatattgtatattctacccaccatgtcatcttcggtcacatttttaggagaatgtagttattttttttcacttcccatttctagttgcattgggatttttttttttcccttacaatttcgagagaga

SEQ ID NO: 40497 - DNA, 1805 bp, Cannabis sativa
  modified_base (1083)..(1088): a, c, t, g, unknown or other
gtaattaatccaatttcctgtggttcgacctcacttgcgtgagtatactacttgattgcgtgcacttgcgtagtaattaataaatttcagcaacataccttagctcataaccataatttaaataactccagatatggaaagttatatcatataccatatatatttgtgctaaacgaaaccattacatatatgtagggatcataaccctaacatcatactcatagcacaatcatagccactacatacacaacatgggcctaacctgaccgtacaataacctgggcacatttaaccctaccattgctatggaataaggtatctttacattcaacttaactatcactgtatcataccttaccattacaattttatacaccaatcagacaaatgtagggtagggtatctctatattcaacggccttaccccgtatcataccctaccatggcccctcatttgtacctgagacgttagcatgcaacatacaatatacaacatatacaaatcatatcaaccataatatatatcgattcacaaaatcatataccacacattctcagttacatatacacattcataataatgcatcacaaatcatatttcaatacacaaatagtataaattacgcagttcaaaacatacaaaactacctaatttccttacctcaaaccccgttgcttaagacttgttatcccgtcactactacctataataagacaccggccaaggccctaacattaaaatttgtactcttacagtatggtgatgatgatctcaatcttatgttgatgaaaatcatgagcggtgtttgacgaaaagaacgaaagaaaaacaaataaatcattgatagatggcgagatgaatagattgtaggattatgattttatgagtgtcttctctaagaattgtgttcaagctgaaagaaagagattgagattgagttttttttcttcttagagttagaggttctctgtatattacgtaacgagaatgtgagagattgtttataatctaattaaatctaataatggtgtgtaaaagaaaatattaaaataactcttataatctgatgctaatttaactcnnnnnngaataattaaataaaaatcttatttgctagatataatttttaaatttgaattttaaaacttagggtaatcatgttaagcttaacaggtcattactttgtagcttaattttgaccctgataaagttaaaattacgttaaatctatttctacctaatttctagatcattgaattatctttccaacatcactataataacttcaatcagagctttagaactctagatatgatcgttttagtaaaatagtttttaagcctgtgactttatctaaacctacgaatttttaacattaatgccattataatgttatttaatatactgatacaatgaattaaacccacaaaataatttataaaccctaatagactttcacattgaactttaattaagcaattatcccaattcataaaaacaccataattttaccttgacacttaatataattttaaccatgcttagaaatttatcaatactactctaagaaattatctgtattcactacaagtagaaataaataaaataattattctcacacaaataatataacaaataaaatttaaaatatgtatactattatcggatattacaatagagatattcatttaacaaattattgcacacttataacaaaacgcacaggatagtaactgttggaaattattttaccaggttcttagatctactcacaaacctaacattgggtgcagcggaattaaat

SEQ ID NO: 40498 - DNA, 1588 bp, Cannabis sativa
acaatctcaatagttcagggggaatttttaacggcctaaaaagttcagggggcatgatttggtacgtgtcaaagttcggggggaaaattactaattagcctaatttaaatgacatttaaatttgtcatatgtgtaagacatatctatatttatatctatcatttattatctaataacaaagtaaaatgatttaattgaaaaattagtaattttttttaaaactcccattctaattttattttattctataatataataattaaaaaattaatattttttattaatgaaaataattatttaatgaagaaaataattattgagaagctatatgaaacacaaaatgtttttgtctatcagaattataataatacacgttttagtctgatatgatgtgtctactaaaatgattattattgatgcaattttatagtgagttttgaatatccaaaaagaatgttaaaaaaattgtattgaaacatcaaaatataagaataacaataaacatgactaatgttatttaatacacaagacatgtatttattgttcatcaatcctatagagaataatacgaaatgaatttaattaattttaagggattttttctataacaaactaaaaaaaggaaaccatttacatttatagcctaaaaaggaaaaataaacataaatagaaaacaaaagtttctattgaaatgataaggaaatttggtaaatttgaacaaaaaatcaacaacagattgcatcaaaaaaatataaatgcatataattaaaagctagagggttttaatctgtaaacagttgtttataagttgttttccagtaatataatttttaagaaatgttgaatttattcttattaacgattttatgcttcaaaatagttgtttaatagttgatttgacagataaaaatagtcgttcagattgaaatgttatttgcaactattgtcactgaaaatagttgcctattagtttttttgttagattgaaatagttgtttgcaacttttaaaactaaaacaaatatttaatgaacattatttcagggcatggaaccactacaaattttggtacagaacaatcggcattgagatgacaacaaaaattatgttgaatatgaatcaagtggagaattaatttccagcaaatgcacttttgatgaactagtgaaaataatgatggaagaactccaatgcaaccatgaaacaacacaaatacaactgaaatactaactgaaagaaggatgccaaccactacaaataaaggatgacaaaaatttgttgttctacataaagctattaagcaaagagactgatttcacacgatacccattgtgtgtgaacaaaatcagcaacatagcaacacctaaccaaacaatggtgtgcaacaatatgatactggcagcatatgacaacaactcagcacaggcagatttgtagaaacctggaaacaacccaacaacaacttccaaacaacaactaactggacacacaattggatcagttcaagatgatcattttttctagagacagggactgtgacgtcagagtcaaccatccaacaaccagaaaacaacaatgaaacaactcta

SEQ ID NO: 40499 - DNA, 1799 bp, Cannabis sativa
ttttcctgacgattttaaatagttacttaatttttttagtgacggtcccaaaaaaaaaaaacatttttaggaccgtcgcaaattcttatatttgtaatagtgcgtacagagaatacaaggtacaccctaaaataagcatatcattacctccttatagctcaatactaaaatcaaaataaaataactaaaggttgaactggataagaacattgataacttttattatatttttgtgacagtcagtagttccgtgatctataaggggaaatactaggtaagttgtgcaatcccacattgcctgaggaaggtgaagtgggatgattatgagaatgtgtaggtatggaactacacagttgaagaggacttaaatggattgatcggtactacctatatcaataaggtgcattttattttctggtagcccatcacgaaagaattctacagttaagcatgcttgacttgggataatttcaggatgggtgacctcctgaaaaattttcctaagtagtgtgcaagtgaggaaaaagtacgctgaaaatggtcgtgttggtttgtagggtcagtcttcagtccatgaagcagccagagtgacaaactcatgtataagagccataattttgtgggtgtaagggcccaatggaggcttgaatcggggaatttacaaatggtatcagagccttgacccaaccaaaaatgtggtcatcgaggacattgaaccccgtaaagaaaggtgattgtgacaactagtggatgcagtgctgtctcaagcttttgaggggcctaaggtaaaatttaaaaatggggccttttaattaaagaaaaatagccataactttttttgtttgcaatgaaaattcaacaataattgaagatggccgacctcctgactgccacatgtgattgggacattcggaaactgaattttctctttgatagaaattaatactatttctgctatcccaaaaggaggatcaccttttggtctagaaaaagataaatgaatctagacaaaagagtgtaatgggaatatctcatgcaaatcgtcctatcttactcaagcattacatagagctccagagtgtgagattgcccccttagagaggcataagatctcttggtggtgtattttgtccaaggcccttccgatcagagctattcttggcaagagattaaaggttgaggatgttacctgccctttttgtggagtggaagaggaatctctggagcacttgtttcttaaatacgatctggctttctgtttacgaaagtcttcgccatggagtatctttccaatggtcaattcaagaatccatatgtgtgagattgggttaaatttatttggaatctctataataggggcatcaacgttgatgagatctttatctatgcttctgttattgttgacactatatggcgagcccaaaataaaaaggtacataatcataagatagttaacttgaatcagtgttttgactctattcgatgctcttatgtagacttacgagctactctaattcccactccttctcctatccgggtggatgattgacgtcatcctcctccagattggataacactgaactatgatgttaaagtgggatcagaaatctcgtgtatagcagttgttgctagatcaccatttaggtgaggtcatctaggtgagcacgacggacttggattattcggatgccctttgtggagagacggcagcttgttgcttggtgattgatttggtaaagctcaaagattacaagttcatcattgtggagagcgactctaggatagtaatcaactctctc

SEQ ID NO: 40500 - DNA, 1991 bp, Cannabis sativa
  modified_base (592)..(604): a, c, t, g, unknown or other
agagagagagagagggagagataaagagaggaagagatttacctgtaatggtaaagatgaagctatggaaactcctctgaaggtggtgattaacgagagagaagcacaagtaaaaaattgtttttaaaaatttttaaaatcatccaaaatctgttttttaaattcactccattctgttttttaattttaaaaacaaaaaataaaatagagttatcaaacacaatttttatttgtattttcaaattattaattttaaaaacaaaaaatcatttttaaaatggttaccgaacacagccttagtgtatattaactttttaaatttatttgagtaatttaaggtattaatatctaagtttaactttcagtgttaaataaatacttaaatttaatttttggcggtaataatacctaagttataattctgaaacttttgtaggtatctgacggttaattgttaagtaaattgccacgtggtaattccttattggtctaagttaaatttttttattttttttaaaaaattattttaaatataccaataagaaaatgacacgtggataatgatacaatatttaacggttaggtacctacnnnnnnnnnnnnntataacttaagtattattaccaccaaaaattaaatttaggtatttatttataatttagagttaaacttaggtatttatgccgcaaattactctttttattttattattctttaatttatacccaattttatagattaaatttccattatgtgtattagaaactctaattttttataagttatgtgaagttatatttggtactttgattataaaagagagtatttgtcaattaaaattattttgaagttatatttaattaatgtgtaataaaaaggagtagttttcaacttatcccaaaaaaaatttaaggaataaaagcatcaccgactgtgttattctctaaggattcatttagtacgttgtattgtattatattatattgtgttagattaaattatattgtattaaaattatttaatataatattatatttaatattaacttgtattaataaattgtataaaattataatatattaacaatacactcgacccaaactagccctaagagcataagaataagaaaaaaagatataaaatatgatattgttagacattttttttagtattctttttcacttttaacagtatatactcaataaaagctgttaaaagtagatctatattaacaagcattctttaaagcattctcaagatgttctaatcaattgtaaggtgactagtgctcaataataatacttggctcaatacaatatctactaattcacttaagcgagtaacaacaataagatcgccaaattaaattaaaaataaaataattggtattaaaaattcgttgaattctattcttttatttatttttttaatttacatcatcattttacattacataagggtgtttattcaattcgcactattttgctcataatataatatgatcctcactaagtacagatttaatattttgaatccaatccaatctacataataactcaaatccgattcaatttaatctaatctacatattttgaattgattattttaaattgacaattttttaataattattatttaatatttaataaaacatattatttatataaactaacaacaaaatagctttacacatttatacctattaaaataaataatgacatatttattattgaaaagattatatacccaagttatataaattagttttagaattaaccaatttcattaaataaaaaatacattttaaaaattataacatcctaataatataataatagcatgattagatataaaaattaacagttagtaattaattagtagattataaataatgaaagaggttctaatggttacatttttattgtaaccacatgattacaatttttttaaccattggatcactattaaatggttgtgattaacttggaaat

SEQ ID NO: 40501 - DNA, 1761 bp, Cannabis sativa
acaagagtgaataaattcaatgccatgagtttgaaccaaggctgtgaaggggtgatattcaccaccccaatcggttttgaggcatttaattttcttgtcaaattggttttcaaccaaattcttgaactgtatgaaagcatcaagtgcttctgatttgaacttcagtgggtacagccatgtgtacctactgtagtcgtcaatgaaatgtatatagtatctatgattcgagttagaagcaatgggagcagccccccacaagtcagtatggatcaattctaacacagatttggctcggttaggtgaaagtttaaatggaagagcatgagacttcccatattgacaagcatcacaaaacgattgcatttcatgtttagattttcttacattagcagtatttaaaacaagatttaaaactttggatgatggatggcccaaacgcctatgccaaacatccattcttgacacagaattgacactaacttgggactggtttgcactagactcgacagaaaaacaaactggaaaacatgaagactctgactggtttttgttgatgacctgggagtgactttgtgttgtggatgataggttctgtgatggagtttcaagtctgtacaatccttctttaagtactcctcgaagcaccaccttccgagttgccttgtccttcaccaaacaaacatcagaatgaaattcaattagcacattattgtcattagtgagttttgacacactaattaaacttttggcaatttgagggacatgcaacatctcttttaaaagcaaacgatttccacagttatcttttaagtaaccactacctatgtgtgatatgttgagtttggttccatcacccactgtaactttttccttaccattgtagggctgtttttggtttagagctgaggcatctgaggtgatgtggttgctggctccactgtcagcaaaccacacatcactttcaagaatctcagggctagcaatgaaggcattgtggctggtatgttgttgtttgttccctccagtgggattgttagggtctgtacccatgaaattctcatcgaatcgattataacatacagcagcagaatgaccatacttgccacagacttggcaagtaggtctagttgtgttgccacggccccttccacgaaaacgtccagtgcttccacgacttccaggaaaccttcctccacttccagagtagtgattcatgttgtgagttccacgaccacgaccagtgtgatttcctccaggattgtttttagcagcaagattggcttgcggggcagtaggagtagtggttttgctgcttatgctcagggtctgcaacctttcaattttactatcaaaactcaataataagtcctgcaattcttgccaagtagtggtaggtcttgcttcgatctgcacaacaatagataaatactcagcatctaaacgagataagacattggcaacaagatgtgcctcggggtacggatctccagcaagtgcaaggatgtccgcccagtttttcttttgacgaaggtactcagtcatgggagttgagccttttcgaactgtctgtataagggttcttgtatcatccattttggatttggagtaggctccatagagactctccagagcacgccagagaccagcagcagtgcttgaacccatcacttccgttgctattccttcagtcatcgagctgtatagccatcccatgagtagctgatcgttgatgatccactgttcgtactccggatttgtagt

SEQ ID NO: 40502 - DNA, 1277 bp, Cannabis sativa
cttttatatttaatccatgtgggagaatgttcacaatattcccccttaagatgatggctattttttgctcatcaatcttgaaccgtattagagtacatggtgacttgcccgcaagggatatagctctgataccatgtagcccatgttcttatatatggctcaatacttttatatttaatccatgtgagacaatgttcacaataatttgagcattgttatttggcactagtagtgtttaacaccttctaaaaatgacgtctagcgattgattagaaatattcactaaaaattattttcttaaattatatatgatctgatatttaattatattaatagaataatgacaccaaaaaataatgtgaagcaccaataataatttttgattctcttattattttataattaacatttaaagagtgtaattaaatcctttaattacttctaattacataattattatataattatctattcaaataaacactttaaattttataattatttcaaattacactctatacacattctaattattaattaagtaggtacgtacttttatgaatatatatagtttgtgaaagcaatttggaagtattattattattggagacatgttgattgttctcttgtttgaaaataactatatataattctgatttagattgtgtgaagtgaagtgaacctttgaaccttttacaagttttttagttttttttttcctttttctttttctttctttataataaaataattacttcctttatttgtttcctcatttaaatttgataatgttatatgaaatggtcctataagagatgtactcatttattatagactttattgcttttagtttcatgtcactatctttttattaatgcaaagatatttatcttcatttctttttaaaatataaattgatttctgctttggattttcagtcgtacaaaaaggccaccataaatgaaaatacaaaaaaaaaaataatgaacttttgaatagatcgtcattgaacattttaagggattattttactaatacataaaaataataaaaaaaaattataaaatttactaattttatttataaaaaatataatcttgatgtatttttatattgtattgttattaatttattgttaattttttatatatttatatattattttttttgttataatttttttattattttagtattgtttttatagaatattgtaaaaatattaaaaaaaaatttaaacttataaaaatttgctataatatattaagtatttatct

SEQ ID NO: 40503 - DNA, 1471 bp, Cannabis sativa
aaaacaaaactctttaatgttatattaacatattcgaataactttctaattattatcattatcaacaaatgcctgattctactaactaaagtaaataaattttgggcatcgattatcaatgacaactaactaaattaggatttttcagatagttgtgtatggaatagaatttatatattattaaagttttttttaacgagcttatattttggtagttttattgaatctaaatgtagttgaagatcgtttattcttgtttaaagagcatgatggtttttattcggtgcatagtatatacaagttgatacaacttagaaataaaattggaatgcaattgatttttttgggttttagcacaagctttagaatttgaaagtactacttaaagttctcaattcgatatgacgggctaattcaggattgtttttccttgtctaaagagtattatagtttctactcgatatgtagtgcatacaagttcatacaagctcagaaagaaaattggactacagttaattcttttgggtcctggcacaagctttagaatttgaaggtaccaccaaaagctctcaatttagtatggcagactgctttaaattgtttgcccatcttgcctcagttaagtagtaagagggtcccagttcaaatcatctgtccagtttatcaaagaagtgaggaaactatagttcatgcgcttattcctattcatttgctgctcaatgctgacagaggcttttggttagggttaggtcgattgttgttgttgatttttacaattgatttggttaaaatttgcaaaggtgcagtaagaataagtgtggagagactattatgttatggaaggcttgaaataatttggtttggaaccaaaagtatgctacagtagatggtgttcttatctcatctataagttgtctcttgtgcaatagaagttagcccaaaatagagatttagaggcttctttttccatttttgaagctagtgatatagagttgaattttaggttaagctccaggagaatacaattaaggtaactgttgatactgctagttttcgtgatcgagttgcgtttggttatggcaaaatcgctcgagactctcaaggaaatgtctaagtcggacagtttttctggtataggcactccgaatttaattgaagcaattggtataaagaaagcgctaagttcaattaaaactcaactatgacagaaagttgagttatagtcacattttagtagcagatgaagctatttgaaatttattacctatatttttttcttctaaagttaaaagattgtcttaaatttttcatatttctaaataatatttttttattttttattaaacaatctgctaataagattatttataattttactagagcatcttgttttttttttttaattaagagtttaagatattcatactttatcttttagttaatttgacaaattaataaaaaaaaaaaaaaa

SEQ ID NO: 40504 - DNA, 1984 bp, Cannabis sativa
tcttcttccctgccaacacttccccaacaatctcagcatatgctgaaacaagtttatcaacatccaatgaacaaatttcattctttgctaatgccaattggggcaattgtcaagatactatgcactccatttaagggtattgtgtattccttggccaatcacttgtctcgggaaatctaaaaaatagcaagttgtatctcggtcatttgctgaagctgagtattgtgcaacggtaaatggaacttccgaagtgacatggatccttactctcctcaaaggcattgtcatctctcccaaagttccagcaacattacactttgacaacactacagcaatgcacatcactgagaatcccgtttaccatgaatgcaccaaacatgtggagattgactgccacttcatttgagaaaatgttcagcaaggatcactccaacttcttcatctctcatctcaatagaaccttgcagacatcttcaccaaagctttgctaccttcatctttctcaaccattgtatccaagttgggtgtcattaatatttacactttaacttgagggggcctattaaaatgtaattagttgagttagttataggcttttcacttgtctgccatttttgttaccagtttgtatttctgttattaactaacagattggttagttatacttgaccaactaggatgttgattattgctgctataaaagcacttgactctgtatcattttaaattacttcatttttgagaaataaagcatttttctttttctctctcttagtttctctcaagtatagaagcaagaaaaccttaatctctctcaaaagctcttgcattgatctgtgagaattttacttttgaatttagattttgtgtattttctctgaattaatttagagtcctttaatagtgatatgactctactatttatagggatgaattacattaattggtttccaaaacctaatatggaataaaatgagaaaactatctactttctatatttataatgagaaaaataggaaactaggtgagctgcctttctttcttgaactgtgtatccatcccatgaaattagaaatattattgtgtcttgcaagcatgaagatatataggatatatctctaaaaatatccaactcacattctttagtcgactcatgtgagttgcccacatgatggagctagtcggatcttctcgtataccctgctctaacatttaactctgacttactttgagcattagacctctctgcacgattccttccgagtgtagtggttcttccaagtcacaaaatctattccacgtgtcacccagatggatgccacatcatcctttgtagaaatttagataacattttccccccaagtccgcgcgaggaatcttggtccactactactaaaaccactattcccaactgtcttaaaaacacttttttgagggacagtccctaaaaaaatttatcgagtgtttaaaattgtgcagaaaaatagggtattctcaacagttttaaatactcgtgatgtattcccagcgatttttaagcgtgccttaaaaattacaatttttttttaaaagggaattgctgaggtttaaaaattgtggcctataatataggtgacagttttaaactgtggcctatactataggcgatagttttgaaaccatcaaaaccatcgcttatagtacaggtcacggtttaaaaccatcccgtatagtgttattcccgacggtttttaagcgttccttaaaaattgcaaattattttaaaggggaattgctgacggttagaaatcgtggcctacagtatagtccacggtttaaaaccgtcgcttatagtattataggccataattttaaactgacggcaatttgttcaaatattttttttttaaataaagtgctttccctcgctccaatatataatgtattttagatctaattttttttcaaagcaatacaatttcaagatctctctctctctctctct

SEQ ID NO: 40505 - DNA, 2227 bp, Cannabis sativa
  modified_base (1882)..(1883): a, c, t, g, unknown or other
  modified_base (2188)..(2196): a, c, t, g, unknown or other
ttttttttttttttcaatcagcccataaataattaaacttaaaatacctattcttaaagaataaaaaaattatcctccaaagaaacttaatttttaaaataacctaggggcatttttggtaattttactaatccattaaaccgacattctaaaacttctaacctagtccgaaatactctcaaaataattcatccattaatgtcgtgacatttctaaccacaatgcttaatttccacagtcgctgggcccgataaaatatttttatttcaaaaatagcatcctcgatacccacatatctcaatataatctctgtaattaatgaattacgctatatatcattcaataaattctcagtagttaccctaagtaagatcataatcttacttcgttaccaaaataattacatatttaataaaacatgtctatttaaacattattttattttctggtatattacagttaaagaataagaaacatatgtaacttatgaagtagaattttgcttttatagagcagaatagttattgggaaggtagaaaaattaattagcattaaatgttcaactgtacacgtgtatggcatgcaatgggcattcatcaatattatgtcgatacgttatcgatatgttaccgatagttttgtgataataaaaattgaggtcacactttatcgagttgatatcaatgataagtcgatagcttatcgactgcctcaaaaattttatagagtagaagttgggaaggtaagaaaaattaatcagcgttaaatgtccaatagtacacgtgtatgtcatggaatgtgcatttatcgatattatgtcgatacgttgtcgataggatccaaaaatgatacaagcttaatttgaggtcactctttatcgatatgatatcaatgatatgtcgatactctgtcgatgatgccactgctcgaaatcatgacagtttttatcaatggaatatcgatatataggatgtcgatatattgtcgattatgttaaatttttgccgtttttagtatttttttaatagttttttagtatttttccctaactaaccttttttttgtttgaaattgcaagattcactgtgtttcttgttgtatagtacaatggtgtttggtatgttgatggttttaattgggtttatgaagccaaaggcagtttgacgttgacagttagaactgacacaaccatacaacaattgcaccatattttatacgaagagttggaagttgatcatttggtgtatgatttgaaattagacatttgttccttgtacatgaagggacaaatggtaccgccagatattattaagaaagaacgccaactgagaacgttcttagagatgagggcaataatgtcaaacacagattttatgccattatttgtgactaaggtgagaaaagttggaaatttggagcctatcccgcctactaatcctctcattcgaagtgtggtagggtctttcgttcttgaaacaagtgttaggattggtgtgaatgagaaggttcctaccaatgtagatcagcagcaagaagtgacatgatttgattagtttgaggagtttgatactcccttgaggttagagtgtgcaccgagcaaccatggtacatggcgagaatggcaaatcccataatgaaaatcacaatacacctagaactaggagtagtcgacaaggcagatctgaagaacatgctcctcctcttcatgcacacttgtcaacgttctcgtcatttgaagtttgtactaagttcaatgctcctatgttgacaaaggaagacataatagaagggagatacaacttggaaatttttatgaaaattagaaagaaatgagataagtagtggctaggtttgcaattaataataattttgagtggatggnnaagaagtcagcccccaatgtgttgtacgttacatgcaaggatccagattgtaaatggagattgagggagaggaagaagatgtgttttgataactttgaggctactgtatttcacaacgaacacttatgtaacttgaatgcgagacattcaaaccatcgttaagcagcaccatgggtggttttccaccttattaaggggaagtacacccaagatagaactaagtacaagggaaaagaaatatagaggggcatgtttgacgcctatggtatccagataagttatgtgtgttggaatttattttaccnnnnnnnnngatctactcacaagtatgttattgtaacacc

SEQ ID NO: 40506 - DNA, 2103 bp, Cannabis sativa
aagtttagaaaaattctataatgctcgtactgtttctgcatcagagaaattttttttattctaatttttttcatagtaattttctctgtagttatttaagacatccgcaaaattttaagaaatttagtaacatttaatgcgccaaaaataaggtttaaaaaatttattgtatgcgtaatttttttatatgcgtatgaatagactatttgaaaaatattttctacattgaaaattattttgaatttttttaaaattttataggatgtcttaaattactgtaacaaatacgagtatgaaaaattgaactaaatttaattacggatgtcaaaacagataaagaatgcatcagtgcatttcttttaggagtgcattgtagaagcgctcgaaagtttatggaaaaaaaattatagaaaaattctataatatagtccctaaaatgggcgcactgatgcgcctgtaattgttttagcatccaacatccagcatctaggaactttttttagttcaatgttttttcatagttttgtactttgtagttatttaagatattctacaaaattttaaaaaaatttgaaaaatttatacaaagggttcaaataatttgttacatgtgtgtctctttaattttatacgtgtgtgaaatagattttttgaacattgttttgtatattgtaaattattccgaattttttaaaattttaaaaaatatcttaaataactataacgtacgtgatcatagaaaaaaattaaactaataaatttttcaatataacgaaacagtagaagatgcatcgaatatatatacagatgacaagagtgatcaagaagaacttactgaaatgtttaaaataaaatattgagactgcaaaagctaattttcttatttgaggttttcttaaaatataatctactgtattgagttcattgaacaacaattgttagttgttgttgttattctttttctaatttatattgttgttcccaactcaatatatgtttttggaggttgactcagtgatacactcatccttaattgaggtgtatatattatactcatattttgcaatataagaacatattattaataagagacattattatatctgtaaaagacagagagattagtgtacctcaatactagtgaatgagaagttcagatcaaaacaaggtggaattagttactttgaccacttagaagtcaactccaaatcctaactacttttactaaatatcgcggccaagtcagcattttcagttaaaatctgttacaaatctttactttgttttagtttcaagctatgatgaagagagattcaagttcaccaattgtaaagttactgatttagaacctaattccaataaagggaatgaaaatgaaaacataaaatgcaaaacaaaacagcctttgacttcaaactttattgattcacacttggtgttataatggtgatgatcaccaacagctatgaactcacaagagaatcgagttctatagctttcatttctgtacagagaaaatttcggagaggaggagaatttggtatttaaaggcattgtccaaaaatattggaaagacagaattgtacccaactaattaacttaactgccgagattgaagctttaaggaatttactcgttgtaacaccacaacaagtatctcatggtggttgattgaacctcgtaattcttagtgtgtttgttccaataattgttcataatcattctttagttttcagcttttaatcttttttatgtgttcttaatgaggtgttaattcaccacaaaatatacaattgattgcatatataagagacaatattgtatctgtgtttttctatgagaaccaatgtataatggatgaatgtacataataaataaatcatcaacaaaaatctcaagttcacttcatattcattttgttttaaggtcattttatcctaataattaataatgagtgttgagaatcatggggttccaactcaaaatcaattgacaatgagtggagtagcccatatttcttatatatggctcaatactttcatatttaatccatgtgggacaatattctacaataatgaggtctatgatgatcttcatccttca

SEQ ID NO: 40507 - DNA, 1752 bp, Cannabis sativa
ataatatcttccacgagtaattaataacatatgagttgatcctagtttatgatcgagggtgatcagttgaatttgacttttgaccaacgatagaaataaactagaaaataatagtagtattattagaagtagtaatgaatttcacgggcaagatcaagagcatatatatccctacctaattttttttttttaaaaaaaaaaaactaaaataacttcactagctggaaaaactccaagttggaaatagctagcaaaagaatgtgttacacattaataagttaagctaagaaaataaataattacgatatccatcgatcaattttaagatcatgagttggcaaagaccaaagaccaaagacgtatgctagttactttgctctacgtacgtacacttctcatgaacctatttaaggcttctatactacacattacaacaaaccaaagaaatcccaaattgacattttcttctttaataattattattgaaaaaataataatgtcaataagcaaacgtttgagtatcatttattttgtttttcatcttcttctgctcttgtgttcacatcatgtgttttccgtaaggccaataatattaatggaggtgaataaggcgccggcgaattatgtgtcttttgagcctaataaagaagtaaacagtggtgggcaagggggctttggaaggcggcctgaggtggagagttgcttgcccaaggggtttcgacagacctcggctccaagtcgatatgttaacgatgacactcttggctcaactctttgttcttctcctacttcagatcataagccatgatatacatattcagatgagatcattgttaagctctgtcacagctggtcatatatatatatatatatatgtattatacatgtatgtgctttaatttgctttgatgttatgtaaaagagtggagatgtatcgaattctctatcacttgtgtgttatatatgttaaagaaaattatattcacatatatatatatatagaatgatttatctatatttattgcaagtttctaattttaatttattgttatttatcgaagtattcttttatcatagaaatttttttggtatttatgaattcttttatgaattacattttcttacttaacagagaaaagttcaaattaaggtctatacatatatgagcaatgctatatcaatttgcacgttatgagtgattaacatgcttttatattatttattaaattaaaatggatggaatttgctgattttaatttgcacctaacaaagtttagcacaacatcatttctcatatatatttatattataatattatatttattagggtgctccctcctagtttgtaaaatgacttggcaacaccaacgggcttgggcttgggcttggacttgggcctaataaatctggtatataaaaaagatgatccaacttattattatgtactccaaagttatcaaatttattacatagaatctaaaataataataataatcaatcaacttatttataataatatcagtatcgcagttaagcataaaaagatcgattccaaaattagacaaaaataagaaaatctcattgcttaaatattaatttttcttttttgttaaacgtaaaaaaacaagattttaattgcttaataacatactaattattaactggctaccattttataaaaagatgcactttatatgaaaatgatctcatgttcattttaattacttattttgtttaattacttttaaaatt

SEQ ID NO: 40508 - DNA, 1546 bp, Cannabis sativa
  modified_base (632)..(641): a, c, t, g, unknown or other
  modified_base (739)..(742): a, c, t, g, unknown or other
  modified_base (901)..(908): a, c, t, g, unknown or other
gttgtacgaattgtatggcagccgttagatgcgggagagttatttgatttgagggctggggttgatctaggggtaattagtgttaaaaaatggtaacgtaccttgagacccatctaatataccctgagacccatctaatgtaccacataatacattctgtaaaaatacatcacaggacaaaatcgtgtctctatatatatataaataaaataagagtcagactttctactcattacataaaaagttttctagaatggaagaaggattagctagtccagtagtattagtaggaaaagcccacataacaatattatagtccacaaatttataattattaaaaataaacgaaaaattacatactatcaaaaggttcgggatctaaatgcattgagtcacgtagttacaattctattcataatgtttattttattttatttaaattgaagataccttagtaaatttctatgatcttacttttggaaaattatttctattcacttttctgaatttttttaagtacatattaatttttattgtgatgattgcttagcttaaatttgaaatttagcaaataattagggtttagttatggaatttatttattaattttaaattattaatttatgatgatnnnnnnnnnntcagaatgcattttatatgtcatataaagaattttcataattttgcatgttcagtgcccgacgacatttaaatacggtgtttggctattagaatcacnnnntagtatttttagtatagcggggcgatatagttagacattaagaatgtcattaagaatgtcgaaaatagttggaattttagttggaattttagaatttcccaaaatacccctaagtgactttaagttagttttgggtgggcaagggcattttggtctttnnnnnnnntttgtattttgtctttatgtgaaattaagtaaatagatacattcaaattttttagttgtatttgcctgaaattgatttaataaaacctaaactatttctttattttacaaaaagttagaaaatcacatttattctctcttctctcttctctctcccgtgagccctagaaaccagcaagagtcttgggttttcttcagcaattttggatttagatagcagctttgttgaggtttcaagctttggtaagttttctagttcctcttttgttgttttttaagtttaaagttaagaattttgcatgaaatgagggttattgttgctgttcttgctttgattgcttgttgtgttttttgaagttaaattatggttagaattgatgattagagcggatttggtggtagtttttgaggtttgttcaaggtttgagcttaagagctcaaactttgctctcatggtggtttttgtatttgtgcatgtagtagtgttttgttgccttggatatgttctctaagttgtatagaacaggtttggaaagtttggtttgaattggggttgatttggtttgagatatgaaagtttcggtcattcctgcactgaactggaatttcggttcagaggggcgtgtaggaaccggaatt

SEQ ID NO: 40509 - DNA, 2203 bp, Cannabis sativa
gctaattaagatttttgtctctgaactttggtatgtaccaaattatgtcttctgaacctttaaggtcgttaaaaatgtcctctgaactattgagattattaaatttaaggacttttgtctacatttaattttactatttcagtgattgtttatatactaaaatatactctccaaactttgatatctaccaaatcatgctcctcgaattttgacatgtactaaattatggcccccaaacttccatccatgttagacttttttactaaaattagaaaatagtccttaaatccaattatttcaatagtccagggagcatttttcacggtcttaaaaattcagggaacatgattgggtaaatgtcaaagttcagggaacaaatatcttaattagacaatgataaaatataaaagtctaaaatcaaaaggctgatcttattattataccatccgtatgtgtgtaattatataatcttcaactatttttagttaattaatatagctggctctgtacgtaattattgaccatttgcacctaagtacacaactgggagaagaagctagctagtagtgcaatccacaactcgttatccaagtcacgtgaagccaaaatgccctttgtcgtttagattattggatattctttgtatttgttatagaaaacaatacaagtatacattccaaaataaatacatatatatatatagttacataattacaccatactttcatatattttttcttttctataaaaggttcgttggtggtgtatccacttgaatgataattacaggcgtactttcatcttgatacagcccctccaaaattttacagaaaaaaaaaatatagtaattttatattaaaatttttaatttttttataaaagttatgtattttggactccctttattttatttatttatttaccttttgtcttccttaatgttatcctctggccatcccatttttatcgactattaacttttatatttagtggtctgacaactttgattgtattgatactactttgtgacaatctttttgctcttaagaactctaatttactcttaagatttttttctaaaaaaataaaataaaataaaatacactacaacgtcaaatttatcatggactcattatccttatgttataaactccatgataaaaaaaaaaatgttatttaattaggattctagctctaaggtatttcacatcacttgtgtgcgatagagttgttaaaagtgttaaaaatatgagagttgttaagagtgttatttttttttaccatctccaatatttgtataagtttcttaattaagtaattttgtacattttttgtaatataataatatttattgtacaccaatagaaaaaactcctttcttccttaaaaaaaaaaaaaaaaactcctttattaaatgtgacaaagtctttattagttactaatttgagttatatctttgtaacaatctttgtctactttttcttaattgcgttcatatatttatccccttctgttgttgattacttaatgtatgtcattatcttgcattgtattagtattgtttcttatcatttgattcatactatcatatatgtttctttcttgaaaatcaagattgacattcaaggtcaagattaattgcattcttaaatgtaaatctcaattttctaatctagatcaattaaacttcaagaacttatccttaattgattctaattgattagtgtaagaccataaattctaacaaaatcaagtgttctcggttggtcaccatttttctggatggaacccctctctgttgagtttgcaccgacgatattattctcggtatacttttaaagggtttttttttttttttttaatataattttattttaaatagtatagcacaaattataataaatataaatatatataatggatttgtttggtacgccgtattgtatagtattatattaaattgtattttatacaatatttttttatataaaaatatatgtggtattaacttttatgggaacctaaatatacaatattagtataaattaaagtttaatatagcaattatataaaaatatgatatataatccgatttaatataatacaatatgttaattctatttttgacatatttaattgacaaaaatattttattatttattgtatatttcggctggtatgttttaatatggtttccttattt

SEQ ID NO: 40510 - DNA, 2666 bp, Cannabis sativa
aatatatattaattttattatttgtgtaaaataaaattataaaatttagtttgggatatgtacattagtcatgattataattaaaaaaatatattttgtttaaatagtttatgatatatattgtattactaaaactttaattttataatatgtatgtggtattattatttttcttgacatttttgataatatagtaaaactttaatattgtaggttgtggatttaattagcaaggattcattttacaaattgaaatgaagtttgtttggtggttcattaaaagaggtgtgtacaatcactcatttctttacttcatgacataatatttttcatctttgaagagtttgaatatcttaaatattcatctatagtgaagtatgttttaaaattaagtgtgtgttgcggtgataatggaaggttgaaacttgtgtgttgtagtgaagtaggttctggaaaatttgtgtgctgcagagatataaagaagaaacttattgtgtgatatttgttatttgtatgtataataggtacttatgaaagtggaaaatattatagaaatagagaaaatcctgtccaattttcaattatatttgttgtgtgctgtttatcatgttttttatttgttgatataggtacttataaaattgaaaatattatagaaacaaaggaaattctgtccaattttcaattatgtttattgtgtttgttatttgttgatataggtacttataaaattagaaaatgttatagaaacagaggaaactctgcccaacttttaataatattgaagatttataagtactaaaataatttaacaaaaattactttgatttaatttttaacttgtaatagcattaaattattttaggtaattataaattaatatggatagagatcgaatgaaaaagaatagattgtcaaaagagtatgaagatggagttaactatttcatgaattttttaatacaaaacgaataggatcctactataatatcttgctcatgtatgaagtgttgaaatttaaaaatattaaaggttgtagatgtaagaggacacttatacataaatggtatagaccaaacttaccaaaaatggatatggcacggtgagagtgtgtcccaaccatcatttctaaaaagagctcgcaaagaggatgtatcagataggaattttcacattgatatggttaacgatttagaataagagtttgcagactgcctggatgaatttgtaagaataattgaagaatcagaaaaatccatttatattgggtctaaggttagaaaaatgtcatttttagttaagatgtataatataaaggcaaggaatggattgagtgataatagattttcacaattactttcttacttaagcaatatttttcctgaaggaaataatatcccaagtagtacttatgaggcaaagaagatattgcagtcattaggcataaagtatgaaaagatacatgcatgtcctaatgattgcatatgatttaggaatgagtttgttgaggctaagcattgcccagtttgtaagtgctctagatggaagttgaatgataatggaaaagagaaagaggggattcctgccaaattattgtggtatataccaccaattcctaggtttaagcatttatttcgcaaccttgaacatgcaaaaagtttggtatggcatgacgagaagagaattaaggatggaaaaatgtgtcatccggcagattcttcgtcttggaaaaacattgatgacatgtatcctaaaatagcttcagaccctagaaatcttcgaataggcctttctgcagatggtatcaatcctcatagtttcatgagtagcaactacagttgttggccgatcaatcttattatttataatcttcctccttggttatgcatgaaacgtaaatttgtcatgttgtcattattaatttctgggcctaagcaacctggaaatgatattgacgtgtatttggcaccaccggtgggtgatttaaaataattatgggaaggaattgaatgctatgatgtaagaaaagatgaaatttttactttgcgagcagttttattatggacaatcaatgattttccagcatatggtcatttgtctgggcattgtgtcaagggatataaagcatgtcctatttgcttagaacagacatatggtattagattaacacactgtaaaaaagttgtgtacatgggccatagacaatttctacaacttactcatccatttcgtaggtactcaatggaatttgatggtacaatagaagataaaattgatcccactcccatgactggtatagatgtgtttgacaaagttagtcagttggtgaatcaatttgggaagattcccccaaatacaaaagataaagaaaaagtaaaacaaaaagggaaagggaaaaaagggaaaggcaaaggaaaaaagaagaaagttgtaaaagttaaaagagtttcaaaactaagaacaagattgaagatgcttgttggaagaagagatattttctttttttttgagttggagtactggaaacatctcttattgcgacacaatcttgatgtcatgcacattgagaaaaatgtttgtgaaagtataattagaactttacttaatattccaggaaagacaaaagatggtttttcatcatggctagatctgttagaaatgggaatt

SEQ ID NO: 40511 - DNA, 2644 bp, Cannabis sativa
ctcagaaggtctttcgtctctcatctcccagaagactttagccactaactcccgtaacaatggtctaggtctcaagatttctcgcaatgcaccaattatttcccaccttttcttcgcagacgacagtctcctcttcagtccagcctcatccagatccgctaacactataaaggaagttttgcatgcttattgttcggcatcggggcaaatggttaattacaataaatcatctctcttcttctctcccaacactgatgaggacactaaatgtcacatcacctcagccttgggcattcctgttcaaaactcctttgagaaatacctggggcttccccaaacttttgggagaactaagaaagagatattcaactacctttcagatcgtgcctggtctcacctgaaaaaatggaattctaagcatttttctaaaggtggaaaagaaattctcttgaaatcagttgtgcaggcaatcccatcttatgccatggcctgtttcaaactgcctgcttccttccattcaaagatcgaatccatgatggcggttttggtggggaggatctgaaagcagcaggaagattcactggaaaaaatggtcctctctcagtcgatccaaattccatgggaggcttggctttcgatcaatgaaggccttcaatcaagcgatattggcaaagcaagcttggcgtattcttcaggcacccaactctcttgttgccactttactcaaagcccgttattttccaagaaacacctttcttgaggctgcaaaagtacgccgaccttcttttgtttggactaacatctcctggggaaaagaacttctagtttcagggcttagaaactctataggcaatggtgcaaatacttcaatatacaatgatgcttggatccctggtttcagcaaagtcaattacctcaaacatctctctgatggttgctcaaaagtatctgatttaatcacccttgataaccaatgggataccaatcgcattaaagccattttccctgctgatattagtaaagccattgaaactatcccattattacccccccgtaccctgatacctactattggccttatacaacacatggaaactacacagtcaactcagattaccatagagcccataccttattgtgtaagaatgatccctccccttcggataccttggtgcaacaaacttggtggaaaaagatgtggactcaggccatacctccaaaagttaaacactttatttggagagcctaccatgatattcttcctactagtcacaatatgcacacaaggaaaatcattccaacacctagttgctgtcgttgtcatcaccacattgagaccctagagcatgctattttcaggtgcccaactatccagaaggtatagaaattaactcaattctcctctttcattttaaaatatatggaactaacttgcagggaaattttacatgctgcggcttcctcatttccagatacagattttcaatttttcctttgtttggtttggaagagttggcattgcaggaacgaatttctccaccatcagaaaagaatcatccctgctcttatgatacaaactacttcggactacttgaatctataccagcaaaacaacatgaattcagctacaccgggggctcatcattctttattagcggctgctcctcatggaaagttgcccaatttcaacttaaaattgactgttgatgcagcccaggatataaattccaatatgacaggatttggcttggctcttttcaacagcgaaggtaatatgttgctgtcagtttctaaaccatggacaggcgctcactcggctcttctaatggaagctcatgctctcacctatgctctgtcatggtgccaccagcgatgcatacaaccggaccttatcgtatcagattgcaaagtgcttgtggattacatctgtagtgaagcatcgcaccacctactgctaaacagattcgccaaagaaattacaaacttcctttcttgtattcctaatgctaaacttatgcacatatccagggagcaaaatgaaatggctcacactcttgccaagtttgcattaggcctagttcaggaagtttattggaaagatcatacatttatttgtaacttgtgatttgtaacctgtgatttgtacctccaatttcctattttgaatgaagtccaggtttcttcaaaaaaaaaaaataaatccaagagagagagataaaatttgaccgtaccaaagtagaattgaattatgtaacccaaatctagggaagctcacctcaccctcctcaactcaaactcgagggttcccttttcttcctatatttgtttgttttgacatgatctcctctactaactttacctcaattcttttctttttatttattaaataaatgcaagatcttctcctcagatttgggtcccacttcacactccaactcatcctcttattttttttcccaccactagttatccactaattattataattctttaaatctctatataaatcatgaaaatatatccttactttatatatataatataataacaaatttataaatttatgtactttatattaaatatagggtaaatactattttggaccctgtgttttacaaaagttacagattggaccctgtgtttt

SEQ ID NO: 40512 - DNA, 2598 bp, Cannabis sativa
tttttgtttttttcccaaaattaaataaataaaatatattaataagattatttatcaaagtattaaaattaaaaaaggaaattatttaaatttaacacaaacagtaaattaaagtacctaaaatatataaaaaataatatgtaagggtggtaatttaattttgctaattaaataaaaatttgggaactaatttactaaaaaataaaatttaaaaataaacttacaaaaacatataaaatttgaaaattaatttactaaaaaataaaattttaagaccaacttattaaatcttatataatttaagaaattgtggttgaaataaactttttaaagccggaagaaggtttgtcatttcaggaaatcgatccaaaactaggtggtatgagaatatgaattaatgccaatacaagtctccttcatttaagtccacaatataagtttgttcctataaattctaaatccttttgaaccgttgaatatgccacctcacgcattagcaagtgagaatatatagggttcgtttgtttggtaggtcttattatatcgtattgtattatatttaattatattttatgtaatatttttaaataaaattataagtagtattaattaaaatttaacataatattatataaaaaaatattatataatataatttaatataatacaatacaataaaatataatacgacaattttttagaatccacgagcatcttcaaacgacggttttgttgagtttactaagtcttgtttttattctaagtcacatgggaatgagatgagtggagaggagaggaggtccttgtcaggtagtcatatttgatgccttttttgggttcttttgtttttttctaaacaaatattattacaacgttgccggtctacatttggcaacacacctccattttttcttaatttattatttccttatatcataatagcaactacactcacaaatataaattacatcatattgttatcaattcaattgtcacgctattaatattgttaagtcataaattttatgaatcttttaattaacataatcactactttaaaaaaaaaaaaaaatcatggtcgtgtatacattttgcattatggcggtgtcatgtgtccttaaacttttgactcgagactttttattagagtgtgtatatattgatctaatttaataataattggctaatttaattgtaattgattagcaaatattaaatatctaattgtgattaaattggattgaatgttatttttaaatattcaatcggatcggaccggatattagatagagtgtccaaaaatccaatacatttaacatccaatcgaaataattaatattttcatttagtttgaatgaataattaaattttatgttattatacgtacaaaaaaaatatgtatatatgaaaattaacattaattttttttttgattggatatatctaattcaatccaatagatactaaatttaaaatattaaatggatccgatctgatccaataaatactaagtttaaaatattggataagcccaaattaaatcaatagatatacatgaaatacattcaataaatagaaccgatccaatccaacattcataggatattggatcgattagataactaaaattaattggatcggattggatgataaaatctatcatccaatatataattggatcaaatctgtataaacgtaaaaatattagatgtgatccaataaacactcatatttttataatgtataattgagttacccacactttatttagtagtattccttcctcattgttttttttataagtaactaattttattgccaaacacaaaactaaaacaaactagtagccataacggggccacttcctttaagcatccctcagacttacccttagcacaatgggcccaactggccagcgcattcgcaacagagtttacaaagtgagaaacaaaacaaacatctaggaaaacaaaattcttgcaaaaacttaaacattaacaaaataatagataaaacccctctaaggtttaagactagaatagagagagagagattgaaagaaagagtactttatattcattgattaatgaagaaaataacatgagtgtgaggacatgcaagtctatgcactatgcctgaactctcaagaagattagtaaaagctctaaactcaccccctaatctgactgaagtgttttgatcttaagacccaattgtaattcaacttgagccttaaattttgtgaatgtaggcaaagcctcatcacgagttctaagaagataaagtcaggtatatcttgaatatgcatttacaaagataatataatatctataaccattgaatgaattaatgggtgcaggtccctatagatctgaatggagtagctgtaatggtttagtataagtagtattggagtgagaaaatgacaatttgtgagattttccaagacagcaagattggcacacataaaaaaaattattagacaacggtatattacattttgacaaggccatttttacaattttggtagcagggtggccaagcctgctgtgccacaaagaaaaatcaaaattggaattgaaaagatgatgactatgg

SEQ ID NO: 40513 - DNA, 3180 bp, Cannabis sativa
caccttgaaacactgtcaatagtagggataaagagcggtatatagatgttcgaaagaaaatttattttgaattggcaatatagtaattatttattttttgtaataaataaatgattctttaaaattaattaaataggaaaaaagacaaagattgtcaagataaaatttgtcgagataaaatttgtcaagacaaaagctgtcaggacaaaaaataccaacctcgtcttaaagacagtggtaagcgactagcttgttcctatccctataggatttgtctttctgggttgattaattatttaattaattcaattaggtaaatatctaatttaaaaaatggttaaagatgtttcaagattattgagatattctctcaagtagttgagagattccctcataaatatcagtaaccaaattcaattatagatatttatttatttaaacaattaaataataattcaattaaagggatttaaatactataaacaggagtctgatttgagaaatcatgatcattcttttacactgctaaattagaaatctatagagagaaaaaggaaactattttttctcttagttgttcttgctcatgtgttgagaattcaacaagaacaaaggttgtgcactttatcctaatagctcacactattctttgtgtgtgtatgattgatttaaagacactggtgtgactccaaattgcatattcctcatcaattgattaagggatacaacttacgagaagtttcaaggatatccagatagacttcaagaggtatactctaaacttattaattttactgttttaatttaatgtacacacatctatagatcctaaaggctatggtacaataataatgagataatacataactctcctattgcatacctaatttagtagcataaaaccaatattctttcccaactcttctttaggttacttttttattttatttttgtaaaaatatttatgttactttcaagtctattcaataaactaataactgataataataataataataaaaaaaaaaaaaaaactcaaataacttattggtaaacatttaaattgctaattagttattttaaagttataattttggttacattttaagtttattgtagaaattaattagttttcatataatataacaaataagcatagatattaaatagttttatttaatatactttatagtaatatttaaataaaactacgtaatatatatttagtctttcatattttttgttatatatatattaattaataaatataaaaaaaaagagtaaaatttacaagttatttttaaatcaaacaaaaaacaaacattttattttttaaaaaaataataacaaatgtaactacaaaattattttcatacataatataatctaataatggttgcattagattggttgctggaattggacttcctcctatttcctttgagcctgattgtttagattgatctctgtctttttaagagattttgtttctgtaatgaatttaggatctcttttgatgtttttttagtttactgtccaattttcctaagacatttcttattcatgtaaattatttgaccattatggctacacatgaattagctgcgcacgtacttagagtgaatggtgagctaatttggatggaagatctttgatctctctttttaatgtactcaacgctaattgaattgtaatgtagtaatatacagtaatatttttattaattagtatttttctataataatcttttgttatttgaattttatagtaataaatataattggatggatgtaatacacggtactcataaatgacaagtattgtaatttaaatatgtaacgtcattattgaaaataagataagggaagggttttttttttttttggtaaaggaaaagggttgttgatgtaaatttttagaaattttttttttaccaaagttgactgtagggtcgtagttagtattttatttattattattattattcttttttggtaaggtagtttgcattttattgaaaacatagggggcaaaaattactcaaataggtactagatgaaaacacaaaggtccattttgatatttattcaaaaaagaaaaagaaaaaaaagtccattttgatagaaattaaacaactgcagatctattaactaggaataaacataagactgaattgatacaaactgatagtagatattgatagaattaaactaaacaacttcgatggtgttccttcagatccatggccataaaacagaacacataaaaatgaggttatagaaaagagttgagattctcatcaatttagttaattattattccaaagctcaataaccttgctcaatgcaacatgagaagagcctccaaccttcttagctgcaacagctccttctttcaattgccaaacccattctctaacctccttccctttcaccgagtccgagtccatcaactctttcactcggttctccaactcagttgcactcacaaacccatctttcgattctctaaaactcagtgccactttcaacccttccaccaagaaaatcctgttcatcctctgttctgcatacaaaggccaccccaacaacggcactccattgctaatagcttccatcactgagctccatccacagtgagtcacgaacccaccaaccgagtcatgactcagaatagccatctgtggagcccaacgcttaaccaccaatcctctttcttttgtcctttccagaaaccctttaggcaatatttcttccaactctctctccttattcttctcatcgccattgttgtcaggtgggtctctcaccacccacaagaatcgatggccactattttctaaacccacagccatgtcggtcaactgggtcgccgagaaacgccccaaacttccaaaacacaagaacacaacgcttttacttggctgcccatttagccaactcaagcaaccactttcatcttccaatttcgatcccatattagttttgatcaccggtccaacaggaaaaaccggtgggatcgattttcccggtaagggaagcccatccctaagagctgttatagttttattctcgaacatatcaaatgagtttaccaaaagcccactagctttcgtcatgtgtaaagacaaatccaaaaatttcttgcagcgatcactcctgaaatcctgattagcctcag

SEQ ID NO: 40514 - DNA, 1436 bp, Cannabis sativa
  modified_base (875)..(891): a, c, t, g, unknown or other
  modified_base (936)..(963): a, c, t, g, unknown or other
ccgagccggccaccacctcctatgatcaccaccactgaaaccaccacataccgttgcaaaagaagatggctaaaataaatgtaattttaaatttatattacttttgttgacaaaaaaaaaaaattaagttcaattttccaattaaaatgtattttgttgaatggtatgcattctaaataagcttaattatacattaatatataaatcaattcaataggaaaatgaaaataataataataaaaaaagggtatgtaggtacgtaccaacagtctataataaccttatcttgatccatgtgacacaaaggagcaatggacaatccaccttcattcttggttaagaatttgctaagtggagtcattccatagagcctttccccatcacgaatcgagtaagtgagcacgttgtagctcgccagtaatctcagcatccggtccaacatcaccggggcgttagggttctttgtcggaagttgtgctacaatgttggaaggtgaaaggaacgcgacaggacccgccataactatgatctccaagaggccgagctccaacgcggttttgagaaccataggcagtactgtagcactagctaatctcatcgcaaaaaggtaattggcttctaattcctcagacatttgggttggtgtagtcatttgtctttgtaatttagctaggtttagctaaatatgtatatatatatatagttagttgttacctaactatttttcttagctactgacatcatctagttattagtttaatttagctatttaaattatttccattcataattattatagttgattttttttattcaattaccgttttagggtttaatataggggaattattccatatactgtttttttaactttnnnnnnnnnnnnnnnnntacggtttgagtttctaaagtgtggttgcagcgctagttgcaatnnnnnnnnnnnnnnnnnnnnnnnnnnnnatttaggttgcagcgctagttacaatatgagtttctatgtcaaattccgtaaaaatgtaaaaaaaaaaatattttgaagtgtaaaaataaaaatgaccctttaatattttatttttccgtattaatttttaataaattatcagttttattatgtatcttattaattattgttttttatttgtttgttctgttattattctatataggttataatttaggagtgcattttctatttttccattttttttgggaaatcagcagtgtttttcattactccaaaagactttttacaatccattcaacaccttttataaaataaggtctgatcttttccttctagtaattacatttggttacaattcattaagccatgtagtatctcctatagaaaccttcctaggccatacactttgtatcctagttttacaaatatttttaatcctctgtacaatagacttcgggtcttcctttgt

SEQ ID NO: 40515 - DNA, 1104 bp, Cannabis sativa
aaaaaaaaagaaagataaatacttgtcacttctctatctttgtcaaagaaaaaagataaatactattgtcactttctttgttaaaaaaaaaaatataaactaatgtgaaatgaaaaaaactaatttaacaatcgtgggtaaattgaaaaatatggattgatttttcaaacaaacaaaaaaaactaaaaaaaaaaagcttaagaagaagaatttttttttaagatgatggagatgagaataacaaaaagtaatggtaaccacattaaaaaaatgtggataaatttttcaaataaatgaagaaaaaatactgaaaaaagaagattaagaagaataagaaaattttaaaaatgatggagatgagaagaacaataagtaatgagtttggggtaagtgtattttgctttaaaaaatgagcaaaaaacataaattagaaaaaaaaaatccaaaatatctaccgcaaaaaaggaaaaaacccctaaaacaattgaaaaataacataaataccttcgatactttgtgtatcctgaaatctctatcatcaagtttgaaattagagtgtgaatcttcaataattagtttcaaacgttttgattttgttttttccagagaatcaacaactgatttcttattcgatgctatagaagatgtaaggctaggagtttctttgaaatttttcttgtgcattgcaaatttattgacagttttttgtaatttttttaggattttttttacaattgaagaagataaattcgaatgtataacagctattgataaaagaaacaatatttatagggaaaaaatcaacaacaaatggaggaaaaataagagagaaaatggtttttgaaaaaaaaaaaattgaacaaaaaggataaaaactaactaagaaaccacatttaaattgcaaacaacatagaaacttagttgaattttaaaaaacaagaggaaaaaatgaaaagaagaaagaaaaaatagaaagaaggagaagggacgaaagataacttagggctagtttggcatgtgctgtgagaaaaaacagctatagcaaaactgtggaaaaaagctgagctgggtatttggtaaattataaattttaaagtactgtga

SEQ ID NO: 40516 - DNA, 1708 bp, Cannabis sativa
ttaatgataaagaaaaattaatataattacatttgttatattaattattatgtcaattttaaaagaagactattttgctaattaaaatatttgaagagttattttactaataaaagtttccataaagactattttaccaactcactctggaggtaaggtgggctagtgggggttcaaggttcgtctggatgaagaagttgaagaagaaaaaagagaaagaaaaaaaatataaaaaattatttttttatgatttttaaataatatattttgttttttaaaataattttaattaaaatataattagaccaataaaattttaacacatgacatttttaaataagtaaaggctgagttaaaaagaaagaactaacatacttaaaaaaatattacttaaaaattaggggaattaccccatatactttttttaaaaaaaaaaaaaattacggtttaggtttccaaagaaagaactaacatacttaaaaaatattacttaaaaattaggagaattaccccatatactttttttaatttttttttttttaaatttacggtttagagttctaaagtgcttgcagcgctagttgtaataggggtttctatatgatttttcgttacaatttaagttgcaacactagttgcaataggagtatctatgtagaatttcgtaaaaaaaaataaattattttaccttttgtaaaaatgaaaaagcctgtaaatattattaggtcaaaccaaactttttaaaaaaatttacggcaactttccatcattaaccaaattacttttattttttgagagaatgaaccaaattacttcgtatcatatttattatttggaaggactataataggtgtcaatattcaaccaatcacaaatggtggcttgggagtcacgatcaaaaaggcttatatatactcgattttattttagtgtttctcataattcaatctttctttcttcctcttattagaaagagtgagttggcaaaatagcctgtatgaaaagagtaatttgcggcataaatacttaaattttatgccgagtagcagatagataccaaagtcctatttttggcggtaaaaatactttccgtcactactttagaactttcgtaggtacctctccgttttctgtcttgtaatgtgccagatggcatgatatgtcattaaaaataaatgccacatcattaacaataaattattatatatgtcaaatagatgtatatgtgacaatatttaattggcccatgttatttaaaaaacattttaaataaatttttattaaaaaaattatttaaaattaaaagaaaatacaaaataataattaataaaatttgaaacttaaaataaaaattatttctctctctcttctatctcgtttcttcctcattctcaagttctcaatggctgccattaaaatacttaagcttttaataaaaacactgatacagttaagaggaagatctagactttttttaaaaaaaaaaactgagcacattaaaattgatacacctattcaaaatcacacttaagcttttaaaaaaaaactgaaacacttcacaaaatttcagatcccaaattaaaaataattagatgtgacttagatccatatactaaaacttaaacattggttgtatgcagggccggccctaggcataggcgggctaggcccgtgcttagggcccacactttccgggggcccaaaataa

SEQ ID NO: 40517 - DNA, 5051 bp, Cannabis sativa
atctcgaaatgataatacatatagaaaagttcttaggtaggtatcagaggcgtcacttttgctctttattgttttcggtatatagagaaattataaattaatttttttaatatgatggtgtacgttatagttatactagatatactgattgttttcgaaaaattctaaataatttacagtgtttaaaatagaattcaaacagttagttgtacgtgtgacaataaactagtttgaattttatttttaatattgtaaattatttaaaattttctaaaaacatacaaaatacctattataactataatgtataacatcatataaaaaacttagaatataatttcttaaagccctatatattattgttttatactaaatatgtgtatattagtgttattacataaagaaaaaaaaaagggtcccattagagcaaaagtgggatactattagtggaagaatttgtatggtgattattattaaaaaaaatgtattttttttactatatatgttgtgggtaatgaaagtattgatttgtagtaataacatttgtgttaaatttagcaaattttgaagaaagttgagacctttagtatgagagagagagagagagaaaactatgttgggaaacattgatgatgatgagtgagagagactcaaggaaaagtatgtagaagttatttgaacaatgattggaacttttgtatttatgtaattagaattattataagagtaactgattccttcacatacaactttcttacaatttctctcactgtctgtctttttctgtgtttgttgtgtatagagtcagtctttccagcagtgttcacatggtgttctattttttatcacatgtccatgtgctctctctgagtaagacttttcagctatataataagagagaaactcattaattaaacaatactcacaagtcttaatcacattactaatattaattaactacacatgcagaaaaaatgggggaaaaattaatggtattatgctcctaaaattattagtgatgttaaatatttcgccttaactttgaacatagtaatttatgagatttcgattagaattttgtaaaataattagcacgaagtatgagaacttttaccactttcactattcaggaggcaaaattaataacagaaatcttatatttaattaacgttcaaagttgataggaaatatttaacatcagtaataacttaagagacaaaatacttatttattcaattaagagttttttacagttaaattctctaaaccatcattcaacttgcacttaatctttaagttcaaattttagtggtaaaaccctccatattataaactgttagcaaatttaaagagacatttatttttcacagttaactgtcaacatggactgcttatatgtacactcttgtacatgtgacacgtttatattagtacacttaatattattatttaaaaataacttgtcacgtgtacaaaattatacacataaatcatctatgatagctagtaaccaaatgacactttaaatttactaacagttcagtaatttggaaggttttaccgtcaaaatttaaacttcaaaagttaaatgcaagtgaaacgatagttgacgggatttagctgccaaaaacttttcaattaaatagataattgaaatggacttaagaatacaagtgcagtacactctagctccataattatctcatcatcatcaccacttcttgttatcctccatccatacagtgttataaaacaccactatgaaagcttccattcagagattttttggacttgagtgagatcccaccaccaacatcagctgttgctgtctttagtctaaactaggaagagaaactaactagactaggctagactagttgcagttgcaactaacaacagctgaagaagagacctcatttttgtggccacagaaatgtggatgggccacaccattttgttgtctatcacatagctatatgaacttaagatgggtcactcactattggattctagtttctttactatggtgctaataacatcccagctgaacccgcggtactgaagccaccgaatgatccttgatttcctcttctctttaggcacgtcttggccccctcgtagccattgtttcgaggcttgaacaagcaaacgatccatcgatggctctgataggccacgactcgtctctttgtgttcttcggattctccatcttgaaagactatttgtattgctttctctatatcgtctttacttactcccttcctataaagtgcctgaaaagggagatgatttactaaacaaagttaaataaacagaaaaatgataactttggttcaatcttttgaaattgaaaaaaaattcatacataaaagataatgataaggggatttggtaagatagaaatgatgccaaaaaagtaggctattcacaaaatgatgccaataaataggctattttagccaattatttcggtcaataagtttcaagtaagttttgttcaatctttgagaagaatttcatacataaaaatgatgttaaatcagatcttgttgtgtagaaaaaagggcatttggcaagattgaaatgatgcccaaaaaaattaggctattttcaccaattatttcggtctaaatttcaagtaaaaaatgaatctgaacaagcgtaaccaaactttttcactccaaaaaatgaagcttgaacttagagctaccagctgagaaaaatattagttaagagtaaggactccaagtgataggaaatctgttaaaattagaagtatgcctttcataagaaagtagaaaatttaacttaaaaacagagattaacttacttgcttgatccgttgtggtccccagctcgacgaagaccatctagattgacaaaatccctctgcatacatgctatcattgatgaaccctctaccgaaaacagaaacaaacaacaaacttgagcaagacaacaaattttgttcattcaacatgtttaaagaatgtcactacttggtaaagtttctataatttgaaatcaactgaactaagaataaaataccaccatttgcgaaaataccctcagctcttcggcgagaaaggagtaaggtggaagaggattaaagttaaaactcccccttatacattaatgaaagaccccagttaagtatggaagtggttattatggttggaacgaaacagaaatttctttgaacaagaggaaagtgaggaagagaggttcgttgtgggatagtgtcaaacaaaaagttggagatttttattgtaatttttttatcaattggacaaagaaatgtacatattaatgaaatgtagtataatgatattcttagttcttagaaatgcacctgcacttatagtcattaatcacttcatcaacaatatccagagagaatttttttccacacaattttttccttagttcaacagcggtgaaagccctgcaaaaacatccaagacttcaaatcgaaaagattctacagtgtatgaaactatagataatcaccaatcttacatcaaaaattcaggacaaaatttgttaccactaacctcattgctagtaactttatgaccagtttctcagcatcgagcttagttcgatttttctgaggtaaattatcccgatcactactattctctcgatcaataaataactcttcataaacctcctcatgttcttccattacattatctactcacaaacaaaaatcaagaataaatctaagttgttttagcaagttttcaaagctgcagcattgcaaagaacttgacataaaaagttcataccatgttcaaactcattaggcaaaaacttaaaagaaggcgtcggaagatgttgttcgaatcgtggcttcgaattaaaattgtttcttttctgcacaccattttcatttccatttccactatggttactactaatgcctactacattgtcaaatggagttactgcttctgaaaattcaaaaaattccttcttttttgaacccttgttgataagctcagaattcccaatttcattacttttagaagcttttttaggaatgtatctaataggaactgaggaattataatctctactcttcaaacatgtgattgaactattattcttaaccctgaaaatgataataatttaaatgtaaactttggaattaaaatcaccacagattcaaatataattacaaatttgggttctaatgatgaaaattgaatctttagaacttcaacatgctcttgttcaatcaaaagatagagactttaagatcgtaccagggaattcgataagctcgagaatgaagttggaatattagggttttgatggcagaagatcccagtgaaatcgtcattttcttcccccaattcgattgttaaatttcaaattcagattaaaccctccaatcaaagaaccctaattttacttggtagttgtttgttgttagttaaagttaacactatctacgacaacaatacattaaaacgacattcacttcgaaaacgacataataataattggagagtaaaggattagaggtaaaatattaaggaataattacattaagtaaaattttttataaaatttttatatctttatagattttttttttatatgttttacggtataaaatttttcgtgcaaatcagcttacttagctcaggctctagagagagcccttcactgtgaggttgccccatccatgtggaataagctgtggaatagcaatattttggagcgacataaggtgctctgatggtgtatcctttcaaatgcactcccggttagaaatgagattaaaaacgttttcagatcgaggattctagctgtcctttgtgtggtttgagagaagaaattgttgaacacttattcctctcgtgtgaggtggcgatgcatttgtagcgatcctcaccttggggaatttatcccgtttttgatactggtattcgtatctgggactgggtgaaattcatttgggatcttagaaatagggggatccgggttgaggaagttttcctttatgcttcaattgttgttgacactttatggagggtgc

SEQ ID NO: 40518 - DNA, 1268 bp, Cannabis sativa
agaatatattttacagttaggagactaaatatctactaaatatctactaaatatctaattcttttacagctaatatacatctaatatctaacactaagaaatatggggaacggagaaatatgttatttcataaggtaaatccattaacaatacattgacaaattatgagaagggaatattatcgtgcaacgagtccttttatgttgtcgaagctctattatagcctagttctttaactttaaagaacattgaagatctctttagattggaaggacaacattttacaacacttcctacactacaaaaccagctgagcaagggcactaggtggaccaacaaatcaagtgatcttgcaaatgtttcaagtgcaataagtctggtcatcatcttccattgagtgtccaaggccaagccaaggactgtcaaatgtgatggacgaagaaaattgagccaattcaagaaataacatatttacacattataaagttaaacttgtgagaaaaccctctacagacattaacaaggtagaaccaaagggagtagtgaggggaaaggagttcaagcccagcagacgagacaacctctttttggctcggtgatgacgcaaattgcctgcacttagaaggtctggaagctccattgtgaattagacttacaagaagttatgctcgttttcctttcaccttggatgagaattctgctcatccaccgcggtaggggaggaatttttaaaagaaaggatgacgagacgagaatcaaggtctaatagatctattcctgctaccttatagtaggaaggattactggtttgtcttatcttattagtagcagtcagtgggaagaactagctctggcattcaagcatgaaccagtaattggatttagcatttgttggggatggcaatagattaggaaggggcctaaactaagatgttttttctttcatcgtgtccctagttattgtatacaacactctcttattacattgctaaagactgtcaaatgtgatggacaaaaaaaattgagccaattcaataaataacatgtttacacattatgaagttaaacaacatattaaatacagttcctcacttatatacttccaaaaattaaaactgtgaaacgatcacttatgatccatttctacatctgctcaagaaaaagaaaattgtaactgccgaaacatatcaaacgcatcaattaaaggcagattataagttaattagccagatcacttggaataggagttgatatcaaaattgccattg

SEQ ID NO: 40519 - DNA, 1387 bp, Cannabis sativa
  modified_base (62)..(62): a, c, t, g, unknown or other
gtacaatatataaaaaaagaggtatgtttcaattaaatttaaaattagaggtaaatttgatnaattgattaataaaagtggtatttctcaacttacctaaaaaaaataataagaaaacattaataagagtacaatggaaaaatacagtggttgttaatagattggataaatactatgttttgtgtgaattttttttcttaaaaagaaaaaaaaaaaaaaagaaatagttgtttaatttgagaaagtgataatgatataattatttcaaatctagagtgaatactgttaaaaaattcaaccgttgcaatgtgagtgatacatggaggaattgattcatcctaatacatttcaaaagaaaatgagaaactcatgcaattaggacttgctaatttagctctctattatattgttgatgaacacgtttggggtcggtttcgcttcctcgattgattgtttcatcttggctgatttataacgtctttcatgaaatcttttctttccaaaataataataaaaagatatgcatttgggatcataatgagtacattgactgagtagtgtatgtctctgcttattgataaaaaaaaataaaaatataaatgaacggtttgttttttttgtcaaagtggtgtgctcttaactttttgcgtgagtgtttagctgacctaattatagacgaggttgaaaataaatgataatcagattcaatagctctctcaatctttatattttgattccccacttgtaacatattttgatttttattacactaggctactagccatataagtttgctatattccaaattatactcctatcctacatattttagtgtaagaaaactctctactcttttgtacaattaattaataattatcaagtaaaaaaaaagaccagttaacaatattactaaatattttttttattaaatccatatggctaattacaaaaagatgcactcgttttttctttaaatacccttttaacataatatatgtgaaaataatcatacatggaagagtgtaaaaattaattaatattaatgcttcctttcctcatttccacctccatctgtgttactaatttttctttttatgataatagttgaaatgtgcaaaatcaatttggttgatgtatccaacattcaattaatttaatattcacagaattttcacactattctatctgcattaatggtcaacacatgtatgcattttgggttgtaccctttcgaatgtaagtatagttttgttcgtgagggactataaatacatatatatgcaataccaattaagtagtagcatagcagtatatacagataaaatttcccaagaaaattatataacagaagagaaaaggggagtatataagaaaatgattggagaac

SEQ ID NO: 40520 - DNA, 1128 bp, Cannabis sativa
atccctacgggtcgggtccaagcatcgaatcttggatgtctcccgaggtgggtcctaggtctaggtttgggtaaggtgtcgggtcccggatcctgatccacattttgaggcctaagttttattcccgatttgggggactaattcaatggtgagggtcccccatctatgttcatgtcctaggtctcggtctgggtctaagtttgtgttttggctcaagttcgggtctcgggtcctagtctgagtccaggtcgcgatttgggttcgggtcccagtcctaatgtgggttcgagtttcaggtcccatgtctttgggtctgggtctgggtctgggtcccgatctggatccaggtcccggtccgtgtccaaggcccggtatggattctagtttgtgtttgggtttaggtttgggtcctattactgtcccaggtctagcttctagtaccatacctggtccaattctgatttagggtccgcatttgggtatggatccgggtctgggtcctggattcaaacactaactacgggttaggtcaaagctgcaggtttagattcggatatcggtgttagatctcggtcttcttcaagttcaggtcccgtgtcttgggccatgtcctaagcttgggtttgggtccgagttcgcggtgtgtcccagtagtcaaatcctaggttccgagtccatggtcgggtcatgtgtctcgagtcaggggttgagttttgggtctcggtcccgatttcagggcccatttttaagtacaagtccccactctaggttcagttccttgttccaggtctgggtcctaggtctcccatctaggtctggatcctaggtctcgatctaggtcaaagttcaggtttaggtttggatctcgagtttggatccgagtctaggtcctagtacgggttcagggttgagtttaggtccagatcccagtttgagttcaggtccctgttcgggtccgagtcggggttccaattcgggtcccagtcaaggtctaagtactggactagatctggtttgggtttgagttcaggtttttgtcgtgagtctcggtctaggtttgggtcttggtcctgggttccgatctcggtatgggtaacggtctacgcccgtgtccaggttagggtttag

SEQ ID NO: 40521 - DNA, 2189 bp, Cannabis sativa
tgtgaagtggcttgtggagaaggagtagtgttgtgtgaatttagagcagaatcaaggtcaagagagccaaattggatggtgttggaactgacaggtgaaggcattgaaggaatgacaaaagcaggggcaagaaagtttctgtgatatgttgcagattggggtttggagaataaggtagaatatgggaattctttctcattaaaattgacacttcttgcaatatatattctacctgaagagtgaaggcatctatatcctttatggaaagggctatagccaagaaagacacatttagaagtcttgaattggaacttgtgattgttgtatggtctaaggaaggggaagcaagcacacccaaatgtttttaaaaaaattataatcgggttgcagagacattgaaaaggagatttgtattgattgactatggtaggcaatctattgatgagatagactgcagaaacacaagcatcccaccaaaagttcaaaggcattttggcttgggctaacaaggttaatcccatttctgtaacatgcatatgcttcctttcaactctaccttgttgttggtgagtgtggggacaaggatgtctaaacaagatgcctaactgctgtaggataggttgtaattttctgtattccccaccccaatcagtttgtaaccccttgatagatgtgtcaaattgcttttccacaagagttctaaaagagagaaatattggaaaggctttagttttgactttcattggataaatccaactatactttgtaaagtcatcaacaaatagtatataatatttataaccttcagcagttgggtttggggagggtccccaaacatcagaatgaataagttgtagaggctgagttgtttttaaagaagaactactgaagtgcattaaatggtttttgccaaattggcaagcatcacaaaattgtaactcagatttagagaacttttgtatttatttgttgaagaactttagtaaggattacagaggagggatggccaagtctattgtgccatagtgtggcaatacaatctgaatttgtacaagaactagaaacattataggccacattattcgaattgttaaaagctacagtgggggaatacaaacacgaatttgcataaagaaatggtgcagaagaacaacttgttgttgggagggatagcttgtacaagccttgactaagagttccttgaagaaggacctgcctcttcatcttgtcaatgacaaaacaattgttagtatcaaacttgataacgacattattatcagcacaaaactgagaaatactgatgagatttttatgaatggtgggaacatgtaggacatctttgagtatcaaaggtttagaaaaggaagaaagataacaatttccaatagcagaaatgagaagagaggcaccattacctacggtcatcatgcctttccctttgtagtcaactttatcagtcaaggaattggcatgagcagtgacatggtgagaagcaccactgtctaaataccattgagaatcagtcagtgtggatgcagtagcaagcatggcttgtgcttcagcaggattggattcttgattgttagagctttcttcaccttgatagctcaaatcaaaccgatgatagcattttaatgctatatgaccagtgcgaccacaaacttgacacaccggtcgattgcctccacgattattgggattacggcctcctctgcctcttgtagagccacggccacctctggtggaattcgaactttgtggtggaggtcctttcttatttgatgcagcataattcgcagttggattttgcagatccaaagcagctatggagttcatttgttcgattcgaatttcttgcgtttggagcaagaattgaacttcttgaatcgtaacagtttctttggagataagattgacaatagcaggatcatattcgctgcctagtcctccaagaatgtacaagatcaattcatcatcagagagtgcatgtccagccgccattaacgcatctccgagacacctcattttgaggatgtattcatcaatcggtgtagatcctttctttgtagattgaagcagccctctaagttgaagtattcttgcacgagaggtgtttgagaagagttgacgaagcacttcccacagttctgcagcagattcacatcgtgcgacatgtccaagcatgcttt

SEQ ID NO: 40522 - DNA, 2236 bp, Cannabis sativa
tggaggcttgaagcggggacgttacatacgttggctctaaaacatgcaccatatcgtagagcttgtcgtaggctttgaaacagtatatttaacatccaaaattgacaaccgagtaaaaaattatggccaaaatacgaaattcgactttttcaaaaactgatcaaacgaaattccgattggtacattcggaattctagttctgaacaaccaagaacacgattttccttaacttgaaccctccaaactagctctaaacctaaccaaatcattcctaacatatataccatatatacaacaatcatttcgtaacagaaattaaaatcgagcccttaaacggaaaatgccattaaagctcggacctaagctttaaaaagttccaaactctcgacctcaaattcaacaagtaaatatcagaactattcccaagactacccgagaataattttataaggtcagaactttcataactattctaatttgtaaaatccctatccgaaaccaattgttttaaacttaaaactgaaataaaccttaccttaagcattcccgctgtgagaattttctatcccgctactaccggagcatatatcgcaaagtttcggattgaaacttgaagaaaataaatataacgggagagagttttgacacagaacaagagtattgttacattaataatattaatataatgattatataatatattaataataataacagtcagattaataataataatgatataataatattaataaaaaaaattatcaatgattatcctattatttcttagtcactaagaaatttttatgtctagggtgctaagttaaataccacatactcttaagtactctaatacctatattatcaagttatcacaatattctaattcaaactaataattacactagttatggtatttttggccaccgatcgagtctccaaggttgccaaacctaaaaatatttgtgttccacatatagctcatattacatttacacatgctatataaatctccgtaatttataaattatgcttatttatcatgttatagcaaatttaaaatttatgttgaactagcttagtaggatcatcatcccacttatcatctaattaaaccataatataattataaaccctaattatttaccattacgcatatcaggatattacaaccatcccctccttataagaattttgtcctcgaaatttacctgaatagctcgagatacagctcccacatttgcaactctaatttccaagttgcttcctcataaaataagttgtctggagttcaatatcatcgtaactcaaaatacgtgttggaacggacacatactttctcaaaatagaaatgtggaagacattatgctccgcggacacatactttcttaaaataaaaatgtggaagacattatgctccgcggacaacacgagttataaaactaattgatagaccacctggcctatgtgctccaatatctaaaaaggatcgatgcatctaaggcttaatcttccattttttcaaaatctatgcaccattttcataggtgatactcaaagaaatactgagtctcccactagaaatttaatatccttatgcttcaaatcaacataggttttgctgtgtactcaatgaagcgagtatacaactcgaactcttgctatgactttataagtttcatggaacttttcggtccatcgtgtgattttataacttgtgttgccctagtgaacaagtgcccaacatctttttcataccacacttattaaagtacctaacgaatggtacatttgatcatcacttttaaacaaacacttcgtcaatggaagagattattctaagataatctaatctttatcaaatatgctcacagcatgtttctaatattccattgattctcccagattagctacatttcaagaataaaacattatactatttttactttaattctcattgttctcgataacctttatcaattctcacatcatagctaatgatatcaactttgatatttcacaagattggactattccttcgtatgaattacatatcctcatttattgtatagattgtctgcgctgatacacaacatattaactcagtatgcccaatcgttactactcggtcgaactcataagatatcacaatatatagttcataattgcatctttctgatcctcctatgggatctcctaaaaaaatctacttacttaacttattaacaagttaagt

SEQ ID NO: 40523 - DNA, 1506 bp, Cannabis sativa
acaattgctccagcccttgtgattccaaaatccattttaaatgctggtttagatgcttctcagattgattactatgaaataagcatttttttgtaagattttagtacttataatctctctactgttcctgatttagtaagctttttttcttagtttcattcatttatattttgttcttttcctctccaggttatagctctagccaatcaaaagctgcttggttgtaatcctgtaagttagtagaaaactagatcatttgtttcaagttggtttagcgtgctataagtctaaaatatatgctatttcaaatctaattattcctacattttctacaattgctatagtatgttttatttgtccactttcatttgattttattcattttgctcaatgtctttatctacatttttttcccttctaattttcacgtatttcaagaatgccttaatgtacatggtggggctgtatcattgggacactcacttggatacagtggagctagtatcttggtcacattgttagaggtaatttataagattctcatccctagctctgcgtacctagtttgatgttctaatgtcattatatagttctctggttttgtttaggtgttctcttattgatccaaaatcattatccataatcatatgtatggttacattctctaaaatataatagacatgcgaagtgacattcttttaaatatctgttgagagtttagttgcggtggatttaaaagacattggtaaatttgctctctctagtgtatttaacttgttggaatttctaaaatgaataatgttgttgcaggtactgagacattaaaatgtaaagtacggggttggtgccatatgaaatggtggtgggggagcttcttcacttgttcttgagctcatgtaagacctgtaattgtttttgagcttatcttttccttttagaattcattgctgttaaactgttggacaggtgatgttgggtgttgatcgtcttgacatgatcaaaggaatcccacagaagattttggctttcgaaaagttcctagaggagaatccaagctggcgtgataaagtagttctacttcaaattgttgtgccaacaagagcagatgttccagaatgtatgttcattatcaaaatatgttcctacccactgtctgttatgcctatttttttttaagtctatctgtagtttgttgtctaatgttatttcaatcatatgactatcattaaatttatatcatctcaatcaatttataaataatagagttgtttattattgtataatacagatcaaatacacacacaatgttattggtattgtgtgattagttaatataatcgattactaattttatgtaagttttaaaaattaacttttttttttggtattatgtatttactattataaagaataattctaaaatttgataatgtaggtgcaaaaaattgtatgaaaaatttgcaatttttctttacttatatttgtgcttcattttataagcgacgc

SEQ ID NO: 40524 - DNA, 1683 bp, Cannabis sativa
ttatttagggcgttacaagcactcacaatagcttctctaaaatagagaaggtttaaaaaatttaaagaatcatattaaaaacacgctacaacaaatgctctaaactcattcttcattttaaagcttttttaaaatacattattcatgctctatatttataaaatactattcattgttctaaacatatttattgttctaagatactattcatattattaattatttttgtatggggatatgtatatatactaatattatatatttgaaatgaaaaaatgaataaaatataataaatttttttaaaaaataggaatttgatgatgtattttaaagaagttgatgtatggtgtaatgttaaattgtgctgtacaatagagaaagtagagttatggtgatgtatcttaaatgataaagtaaaaaagttattggaagtactctaaaactaagaaatcgcttagctatatttagctatgcactatttataaggtaaatttttgaactattttagctttatctattggatatgattttttgatattttttttaacttttagagcactcacaacaacttttatattttatcttttaaaatacattatcaacacctcactttctctattttactttaagcttttacattatatcatacaacatcttttttatatttcttatttattttatttaaataatatgtttataaataaaacattatatatatggtaatgtgtgtatgatgtgataagaaaagttaaaataatattaataaatttttaaaagactactattcatctagctaaatgtggagaaagttttagatcaaaattttgtgagataaaataaagatgaggtaactcatatgatggagctaatatttagcatctttccttaaaaattttacattttagctattataaagcaccagtagttgggagtgctcttagctatttttttttttacttctgtaactattttatattaattattgtgaatactcttaaagcttccaaataagagattatgggttgaatgtcgatgaagctcggtatagttaaagcttttgatacaataaagtggtctttctctttcttagaaaggatcatgcgaaaatttcccttctcgtttccaatccctcattatgtcttatatcacctcagcctcttttaaatttaacataaatgaccatactcttggttttgttgactactaagagcactaattttaaattatataaaattagatagtttttaataaaagcgcttataaattagaatgaaatctatttcaaatttttttggcttttgaaataatgtttatataggaagaagatcattcaaagttattaattttgatattaatattttttttttgataagagatccatccatccatggttgttgtttttttttttttttgaataaaagagatcccacaactccttttgataaagtcaactttaatttctaaaaaataattaaaagcaaataatattaaaaaagtaatagcatgttcacagcacattttaatctcatacatttttattattcaaccaattaaaactaaaataaaatacacttataacttataagtgagagcaaaatggtactcgatctactatatttatatatataaacatatatattttcaatgatttgacttttttaggggttcaatccatcatgtgac

SEQ ID NO: 40525 - DNA, 1543 bp, Cannabis sativa
ggtatggcgggctgaaaaactcaattattttgtcatggctaattaattctatggatcctaaaatcatctataagtacttattttttaaaacgactaaggaagtctgggatgttgcacatcttatatactcagacctcgttaatgcttcacaatatttgagattcatacaaaactcaaaaaaatgtaacaaggtactcaatatgtcacccaatattttttagacttacaagattcgtcgtaggaactcgacctctatctcgagaccacacctttatgcactgattacaatgtgaaacaatgaaaacacctcgaaaaagaatgactgttttaatttctcactaggttgaataataacctagatgaagtacgagggcgtgtagtcagtcactcaccattccctgacactgaggaagcttttgttgtgaaaattatatttatacgcaagtgcacgcaatcgacaacaagtaatataatgataagttgagtatcgtctccacagggattgcaaattaaaatatatgtaaaaccaactaattaacaacttaaggtcttttggaagaaaaataaacaaaaacaaaatggatgattcatgaaagtaaaataacttggtgacaatgaaaatatgctcaaaataaaacaacaaatactgaaaaattatctgcaagaaaaagtatctattgaataatagacttaaatagctgaatccccttacgttaaagctgtccaatttttacaacattactttagcattattttagtaaagttgcacagagttaacataatttttcttgtgtttatgagatttttccaaaactcacaaatcaagttctaccacttagttcaatatattcctatatcaaatcaggttgcagaacaacaattagacatcaattctcaagttatgcaaggtaatgaaatatccatattctatttactaaggaaaacctaaacttaataattcacttgcatcatccaagttgtaactactagatctagccttttcaaaaccagatctagcttagtaaattattactcatggccaagtaataacaattattaagcagtaagcttacttgaatgaacaaaggaaaaattgctaagatcatgcattcaatttacttagttcaaatcatgagggttcatagctattcaaatctcaagaagcttagctcatgttcaaaccagtaattacaattcaaaataaaatttattcatccatggctgctacttagtctttacaaaattaacaactccaagtatataaagaaaggaacaaaatagaagaagaagaatagaaattcaaactaatgaagcttgtgttctcctccttctttgctcggttgacttcctcttttagatatttgattttcagtacttttctttttgcaattaattctttctctcaaaatggcagctgagttcattaatggtaggtcatttaggtacaatctaataccctaaaaatagaagtttatttccttcttttcttggctcacttgccttggtctcctattctcacgttagccagctgacataacctaag

SEQ ID NO: 40526 - DNA, 1755 bp, Cannabis sativa
tttgtcaaaccagcttttttatatattatgtaatataaaaataattatttgttttttgtctcgttgtggcttgtgttgtatatgtttagttttagtttgtttatatgcttggtttgctttatttggtatcattgttcaagttaattatttttcttaggtttattttaaaagcagtgtgagattattgtgacattttcagtttgagagatatatataatattaaaaataaattgtttttattatttttataacaaaataaaaattaatattttaatttaatattatcattaagtagtgtatgttgattgaattttatacatttatgttataaatgtgctttggctttacttatttattggtttttcaataaagtacttctaaagatttttatgagataaattctaatgattatttattttcttaaaacttctttatgtgtataattttaatttctatatgtcttccctacaaatttgttaataatttatttttattttaataatttgtaaatattcttttagtgtgatgtaaaaaaacaaaatgagtatttcacaataaaagactttaatttaaagctttattgtatctttgcatccatagaaaaaatattttattgtttacaagagatctatatatatcttccttcatgtgttggtatcccttaattttccaataaaattttttaataacaaatttttggaacctaaaaaaataataatataacaataattttgatttaggtagcgatattatttaattagcctgaattatatatttcacattcatttaatatcgcgtctttttttagacaacaaaagatctattatcaaaatttttaaattataaagttaaattatataataattgcataaatataaatatatattttgtgtgccaatattttgctttttatcattattatttgaccaagattaataatacactttgtttaattaattaatgaaaagtatatgaaatctttatctataaacttttctgaaggctcatcgatcaaatccgttggatatatacatatctgtcgctgaaagtattttcgaaatgtttgtgaattctaaagtctaatcacttttttgagaaaattaaagtaaataaaaagtaacaataataatgatcataaaaacaaatctatatataatctatattaggagaattatagagagttcatatgtcatatatacattagctttcccttatagtttttatttttcttttacaatttaattttttaataatttaattttatatatcattaatttgattcattagtatgtttactttaaaaaaaaaatctcacaatggcttaaaaattattataagtgattaagtctatatataatttactatttgctaaattagtgttacattattttcttataggcaattaaaaaatttaatcttacttattatatattttgtgataaatgcactataaattttttacaaatttaaatcatatggtaaaaatattaaaatttaaaatataaaataaaataaaaaatctatcgatctctatgggcgattaaagagcttagtattatgcaattagttattatttatttagaagaatgcaacatatatatatagttttgtattttaaaaaatgtaaatttttaaattatctatatatctatattcagtgacggatccagaatttttgttttgtgggggcttatttatcattaaaaaatatttatacttatattataatccctcttactatatttatttaatttt

SEQ ID NO: 40527 - DNA, 1039 bp, Cannabis sativa
ataacaagtgttatttataacctacatggacaacaccttaatagtttctaaatcatgtagaactttaagattgtatgtatagtagtttctttctaaacaaattatgaaaaaattcacaaaattttaaaaatataataaaaaaactcttaggatgctaaagtccttttgtgtttttctttatatttatatatagctacagattgtacaatttttttatttttttttaatggagttagttaaggatatgaggtcaattgttaattagtttatgattagtaactaaaaaaaaatctatgtgtatggttgatatatatcaatatttaaatattatgctatttagaatttttgtatgacatatatattgtatctcaaaattttgtggcttgttacaaatggtccttaaactatttatagttttgtaaattggcttttctgtcaaaataatgacatgactgtttagccagtttttacattagctacatgtataatttaatatttaagaaaatataaattatacatttttaaaatttattaaactaaaaatcaattaatggttaagaaaaataagtaaaactaaattaaaaaaaatattttttcaaattaattacaaatggcgttgacatgatacggacgtggtaattgactaagcagccatgtcattattttatttatcacatgtgacaaaatttgagaaaaagatacttttacaacactatgaatagtttaaagactatttttaatgattaaaaaagttcaagggatacaataatacataggtcatagttcggggggtaaaaatcctaagttgcctatatgtaagcaaggttgttaaaattaaaaggtagtttgaagatatatttaaaattgatattttattattatcattttttattatttatgaaatggttaatattattcgtgttttcggataaggacacgtggagttcccataacaaatacgacttaaatgttccaagcccaatagcaagccaaatgcgataactgttggactttgtgccttaaataaaactctgtttca

SEQ ID NO: 40528 - DNA, 1224 bp, Cannabis sativa
cataaaatgtgtaattttcactttattttatcgtaaaatttacaaagtcttgtattttgctaggcttagttgtactctaacaatttacaatttggcactagacttagtaaaatttatggtaatgcggagagttgcgctatctgtggtgaaaatattgattcgtttgttcatctcttctgcctttgctagttggctagagctctttggttctctagtccttagtcagttcatagtgagtctctcggtttcactaatccgcggaagctggtttgttggctgctagacccccttcttccccacggttcttctaatgacgactctctttcttttagcagattcaggatctatctttgcttcgaattgtgggaggctcataaccatgctttccatgacaaagtggttcccaatgcaataggtgtcttgtgcaagattaagaagtgtcttgcttgtctttcagcatttggagggggagtcccctgggtcgcacaacatcagggaacaaagtgtgaatttggtggagagcgagtttcgaggaaaattgtgcatcgagcggcgactgatatagtggttaaagatgctaaaggtcttcttgtggttgtgcagttcaactgtcttcctccgatcctttggaggctgaaactctggcactttctcaggttgtgagcttgtgcatgtctcggggctggcatgactgttttgatttcgatcccacaaggcaccaattggaggcttgctcaaagttgttagagcttctggatgcgatctctggtgtgaagttgctgtgggcaactcgtgccttcaaatggggaagctcataacttggcagcttgggcatttacttctgcttcttctggttttctttttcggctggggagttggctcttcttgtagccaattaatgtagtgtttgttttttttctggtcatgttgtaaaatccaatcaacaacatgattcattgttcaattaagctgttttttttttaatttggggttttgtcaatcttcatttatatatgtaccaaattatgtttctaacatttatccaaaatcaccaaagtagaacaaagatagttgaagattaataaatgaccagataatttttgccttgttcaactagaaactctaaaaaggggtatacaatacaatgtaatttttatcaacacaacaacaaagtttaaacagattgactctaaagaaaaacaatccacacatcaagtttaataa

SEQ ID NO: 40529 - DNA, 2170 bp, Cannabis sativa
attgttatttgaagtttgacccaaataaagtgattgttttaataattgttggtcatttggtattaaagtgttacgggctaatgtgtaaatacctcaagagatacttttaatttattgagaggataaattaaaaatgctaaaattaataacctattaggttatataatagtagtggtccccaagaaacaagaacaattctattctcatcttccctcatcaagagagaaaattagaaaatcctaaatcttattttcttggaagatcattaaccaaaatcactagaaaggcatttaagttcttctctttgaatcaacaaaggtattctttagatctatgtttctcatacttattgttaacgtgatttttttattaactaataaatgagccttaattgacaattaaataatactgaaagatgactgtaaataatatacaaagaagttttgcgtcgttttaaagttaaatctttatagtccacaagttcgtcttatttttcacttttttgtttatacaaagtataaatattgatcgtaaggatctttgtattttcccaattatccccccttgtccagttacttgtgccactatttataaggatataagaatggtagttattccatttgttctagtcgttcattaaacgtggactattcccatgtttcatacaattactaacatgtatatatacacagttattttacaaagatacccacttgtaagttgttgctcgcaaatcacttagataatcttttatgtagatttgtctccatccatctcgcagtatacatactcttttgtaatgaccagtcttgtcttcacatatcttcgcatttcttaataggatgcatttatcctatatcgcttcgcattataaggtgacgagacgatacctgtgagacacatgtttggatattattttcacatttgattattcatgataaaaattttgaataattcttatataagtttttaagtaatgtatcgtttatgatctttaggtcgaactcctttatgctgtcttgttcaaccaataaagtttcttatcttgttttcttctgtaaatttacttttttttcatatacttataataagaattataaattggtaaatactattttagactctgtgttttgcaaaagttaccaattagaccctcagtttgttaaatgacaaaatagactctgtattttctaaaatggtacaaataggactttaaactaatattttgtcaaaataaaatttaataataatctgatttaaaggtatcatgacaaaactgtttacattttctgtatctgttcatgttaagaattatctttaagttggttatattaaaaaaaatttagttcattctctctccatagctatatgtagagatgcaaatttattatagctaagctataaacataaacattacatattgatggaagggttaagataagttttaagttaaaatttttagttattaagacactaattggagtgctctaataagatttattattttaagaagctcaattattagtacaaaataaaaatatatattaaaaacaaattaagttgtaaaatgttacacgtattaaacaaagcatcttttctttacagctcacaaatctttctagccttgcaaataaaaatcacaatcgaagacaagagaatataaagttctaacactaatcacacatcaaataaaaatttatataacaaatttaaaaacacaagaagtagctaggtagataataactaaagaaatgaaaaatcatacaattaataataacaataatactccattaattaatttaataagaaatgttattaatttatttttatttttgtgcaaaaacaggtctctttttggttccataatcggattatattctctttcggtgagttgagttgagtttaattacattaacacctttaatttaatggaatggagttcgattcccagttttctcgttcacacaatacaaaaatataccatattaatattcccaactagtatacaactttgatcataatcatatatatattaaaagaaccaattttcaatgtcataataaacccaaaatccagttttgccaaatatgaataatacccactctgctaatccaacatcattaactaatcacaattacaataacactaataatccttatgttaattgttc

SEQ ID NO: 40530 - DNA, 1695 bp, Cannabis sativa
tataaaaaatattaaatattattaatgtccaatcgtgatatttttttttattgaaattaaacaatcacccacataggaaacgatatacttacatattacatatgttgatgtcatttagattattgtatttgttgtgattgttgtgatcccaagttaatttagctaagttttgtttagttaccttttcttctcgatgagagaatattattaaaactaggtgaaaatttcgatgattaatgtatttctttagtgataatcaacccgacaacgcaaactcctatataaacatgtgaccccgtggaatacttaagcttttatcactaaatttattttcatataacaatgttaaaagctgtgctgccaagtataattagttgctttcagggttgattaattagagttgattttatttttacttactctgtagtgtagtctgtagtccagtttgctttttaaatgctttcagcttcaataatttattgcacacatttcataaagagagagaaacatgaaaggggtggttggcaaagggaatcatgattatcttcaaacatcaataaataggtataatgggccatcttaaatgatgacaaaaggaaagaagactttttctcttcctaattaattttttttgatgagactcttggtaattaaattattttttttatgagacttttcttttcttttattttctttcatatttaatcaattttttttttataaaaactaatggaatgattgacaattttaaaaaatatctattatgtttgcacatattatattttaaatattaaagtattgtttgataattttttttaatcaattttttaattataaaattgaaaaaataaaaatatttttcaaaaatatgttttataaaattatttttatttttttatatttttcaaaaaaaagccacttttaaacctggaaccaatcccctccccccaaatggccctggcaccaaacccgacttctgacccgatctcgaattcgatctcggaccctagacccaacttaaatagaataaaaaaataaaaataaaaatgaattttacagaatacacttttattttttgtttttaaaattgaaaaacaaagtagttatagaaagcatttttatttttcaaaaataaaatttttaaaaataaaaattttttcattttgtcattaaaaaattagaaagcaaaaatatttccaaatggtacctaaattaataaagtttctcgtgataaaaatatactttttttttctaaaagaaaaagaaaatatgacatgactattatctcttttgaacaacactcaatatctatattctcaaagtttattttacatacactttttggcaagaccattttaataaacaatccctatttgagatgtacagtaaaagtcacaaaaccctgcaaaataataattatgtttgacaaacacattgtttagagaaatgagtgttacaaatagtgtccaataacttttatagatgacgcctaacgattagttagcaatattttctaaaagctgttttcttaagttatatgagacccaatactgaattatactaatagcagttgttaacacaaattttcgttaactaaaattaatgaacctttacgtaataaatatatcacagaaatcataataaatgattaaataactctagattatttacgtggttttgcagcgagtctatctt

SEQ ID NO: 40531 - DNA, 1949 bp, Cannabis sativa
  modified_base (698)..(703): a, c, t, g, unknown or other
ttgatgcagattttcatttttttgtgtattaaattctcttgtatgagtttcatgagtgttaacagtttttcttcgaaagaataaatatgtgaaaaagaaaacttattatcacaatgggatcatgtttggattatttacttaaattagtgatttgtggtccctttgatgatgagccatgtggttgtggaggtggaggatgtgataggtgatggctaaggtcataactgattatattaatgctatacttactttttttgtggaaatttttgtgtagagagtagatataatatatggtccaagactctaaggtagaatagcatttgtttacacatgcattttatattaaaattgccttctagacagaaatttgtctaattgtattgcaaagataaggaacatttgaactttttcttaatacaagattttgtttttatacaattaatattattgaagttaaaatacagtgcacaaacgcatgcaaattttaataaattccttgtcaatactagctgaaagcaagatattttatagtatttaaaaactgtgttatatttagcacaaaaagtaattttgtagtaaatttataccaaaatttagctttgtgctcccatacacaattttaaaattttgatgcactatttaatatcttattaatgttttattaaaaaaataaaatttaataactttataatcaattnnnnnnttattttaatatgtaagacaataaaaattaatataaatgtttcataatttgatgtgcatagttaaatatactaataaaataatagaaatgacataaatgtaaatgaaaaagtagtgcatttattgtggtgtaaattttatattatagtgtcaaatttggcacaaaatttggtatgtgccaaatttacatcactttttagtacactattagattacattttttattaaatgagctatattttatctttttaatacttatttacacatttattgaagatcctctaatatcctaaaaataaataaggaatcatactcttcttttaacttggcaaggaatctaatgggaataagagatttactgttgaaagtggtaagatgtcgcgggtattggaaatgatagaaatggagagaagttcagagactcttgactgccaagagcacctttttttctctatcagatcttattggcccgcctagtacatagaattctattggtctatattgccaacaattaagacaattacaaaaatttgttaaatagatagttagtttttatgactctatcatatcagcaaagcaaggctctaaaaacagcctttaaacgtatagcaggtttagaggcttttcttctgtcttatctagaagtggtcacattataaatattagctaattttactgataatataatttttttttattaattggtaataaaaatttatttgtaattaaaatataatttctaaatataagttctcactaatttaattttagttacaacaattattgtgattaaaaacatatttcgtcacaacaaattctaatttttgtagctaatatttttagctacggatcttttaattacaatataaaaataataatttataatcaattacaactttttttactttaagtcacaatttttgttgtaactgaaaacaaaattttttgtagagtagagctggcacacaattcttatggttgatgcaatggtggtgagtacaacaagtttagtggatttaggtgctattatgaagataatagaactatgtcaacgttatgcaaattttttaaaggctagtcatcggggtgaatttagaggtcatttctgcaaatatttttgtagttattatatgttcttttatctgttttttattgttttattttgttctgctgaccatggaaagtgtgtaataatagaagtgtagttggatctaaaaattcagtttcctcattgttgatgcttgatt

SEQ ID NO: 40532 - DNA, 2062 bp, Cannabis sativa
aaaaacacaattttgaaaactgaagcagcctcttacttttcacatgtttggactaatcttttactgtgttttgtagacaaaagaagaattattgagagtcttaggactacaagaggaacaaggaagctcactcgaatttctgcgtagaggctacaaggtttctctctttatatagagttttcccctttgaatatctttcacaatttcaatttcagagagatttatgggagtgagaaacatgtaaatgagatccactaattagatgtaaaacatatttttctttttcagagtgctacttggtgggaagaagatgttgagttagaagcttcttcggaatggcgtagttgagcaggatcaacaaccaaagatatcgaaaatgcgtctgtgtattcctatgaatctgtgacaaccatactggtaattacaagatatatcaacactttgaaatatagttaattcttttatggtttgaaaggagagatgctgtaatccttaaaatcttaactctattgggaagagccatatgatttgtaaattcatttgtttattttggtttttctctctcaaggtaaattcattggaagtaattataagctttgagtttaagatgcttaaattcagttgattgttacgttagaatgttcttgcaaaaaaaaatggaatgtattaggatgataagaaagataatatagtatatactaaaatctgaaagaacaaaataaattggggatgggttaataatttgttttattttcttgttaaatgtaggagtggtaaaacgtgttattgttttatgttcgtgttatattatgtgactcgcttatttatttttaatgaacgcatatgttgtagttattaagtctatttgtaaatttttaataagttctgaatagtttacagtaccgaaaataaagtttaaacagttatttactacgcatataagaaacatctttgcgagtgcaacgaaatgtgtaaatcttattttcggtattgtaaactactcaaaaaattttataaattcacaaatggtcctaaataactataataatatatataaaaaaattagactaaataattattttgtatgacaaaatagatagaaggtttgccaaaatattttatttgggtaaataatagcataagtaattaaaattttaagtttgtaagtgacataacccaataatttttttaatagtataagtacccaatatttataaaattacaattctcttttggttggtagagttagtgaatagcctttgtattgataagttctttcaagtaaggtcaattgtgatgactttgttgcatctttgaatctcaacccattagaatctaagataaaaaaaaaccattagaatcatatacatacgtgttattattttatttatttttgaataatgaaaaaataattaaaataaataaataaaatgtacaaaacaaatggaccaaatatatctaaacaagtttttaatctactctgaatacatttgcaactaattcatgagatgatatagactagaaatacatcagaaaaattaaatagcaaacttgaaaaaacaaaaatagtataataattggagaaaatattcaacgctaaataagaaaagactttaaaagaaaatagagactaagatgcatccacaaattcacaaatttttcctccaactccaatattagcaaactgcaaatgaataatttgaaaaatacacaaaataaaataaagagatttttataccatatactttaatttcacacttttttttattgtgagacgaaaatattaaaaaaaattgtgttttttttcaaaaatattgtgtactgtgttaagtttcttctgttgttccactttcaatgttgtttttagttaatttattattatttttaattgttctatttagtattttatgattattttataaaaaaatagtatttttttaaaaaaattcatgataatattttttttgtaaaaattaattcaaattgtagtaatttttttttttaaaaatttctctaaaataaatagtggtaaccacgtgtaaattattgacattgtacataa

SEQ ID NO: 40533 - DNA, 1843 bp, Cannabis sativa
aattacatagttatagtgtaattacataatcagtcaaacatagcaaattatgtaatctaattacacacaaatctaattacaccgtgacttttcaagcacccctagaacttcatcattgtaagttcttccactcctcaatgcaatggtgaaccaaaacaaatttaaatgtgaaccatataaaactggaacgacttatttgtctaactatgtaatttaaaggtaattatatcattagaggtaattgaatagtcttaattacactattcaattctcataatttatgagatttggatgtagttatactgtttaattgataaaaaaaaaaattattttaaatattaatgctgtatgtaattaccaactatttagtattgtaaactatttgagatttttttaaaattttatttttgttgggaattcaaaattctatgaagattctgactaggtggtcttaaatataatgtagatgattatgaaaaaaaaattgaaaaagttgtcgatgcggtttttctttaacaaatttaagaagattataaacaagcaattgaacacaaagaataataaatcacaagtaagccgtatatgaaaaataataagagaaaacaagaaacactagatttatactcacctcatttcaataataatggagtaatcgacttataagtacctttatcactctcaatgcttaaaaaaagttctctaggttacattttttaagagttctttcttcaagtgagttttagttctagttcataggattctcaaggtttcgagagttctctctctacaaataaatgaattagctacttatgggtgtagcatctctaatatcttcctttaaattaggaagatacttacaaataaaacaaacaattaaatttagatgtctaaccactttgatatcaattacaatagtagtataagattcataaataaaatatagatttaaagttgaatttaaatgtccctaaattaaagtagaaagttaaattatccatcatttacggaatgtctagaatcttctacaaatcccctcaagaagtgttcatgagagaatgctcccttgattaagccttacacatcactctagggctactttgtgcatggtattcttactctagttggagcctttcctcttcattgtagggttccaaattagttttaatatttgtcgtgaattcgagtcctacatgctcctttaaggctatgaatagcattgtctaggtctcctaaattcgagccctacatctcagccttgtactcccattttgggctcaggtggtacttgaagatggctctcaaaatggaaccctacacccacttggagtagtcgacctgcatggttctcaaaatggatccctaacgtaatatattcgtattagaatattttataattactaagtcaaatatttgatttgattttgatttatattatttgattattaattttaaatactctaattatggtcatattttgatttactaaatattttcattactcaatttcatttcctgaattattgtcaaaatattttgacaattaatgtgtcgcaaatactgatggagtatctcccctaggataccggtccccaagctcactactcattctgtgaaatatagtaaatctatctaagagagtgagggagagcttcgaggctcgaatacccacactaactaaatttttattttcttttgcaaatcaaaacttgtgtgtgattgaagttcaaaaaattaatagttaaaggtattttgatccttacttatacaatgtatatgttcgattcattcttcttttcatacacgatcatacatgctttatagtattcatataaatttctaacag

SEQ ID NO: 40534 - DNA, 1701 bp, Cannabis sativa
ccccatcaacacaacaacattttgcattatacataagtattatcttttctcaaaagcttggttttgagtttttgatttttaaattaaaggaatttatttatttttttattgtgctaacaacgatcatgagaagacaaattccaactccagaaatggttgaacgtcataaagctctattaggtctttcatttggattgcgatcagtagattttctactaaacgagactaatctaaagaccgttaatcttcttggcaccgatcaatctacctgcgactataagaatctgaagtattctaagtggcagaaagtcccagttccactcgatgaggaagatagagattacgtggctcgcacccactatctcaataaagtagcccctcggggagctgaagaagaagcatcctgaggtaataattgttgatggtcaccaactgtgcttaggactgaatgtactttgttagttaagtttcaggatagtcagtataatttttgtacttgggataaattctgtatagatcgcataacacatagatttgatagttggtatcctaagtttcatgtccaacttagttgcaatagttcttacttcagcattagcaatatggtactaatttagatagggcgggcaatatggtactaatttagatagggcgggccatctggattcaagttgggacttatctctaataaacccctatgatatatacatgatcactgggtctagggagtttaatagttatcaagtttttctttctcatcatctgataattataataaatttctctaagtgggagtttattccccaccttttcattatctattttttaataagtgttcattcattttctgttctgctcgcagatatggattctgagaagctcctcaatacttcaggcaaaaagggaaagaagagggttgccgcctcagagacttcattgggagcaaatctagaacccgtgaagagattgaggaaaaccactgctaataaaaaacatgcctcgtagcaaataattatcgagccagctgatgatcgggttcattcccagaccccatccactatgagcactgaagagcaagccttgggttcaacacaccaagtcaaattctcaggttcaaacctgagatggtctttttggaaccctcctgtcccttgcctagagaagtaggaattattggttcgtagatcttctcacagtatgctacctcaagttggtgtcattttcaatcttttcagtttggtgattgggacttgatcaacaacggcaacttcgaggagttgtttgagaggagtctgaactttagtctcttggttagttcctttcttcattttcttattttataacatgttctttcttatacttcttctaaatttacttttattgcatgcatctctactgtctcacgtggcacaacaatggggccttcaacaaatccaagagttaaaatctgagcttcgtaaatccatcgaacaatgtgtggttgttgtgaagcagtggactgatgccaaaaaagagaacactcgcttgaccaaggataccaaggagctaaagaggaaccacaaggctgaggttgaaaatgctcaaaaggaagccaaagatcatcgcgagccccgctaaaaaatttaggaagagctcagtgaacccaataaaaagcttaagggtgctgaggctgatgctaaggagaggtgcaacaacgttgca

SEQ ID NO: 40535 - DNA, 954 bp, Cannabis sativa
tattgtggcaatttaaacacggttccccttttaagtagtaaagacttccttctttgtagcctttcattattgtcatagaacccttgcttagtttcattgtaccttttcaatcttactcacgatacgaaggtcatctagtacacatagatattacattcctagctaagttcgatacaagtcttacccttgttaaacaccttaccacaccatcaaacgttcttaaatttacaattcttgaaccttcaatatgacatgttgattgttgccaagaattaccttttcacatttagattccctgaaattcataagtaaagatttaccattagtcatgtgaaaagtacaaactaaatcaagaatcattcattcttaaaattaggagcataaacttttccactttcatagccatcatttagactggcttcattctatttttctttctgttttgagaattagttctctcgtttgcatcattgtcttgttcatttagtttgtttttgttatttctctttcaatagtagtagtcccttctgaagtgtcttggctttccacaatggtagcaaccatttggttcctttggccctcttgattgtaatctgtctctgccttgttttctacctttattagggcctctactatgacttcttccgaggaaattatattgtatacccactttattttacattttttaatttttaccttcatgtccatatttttaaagatatacccacttttatagctgatgtcctaattatatcccttaagttaatgtaaattatgtgctggacttaagtggagagtaagggtatattgggcaacacacactcacaaaagtgggtacattttaataaaatataatatgaggtatttttaattaatagatacaaaaaagagatattcttcaacttttttttttaaagagaaaggagatcaatatgccgtaacgatggaaaaatc

SEQ ID NO: 40536 - DNA, 1145 bp, Cannabis sativa
atgatttttatcaataaaaaaattgatacctgatatttatttgtgtttaacagatcagttagaaaaagaactaacaaacttacagaaaatatgatcttaaaaattattactgttaatttttaaagttagagatttatctacttcaaacataaattttttaaaacttttatcgtaatttttccaaaaagaaaaaagaaaagtaattaatggcctatgccttgaattagggcggggacttcatagatatgatattatatatattgttaataagctaataaataaagacaagttagcaacattgtaaatgataccaattttaatgctattttaacaaattacaaatgtatcgatcaattcatatataattatgtgataataacaagagacttgaaagactacatattctaattgagatcatcaaaccaatattattaattttatttatcattattattagaatggaaaatttatcgataatgatgttggttttgctgttggtagtgttattacagcatagctttcaagtatattccgatggtaggttataactgcatagctttcaattgcctctagcttgttcattttttctttctaagagttgtaataacaacattttgtataactatactttacttataggtatagtggaaacattgtattattcattaatggtcatttcaatgatcatattcattataatatagtcatgattccaaacagaaataggcttaagaaaaaataattttttggttcttatttttaaaattattaaaaaaaattaagaaaattatttcatatacaattttttaacattttttttaaatacagtttggattgcttcagtgatttttatgtatattttcgtaaaaataaaaaaaaaaatattttgaagtataaaaataaaaccctaaaaaattatagatttttttaaaaagatatatttttaatttgagcccctaaaatagatagacgttagacgcaagcctaacgtgccttaaccgccaatcctgtgaccaatactacaagtgaccacattcctttttactttttcttcttgagtttatatatgtaaatatgcatatttttattatataattatgaaatttgagaataacccaattgaaatttatggttggatttgaaaa

SEQ ID NO: 40537 - DNA, 1487 bp, Cannabis sativa
  modified_base (1250)..(1252): a, c, t, g, unknown or other
caccaggtagttgtacttttaagctcgaatcaaggtttgaataaatgtttgtgtttattgttgtaatttttgaggaagtgctacacccaagcttgaactcaaatgcccttatattttaaacactgtaaaatatttgttctcttaattcattagctaactttgggttttttttatttgcgtttaggatcattaattagcaacaatttggtatttgctttttgtttcggcatttttggtactcctccaacctccaacaggtattccagatatgattttgagattgatttttcttaattttcaagtacatcagaataaaagtaaatgagaaacttttgatttaaaattcacttttatggtttaaacttttttttaactgcaattggaagtgcagaatataatgaggagccttctaccaaagtgaaatttcagaaaacttccaattggctaggttgctcaagttctttgtcatgggaacaagttagtttctgtaatatctattctatataaacactactagaaaaacccccttttaagtccatcaatattggactagataaatttttcgagtcccttttgtgttggacatgatagcctaggacataaaaagggtatttttctagtccaacattattagactagaaaaacatatctagtccaacaatattagactaggaaaacatttctagtccaacattgttagactagaaaaatatttctagtctaatattattggacttaaaaaacagtcccacaatatgaaacttaattgttggactagaaaaacatttctagtccaacaatgctggacttgaaaagcgatcccttgctgagaatccctttctagtctagctaagttggacttaaaactagattttttttttattttttttctaaattaaatgctataaaattaatttcatttctttattttaatattaaattataaataattatttatgttatataatatatttttttccagtaaattatttataattaacttaactcaattaatacacataagaaattagagtaacataaaaatgaacacaaattttaaactatcatagagatctcaaagtttacaatatttattaaagatatatacataacaaaattaataaatattatataaaaggaaaagaagatatatttaactcacattgttagctaaatatttgtcataaataatattttcttaaaaaaaaataactaatgattcacgatgtgatgactctgcaagtgtggannnatatctgtcgcccactcttccctcatctcatcaatcatagcttttggagactttttatttattagttacaaaatataaaagagaaataaattaattaaataataaatataaataaaacatatttttatatttaataactattttacaaatatttatgtactctttcttaatatagtcacgttgattagggcaactgaactagatctttttcataacataatttaaataattacat

SEQ ID NO: 40538 - DNA, 1113 bp, Cannabis sativa
attaaatcatgcccttaaatttttttggacgttaaaaaaattctaatatggatgaaaattcaaataacatgatttagtatatatttaagtttgaggggcatgatttggtaaatatcaaagttttggaaacatggtttagtacataaagaatcacttaaacagtaaaattaaatgaattagtccatgttgggaaaatgaaattaaatgaaacagtaaaggggcatagtttaatacaagtcaaagttgggaaaaaaaaattagaattttttgattgaaattagacaaaaattcttaacataatttagtatatgtaaaaaaaaattactaattaacctaaataaagtggggtttttatttcttatttttcaattttttttttttgagtaataagagttgtccctttcctttttcccgaactattacactgaatttctgcgtacaacgaaagacgagactgtgctatccccaaatactctgactctgaggtgaccagagaacttttaggcacgcctaaccagaattgccacgtaagcacaagcgtacggacacggacggagtcgtactcattccttcagcgttataaatttgggcgggacttgtaataaaaatattatggttcccatatttgatctctctttcttcatttcaattttctctgcttttctcccttttctctcagatacacactcactactacgaaaagaggagtcggccacatgggtgatcgcgcgggatcagtgcctcttcctcgttcggtggaggaaatactggacaagatttgcttcactcagcacctgttgaaggcggacgacttggcaaggcaaaagttggctgccgccggagaagaatcggcacttgagaagctcaggatactagccactagaaaggttgataacctctctaaatacattatgttcatgttctcacagtctttatctccttcgcgttctcctccttccaaacggaaacttctccttccctacgaacctcattctccgccctcttcttctcccaacacgcgcacggtcccgcttttcaagaaaacgcgaggtgagttgctgagtaattgtgattgattgttttctcttgtttactctgtttcagtgatgttac

SEQ ID NO: 40539 - DNA, 2362 bp, Cannabis sativa
tgagttaatcccttttgactgatgtgattcttcccagagtagtcgtcactagactttattggtcatagcctattaggattgcgagattttgtatcatcctgggaaagccaatgtagtggtagatgctttgagcagaaaaggtcccgagtacgtttttaatactataatgatagctcctcagctagcctaaaaaatggttaaggtcgaaattgaatttgtggtaggaaagttacacaacctaaaacttcagtctgattgttggaaagaattagaaagacacagttggaagatcggaagctagttaaaattcaggatgaagtattggccggtcggcctaaggacttttcgatctcgaataacgaaatgttacttataaagcttgggtttgagttccagatatggtgagcttaaaaaggaaatacttgacgaagctcatactacagcttattcgtttcacctaggaacgaacaaaatgtatctaaatttgaaactttatttttggtggtgtggaatgaagaaagatgtggtagattacgtgtctaaatgtataacttgtcagcaaatcaaagttgaacaccagcggtcggtagggttattgcaacctttagcacttcgtgagaggaagtgagaaaatattacagtggacttcgtggttggtttgccttgaaccatgggaatgcatgactcagtatgggtcatagtggaccgtttcacgaagtcaacacattttatatcggtgaaaactacctttacagtggatcagtatgcagagctatatgtgaaggagatagctcatctccatgaggctcctaaatcccttatttcagacagatatccaaagtttacatcaaaattttggataagtctttagagggctatgggtacgaagttgaagttcagtacaactttttaccttcagactgatgggcaatcagagaaaaccattcagatattagaagacttgctgcgagcctgtgtcatggactttgagggttcatggagtagatacttgcctttgatagaattttcctacaacaacagctatcaaagtacgataagaatggctccttatgaaatgatgtatggtaggaagtgtcgttccctagtccattgggatgaaacaggggaaaggaagtatttgggtcctaagttagttcaaaggaccattgaagctatagacaagatcaaggcttagatgcttgcttcgtaaagcagtcagaaaagttatgctaatccgatgcgcagagatattgcatttcaagcaggaggacttgtttccgcgagagtcctgccaatgaagggaattagacgttttggaaagaggagcaagttacgtcctaggttcgttgggccatttgagatactcgagaaggtcgagcaggtagtgtatcggctagccttaccaccagtgttatcgactattcaaaatgtatttcgtatttcgatgttgaggaaatgatgtggcttgcttcaaagtataccctcacaggtttgatcttggtcatgccttttaggatggtttactagtactaggagaaggattgatagtggagaattcttctatattcgtaggatagctattggatgaaattatttcgtgtcccataactcccctttttgttcttgaaaaattaacaaaattaaaaaaaaaagaagttaggacccgagaaagtaattttggcaagaaatggattacctatttttcttggaaaatgtgacatagcccattaaactaagaaaaggcacaagagaaaaagaaaagaataaaaatataaaaatgtctttatttcatttggtggggcccatatgtaatcctaaagttatgaaaaataggcggagtcgctcacacgaatttatattcaacaacattcaaccttcactcacgtggcacaacggcgtgcccatggagatgaccattgacactagtgatgagatggcaatggtctaccataaaaatcatgtgtttagagtaatgacaaagtgctttaacaatggagtgttgccatttgagcttcttggccatgagagttcttacatggtgacataccatgtattcaatcaaaacaaaacaattcaacaacacaagcattcaaactaggaaatttaaagaaattgcacatatccaaataacccaagtgacaaaaaccacttgttttctcacgtgggaatttcatcgtacacttggtgggactaatttttcatcatccaaacctataccaaaagtttgtaattcttgcccaaatttacaaattcaacttccaattatactaattccatcacaaatatcaaaaccaatttaaaataaattcaaaacctatacaaattccattcctacaatacatagccaaacacattcaagaaa

SEQ ID NO: 40540 - DNA, 1950 bp, Cannabis sativa
  modified_base (820)..(823): a, c, t, g, unknown or other
taaaataatttccaacaagtatgttcttaacattatacaaaaacaaactaaaaatcttgcctcttacttctagaatgaaacattggattttccaaaaacttatctcaattattaaaaaaattgaaacctaagtactgtgtgttgggatttatgccctaagacaaataattaatggataatatattagaaaatatatgaaatataattataagataaataatacattaataaaataattcttaaatatctaaaaatttatttttttttttatatggagaatgtataaacttgtaaggacgtacaagagaattaaggttatatgaagatgaataaaacaagtaaatagtgtattaaactgttaggaatctttaatatagaactgctaagtatgatttactatacactatacttttagtgtgtgtaattttaatttggatcacatgtgtagatagacatgtaataaaggtcctgagtataattcgattatacacgactggatcaatatgtaattaacatcttttattaacgtgtcatttactatgaaagagttattcatatcacaacgatgatcattagtagattagcctgaatcctgagtatacatgaactcctatttgttttcattgagttatttgattcactcgttaaattttctcaaagaagataattcatacaatttctgttttaggagcttaataacatgagatgccgggaacatgttatataatagtggaatctaaattttcctaatggatcgaatatttgtttccttatagtattaattttgggagtgcttacagttggatccaaatctataatnnnntatagattaactgttcacattgaattaagggtacataaggggttaagagataattagaagggtaaaacaataattgtgaacaactctaattattaactaataattggacgacaaactacttatattgattatatgaatggactacaagtaagaattctctagatataattctgtattatcaaagagtgcaattctatatttataatagagtaataatagaattaataaatcagattattctattgatgagatcgatagtaatcacgtatttattaaagcttcaaaatataggtccatggtcccacagtcacctctatacaacactatataggggaagattttatttgataaataaatttgagtgagaatcaatttttatgagaaataaattcttaagggcagaatagtagtttctaaaattattattttgaataattataataagtatgaattgtatagacttagttttattagataaaactatatttattagttaaaaataatattattcttaaataatattaaagatagaaatatattattttagagagaataatatttattttaaccattgtaaaataatagattaataataatataattaattaattattatttaatggaatggaagaataaataataaatcttatttgtagtaaaattaagaaattaattttggacctttaaaatatggcccatacgtgtaggcctaacccacacgtgtagggtgacatataaagacccatgataaattttttttattaaaataattcatttaaattaattaattatcttttaattattgaattaaacatataattggacaatttatttaattaaaaagataataataaaataaaaagatttaactgatttctgttaatgtgtcattagatatttatatttaaatttgaattatgaattcaaatcaaattagatattttcttttatttaaaggatcaactaaaggctttatttataactctacatatatatatatattatagtattagaaactaaaaatctgagataaactagacaagaggtgacaagttgagagagattaggaattgatttttcactccatttctctcttctacacgcctatctctctctctctctccctc

SEQ ID NO: 40541 - DNA, 2258 bp, Cannabis sativa
  modified_base (2232)..(2233): a, c, t, g, unknown or other
gatttttgtatacccgcgatcaacgtaagacatacattgtcgacctcggaaagaagaatggttctagctcgccattgggatcactacaatcaagtttctgtcgagacatctcccgattcaacaattgaagacgtctttaatacacgatattcttgacccagtaaaagctggaaaatcacagctatgcgattttcaaaatcatacaccgcattcacatttcatgatatgtaatcagatcccacgattttagggatgatgactgtaaacatattttgtttagctttgtaattaactgccattatgaaattataaatagtggcaaacaatctcaaaaagggatgaaaaaactcttatgaaagagtccctgaaaaaatactcagaaatctgaataagattgactcgtagactatgcagaattttaactgcaaaaccacgtaaaaaaccttttgttcatatattatttttctatagcttttattttttctgtgttgaattatcatcgtgaggctcaaatttggttaacgaaaatctacgttaacaggatagataatgagttttcatctcattgacctacatacacgtgagtatgtcaaaagatttaagacaacaactttagcatgattcatctcacttttgtcacgctataataagtgtcttgcatatacctcactctacattaatataagaacgcgaggaatactacaacctatacatagatgctggcttacgataacgtgtctagaaaagtaataatcaactgtgagaagtatgaagcatagtcaacataaccctctatagataatgacaaagagaggttgtagcagctatttataattatctcatattcatcaatatgaaatgtggggattgtctacatttcacgaacggttacaaacaatcagattctaaggaaataactgtcatcctagactcctatacatagggacaaaacttagagaacaaatgacgaccattttgggaaaagaaagaaaataatatctattattcgttatgtaaaacaatttattgtattctgtatacaatttataaacccaaaataagatggactagtagactttgaagaattaacttcaaaaccacgtaaaaaatttcttctcacttattgctgttattattagtaattattacttaattaattctggagatcatttattactaaaaggcttatttattagttaacgaaaatctacgttaatagtttggtactttcattgagagccttgtaataaaaactcagaagaacaccctccttgaaagcaaattcaaatcgtccattcatgatagatgatactcctcaaaatgaagggaatcagccaggagacacaactcaacgtcctggaaaggagcatcagatttttcactggacgaataccattgaaactccacattctggaagaaatggttgagagtttgaacaaactgggtaagaaatcccagaaaggcgaagcgaggatgcctacgatcccacaagatatgttccatcagtcgaattggaaaatagggaactttgacatcgactggttgaatcgaattgaagaaatacaaaactgaagcgcaaggcatcgactgcaagggttgcacgagatgatgcccctccaaaccaacctgatacatctactagacggcctcagggaagacctagaggctctatgataaggagacatgtggatacccctagggggaataaccctagaaaccccctcaaacacttaggaaaatcaacctaatgatgcgaaggacatccgagtggatgaagagatttttcaaactctaggaaacactagaaataaagagactcaaccaaataatccaggaactttctgtggatatacaaccctaagaatccaaaatcaattggggttatatgtcataaataaaacccatttcaatataatcttatttgttatcaatagaagtttagaagtcatttaagttagcatgttattttcatgattatagtttaatatacaatttctattaaatccagaacatctagttattcacaattacagtgatgccaaaactgtgaaaggtaatagtgattatatgtttcaaagcttatgtcctatgattcatcagtgcactggatttacactgatttgataatctgcgagaatgtttacttacaccttggataagtgttatttcctttctggggcattggtaaattatgctagtattagatttatagagtatacattggactggacnnatattgatcttggtaaagatattat

SEQ ID NO: 40542 - DNA, 1661 bp, Cannabis sativa
  modified_base (1224)..(1226): a, c, t, g, unknown or other
  modified_base (1446)..(1452): a, c, t, g, unknown or other
ttaacgggagatcaaacctaatcgttaaatttaatgtcgttagataaacacttttaatatataaagatatatagtatgtgattaaaaaataaaaaagagaaagctaaaagaaaaagaaaaagtcagccaaaaaggttatttgaatatgttaattgtaaagatactttataaaaaaaaaaataagaaaaaggaaaagtcaaaatgtggcagaaaaaaaaaagatttaaatatgttaattgtgatgatatatatttttaaaaaaaaaaaaaaaatcattttcaaaaatcttaatttaaaaaaaaaagttcaaaacgtgaccaaaaggtgatttgaatatgttaattgtgatgacgttcttttaaaaaatatcattcttaaaatttaaatttcattcatttcaaaaaaaaaaaaaaaattaaatttcaaaagaaaggtcaaaaggtggccaagtaatttagattttattagttattatcatatatttatatgaattaatatttgtataaagtaataaaaatattgaagaaaacaaaaaattaaaaaaagaagaaatagcagaaagtaacctgtgactgcccatatctctcaattatataaatataaatttgtaatattttcattcacacgatattttgcaaaagatagtaggatacccttaatccaggcccatataccgtagatattaccaggtcaacctaggtcaaacctattatagtgcaagaaagtgaaagcagctctactcttgtaatctacttttacaaggaggagagtgaaatttttttacacattatggggcaaaccacgggctgcaatataatttatatatatataacttaaaaatataatatatatattttagtttagtaaatttcataaaaaaaagtgtagttcatttggtaaaagtgagcgacactcatgaatattatgttatatattttttataaggagcaactaatatgtttagtacataattttttaaaaattacttagcaattcaaataataaaaaaaatactgtaataataataaataaatcaaatattttttaaaaaataactaataaaaatattgtagcttaaaaatttaatggcaatattataacaataataacaatattataatttaaataaaaaaatatatttattaattattatgtatcttcttaaatttttacaacttttaacatatattaattaactacaaaaaatcttatttttagtcacannnaaacttgtgactaaaagtgaaaaattgtgactaattataaattattattcttatattgtgactaaaaggtctatgactaaaagtattagtaacaaaagttataatttattgtaactaaatgtatttttagtcagtgacaacttgtaactaaattctatgttttagtcacaagtaacattttgttgtgattaaaaggcacatttagtcacaaaaaaattannnnnnnactaaaaagttgtcacaaaaatagcaattttttgtagtgtaaaaaaattaacctaatttttgcatactattgatttattttttatgttagcttatgtggtgagaaaaaattatttgtcatatgaagataaaatagttaaattatattgtgtcaaaatttaaataataaataatatctcaaagtaaaaaataaataaaagatcggaagag

SEQ ID NO: 40543 - DNA, 1078 bp, Cannabis sativa
tggctgacacatgattatccttggtcggccaaggtgtggtccggccagacccccttggcagccatttccttgtaacttgatcatgtttgagtgctttgatccctcattaattggggtgttgcatatggtgatttggcttacctattgacatgttgtactccacgtggctctggtcttgcccacatggatatgtcacataatcacatcaagctatatttttttcaattcaaaatcacttattagttgattatagatcaattgatctcaatctttagatgattaagttttaagctaattgtattattagagttctttaatttatttgttaccatcttaacccgtggtctagctcatacttacatcttggaactcgatagttcaattgagtgtgagcattagctagatatggacatttatagtttctatgattatttaaaagtgaaatgatagtctcctttgagcttggctaaactagttaaatgatgagtaatcattttagtaattataagagtttactaaaatatcatttacagtaagctataagtgtttaaaagataaaattcattgaggggaaaaatagaaattttatccccacttgatgtagaccatctatagagaatcattcattgttctgatcaaagcaatattgtataatttataacatatatatattggtaatatataatgttctatgtaataatgagtgcaattatgggtttatagtggagtcacgaagaattaatataagttaagaaatgtacttggtaaattcaaatcaacttagtaggagtttgatttcataggcccatgaaatgtaaaaactatgtcaagtttgataattttcactaaatttgggctaaattaagaagataaaaaaagattaaggtttatttgtttattaaaacactttatgagtcaaattaataaatataatttaaattatattttaattgataatgatttataattattaaattaaaaaaaattaaatagattttaattaaattaataaataaattagaaaaggttaatttatttttaatcatgaattgatttaaaataaaggctaattagtaat

SEQ ID NO: 40544 - DNA, 2467 bp, Cannabis sativa
gttttataaatacatgctgaggagttgatatttttttacttattgtaacgagatcaatgacttgttgtttttttattattttgtagcttttttttatatagttgttttcatgttgtgttaaattgttttacaattttttttttttattttagtgaaacatgattttttttttttttttacttttgaaactttataccagtatttctttctttcgaaaacaaaactttaaaacagtattatatttattaagaccataatttaaggataggtagggaaggaaggcccatcttattgaattcggcccaaagttgggtgctaagaaataggcttggttttagtttgccagtagataatggttcttttcttttttcccgcaaagtagtacatttgagaatggttgacctgagtaatgatccccttttgtttctgttttttttttatttatttaagcgttaatatattataattatgcataatttgatacccgaattcaagacctccaacacacacaactttctatagccacttaagctaggtttaagtagttaaatttttatttctaattcgtacctcaatagactaaacataccacaacattattaacaatccctcaagtttttactagcttttaagtactttaagtgccgaacattatatcaatactaattttttatattatttattgaattaaattgtgcaaaatataatattaaaatatatcaataacaatatatctcaagaaattgcccttaccattctccttttagtaactctcaaactcatcatactcctccagccaatccacagtcacctactcactcaaatttaaatgttgcaataactattaagaaagaaaaataaggatttaagtatatgaatatctctccctcaaattctacctcgtttcaccaattaaatttttgcccattttgcaaacgaaaaactaaattacatatttatgttgattttcaagaaaaaaaatataagaaaatattagttgcggtgaggctcccttatcattcaagattgttggttttctctgacggtgatgattacgcctcctacttggtgagtcaagatcaactgtgacgttagagttggtagtgattcaatgtatgtggtagcgctgactagagatcataaggagtcgattttgtgggtagatagcaacattcttccctgatctgctcgttggagaaactgcgacttgcttgttagccctggaattagctatcagttggagacactcttttgtgattctgagacagtgatcaacacgctgaagagaacttattctgtttggggtattggtaactatacgcttcattgtaaacacctctcaagactttttattagttgtaattttttatttattcctagactttataattttgcagcccataatgtggccaggcttttgtctgtagtaatgtaacgagtatggtcgatctattctctataccaaataacttaatctgtaataatcataaggtataactcttttaccttaatataattacgcttttattcaaaaaataataataaaaaaaagtgacaataatagcacattcagttaaatgctagttaagtacgttaaatgttaattctttgaaaataatgttattcaaagtagatacaaatccaagtgcttatgttagtgggagtaaaaacaattaattgtttagaaaatagaatattaatgaaaaatattaattttgttaagataaaaaattacaaattttattagaataaaaataaaattaagtaaggatataaattaaaaaatatacattttgtatagataaaatgaaaaatatgtaaaaataaaaataaaaatcaataattttataaagataaaaatactaaaaattaaattttaaggggcaaaataaaaaatatgtataaaatataattttataaaatttgaatgaggtcacgtgccccacaagacccaaaagacacttgtcaatatattattatttcacagtttaaaaaataaagagaatatactcatttagtatcttgtgtttttataaaaaatatatttgatatcttatattttcaataatacttaattggtatcatatattttcaaattgtacatatataatactttaaagtaaaatttaataaatataattttatcaatttaatcaaacaaatattagttatatgtaatcaaataattaaatttgaattaagaatttataaaactatagacaatttaattgtattgataaaattttatcaaaaaaatttgaatttagagtactaaatatgtatgattttaaataaagtaacaaataaacattattaaaaatacaaaatacttcatttgtatttaaataaaatacaagatactaaatatgtagatactcaaaaataaatttaattaagggattttttcaataatatacctaaattgattttatttgcaaaaataccttcaacaaatttatttgcacaa

SEQ ID NO: 40545 - DNA, 1184 bp, Cannabis sativa
tacacttgcgtgtgcaaaatatcgcaacaagttgaaaaaccaaaaaaatgaacctttggactagaatacttgattaacacatatgaacacaagtcaatgacgaaaatgaagagccctttattcaatattgatcagcatatacatagaggaaaattcgtataaattacaaagcaaacgaaagaaaattacataaaaatctcacttgagttctctcaattaaatacatgacaatagctttacatccctcaaatctcactaagtttctttctaagaattacaattgaatttctatacaaaatgaatctctaaaatgatccctaaaatgagaggcatggctgctatttaaggtgttggttggagctgatttgagcttgattaaaacaccaaccaaaataactaagttcatgccacatagggttagtttgtagctgatgtggcagtgagtaaacttcgttgaatccactacaaacctacctgatttgccaacctgcttttcttcccattaccctgtctgttgctattgtttggcctctttccaacttggtttgaactactgtgattttgtgaatccttgtttagctggatggatgtattggtgtagtagtgtgttattgagttttcttttatccaattgtctccacacgccggattgctttttcgagctttataaattgatctgctcggtctaagaattctaccatggatcccatagttaatctatttatgtctttccatagttctcctaggggttctcaggattgcggccagccttccttcttcggttaatcatttgacctttgttggttcagtaataaacctactaatgtaagtgttgggattttccagtcctatccctacacaaagtcaactcacacacataaacacaaggtcaatcttgacctttcacacttcagcaagtggacacaaactgtccacgtatcacatacaattttgacacattactttgcttaaaacattcaactttactaaaacagtaggcagagaaaattgatcaggttttctcagcttagtttctagggttagtttcaaagatgagcatgcaatgttcaaatgatttagtactaatgatgcagaaaagaaaatgaagaagaagagaagcaaacacagagaatttatagaggttccccctgagttgatggggtactcctcttgagctcgcctca

SEQ ID NO: 40546 - DNA, 3510 bp, Cannabis sativa
tccagtcaactattatcaccaaacataagattaagataatttatgctaatattagtccctatcccattggccaaacgggcactttaagtataacaagtgattttttattggttaaaaaatattaatctaagagagatattcgattatgattggaaaattaataacttctacatgtttagtaaaatgtaaaaataaaccactattacgtactcacatataaactgcaggagtgcccaaaactatattgaatctttttattcaaaagttactaggtagctttatccaaaagaaaaatattggtcaacaagttgcctaatgcgtgtgccgaagccaagggcaatattactgcaaactgaaaaacttatgaacggttaattcacttagccatgactaaggttgttaaagcgaactgctaacaagattctaagcaaactacaccatgtatgaattttaagtgactttgatgagtctagtctcttagtggactgttttttaattttcttgggtgtattgttgtttcgttttctcgtcttggcttttcacttttctcacagttcagtttcccctttgtgcttatttctgaccctagtttttctagagtttctgctcttgttttcccgtttcctctcctatttggtggtcttgaaaagctttgctattttagacatggtcatagtcaaggatctcagttgtggggaggtgaggaggtcacgatggaggttgacacagttgattcaagtgctgcgaagttattgagcgagatagcgaacttgaaattgaaatgatgaatttgttgaggatctctccctagtggtcaacagagtctgcgttggtaaggttatgggatgcaagaacatggttgcttcggtggttaagaaaatccttcttggtgtttggaacctaaatcagagctggtgcatgaaaaaatttgaagaaggtgtgcttggcttcttttttgactttgaagaggattgcactcttgttatgaataaacggccttggttggtgaatggtgtgctattgaatctgaaaccatgtccattggaaggggaagtttgaatgttagagtttgatgttgctcgtttttgggttgagttccacaaattaccccactcgatgcctctcggaagcaaacgtacccattctcgtcatgaaggtgtgacaattggttaaatttgatggcaaacgaaaggaggatattgttcgtagcggttatctcagatgttggattgatgtttggataagccatcaaattctagcaagtatgtttctcaagtttgaagctaaaacagactcttggattaaattgaaatatggaaagctaccttacttgtgtttcaactgcggtaagcttgcccatataaatacatactgtgtggtttcgacgcctggctaaaccctgcttagggaccgatagttcaaatgtatggaacttggttaaaagtggatggagcacctgggaattatttatctgctgcatcttttcatcgtgaaatgatcacctatgatgacgatattaagttgaaaggtgttaagcagagacgcataggtgtgtggaagaggcgactcgatctccagtgaaaccagggtaccgactcctccatgtatagcttcaaggggaaaggacatgtggcatctcctcaaaagcttgctaaggacgtagaggagagtactatgcatggtgtgtccactaccatgcaaggtagttggagtctcgatgagtacgactgtcaatggagtggcaaggactgatgatttggaggacctggtaacgactcaaatactgaaatggatttgaatattccttcaaaaagtgtcatatttcataaaccaaatttggacttcgcccagtttaatgggcctttggatgatgtggagcatatccctaatttgggccttctcttatccaatgcttggatattccacataaatggccttgtcgatcacaaaggccacaccattttcatgagcctaccaattttaaatgcccggtaataacccaaaactacagatgctatactgtgatctttttggcccagattatactaatctctataaggcccaaccatccttaatctcaaatcctccaaatctatcaaaaatgatattacatcttctggccactaaaatacaaaaagatcatacctggtacaatcctacacccaatatttttaaagcttctccatttaaatatgatcatgcttttaggtttaggaaattcgactaaggcgccaagatcggagataaatgttaaccccgattctgcctgcgaactgggttttgattctttctaggcgggctcaagcaagcaaggggaaacctttggagttaaaaatggaaggaagagatgcacaaagtttaatgttggtcgacagacagttcagagaagctcgggagttaagactagaagaaccaagaaagagatcgatgatgacaagctggttactcaaggtaacaataaccagattcttgctcagtgtattgacgtgccaatttcttttgtgcaaaattttggagacggcgaggaggtggccagaagcatgcccccacatgcgccatgaggtgtctttcttggaattatcgcagactttgtaaaacagcagcagagagaactgactgtcttggaattgtcgtggactctgtagaacagcggcagaaacatgtagagcatttcacatataaatggagatagattgtcatctgttttgtgattgtcactttactcgaagcttgtgctttcttaacccttgggggattagaagtgactgtctttcagctatgtcttttgaagatttttttctctagctgtgtagtggcaacgatgacaaactcttgatctttgctacttgtttggttgaggttgtttggaagtgcaaaaatgagtaccttttccaagactctatgccggatgtgaagcgagtcttattggcaatcctgaagggagttgaggagtatggtaatgctcttcttgatgagacctcctctttagagcagtctattgtggatgtaattgcggtttgtgcttcctcgactttttgggacatgaggttacaagttgatgcctcagtgttggatggtttggtgggtacgaggttgattcagtgtgatgttgatgatggagtagccatcactttgatgtagtttgttgaggtttttggtgtcttggaggctgaattggtggcgattctctcagccctgcaacttgcggtcgaggaaaattgtagcaccgtgctcattgagtcggactccaccaaggcagttaaggctttatctacaggagagttaccttttgcttggggcccgtaccctatttttagaaaatgtttgtatttaattgctaagttttcacgctattcagttgtgtttatgccttgtgtggaaaactcggtggcagacaggttagcctgcctcgctaaagttaagcgcttttgtgcgaggtcagtttgaagggagattgtcccctttgtgacaactttttaggctctatttctggtttcttgctttgttaaa

SEQ ID NO: 40547 - DNA, 2046 bp, Cannabis sativa
attggagcataatagtaaaaattgatgtaaaaatatcacaaaattactttttgtacaaaatatagctcaacttttacatctctcattggagatgttcttagtgaataatatgctacatggtcttcgctttttacttggtatagttcttcctcttcttgaagtactttttctcttaaaaaataatagtgtacctccacattcttatttcgtgcatgaaatactgggatttcaactagacaaattgacgaatgattatcacaatgaagtagcactgcatagtttgtaaacttgtgtagatcctttatcaattgcatcaaccacatactctcttgagttgccattgcccctgctctatgattgataaggatattgttggttgccttttgctacaccaagatattattccagatccaagcttgaatacatacccaatagttgatcgacaagtatcgtgatctttaacataatcagcatcgcagttgtcaatgattttaacgtcatcgcctttcttataaaagatcccataatcaatagtatctttgacgtacctcaacattcatcgtactgcttccaaatgtggcttctttagttgctgcatatatcgacttactactccaactccataggagatatctgaccttgttaatataaggtagattagactacttataagttgttgatacattgttctgtcttgtaagtccttcgcagaatgaacacgtagcttaacattagcttccataggtgttgagatgggcttgcactcgagcattccaaacctttgcaacaagtctttagcatatttttattagcagagaaataaaccctcctcagttcggtcaacttctaatctgagaaagtttttaattctctaagctccttcatttggaagcaactgacaagttctcctttgtttgatgaatctctgctttatcattgaaagtaatgatgagatcatcaacgtatactagaataactgcaatcattgcttattctactttgatgaataagcttgaatctgcgtgtgccatggaataatcgctttttactaagaatttagcaatcttgccataccattttgctctcagagcttacttcaatctatagagtgcctttatcagtttgcaaacatatcctggatgagttctatcctcaaatcctcttggtttctccatgtatatctcttgatctaattctccatgtaaaaaggcattcttcttgtccatttgccacaatcttcaatctttacttgctgcaagtgctagcaggacccttaccgttgtaatctttgcaactgggctaaatatctcgtcataatctagtctataatgttgagaaaatccttcttcaactaaataagccttatatctttcaatcgatccaactttactttcttaccttgtataccaatttgcatgaaatgagttttactttcttcagctttggtatcagctcccaagtttgatttttctctaaagcaattatctcttctttcatagcttcaagccacttggaatactagtatgtctcctcatatgtaacgccctgatacttaggcacactatagtaattttaaaattagtgtgccacatttgctaatcaaagagttttcctcaaaaattgtgccaaattaattttttgttttaaactattaaactctctatatatatatttacataactcgagatcccgtatttaaacttttacgatcattatcaaaatacttttacagacatgtcacacaacgactacaaaatatagcccgtcatctcgagaccgaacactccaggtcacgtcgtctcggcatgtacaatcatcctccgagctcagaactcactcctattcaactttcgtctttcctttacctacacacagaaataatatctgtgagccgacaaactcagtaagaaaaacacataacatataatataatacccacttgcatctaggtgcccatacacctatccacaaggcttatcagataaggaagaacgttctttaataaggtacgaccactgtaccacatgcactatgtaccgctactgt

SEQ ID NO: 40548 - DNA, 1476 bp, Cannabis sativa
ttttctttattttactgacatgcttcctcccaagaacacttagtgtcagcttagtcttctacagtccaatcagccgccacatttagtcatgtctctctgaacgcgtcctgcttgacgcccatcataaatgatcattttatactttagtaacacagccatttagactctagctagccaagagggatgtactgagattcaatgtggcattcctccatctctacctataaataagcagaaaagtcagtgtaaaaagaatggaaactactaaggggttgtaacacttcaaactaatccctaaaaaataccattgtaacaaccaaactttaaacatcaatataagtgactcgtagagtaaggctcattaacgccctaaccacgtaaaaaatccttctctcaataccttaattaacaaatatttagtgaaatttatgtagttgtcaaaaaactcaataaatattttggtgttttcattgagagctgcaggaggctttcatccgttgatttcttttccacaatggtattgaccagaaataaccaaagacctccttcatcacccgatcttcaagcacgctctaaggaagatgtagcatccttggtcgaaaggaaagaagataacaccaacgacctggattataggagagagagcaatgtagaagactatgaggaggatgaatacactaaactcatctctttacgactacaagccgcggaacacgacatacagttggctgaatagagggaggccaataaaagaatgtaagaagtcatggttgctatgaagaaagcaatggctagagcaggcctcaatgttgactctgctgccataccacgccacttgacaatgagggagaatgtcgttctcaatcgcaagaaaacctgaaacaaaaagagcggataccaaatccaatatagtatctttctgaagaacctcccctctcaaaggtcaatcctactatagtacctagggggaccaaataaattatgaccattgaaaggtgtgttttttcctcccgcaagggaaaagttggcaaggaaataggctctcccaaaggaagcttagaccccaggattgtagggaatgccaaagtgtatttttgctccaaagaagtaatgaacgacataatgctaaaaggtaaggaagatgagcccctctgatttatttaagggaaagaattaattccaatcagggagatctcaaaaatcaaataaacatccaaagaagcgaataaacgccctagcaggacgtcctaaacaaggttatattagctgaactggccttcgttaagaaggatttattaaaagtgttctggagacaaagaggtgatgattctgacttcaacaatgatgaccgagaatcgtgagctaagaatgagttagaagtagaacttctcaatagggttgtgacagtgttacgtgtcagttcttgacctcaaatttggccaaccgatagtggagtcgtatttatgactgatatca

SEQ ID NO: 40549 - DNA, 1759 bp, Cannabis sativa
actcatattcagtaagcttttattactttagtagcttgttttattagtatgctataaggaaagcctgataggaagaatgttagtagcccgatagctaaattggtggatgttttaatttcttaagcaagcgatattagtaatttattcttgatcgcgatctaactagactagttcttggttttgcatgctagaatggatgccaggcggaacacgagaagccagggtaattcggttggatctagtgccagttagggagttcaggtttcccccgaataatcatggtcgaggtagaggcccatgcggtagggcatgcagtcaatgagatgttaacccaccgcatgctgcccaggatttaatgaataggtttgcagcaatgcaagctagaattaacgaacaagacaaagtgattaggtgtttggggcagcagggtgctcctgcaatacctgctcctaaagtgtaggtggctcttgcccctactgtgcaggtagggtcagttgtggctgctaaccgaatagaaacactgtataaaaggtttcgtaagcatgcacctctagtctttctgggaagttcaaatgttatgaaagtcgaccagtggctacatgtaatcaatcaaattctaaacgttatgggactcactagaaatgacatagtgatctatgctaccttccagttataggaggaggtcctggtctggtgggatatggtggctcttactcgggatgtcactactaatacctgggaagagttttaagagctgtttaatgtggagtactacaacgaggcagtttttagtacaaaaagaaaggaattcactctgctaactcagaaggagaatatgtcagttacagaatatacaacccaattcgataggttggctaggttggcctcgggaattgtgctaactgattttagcaagaaataaaagtagagggttgaatcccaagattaagcatgagttgatgattataaaagatgacaccaccacttatgttgatatggtgggtaaagcactacgagctgagggcacagttgagtgcattcaggagtctcgagggattcagattgttggtggagccaccgttcttcctacctctggttacggtaagggtggtagtgactcaacactgatcagaagagaaaggcaccatctgcatccaatggctcgagtcaaaattgttagcccaagatatgtttttacgagggggtgaattggaaatttaagctaatctcagaaatttaaaaaccctaaagagaactcatgcaaatattcaagtttaatggaataacaaagataatcacaagaataacaaataataaacttgaaatgtaaagagtttagggatagaaattgcaaactctcaatctttacaaggttcggtagaactaagccacctacgtccttggtcttcaaaacttggacctagctttgagtacaactatcaagccaagttaacggggttgactaacccttacaaccgagaaatttttcaccaaggtttttcctaaacctttcacaatagtttaatttcttccaaggactatcaacctcactgaattgtagaagtgccaatctcacttttctcgggttgtttacaaaaacgggtgtcaacctcacctacaaccaagttgtttttctattggtgccaacctcacctctcaatacgatggatatttgattataaaatacaaagaaaactctctctaataaaatgaaatacaatgtgaaatcctagagagaattgcaagcacactagagaag

SEQ ID NO: 40550 - DNA, 1639 bp, Cannabis sativa
aaaaattagatttctttactcgaattaatatttttcaacaagtattcaccaatagatcctctaaaacataaaactataacaaattgttttgtggtggtggtggtgaaagaaaattatcaaggaaagatgatgatggacaggttagaggggatatgggatagagaacaaaatgtttctaatttttgccatgcttacaaaaaatatatcaagcaaaatatttattagtaaccaatataccaatatacttttgacacatattcatacataaaagaaattaattaaatctattgatacataaaaagagttaaatgttggtatgaaataagagagtgacacataatggaaaaaaatatatcgtgacatttcctatatatatgatttgtgtgatttttttggctaattagcttcttttataatatcacagcacatgtagaaattttatatactaatttttattattaaagactttgatattcagatatcaaagatttggttttgtgttaaaataaattttatgttatagggtaattgacatgattaatctattaagtactgattactttttacttttcttactcgtagatatgaaatttatagcttctataactttttggagtgaaacgataattttttcaagcttggcttaatgcaataaatgattgagcgctcatttcattaattatattagtttattaaaatatcatttagaagtagctaaagtattttaaggataaaatacattaaatgataggacggtaaagttgttcatactcgatgtagatcatctatagaggatatttgactatttagattgaaataatgggtaatttaaatcgcatctatttttagtaatagagtgttctatgtaattagaagtgcaattctaaatctatagtggaattaggaagaatttataagttaggaaatttacttggtaaattttggatctactcattggaaacttgattacattggactatgatccccacactaactgagaaaatattattttgtagtctcaattaattggttttaattgatcaattatttctaaataagactatgtcttgtttgtgaattttcaccaagaaagagcacaattgagaagaaaagagaatttaaggtttatttattaattaagagactctttgaggtctaattaataaataagttaaatgataattttatttaataattaattataattattaaaaagatagagttgatatttatagagctagaattaaaatatagcatttatgaaaagaaaaaatgagttcaacaaaatgacaaaattgaaatccataaggcccattaaaggttcggccttggtggcttaataaagcaaacttttttttttatcttttttaattccatctaaattctaaacctagccctagaagaaatcctataaatagaataagatggctctagttttcttaattgacttcagactcttttgtcaaacaaaaatagaaaacaaagcctttcctctatttcgaaatcctcttcttctctactgaatatttcaaagccttggtgattgagagtatgcccactcatgtcagagaaatacctagtatagtgaggaagactgtgtctaaccaaattgaacgagagaagatccaggtacagatct

SEQ ID NO: 40551 - DNA, 2954 bp, Cannabis sativa
  modified_base (2071)..(2072): a, c, t, g, unknown or other
  modified_base (2173)..(2181): a, c, t, g, unknown or other
ggagtgttcaaaagaacactgataccacgtacaaatctcttgtgtcaagtgatttaattttctgcaactatttttaaattctgtctgttcagttttgtcactgaaaaactggtctctgcagtaacaaaattacattctgcttctgcagacgtatacagttttatatatacgtatttattgttgatatttacaaaaacttggtttttcagaatcaaggaggatttgttcatggaaaattcattggacacaatatcatcatttgccaagatctcatcggacactatggaaggaagaaaaagataaagcgggacttacaaaaggcatatgatatcattgaatgggatttcatagaagagatgttatatgggttccattttccaccaaagtttattaacttggtaatgacttgtgttcgaactcctcggttctctttgatgataaatggatcattacgtggcttctttgaggcgaagtgaggtttgaggcatggagatccaatgtcgccgctattatttgttctcggaatggaataactttctcgaataatgaggaagattggtaaaaagcaggattttatttttcatgaaagatgtggggtcttgagttgaatcacttaagctttgttgatgatgttctattgttttgcaatggggatttcaagagcatatattacatgttacagggattgaagcttttctctcacacatcaggcttgttttctaatccctctaaatcggttgtatactgtagtaacatgtctgatgcagatgtgcaaagaattctggaggtattaggtttccaaaagcaagacctgccattcaagtatttgggagtgcctatttgcccatagaggatctcttcagcagattgcaagctattggtggaaaaaatgatggcttagatcaaaactttgagcacgagaaacctttcttttgctgggcgtgttgttctcattaattcagtgctcatggccatacactcttactggtatcaagtgatgatgctgccaaagaaaattgtaagtgaaatagaatctatttgtcgtagtttcttatggaatggacagtacacattaccaggtgtccctacggttgcctaggcttcggtttgtcaatcaaaaagttcaggaggactgagattcagatgtatctcggattggaacaaggctgcgttgtacaaatatgtatgggctattgctaagatggaagacaacctatggattaaatgggttcacaatgtatacaacaaggatgaggattggtggacctattaaccttcaactcaagcaagttggtattggaggaaattggtgatgataaaagatctaatgaagagtttgggttcattaaacaaggtacaaggcaattacatagtggttgttggctatggagaagtacatacacagccgtctaaagtggattggagcaagtttgtatggagttgttttaatattccgaagcatagctttactgtatggttaactatgcttgggaaaatgaagacgaaggaaagattaaagagatttggggtaattgatagtgatgactgccttctgtgtaataattgcagcgagacaatagaacacctcttttttggctgccagttttcgaaggattgcttgacacaaatcaagcaatggcttcaatggaggacttcggcagcaaccttgaaaagcattagcaagtggttaaaaaaggcaaaatgtaacaacttcagaaggaaagtatttgctgctgccattgcagcgctgatatacttgatttggagcaaccgaaataatggtttttagaatggggagatagaaaattgtcatagaattgtatacaaagttaaagctgtcattaaacttagaatagtttgtatatggccaaaagatgtaacaaatagagagtagtgttggtttaattcattgtaagtccattgtaatgattatagattttagagttggaggtcctcttcttgaggatgctcttaggttgtatgaattgttgtttggtttttttaatacacttgctgatttaccaaaaaaaaaatttttagtcacaacataatttttttatgactaaatgtnncttttagtcacaacaaaaagttacatgtgactaaaacataatatttagatacaagttgttactaatttaattttagtcacaagtattgtgactaaaaatannnnnnnnnacaataaattataatttttgtaataatacctttagccacgaactttttagtcacaacatagaaatgatataattagtcacaattcttttactcttaatcataagttttgttgtgactaaaaataagattttttgtagtggtaatcaatagtgtcatactaataatagtggaacactataaataatactatatatatgataacttttagagtgtgttaaaataaatttagtgtaaaatccatcaaatttgacatttcaacgttttattggaattggcctaagtaccctcattattatgttacgagagcatgaatgagattatatcattatataacgagaatatttttcagtatgaaaaaatttaatagagtttacttttataaggcataaataaataatgcaaaaaaatatgggattaaaaaataatcaaagtttaaaatatgggaaacaaaaaaaaagtaatatataattttaataaaacttctaataataagttttgccgaaaaaattaccagcgccagaaaagttactagtgctagaaaagtcaccagaaaagtcattgtcaccagaaaagttatcgtcgctagaaaagttgtcggaaaaatcaccgaagttgtcgtcatcgtcagattagtcatcgaaattagaaatctcagatataaattaaaatagaaccggtttcataaaataataaataaaaacaaataatacaaaataactcaaacacattataattaaagtaaaaccggttctatgcctaattcatgcatctcg

SEQ ID NO: 40552 - DNA, 3033 bp, Cannabis sativa
agagagagagagagagataagagcattatcgagagctcgaatctcaaacacaagaagctgaagaccgaaagggggtgttgtgtttggaccacacctagtgatgccatgctatgcaggtccaacataaaaatgaggccttttattttatttactgtttttggttaataaaataattaggatgttgagaaaaaaaaaatatacacatgatattttctttaaggaatttttgggagccatatccaaaagaaaaaaaagaaacatccttccatatataatatatatataaaaataaaaaataaaataattaaaaaggtagtgtggaaagcttaatagtcttcaaatacaagactgtttattattctaatttaattttgggtatggagaaagcatctctaggagaagaaaaagggttagaaatttgtgtattctaaaggctaaagtctctagaaaagggaaagagagcatgtgtcttttagatctcaattagaagggttctttttataaaatgcagattcagtatcctaagtgtggattttgtttttttggttaccttcttctaaatttctcttgaccatattacaattctcaactcttttctttcttgggtttctcttcggttaatttgatatatatacttttgtagatgaaagaaatttattcatatagacatcttttggcatctctaataaaactttctatattttaaaatttatgggattattgaacatgatttcttttgccaatttctaatgatgtgtctcaagtataaatggacctctatcgatatctcacacatactcatatacacatttggtggtgggtatatgatgatttctagatacaatacataagttgagacaacttatttcagtggtaagtttatacttgtattcatatatgtattgtattaatttataaatggttaataagacattaaagattcttagttactccaattgtgtactgatcatgatcatgatcatgtgaagtttttattattataagctattaatggtgaagtagttcgactatgcattatttaattaattatgctgagttttaggcatgatcttccataatataacttcaatgtaggttaataaagatttattgtcttgttaataatgcatattttactaacttatcaaataatctaattttcaaattgttaagtttgatatgtattaagtttgctagacttcatctatgagacttgttcgatattagtattagtttatcatgcgtgttgcaataataatggttttcaccttatttattgagacgttaattcattccaatttaatgttagataaatactctacccaatttattaaaattttactttttctattttacagtatatctttatattataccatacatcaacttctttaaaatacattactactttttttttaactttttttatttcaaatatataatattaatataaatacatattttcatgcaaaaaataattatgataaccgaaaataattaataaaatatgtttagagcaataaatagtattctataaatgtagaacatgaataatatattttaaaaaaaatttaaactaaagaaatttagagcatttgttgtagcatgtttttagtacaatttttaaattttttttaaaatttctcataattgtaagattattaaaaagatactattgttttacgattgttttgtctatttatttttttgttcagagtgtgattgttatgaggtttttgctctattattataatcgatatagtttggacaatttccactatgaaatttgggtaattctttgagtgctttccgatcttgtaaaactttttcattttatattgttgaataaatgttcttcccttaaaagaaaacttatgattctttaaatttttaaattctctctctctctctctttttttttttttaatataatgtcataattttgatgagggcacataaatttgtttggtatactcttaaattagacaatattattcctacatattgtaaaataaaattcatttacaacctattaaaaaaaaaaaactagatcctcatcaaggaatctgttcaaattcattatgtgtttcccaaagttttgaaacttaaatttgtattacttataagttgaaaattgaaatgatttagaagtgaaacatatttgaccaaataccaaatgagattgagacccaaattgaaaaacgaatatcacgatcacaatgcctaaaacaaacggccattttttgtttgtctctgatttgagcacgcgattcccatttctaaaccctaaaaaaaaaaaataagaccaattaataaaagcttctttaacatttgtcgttttggaacatcattttagtaattgtcatatatgtacatcaaaacataaaccaatctcacacttatatatttcatttcatttcatctatttaatttgtgtgtgtgggcaagatttagattgaatatattaatcaaatcatataagattgtattaaatacttctatgtaataattaaggttaattctaccatcttgaatttatatttatctcaataatcttgaattattagcaataaaaataaatttaggtataagtaatcctcatactaatattaatgttgcaagcgcaccaacacaagttgtttaaaaatcaaagtgttagtccaatcataccacaataacaaattaaaaattcaataaaaaaatttggttagatgccaatttagaaaaatcactatatttttcttacaaatacccatatcacgtgatatgctacaattgagtaacaaatagtcctttgctccctcaaatatcaagcttttgcacattgagatccttctaaaaagaaattagactcaattaaccttttatttcaatgattttacttacaatcttctttgattgagttggagagtgaaaacatattcgttttggcactaagggtcaatattgaatttgaagatattttttctatgataaattttatttacatttaaaacatttataaatttattacatttaatagtttttatttta

SEQ ID NO: 40553 - DNA, 1215 bp, Cannabis sativa
tgttggtgtttggtgatcccattattcttctttggtgattttcctttcctgttttatttttcagcaattatttattttattgtcttatgcttttaatgggtatcgttgtttttattccgagtgaggtttctctgctatagggaagattcttagattgttattaatcccttgttctatggaatgatctttcaatatgtttgttcttagtttggttagttttgttattctcctttattctagtttgaaaattagggtgtctctagcaaatttttattggaagatctttggttaattgtcattgataagaatgatctgtcacatattcattcaagataaaaatttaattttcttcaaattcttgtgatgcttcacagatggagacttattagtcatttagttgaagatgatgttagaatattttttcctatttattgtaattgttaacctattattgttgattttgcttgataagaaatatgtgcatgtaatggactatgtccaatagacattccatttacctttcaaaaaaaaaaaaaaaacatataggatgagcaaaatgtatattgtatatgcgtgataaaagagtgacttatgcattggtattatgttctcatagattctaataatattaaagagtgtgtagcgtctttattttaataaaaataaaaattactgtcaatttcttattttattcttttctcaacttttgcatccaaaaatacatattagagtagaaaatatgaaataaaataaaaatacttaggcatatattttttaaggctaagtccaatagaagtctaaaatgttaaactcattgagaattttacacttccaaccacattctaaaaattatcctatttatgacattatttatagtatcccactaatattagtgttacactataaattataccaattctttcttaatgtttttagtcagtcataaataatatatttataattaaacttttcaatatatattatttatatttatttataatttaataaaataatataataataaaaagtataattttagtattgtgattgaaattaaaaaaaatatagtgataaaatctttttttgtgttgcttgaaataagaattttaattattactcttatcaaaataaattgtctccttatgacatttagagcttgttctctttctctttttctttctctctctctctctctctctctctcagatcggaaga

SEQ ID NO: 40554 - DNA, 1537 bp, Cannabis sativa
atgatattttatctcaaaactaatcgataatgataggagtagctcatacatcttatatatgatattaagtttatacattattaatgtaggactctaacattctcctaaagatagtggctattttttgctcaccaatcttaaatgattaggtcaaaagtggcacttttggctcctcgaatcacaagcaactattttggttcatttttttagaatggtcattggatttagatcgtatactcgttagatttttatttggctaccatattaagaattttgaagtgtggtggataaaaataaaatagtatgtgtataaaaagataaaaaggtacatgatgtttcatctcaaaattaatttagtctatttggttgcaatatttatattataccactatactaccatgcatgcataggtttgacaaaaagtaaatgattattaaaaaattaaaaatgtaaattattgtaaaaaaatccaaaaatcattaatggtaatattaaaattaaaaaaaatgtatattaaaacttatcattaataattactagcaaaattatattttaaaactgtatttattgtgtactaaacaaatatattttaggtcaaaattaagataatttttaacatagaccaaatttagtacaaaatttagtaaggataattaatattataaaaaaaatgctaaagtatagcactacacactattttagcactttattaaagatgctataggatattgagtcatctattgaaagtacttagtgttttgagctatattttagctttatagttattgtacttatttattcagaatgtctttaggccacttttcgtgtctttaaattgttgtgtactgtcccttttttagtttcttgaagggggcttttacagtgattgaggttccgattcgaagctcctcgactttgtcgccagtctggagcatatcatcagtccatttatcggcgttggagctccctttatgagaggtttaagactaaaacagaaaaaagagaagagaatgatttcttattaatcttgagctgaaattacagacctatgtataggctttagtacaatggcataatgtaacagatttaggcaacttggcaagaagtaaataacagaaaaataaagattccaagacagttggaataactaactactcctatactaacagcccccctcaagatggagtgtagatatttattacacccatcttggagacaatattagagaagggagttggtaataaaggcttggtaaaaatgtctgccaagttttgttgagaagagacatggaggagttgaatggagtcttgctgaattttttcccgaatgaagtggcaatctatttcaacatgcttcgtacgttcatgatacaccgggttttcactgatgtatattgcagcggtgttgtcgcagtacaagttggcaggttgtttgtgggagacgctaaaatctttgaggagagcaaggagccatgtcaattctgaagtagcattagccatcgcatgatattcagcttcagccaaggagcgagaaacta

SEQ ID NO: 40555 - DNA, 1657 bp, Cannabis sativa
taagagccattcatttcgtgggtgtaagggcccaatggagacttgaagcggggacgttacaagttatatacattctagtttataattatgaaaatgggtcattagagcgtgaggacttaactgcaagggcttaggcttgaaacggacaatatcataccaacatcagcaattatgaatttaaaacctttcctatctcacacaaagttaaagatttttcctttagcaaaaaaaaaaaaaggataatttgttgtcaaattctttgaactttttgacatttagcacgatcaaccacttagattgaaattttgtgggttgaacttttgcaatcaaattatagatttttaattattttttcaacgacattaaattcattaacttggattcctataataattaaaatactaagataactttgcaaaggtcattgtttgtacgactaattaatgggaatatgaaaaatagtactatttcacagaggattattgatcttttttatgagtaaatagtgacataagtactcaaagttttagatttgtaagcaacataaacgcaatgattttttttagtggcataagtaccaatgtttataaaactgtaattttcttccagtttcatcaatacagactctattattgtcttaaacaggacacatataagacccaaattttagattatttggtctggacgaaaaatatgtagtatcagttaattttacaaactcaaaactttgagtacttatgttgttatttacttttttttattatctttgtaacaatatatatacattgaaatattaattttttaaaaaaattatgtaaaatatttcgttaaataattgtatattcatttaaagttcacaatgttttttcttaaactaacaatatctattaaataaagaaagatatttatatgaaaaatatgctacaagggactattagtgcttagcgttattaattacaaggtatcatatcaaatatcaatattttaatttaatttattatatatataaaaattgttcacattcacaatacataatattaaacactaataatgtctaataacaaaattccacttatatactaaaatacgaaattgaaagttatatatattaaattgtagaaatgatgataattgaatatagaatgaaaaggtgtatggtgcttgagagttgtataatcaaataataaggatatatctaatataggataggaaggccttttctatatagatggtcttgtatcatcaactttgtgtactctctttttcatactctaaactcatggtggggagttacatatataggataataaccacacatcaacttttgtataacattatttctaatgaggaaaaaaaaaaactttgtataacatgcatgtatgtatgtatttaaaaaaattaaaaaagagttgaaaaccccactacataaaatttgcatataacactttaaaacaaatactataccacacttgaaaaaaaataaattttttttagtgagggtaaggtatcaatagttaattaaccttgttttttttttataatatgattaattaataaattcatattattcatttatcaattcacttttataggtctttatatatccagctcatatattgaattataaatcatttgagcaagtttcaagccccaaaaa

SEQ ID NO: 40556 - DNA, 1263 bp, Cannabis sativa
  modified_base (47)..(48): a, c, t, g, unknown or other
  modified_base (1041)..(1047): a, c, t, g, unknown or other
aactttgagatgaaagacatgggtgaagcatcctatgtcataggcannaagattcatagagatagataccgaggtatcttaggtttatctcaagaggcctacatcaatagagtttcaaaaagattttggataaaagattgttcaccaagcgttactccaatattgaagggtgataaattgaatttaagccagtgtccaaagaatgattttaaaagagaagaaatgaagaacattccttatgcttctgctgttggaagcttaatgtatgctcaggtgtgcacaagacctaacattgctaattttgttaaagtgttaggaagattttagagtaacccgggtgtagaccactggaaagctagaaagatggtaataaggtatctttagggtatattgaagggtgataatttaagccagtgtcaaaagaaagattttaaaagagaagaaataaagaacaatccttatgcttctgctatcggaagcttaatgtatgctcaggtgtgcacaagacctaacattgcttattttgtcagagtgttaggaagattttagagtaacctagggatagaccactagaaagctggaaagaaggtaataaggtatctttagggtacaaaggattacaaactgatgttcaaacaaactaataatctagaagtagttggctactcagattcatatttcattggttgtactgattcatgtaaatcaacttctggttacgtgtttatgtttgctagaggagctgtatcctggaggagtaacaaacaaactttgactgctacttctactatggaagtcgagttcgtttattgttttcaggctacatcatatggtgtatggctaaagagtttcatttcaggctctaaagttgttgattccatagcaacgccgttaaaaatattttgtgataattcagttgctgttttcatggctaagaacaaaaaaagtggaaagtacttagcttgtaacgccctactgctaaggcacgctacagtgctttttcaattacagtgtaaactttgctaatcaaagaattttctnnnnnnncgtgtcaaattaaaacttttgtataaattaataaactttataatataataaaaatatttacaagtgccgggatcccgtttttaaactttttaaactcagtattccaaaatacataatttacaagtcgctcagcgactacaaaatataattcccagatgtcccgagaccgaacactccaggtcgcgccgctttgacatgtacaatctcaccctagct

SEQ ID NO: 40557 - DNA, 1143 bp, Cannabis sativa
attatcaatagtcgtcttcatctccgtaaatatccattgacggttgttgtggaagttgtcatttctgaagaaccacagcttagagtatagcacagcagcaaaaatagtgaattcctccccgtttatcatgtcagtcgcatccatgaagtgaatcgggttcacgatccagttaacaacctccacacaagtgttgagagggatattctcaattttgacattccatttactcgattaccacggcctacgagtaatatggcattgagtaaagaaatgagcagcagtgtcacccccagccgaatcgcacaagtgacattttcccacctcatttccaaatatacgactgagcctagagccaaagggcatacattcatggctcgccttccacagaaagagcttcaaacgttcgtgtacagaggaattccataaggaagagtataacttactatttgaattcctggaagtaataagatcattataggctgtttttagagagaaattttaagatggagaagacttccacaccagtacatctgaatccctcaacttagagaaactacactgtagcaaagccacgacagcctcaggcttaaaaaaacgttcaaccttgtctatgtcctaggcctcctccgagtttagtctaagctccccgagggtcatgttcgacatgcttctaggattgatatcggcatggccaaagaaattcccatctgagcaagaccaatagcaattccaaatatccacatgagagtttttcccaacaatcgacaagctattgtttcttaagaactcacgagttttccatattccccgcacagccacagaagcaacctgaggtagagaggcaccccaaaagctattggagctacaatacttacccaggataaaagtggcccaaagggtcttacagttagacaccagcctccaacccaatttcgcaactaagcagaaattcatgtcatggaattttcaaattctgaggccaccactgtgcttgggttggcaaaatgatccccagtttaacagagacaggttctccaaccctccatatcaccagtccaccaaaaccgtctaattaatgcatcaagtgcgtcagttattttttgtgggagcaaaaacgcagacattgtgtagatcggggttgaa

SEQ ID NO: 40558 - DNA, 2631 bp, Cannabis sativa
tgcaagctagaatcaatgaacaagaggaagatatcagacgcttgaggcaaaagggtgcttctacgatgcctactccaaaaatgcaggtggcctttacccttgctgtgcaggcaggaccagttgcagcagtgaaccgaatggaaccactgtatgaaaggttccacaagcaggcacctctagtttttctaggaggtcccaatgtaatgaaagttcagcagtggctgacgactattacaataatcttgaattttatgggcgtcactggcaatgacagagtggcctgtgccacattctagttctaagaggatgccctagtttggtgggacatggtatccctgacttgtgatgttactactatgacctgggaaaagttccaggagttgtttaacacaaagtactacaatgaagcagtcaaaagtgtaaaaagaaaagaatttacccagctgatccaaaaggagaatatgagtgataatgaatacacaactcaatttgaccgattagctaggttggcctcgggaattgtgccaaccaatttgagtaagaaagaaaagtacttggatggtttgaatccaaaaatatagcatgatcttatgattaccactgatgacagcaccacctatgctgacatggtggggaaggcactacgagctgagggcgcaattgggtgtactcaggagtctcaagggactcgaattgcttgtagagctcctaatcctcctacttctggttatggtaggggtggtagtggctcgaccagtgatcagaaatgaaaattaccatttgcacccggtggcttaagtcagaacaagaagttccaagggaaccagggtcaaggcaaccgtcagggtggttctgaaacccgatacatgtactcggaatgctctagttgtaaaaagcatcatctaagtgagtgtagagggcaagggtgtttctattgtgggtttccaggacattataaaagagattgcccacatctcaagaaagagcaacagaagacagctgcaaaacccgctcaagcaagggtgtttgctctaagccagtcagatgcagaagctagcccctctactgtttcatgtcagctcttagtcaacaactcttacttttttgcattgtttgactctagggccactcactcttatgtggcaaccatgatttttagtaaattagatagatcacataactgttatgataaataatttggaaccctactgcctggggaagaattagttatctctgaaaggtggattaggtctatgccgattagaattgaggatagtgagttgagtgctgacttaatagaaatgggtttagcagattttgataatatactcggaatggatttcttatctaaatactaagctagtattgactgtaaacggaagatggtgatcttccaacccgcgggcgaggaactatttatttttctgggatcggtttagggatcccgaattccagtgatttcagtattaacgtctagggatttaatacaagacggatgtttaagatttctggcaatggtattggataccgcacgacctgagatagttcggccagaggatatcagggtggttcaggaatttttagatgtttttcatgaggagcttcggggtttaccagagtaaagagaaatcgattttattatcgatctagcacctagagcaaaaccggtttctaaggcaccatacaaaatggctctaacagaacttaaagaattgaaaatttagctttaggggttgcttgacctagggtttacacgacctagtgtgtcaccctagggagctctcgtattatttgtttagaagaaagacagatctttacgtatgtgtattgactaccgggaattaaataaacttactgttaagaacaagtatcttttacctaggatcaatgatctttttaatcaacttcaggggaagacggtcttctcaaagattgatctccgaccgggctatcatcagtttagaattcgagaggaggacattccaaagatgactttccgcactaggtatgggcactatgaatttctggttatgtcttttggactaactaatgctcctatagcttttatggatctgatgaatagggtattcatagatttccttgatatttgtgttattgtttttattgacgacatccttgtgtactcgcaatcaaaagaggagcacgagcaacaccttcggatggttctgcaacgactacgagaacattaattgtatgccaaattcaaaaagtacgagttttggctatctcaggtgtcttttcttggacactttttctgtaaagatgggatcaaggttgatccagggaagattgaatctgttagggattggccgagaccaaagacagttatagaagttagacgtttcctgggtctggctagttatttctgtcgatttgtagagggattttgtaagatttcaatgcccttaacggaactcactaaaaagaatcaacaacttttatggatagataagtatgaagaaagctttaaggagatgaaatagagattaatcacagctccagtattagccctaccttttgataatgaaaagttcgtggcttaaagtgatgcatctagatgggtctttggtgtgtactgatacaggccgatcgagtcatcgcttatgcctc

SEQ ID NO: 40559 - DNA, 1317 bp, Cannabis sativa
attttatctgtaatgtattggaacacaattatacaatttagaccaaatataatactaattacttattttaataagatttagcacaaaatttacaccatcaatcacaaatggtctaacataacaataaaacaaaaacaacaacataaaataataaaacaaaaataacaagaaaactacctgtatcaataaattaaataaaaaataaagttgttgttataaacctaactaaaaaaaaaaagttgttgacataaagattattttgttcattagagtctcattgtcattgtgataaaaaaagtaaccatactttaaaagaaatttagattaatttaataaaaaaatgtttctttattaaattcaattacaaaaattactcttcaactcaaaataaacagaagactatgcccgaagaagaagaaagaaaggaagagaaaaaaaataaacttataattaataattaaaaaaatatcataatactaaaaaaattaaacaggctgacagagaatacacgtgctggagagattcacgttctagggtttcgtccttcgcttcaacccagccgcttagacgatctgataatgacggtacctccccattcgcaaacgatagtggtgtaagctcttccccgtttgtagacgccgacggtgcacgatctcccaatcgcagatgacggtggagagttccttccctcccgcaaacatcaacgacggcagtgtgaaggttcctgggatttcatccattgttccgtgttgttgattaaagagagtaaaagattggttcaagctgtttccgttctgcgattcagtttcgtgttcttctgtgtcgttgatcaaagacagtaaaagattggttcaacctgttttcgtgagttacagtcaacgattggttagttttagttttctgtttccatgagttattagttggctatatttcttttgttcttttgttgaacaattggctttagtttattcttttcgtgagttacagtcaacaattggttgctttacagtgaacgattggtttttgttcttttgttttaaattactctctttttttttagtttttttgattttttgatttttttactgttattaggttaattcgtattagtgtttaatggggttagaatttttaatttcatgtgtggaaactaattaggttttcctattagtcttgtcttttgacatggttctatagtttctctcattgcgttcggtttattggtttctggcgttagttactggttcttggttctgggttcgttcgggtgtccatggcgtcgagtagttatcaacggatggaagcagcggagaaaat

SEQ ID NO: 40560 - DNA, 972 bp, Cannabis sativa
ctacctacaaaataaatagatatagaaaggtagattagcaatttagcacactatacaacgataatattgtaaatttttaaattaaagacaaaagacaaatattattttgaggagggaacttatctttgaagtctttaaaagtagtactacaataatattttggaaaatacaaccataaatcaattttgaaaaatttataaaatatgttaataaaagattttataattcaaaaatttctctcatacaacttaaaaacactcttctccctctaactaatttcctctcaacctctctatcttcctctaatttttgcatgcattagagactgagtgctgcaaatctgacctgactgggagactcgaaaccgatttgatacccatctccgcctaagatcacgaacccaaaaaaatttaaggaagttagaacccaaaactaaaacccaaaccatcggcgaagaccatcgactattcgcaaaccctttaacagctcattccctctctttctttctcactcgtaaaactgttttgttgaatttctaaaaaaaaaaaaaaaaaaaaacaatggatatgggttttactagattttcctccatttattgcattctactcataaaaattaatgtatgctcaaagggaacacagtaccagcatttctagaggttagggatgtattttcaataatacatatcgagcacttcgagcacaataaaatattcatccctaacttttagaacatgttgatatcaagtaccagcataaagtacaattgtgttcaaagaatgttttaacaaaacttaacataaccatcgagcactggtacttatcaaacattatcaaatagtcatccctaacttctaaaacatactaatatcgagtacccatcgagtactaccaattttttactagcagatattgccaaaaatgtagtaaattactcagatcctttctttctttcttattttttttttttttt

SEQ ID NO: 40561 - DNA, 1459 bp, Cannabis sativa
atatgtataaactaattattacaaaacatagtagtgttcctaatttgtttcacaagcaaaagtaaaaagaaatagaatcacatgcacatcccaggtataggggtcacatgcaaatacgtacacacatcacttgaattgtactacacgtaataataatatatatgcatcgatcaacattgaacacttgtacacaaaatggacaaataacgattcagattaaactttgtgtttcctcaaaaattagaaagaaaaaaaaaaagatgtactgaaaatgagatcagaggaaacacgtatattagtctatagaaaacaaaaagtgccgtacatgaccagcactacttgtttagttggaacaagacaacaattaaaatgactcgcttatttattatattatcatagactataggtgttcaaaataaaaagaatttattaatatgaaaggcttacacttttatgtataatatatataataatattattgatttccttttgagattgagtacatatacttaaattttggaatcggaatatcatgaatcagatccatctcaatttgcatgtgattgataggatcatctaaggtgatgaattgatgataagtttatttaaaaatatatatatatatatattataagcatgtgaaaactacgatttgatatttatttatcaaactaattatgcacaaagattataaaagaaaatatgagttttcaaaaagaaatataaatatgaagagggaaggaactcgtacacatagattcactagctatattattttatttatattattatacataacacgtactttttatatattatatatgattaaaataacatggggatttctaaaaaactggccatgtttattggaggcgatttcacacgtgagaataattggacacacatcgttacatatattttttttaagaagacgcactcggcacattattacatactagtataatcattgaggtcgcacatttaagaaagaaaaaaaattatactatttgtcggagaaatttagacaacactaaaatacgtgtaaacaataaataaaacaaacgaaaaaagcacgaacactcacttagagtagcgagtattcaacattaatgaacatgctcgaaaaaaataaggacaaaagaaaatatagtggttcagtcagatcacggtctccttagtccactgttgcaaataatttctgtcatttctcatttaatttggattactcttttatacaaaaagcaagtgtccttttagttttacataattatcgattgtagaaccattttacaataaataatagtattaaatcagaataaatgaagaacagtttaatctgctctaataataagtgcaacaacatatgcaacctatcgggtacgagttgtctgttcatattctcgcacaagctcgcaggctttaggtgcgttctaatttcgctaaatggctaataggccta

SEQ ID NO: 40562 - DNA, 1000 bp, Cannabis sativa
tggcacaattttattagttcacgtaaataaatatttaaaaaaacaaaaaaaataaaaaaaacaatttctctctcttttttttttttttctctttctcttctttctttttcatttatatgtttttttttctcatttacagaccaccattcctccattgaagctccacctacctcaaactccacctcgatccttcatcgaaactacaacgtgctccttcatctaaccttgaacacaaaaaattcccagttcaaaaaaaaaaaaaaaaattaaatgaaagagaatggagactcacaatgtctagaactttgttcgactgagccaaggccggcagtggagcacgtccattttaatggaggactccatctacggggatggacgccagaaaagaaaagaaaaatcgagaaaaaagctatgggatttggaaatttttgacgatgagaaccttttactaccatctgtttggctcgttaagacggaggtacccagattagactcaaaactcgcagctccgtcgatcccttttgacgacaagagaacagtgagggactttcaggaggtatggatctggggtcttcagaattctgcaaatccatctatggcacttgtttggactcacggtggttgaagttatcttcatccatgcacaacggagagtgacgacgagagggagtcgaggtaagggttttccaaaggttgcgagcaaacctgtgtggtccgtttcaatcatcttcgaccggaggatggctattgtggcctagccgtgcatgtgtgacagtgaacaaagagaaagaggtgggatagacagaggaaagggaaaagcttgggtttgggggtttctgagggaaataaggttttttatttattcttttatttttttaggaaaaaaaagaaaaaaaaaataggaaacgattatgaggaaagaaaagaaaaagaaaaaaaataatttttaaagaaaaagattttttttttatttttttaaatatttatttacgtggactaa

SEQ ID NO: 40563 - DNA, 1466 bp, Cannabis sativa
ataaattatatgtttcattaatttattgcctagattaatctatcttcattgaacctagattaatttattgagcataacgcctttattacttgcaatatagaaattgagattattgtctgatttagcattatctatgggactaataatttgattagaaaattgaaataacatttattattaagaattaattaaggatgattgttgagggtgggattaacctttaactattgcttaaatatcgtagtatcttatttattttctcaatttatttgttaattttattctaagagaaaagtaaaaaaaaaaatccccctttttattattgtttaattttgaataataaagtaaacataattctcgtgggatcgacttgtatttatttttatactgaaataattgtaagtattggaataaaattatttagtaaatttaaaacggcttacgacacacatcatatgtcactgctgtttatgggaaaaactctatagctaatagaagagatttgtggtcgtccttagctggtatgttcggttaaatcatcgttggttgaatcttggtgactttaatgtcatgttcaactatgaggatagatttaggggtcttcaagtgactgtcttttggtctaataaacataaacatagtgatcgtatatactttatgttggatagagtgtttattaatgagaagtggtgggattgcttccataatactaaggagtaatggatggaacatagcatgtacaaggtaacaatacttcagaactaatccttaccaatcactagtaggagtactctttatagagttattggtaggttgaaaagagtcaaacatgtgctcaagaagttcagtcatagggaattgaggggcattatttctagttatgatttagctaaagagaaactattactagctcaaaggaattcgcatggctaataatctgactgatatttctctttagcaagctaagaataaagtgcattcagactttcttttggcgagtaaatgttatactagttatattcttcaaacgagtaaaattatttggctcaaatatggtgatgaaaatttttatttctttcatgcgagtgttaagaaaaggaaagtaaaaaattgtatcactacttttgttgagaatgatctggttattgatgagtatgatcatgttattgcccactattgtaatccgttgaggaactttatggagaaaataagtttagctacactcaaaatcttgatcttgtttgtttgaagtatggcaacaagttgaatattgttgtgttttgttggccaaatatcattctctacctattctacccctagctcaatcgaattaaccaactatgagttatgacagttggtgctcaagtcaggggttacacatcaagagaaatcagatcaagagtgagagagagagagagagagaatcagtaattgctgttcagtaagaaaagagagagagagagaga

SEQ ID NO: 40564 - DNA, 1420 bp, Cannabis sativa
tgttggagttcttgtatgcatgtatgtggaagattagcttaatattgatgctttgtgcttagttgtgttgataatctttggttattgttttggattaagttttaaatggaattttaaggattttattggtgtttctaatctgttatgcaactttgaattttgttgttgatgtgagctaagtatttttgttaggtgtttaagctcttgaagttgggattttggtgaatcttgctctagtttggagcctatgttgtatatagtataagctggttttttgatgcttcttttgatgtgaattaaagctttagttggtgtttcttttctctctaatgttatagctttttatttgtgaagttggtatggatgattatgcatgtttaaggtgtttttgtcttgatttcgtgctggaaaattggggttttctaggtttgaaacccaggggtgcggcccaactttttgggcgccgcggcctgcctctgttaaaatcctaggttttaaacccaggtgccgcagccccatgtggggagtgctgcggcccgcccttcatttttgggtagattcgtacgcgttcgaatccttgtaactttgtgatccagactccgtttcgggagttctatatatcgttgaaaagctcattccgagctctatgtgattatctatattttgaatgccaattttgtattatgtgaaagtggatttagagattaaacctatacttgtgaatcccagaaattgtgactaggattactggcacttggtcaagagcacccggggattaggaatctccacatttgcgggacatcaggtaagacagtagttagcacgtagagttatgtgtagtggcccttatattgaatatgatatatgggagtaattagaaatcgggattagggttattaccctaacatgagcagtttagtggcatagggttataaccctagtgattattaatatgtaaatgctatgccattttatatatgtattgagattaaggattatacgtttaaggtataagtggattggactcggtaactagaaccgagatgaaccgttctaaggccttattatatttagacgtgtgagcgtaacacgtaggtctatgtcacatagacataaataggcgtgtgagcgtaatacgcgggtatgtgtcatataggcaaatgggatatggcattaatgtttatgtgatgtatttttgggatcccaaaacctgtacttttgattgtaaagtttaatgttattacaagttttattttcattctattttagtttaaagtttaaatttctcgcgcttttcttcctggtaatcccagtttaggggattagggtttcttaatcagctagggtaacatgcctaattgttagggagttacagtttggtatcagagtgccagggtttttaaacttcctgtagaccggc

SEQ ID NO: 40565 - DNA, 1828 bp, Cannabis sativa
tcagatattccaatgattcatgtgaatttggtaaattttttggtacaatacttgtgactttgacaaatataactattctgtaagaattagaatagttatagtcttctatttgagtttcagttcataatttactcaatttatttcttgttaattgttaattctagtgcttaaaggagtatccggtggattctttggaggaaagacacctgaagaaatggtgaaattggaaaaaaggattatattctgggttgttgaagtttgggagcacttccaaaacagtaaaaggaacgtttgtcagtggtatattctcatctcaaatgaagtcaatgaagcatgaaattatttttatgtaattctttattttattttttggccacatgggcaattgaaattgggaaatcttaattttttttatcacagtagccaaacagtttgtaagttccctcttcgtacccattctttttctttttggtcatttttcttccataaaaatttggtgggttgttttttgtatgagtgtgtgtgcgtaattgatttggttgtggtttggtttttgggttcatcaatataattttgaaatcattcttattcacttgatgggtctcattacttttctctctgtttttctattgccaatttttctcatgtatttctgtcatattatttactcagttgtcagaattgtgtccctattcaagtctataaatctggtaaggctatcttttttatagtaggtgggtgaagttgggcattgggcactaactatttatactaagaaagaagaaagattggatttgattagagcaataaaaagtcatgggcaatactaactttttcatgttcacattccaatcgtgcatctaagtatggctatctgcattgttaccgttactttaaatgttgcaggtcatgtttgaatgatgattttagtaatagatattacattttattttttccgtaacacataaggccatgtctagccactggttccctttcttacacacacctctctgttaatggatttggatcttcatttgatgcatttggtagcgtatttcaaatgaggtgtgtctttccttcttaaatgataaatattgtttgtcccacatgattatgatgaacttctcattcttgatattttcattacaattgcctgtttggtcgattaccttttcaagaagaaattgacaaatcattggaggagcttcatactgcatgatgtggcgttgcaaatggacagaattaaggatcaaaaaaattgattcttaagtatcaaagtatgcaagagatctttacagcatataatgagggtaaacatttgggatcaaatacatagaaatcaatatttctatagagatatcaaatctggtaaaataacagtaaaattattataatgattaagttttatgttttggtgtttcatttacaatgattgtgtacatcatattttgatccccattagagaatgtcatggtataaatctttgcttcttttggttatatttgataattgacttgaatcgactctggtttctcttttattcattgttttgaattgagttaaacttgttggtgttaagtgagtttcaggttctctagatgatagtgatgataatgaagtaaatctaagttgatggaccacttttactgaagaaatattgagtttttagaattatcattgatccattgaaaatcgcccctgcaaaacaatcccattgaaaatcttaggtgatttaaatttgacatcgatccattaaaattgatgcattacataaaaaatatcatatgaagatcctcaagaggacggataagaagaaggtgaggataat

SEQ ID NO: 40566 - DNA, 1437 bp, Cannabis sativa
aaaaataaaaaatctgccagcaacgaagaccaagacagcgtcgtgttgtctcttgtgaagtgttgatcatgagctttgtttcaatggataatgaaacacctaaaaaaaggcaaaaaaaaaaaacctttacattaaccactttaaaccaaaaaagcttggtaatctctttgaatgttctaatcgaatgagccaattgaaattctaaattttaataacatttacagaaatttaaaaccactaaatagactcttttacattggtgtgtgtggaaaatgaaagaaaaaataatgagaagtagaaaaagaatttacctgatggtgatggtgaaaagtgaaaggaggaaacgaataagataaacaaaggggagcacataggcaatggaggaagaggcacatgctatggtggtatatgggctttaggcccatgatcaaaaaactttgtattgatggacctggttgatgaacttgtgtgccccaaagacgacgactcaactagagacgtcgagatccatggatttcattgccggagactcgtccgagaaaatgagagagagagagagagagagagagcgagcgaccctggcgataaccccgaaccaatcctcaccgtgcaaagcttgtcgccatcccctccaccttctcctgcgaccgagatagaaactttgagacttagctttgttagaagagagggaagaaagtaatgtgcggcaaaatatgttagggttagtgcggcgactgagagaaaagtgtgttagggttagttttttagttcttttttgtttaataaaaataaaaaaaatatatatatatattataagattaaaactatgatgtataactaagatattaacttatatacacaactctttaaatttagaacttacacgtctcgagtattttttaaaaaaagttatgtaaaaaatattttctagatttttctttttaaatttaacaaaaataaataaaacaaattgtatatataacctccaactttttttttaaaaaagaaaactctataaaatatttttccagtctaataaaataatttattattttcaatttagtttttcacattaagattatacttttatatatatactctatttaattttatctttaattaattattttattatttatttttttaaaataaatttaaaatctgatagtaaataacatgttaaaaagaattttttgcaccagtttataactgttgggaatactaagtatagccaacagtttataactgttgggaatactaagtatagccaacagtttataactgttgggaatactaagtataaccaacggcttataactattgggaatattatgtattccccaaaatgataaactgttgggaatactaagtattccccacaattataaactgttgccattctttgttagcttttaaaaaaattctatttagtattgc

SEQ ID NO: 40567 - DNA, 1931 bp, Cannabis sativa
  modified_base (1034)..(1034): a, c, t, g, unknown or other
taacgaaaatctgcgttaacacatcaaatataacttttgagccaagaaaagatcatgaaaatttggtagctcatattaagactaatattttaaatttgtaattcctatgtatttttatcgaattgttatgtattattttaaatttgcaattcctatgtattgttcttttctaattgtaacgactatatttttattaaatgaattatcttttatttaaattatttcatttcaacaactacattttgactgttaacggctatattttaacagatatatttaacggctatattataacggcgatattaaaacgactatattttaacggctatagtttaacaactctattttaatggctatatattaacgactatcttttaacacatcaaagtactcacaaagtctatatataccatgttctattcttccttcacttacttctccattttatacattactttacactctcattcatctaacattctcaattataatctacgaaaaatatttttaggcaatggattcagcaagttctccagatccttttgagaatatgaatgttactaatatcataactttagaatgtaatgacaattctgatgaaacttttttaaatgaatacttagctaggggtagctcaagaaggcgaggaagaaaaagagcccatatagacagaggtcgtgtagaaggacacgaacgcttgttctatgactacttttctgatgagctggtgtatacataatatcattttcaaagaagatttagaatgcgtatacatgtttttctacgcatagtgcaagctctagaacatcattcagagtattttcagacgagatttgatgcaatcggtagaaaagggctttcgccacttttgttgcctccgtcatgaatctgcttatgtaagctcggagaggctctcctggtctttcctttattttgaccaggtcttctaaatgtagtggtagttggcaagaagaagagaattgtgcatgaaactttgaggagaaggccttccaagagttgaaccttcctggtgncaacttgaagtaccattgttgagcggcttctgaaagtgtagcagggaagactctgcaatgcacatctccttgtactccttgcaagtccatttgcattttacaatacttgagatgtgataagggatcttctctccctgtatacatcttcaaggtcggcatcttgaacttgaggggtagttctaaaacattgatctctggagcatttgaccggccacgccttagaacatatttttcagttcatccaactgtgcttgcacgaatggattaacttgttcggcctcttggacgatcggtgtcacgtcaggatctctttgagctggatcttgaatgcagaccccgggctgagtggctggttgaacatattgttcgtctaaccccctccttctatttagatcatccctgagatgatcatgggttgttcccaatttattaaatactgaaacaccgaattgccttagtgactggttcgtttggccgagcacttggccagaaccgctagtctagacagagttattgggtataaccccgcctgacgaatcaccagataaggtttggccacctaccacttggcccacaggtggaacctgtgaccggggattggacggctgaccgttcagagtttgggcagtatgcccaactgggtttttgtctgaggtgcccagcgggatgctggacgtaggttactaattaacaactttgtaggctcttcatatcactacggtggcctgtcttgtttattcgtcaatggttgcttgttgagccttcaatgtttccatctctctatccctctgttcggcaaattagcgcctttgctcttcgaacgcaaggttcactgcagcatggagctcttcctgatcatgatgcaaagtattagtatgaccttgcatgagcccaaga

SEQ ID NO: 40568 - DNA, 1422 bp, Cannabis sativa
accagaggcagatagacacttgtacccattgtactttaaactatagccaaggaatgtgcattcctcagattgaaaagccagtttttgtctgttatctggtcgagtgttaggatagcaattgagagtaattaggttcagtgttaaataatttatgtagaggagtgtctcctttgagcacagaagaggaaagtctgttaattgaaagagcaaaagctttgatagcttcatcccaaaaggataaaggaagagaagcatgggcaagtagagtaagggtagtctcaatgagatgtctgtattttgttcatgtgttgtggggcaataaagcctgtgatgtatgctatgttcagtaagatatggggagaatgcttgagattcacctccccagttagattgtagcatcttgatgggtaaattgaaatctttctcaacaagaattttaaagttaataaatgtttaaatggcatctgatttatttttgagatgataaacccaggtaaacctggagaaggcatctgtaaaatgaacataatagtgataaccattagaggagaccattgggaaaggaccccataggtcagagggaatcaattgaagaggcttagtgtattcagtgtcagatctaggaaaagaaaacttgtgtattttgccaagacaacaagatgagcaaaaatcaaaaacatttttattgttatttgagacattacacttgtgcattacatgttgaacaattttaacaggatgatggccaagacgagagtgccacaaatgaaacaaagagttatttgtagtgtttgttctaatagattgaacattattacaataaatttttgaaaaagattttgatgttgaagcaaaagtctgttgagaattgaaggtaggctggaaagaaggaaatagatacaagttagcttcaagagtagcctccagcagcactttgtgtgtctcccaatccttggcaagacaaaagttagggtgaaactcaaaaaatatgttattatcaaaagcaaattgtgagatactaattaggttcttgattatcttagggacatggaaaaagattgataagagttaaaatcttggatttgtcagtagaaagaaagtgtttcttaccaatgttttcaatgtttaacccagtatcattgcctatgtagatttaaataatcttgacaattaaagtcatttttctaagaaagactactctcatttgaagtgcagtgatgagtggctcctgagttaggatatcaggcatcttcatagaccgtgtcagcagtggcaaccatagctgttggaggattatgagtattgttactaggaccagctccaaaactaggaaagcatggattaaatctttggtaacatttagatgcatagtgtcctggtcgagagcagagttgacaagtaggctttgttgggttttgtgcc

SEQ ID NO: 40569 - DNA, 2070 bp, Cannabis sativa
gtttcggccaatagtggttgagatagtagagaccttaacaatattaaaaaaaaaattagaaaaatatttatagaattaaaaatatatttttatttaatagaatcaagaaactacactacagacaaatcatatttcgtatccaaatatcctaaagcattaaaatgactacaaaatagattcactgagagaaaacaaaattaaatataaataaataaattttaaaagaaaagagacaaagatatatctgggaaataagagagacgggcgggaagtgctcttgaaaatatacacatatcccccattaaattatatattcatctaaataattttaatgtgaaaagtaaagaaagtattgaaacttacatttatctcactagaaagagagacaagagaccatgaaaaaggaaggggctccatgaagatggttgctgagagaaggtagttttgttccgttcactaaggctcgcaaagagagagagagcaaaatctgaaggcagtacccttggcatcgttcagggacgaaggttaaatctttaagaattatttagctagggttggtaaaatggagaggcgaaagtgaaagaggaattgaggaaataaagacgaaaacatactagggggaatattgacaaaaaaaaaaaggaaagaaagaacgaaagaaataaactggggggaaaactaaaacgaaagaacaaataattcatttggcgctcattttttcccggtcttttgtccactttaaaattcattatcattgtccagccgcattggacttaaatcatgggttatatttagcatccccacttttttttctagtctaacatttatggacatgattatcttttttttctagtccatcaatattggactagaaatcttctcaattttttttcatgtccaacacattttttgttagacataaaaaaaggacataaaaagaataatttgtagtagtggcctcacttcttatgaatcacttcaaaacactgctcatcattatgatcacttaagaaactttggtgtttagcatatggctccattctcttttccaaaagacataaatttacactaagaagtagagcctctattttcattggctatccacatggcatgaaggcttatatgcttatggatattgagaccaaacaggtttacttttctagggttgttgttttttatgaaaaaattttccctttttttttccaacatctccatctggggtcaacaacttgtttccccaaactgtgcttcccattgtcacgccagtgcagcagattaacaggccaatggccaccaacatcatacccacaccaataccaaaatcagtccaaaatggttctcatatcggttagtccactgatgctaagccaccacaggctcatgtacctgcatctgaaccctaggacaagcagcttcatgctgcaccagcaaccattggccgcactagtaagaaaaccagcatacttacaagactacgtgtgccgtacaacctctactatccatcctattgaacccttcttatcttacattaaactacattccccatttcgagctgttgttcttgcagcatactcacattgaaccaaaaaactatgctgaagcttctctattttagcattggttacaagctatggacaatgaaacctaagctttagaaaaaaaaaaaataagacttgggttatcactaaacttcctattggccacaaatccattggctgtaaataggtttacaaagtaaaatacaaccaacatggggatgttgacaggtttaaagcttgtcctgttgccaaaggtttcaaccaaaggcaaggcatagatgtctcccaaacctatgctccagttgccaagttcaatacactaaaaatcttcttggcacttgcagcaatttataattggcgtatccaccaattagacattaataacatctttctccatgtggacctccatgaagaggtttacatgaaaatacccctggatataaggccccttccaactctgtttgcaagctaaacaagagcatatatgacctgaaataggcctccagatagtggtactcaaagctcagtacca

SEQ ID NO: 40570 - DNA, 3032 bp, Cannabis sativa
  modified_base (176)..(185): a, c, t, g, unknown or other
tgttcataagatgaaatctaaattgctactggcatctaccacgaataaacatcagtatacagatatttggtaatacaaaaccattataccaataatagaattcatattcatttgatcatgtaacttatatatattacctcataaagtaaccatcttcataacatcatgttgcctannnnnnnnnntcgatgctttaatctgataatcttgtattgcattgcctaattaggcaagcccgtgtcatagcctggcatccatatatctcataaatgcatcacctaatcaagtgagcccatacctacgctcggtactcatcatatatcactaacacccgtacttacgcccagtacgtcgccaagaaaattacatcacctaatcaggtgagcccatacctatgctcggtactcatcatatatcactaacgcctgtacttacacctagtaccaccaccaggaaaatcacatcacctaatcaggtgagcccgtacctatgctcggtactcatcatatatcattgatgcccgtacttacgcccagtatgtcaccaggaaagttgtatcacctaattaggtgagctcgtacctacactcagtactcatcatatatcactgacgctcgtacttacgcccagtacattactaggaaaattgcatcacctaattaggtgagcccgtttctacgctcggtactcatcagatatcactgacgcctgtacttacgcccagtacgtcgctagaaaaatcccatcacctaatcaggcgagcccatctatcacatatcgcattatcgatactcaaccaatcaatctttttattatataacaatatgaactatatctcaattttaatcaattcattgcaatactaattacactacataaacgtactatgcaatacaatatactttcttacctcaagttctgatttaggtatgttggctgacctacttggatacgatcaatgatcccgagccctaagtcataaactaataagtgtttatcctaaaacactggttaacaattgaaaaggagaacctagggtttcctactaaatcctatagttcaaataaactaaaataaaacttatattttggctataaaacatataccatatggtagaacttgttgcaagcttcgaaacggtatatagaacgtccaaaacggacacccgatttatgataaaaatacaatttctgagttccccagctgcccaaaacggtaaatcggttggccagaaccggttgacgagtttcaaaactggttgaccggtttttcaggggtaaaaatatgattttccaagtttacgcactcaccgaaatactattggaacctgtccaaactactccaaacttcatagggcacatatataccatacacactaccatacttacgcaatagaaactaaaatcgagtctttgattggcaaacgccactagtattcggacttaagttataaaaagttctaaactcaatatctattccaaaatcacctcaatttcacaaagaaaatatcagaactagtcccatgactatccgagaataattctataaagtcaaaattttcataactattctaatttacaaaacccctatatgaaaccaattgttttaaacttaaaactgaactaaaccttaccttaagctttcctactctgagaattattcatcctgctactactagaacttagatcgctaggttttggattgaaaataaaaaagaatagatgtaggaggagagaagattttgatagaagacgagggtttcgtttcgttcataagttttgtttataaacttattatatataaactaactgttacgtttatatacatattattaatacaataataacataatataatatattaataatattattattaataataacagtaagattaataataatagagatattggcggctaaaccacctgaactttacggtttgtaacacttaaccacaaaaactgaatttttggcggtttaactatctaaaccttggttccgttttgctctgcacacctccgtccaaaaattacagttaagtgccacggtggactgtccacgtgtacgcacttgtacatgtggcaaatttttagtggtccacgtaattttaattttaaaaataattataaatatttaaaaaaaaataaaaaaataatttatataaattaaaaaaaatcttttttttccttttttttctctttttcttttcctttcactttctctttcttctcgaatctgacagaacccttcttcttcttcttcttcttcttctgccattctcaccatgctcataaaccacaaccgcctcttccacctctgaaatcccattcctattttcattttgccccaaaatattatccgtggattcttgtcggttcttcttgtcggtgagtttatcgataaagaagagcgaagaggggtatggtcgtgaatcccacaaattcgctgaagctcaccaccgcttttcccttttgattcattccgattatgtccccgacgagaggacttgcaatatttccatcaatcgtttgcttggttctcgatctcccgaccatactttgagcgttgtctgccgtttgattcgtgttaagcgtgagtttgtgccttctttgatcaattataaccgttttattgatcagctatgttcgttttccaggcctgcagaagctcatggcttgatttttcattttttgggaagagggcattgtcctaataatgttacttacacttcttgattaatgggtattataaagttggtgaatttgattgtgcacagaaggtgtttgatgaaatgggtgagagaggtgttgttccaaattcactgacttacagtgttttgattagttgtgttttgaggattcgtgaggttgagcgtgggagagaactcatgtccttccacggatgatggtttggagcaaaatgtttataatttttttataaagagaaagagaaagagaaagaaaaagaaaaagaaaaagaggaaaaaaaagaaaaaaaaaattaatttttataaatttaattttttaaaaa

SEQ ID NO: 40571 - DNA, 1496 bp, Cannabis sativa
ttattattactcctttaatttaaacaaataaaagttaatttgaacttgactttattttccaactttagggttaattttaaaaccaagttgactaagttattatatttattctttaatttgaacttgactttcattgggctaccccacaaagttatagtttttatacacgagtacagccctgtaaactaataagtgtttttagcattttttgcctctacttgcatgtttcctgtaaaaacttctcaggagattaatcctctcaaaattttttgagattaaacacgctaattaattttgaagttctaaagtgaggagctacaaaaaaaaaaaaaaagatgcaccttgctaatacagttagtactcatcaatctatttaagtcttttttaactatgtaatctcatatatatagacagtctcagaatcaacacacttgatcttctcaaggtaatagcctatatgatatttttatttactaatcacaggactactaactgtcacaagtaaatacttatatttttaattcacaactcttaaaataaattaatatatacttttagatttaaattttctaataatatgaattatagaattataatatacttggtattgtatttgagttttattatcattttaaatcacatcaataaataaatatttattattacaaatattatgattaaatattatcgaaaaatttattgtgtcgtgtctttcacttgttatgttgtgttgtgcctaattagactcatacttttttcatatcagatcgtgctcaaattttttaggctcatgttaatttggtgttgtatcaaaaatttaatccatactaatttacacaatactaattttaagtaaaatttagttatctttgacaaattttatattatatttctcattaaaagctccccaactttggccatgtgaaacacctaattaattaatgagtaaaatatttacgagttatgatttgaaacaaatataaaaaggaggcatgtgaaaatagtgtttcatcaataaatatatgtatatatataaaaaatattaatttgcatgtgtgattatgtgaatattaattactttagttggtagaagaagatcaaaccacatgtgacaaagatataaaagtgatcgtatgagatacttagaaacaatagttataatagttaaatggatactattttagatctgattaaattatctattttattaaatgataaattaatttttttttaaaataatactaaatataaatagtattctaaattaggttttttttttgttaaaacaaaacttaataaaaaaccaatctatatgtattattacaaaattggttacgttttgtctatctgtgttaggaattatattcaagttggttatattaaaaaaaaattctataattgagcttagagttctattagtacaattttaaaaaatataaaatttattttataatttaacaaattagaagtaaaatcaataacttttgtgaaattca

SEQ ID NO: 40572 - DNA, 2070 bp, Cannabis sativa
atatcctgattgcagtttcagtttggagtctgttccaactgatttgttgcctagtttggtaacagagatgatgatttaataaagttattattttcattcaaaaaaaaaaaaattaatttataaagaagaaatatggatattcttatgataacactagggacggatccactcattaatatgtgggggctataactcccattaataaaaatattatcttttaaaaaattaaatgtaaaatttcttaatttaataattataaatcaaaataatagaaaatttatcacaaaattaaataaatatagtaatagtgattataatataggtataaatatttttttataataaataagcccccacaaaataaaaattctgagttggtcactggataacaccacttaagagcaacaaataatatggaaattctcatgatagcttttttattattttattagaatatttaattataatacaaaattatgattatttatatatagtttttataattattattgtatataataaaattaaattaatgctaatttttttcatatatattttcataaaaattagttaaccattaaattttgtctcaagatttataattatgcattaaggtacaatgcttatttatttttatttttattttattttttactaaagaaaaaatttcattaatcaaagacaaaataaaaaaacaccaaggtcacaaccaaccggccccaaaaaccaccagctacaactactcaattaggcacaaatacatgccttttttagcttgaataaacctcctattccttaaactatacaacctatactttattatttctttaatatcatttacaattttcaaaatagtataacaataattattatgcacacaaaaattcctgtttttctacagcatatatacagttgcagcaaacagagagagattatcacaccaggttttttgctagcaaaccaacacttccatctattgtagtccaaaggctaggctacaaccccacactagttaaaaatctactgcaacacagcccttgagacactgcaattgaagaaccatggtcgtgactctcttcttcaaggctacacatcgaacaatagcttgaatcaagaacaatatgaaacttagagaagttgtctctagtgagcaaatgaccatgaaccagctgccataagataaaccgatgcttgggcagagttatattgcaccagacagatttataaaggctttccatgttcaactaaagtgtccccatgtacagacgagcagcaatgaacttccccttttttttactgtaatagccacattaagcttgctgaatttcttcctcaaatgacagatttttctccaataccaactaacatcctccttcaattcgtactcccaaaaatcagtacctttcgtatagatgttattgacccatttaacccaaagaatatcatgcttatccatgattgtccaaatgaacttaccaaggatagaccgattacaagtaggaccacttttgaaaccaagacctcctaaaggtttaggtaaacaaaccttatcccaagaagccaaatggattttgcttttctctcccttaactccccattaaaaatctctacaaagcctctcaatctctttaatgaaactttgaggaagaataaaaatgttcatccaatagttacgaagaccaagtaacaccaaatgaataagctgaatatgacctgcataagacaaatgcctcgtagcccaagtgaccagcctcatttttatcttcttaatgattgcatcacagtcttcacgtctccactttgttggtcttagaggaactccaagatatctgagcgggaaagaaccctctccaaattgcaagtcttccaaaatcacctctttatcaaatgtgtaaacacccccaaagtaaactaaagatttatctttgttagaaaataaacatgttacctcagagaagctttccaatgcaatctttaggtgatggacagctgtaatacccggaattaagaaaaaggattagcaaaaccctaaccagataattatgtataattgaggaattatattattat

SEQ ID NO: 40573 - DNA, 1180 bp, Cannabis sativa
atatatatatatatattattatgcataatctttgtttaatcttttatgatatcacacaatatatcttcagtgtttgaaggatgtgaagaacaagagagaagggagaatcaaaatctatatttatatataatttttatcaattagttttttattttatttttcttttgaatttgattgcaatgacacaatattttgatatgatattaggaaattttcttataagttaataacccaactgagattcattcctattagatgtttggttttaacatgtgatgttgttgcattcccattttaccaatttttctatttatgcttttatgaattctctcataagaaattctttgtcaagcttttcaacattagatgagattcattcctacctattagaagtttggtacactttttggttttcttttttattctaatcaagtcaaaatcatattctcttagggtccttttggtcctatattaaattgtattatgtgttatgtttctatatagtcctgtgtttggttttgattcgtatgtgtatatacaaagtatatacatagtaaagatatacaacacaattcattcctattagatgattggccactaacatagtaaagattgttcttttttagctagtgttgtccaaaggtttcttctcttgtgttagtcatgagcatgaatatctttctgagtataatttttcaatcaacagttccccgaatcagctatggagaaagaagtaagttctctacaatcgttgctaagaacaagaagttttgtttttgattgcaggtgaggaagtgaagttgataggttggagaaggagatccaatatcttgttccattactaagtagtaatgtttatgtggtgccattgtacatactacattgtgtttatatatatatggtgaatttccattccaaggttagaaaaacattcattgctttcaattcatactgtatattgtaatgattaggaaactcactttcctaattctgagaaaaatccattaaacacaaaaacaaagaacttagtgccatgttccatgtttttcttcaatgatttttctaggtattacaatgaggattggcaatgtcttttcgtattattattattctaagcttgaattataagaatcttgagaaatgttagtggattcaataaaattcatagctattattttga

SEQ ID NO: 40574 - DNA, 1791 bp, Cannabis sativa
ttgcagcttgacaaaacgttcaaaactgaatctcgatgttgcagaataaatcccgagttacccaccactagatcaggagttggtggtaacacttattctgctggagctaccagtgttggttgcctaaagtgacataattcatcttcttgacaaagtatgataccttgcattttaaggaacatttgttgccagtcggtaggtggattagcattatcaacccctacattatcccccagattctccggaggtgcaggcggtgccggtggattggcttggtaattactaggctctagatgctcgccttgggtctagatgattgtggagggtcccttttcacaaatagccctaaaatcgacaaccctggcgagtcaggcgccaataccacacttacgcacttattgccttaaactctaactcaaatattctattccttttattaaaataaacatttatcaattaaaacactaatcatgaagttcataacacattcatttctagatgctaacatactgcctaaaacagaaaggggtcaataaataatcacaagggcaatcaatcatttactcttaacacatactgcaccacgagtcgagcttgtctctatcgatgattgaacatgttcagtcggtctacaagaagtttaaaaaccatgacgctctgatactaaactgtgacaccctaataattaagcacgctatgatttttcaattaacataacccaatcccgcgaaaccggcattactaaaaagaagagcataaatttatacgttaaattatttacaaaatgaaaatatataacttgtaattatttaatttacaaaccctttcaaaaaatttatacatgtttcgggatcccataaaaaatttgcaaaacattacaagttacttttacatgccgacctagatggtaaaatccggaaatacaaaagacatccactagtagacccaaccctcgtggtctagtatggcctaaacatgtgcaatccacagctaagccctcgaactcatagttgaccacaaatagatttaccctttcctggacagtagagcacctatcagccaagccaagcaagacaatgtaaataacaatatacacataatcaaatgtcacataattattgacgccactgcacttattgcctatctgacatagacctacgtgttacgatcacacgcctaattatgtatttgtagcatagactcacgtgttacgctcacatgtctatttacaataaggccttagaatagtttatctaggttctgattactgagtctaacctaatcatgccttcaatgcataattctttatttcaacatataaagcatggcattatattcaaaactatttaatcactagggtaataaccctaggctatataaccgctcactttagggtaataaccctaatcctgattcctcatttaattacaatcataatatcaaaatgagtgccaccgcacttaactttacctgctaactactgtcttacttgatattccaagtatgtggagattccaaacctcagggtgttcttgagcaagcactgataatcctagtcactattcccaggatgtcacaaatagggttaatttcaaataatcatataactggcatttcatttatagataagcatatagagctcggaacgagctttccaactatataaggaacatcccaaacgaagtcccaagtcaaatgttatggcgaaaacaaaaacccaaaaattcttgggggaaatagggcctcatcacggcgagcagggccacggccacggcgagcccagccatggcc

SEQ ID NO: 40575 - DNA, 1910 bp, Cannabis sativa
tatttttattttattataattattccaaatatagacatattattatattatatataaaagaaaaaaaaaaacacgttaacatggcccagtgcagtgatagctgttatatcatatagccgttaccactccatttcttaccgttatcgttagcccagtcagtgggtcccacacgccgcttcaaaaatttcccctataaatacccactttactcctctactttcttcattcacaatcacaactctcacacccaaacattacaatctctctctctctttgaaaccctaactttctttctctataaaattatttcagcaatggctcaagtaagcagctcctccgccaaggcgttttccttcttgatcgtcctcttcgtcgtcgccgccgccactctagtctcggctcaggatctttctccggcaccggcgccggctccaatgtcagctggatccggttactcattgccagtctccagcgcctttgttggagcttctcttgttctctcagtcttcgcattattgaagcaatagagcatttctctgaaaatatatatatatatatacatatgtttatgtattgtgttttatttgggagagtgatatcttttttgatcgagatttgatattctattatttttggattcggagagatttatttttgtatgtttaattgattattattacttggtgaataaaatattattatatatttttttaatttattttcttgtcattttaagtttatatgatattaattttataatcaaagtaaaaaaggaatagaagtacaggccagaaaattatatatatggttgtaatcaaagtaaagcatataataatgtaatatgtccaaaattaaagaaataatgtggagtaaaggtaaaatatagagttcatttttggtaatatattttttgtaagggtaaaataccatattttttgtaaaagttattaattaaaatttttattttgttaaattataaaatagactccctattttttaaaattgtataaatagaagatttttatatttttttatcaaaataaaacttaataaaataatgtgatctaaagaatttctgtatctgttccttaaaaattataaagatgatttatattaaaaaataaaattattgaaattgagctaattattatactactcatctaagacattcaaattttcaagggagagggagaaattgagttgaaatgtgaattagtaaatttaattagttttaattataataaaaccgctaaaaaataattattgtttttagtgttttaatattttttaatcaaaatattagtttgatgaacatattataaattaaaatacatttttattaaattttttaaacgattttacattttgattatttttaactaaaaaaaattgaagtgtttatctatttatttatttatttttgagcaagaagtatttaaatgtttgattaaccaactttggctattatcacaataaaaaatacgtaagagtgctacataatttaaatattaagtatttttgtggcaattaacctaaaaaaataaattgatcttaaactaaaaggaaaaaaaaatattaataaaacgttatgatatcatttttaaatatttttgttattaatttaattaactaatatccaaaaggaaaaaacatatataaattacagcaagaatttagaaaattgattccatgttttttttttcttttttgaatataataaattaaaaggcaaaaaagccaaagcactttcacaaggattttttttgataacatctattaagctttgttagagatattacagagctttagagactgtttggtttcataatttaaaaactgttttttattttttaaaactgaaaacaatttttaaaaactaataggagtcgtttgaccaaattttttaaaaa

SEQ ID NO: 40576 - DNA, 1150 bp, Cannabis sativa
  modified_base (1055)..(1070): a, c, t, g, unknown or other
atttgttttaatttttacctttattttcatattttttaagatatactcattttaatagatgatgtccctattagacgttgtaggttaatctaaattatatgttacttaagtagagagtgaaggtatattaggcaactcactcataaaaatgagtatattataacatatgagtatttttgattagtggatacaaaaacaaggcatttctcaacttattctattatttttttaggctattaaggatttttgtgccaaactattatcattaccaaatttatgttatattatttgttataatataatatagattacaaaataaaatataatatattatatatatataagattaatatatataatacgtttagtaattaaattatataatatatagtttaatatatgtatatgagtggttataaaatttaaaaataattttataacctaaggatgacatttgattatatataattaaatgagttattatatatagaagttataaaattaatgagataagtttctagttattaaaaattgttacaatactcaattatatcatttaaatggatattgaaacattctaaaaactgttgttttatggttgataacaagttgttttatggttgttctccttcatgtggagcaagttttgaaatattgtccataaatgtacataaatttattgaacatgtttccagctctcttgtccaaaaattttatcctaataaacaccaattaaagtgctggtaacagccatgtggtgaagaaattttgatttttatatgtgatccctcaaatactataaatagagatatttttttttcatttgtggagacactagtaactatcaaaaaaacacattgctagaaacactttatgcctgataaatccataaagttattttcattcttctcttttccttaagtacttgtggtaggggaaataagcttttagacaaaggtgtaaaaccttgttcaagtttgataattctcttattatacacttgtagtgtatgtggtgctgagattgctctcacatctcttacatatatatatatnnnnnnnnnnnnnnnnttaatgggtattacccatgtatgagtattttatccttgaccattggatcaaatatctaatggttgatatttataatcatt

SEQ ID NO: 40577 - DNA, 1274 bp, Cannabis sativa
taaatgacatcatatttgattttcattttatttttcttaatttgtaaggtttttacattctctgaataacaaaatgtttagaaggtttgaaaagaatcgaagttatacttataatataagtctttcttttttatttttatttagtatatgattagtatcttttttctgtatacatctcataaataatttttttttttctaatatatatttgcttgaaacattgtccatcatccccacatagacaaatatattaatgatatagtcttatttgtaataattaattcacatgcatgtgtgacccacattcacttattaatacttttgttttgatcaaaggactattctctcctataccttattgatgaaaagatgctgcacttctatcgctccaacaatatcaattctacattaattaattccccaacctccaacctcccaaataaattatttttcttttttttttttaaaaaaaaaaaccctcccaaataaaaaaaaaaaaaaaaaaaacgccatgaaaatactatttacatcacgctaccaaaaaaaaaaaaaaaatcctacaatttataaagacctaaattttgtacgtaccagctaataattggagctaaaatatatagacatataaagaacctttatcatctctattgtaacattttttactcaaatcatgcttttattattgaaattattaaattaaaaatataaattgatactttatttttaaaaatacatatataagatgtggacaatatttatatttttttatgtgcttttaattaccaaacaaaatacattttatactacctaccacttacacaatcagacaatggttgctgggtagctggctgaaggttgcatcaggcgacgttttcagtcagaggaaagttgctgggtgattggctgaaggttgcatcagatgaaggttccaatcaaacgaaagttgctgagtggttattaggtggtttgccgaaggttacattagacgaaggtttcaattagatgaaataactgttagtaaaatgtttatgcaactgtaatgcaactgttatgaaactttaaaaatcaaaacagtgttttcacatacgtaactctatcaaaaacaatgaaatacaccaagataaacattttactataatattagtgtaattttttttggattatacttaagttggattgtttagaaactccagttcaatttttttgagatctacattttatggatatgaaaattgaagtcaagacattagttttatgcaaattaaactagattt

SEQ ID NO: 40578 - DNA, 911 bp, Cannabis sativa
cgatattttcgataactaactaaataaataaagatttagagagctggaaaagaaaatagaatataaagactatgaagtttacgggcgttaatgagcctgaagataaagttctctttctaaaatttggcaacattttggcttaacaccaatgagagagaaagaaaataggtcatttacatgtgacctcattgtcatataatttataggccgttatagagttttttttattattattcgtctaaatgcttcaattgactgaaggaaatatattgataggcataaataaagcattaattactggtatacgggcttgtcttatcttgtctcttcagctttattagaaaaacgtcctaacatatcacatcaactttattaggagttttgagagttagcgggtgcaccatcatttgtccttgtttgacaaaaatagtgactaccctctatttttttaaatgaaatataataatactttgagccaaaatttgatcatacttttatttaatatatttgaagccaattttaattacaaatacgtgcaaaaaagaaaattagcctccaccttaagatatttttatatttttgactaaaattgagtcgaggatattataatcgtttattctgaaatatatatttctaattgtcatttaaaaaatttaattgataatttttataaaacacaaggttgagaattttaaaataaaataaattactttaaaaattcatttaaacaaactttttaagcatagtctattttgtactttttttttatcaaaattcactttatttatctcatcattttctctctcgttctatcacattattttcattatttttacttaaataaaaactataacgtaaaaataaaagttataaagacatttttatttaagaaatttatataatacacttaa

SEQ ID NO: 40579 - DNA, 1040 bp, Cannabis sativa
aaaatttgtgccaaacaccattaactttttaaaatgacaaaaaactgttttctattctcacttttaaaaacacaattttaaaaactgaaaactgaaaatttagccaaacaagctctaagtattacgagtgtccaataacaatgttcaaaatattattgtgcatcagacacaataacaaatattacaataaatataacctttattagtttttttttttatcaaatttaacttaatatttagatcttggataagagagaaatatataaattttacaattacatttataaaaatgaccgtgtgcacgtgatcttaacttcatctactctattctttactactcatcaatagtttcttaattaagcacatctctcaagcctaattaatattaatatatagtaaaagaaataaatatgtttgatgatcatcttaacataaaattctataaaaattaatcagcttaacagtacttgatcattttttaattatatatatacttgttcagtttaacgtactatacattattatttttatttctttgtgtaatctaatgagattaattttaaattacaaacaaacaaaacaccattttctatgcaataattcagtttttcaagcaaaataagaataatactgaattacgatttttacctgcgaattttgacaagtactaaattatatcctctgaacttttaaagtcgttaaaaatgttcctgaactattaaaattgttagatttaaggatttttgtctaattttagtaaaaaaaatctaacatggatgatagttcaaaaaacatgatttagtatatgtcaaagttcgagtggcataatttagtagatatcaaagtctagggagcatggtttaattagtatataaacaatcactaaaatagtaaaattgaatgaaattaaataaaagtccttaaatctaacaatctcaatagttcagggaaatttttaaccgccaacaaaatttaagagacataatttgatacatgttaaagtttaggtaaggagtaaaatcctaataataataataata

SEQ ID NO: 40580 - DNA, 1355 bp, Cannabis sativa
ggtagatcagttgcattgtacaccgatttcatgtaactaaaatctgtttaaatcaaattagtatcaatttgacaaaattgtgagataataaagaatattgtaaaaagatatctgatgtaatactgttattgttacaattaagtaatattagaataattcgctaactatataaaagacataaattaaaagtaatgagaacatcttatggctagaatataattaaggagacatgcatgtatgtaccataatcagctgcataaacttgtagtagttttctatgaaaacaagttaataatattagaatagtaagaatggaccatagagaagatggtgccatgtttttttttttttttgaagtttgaattcttaaatgataaggggtttggttacattagtatactatttataggttttttgtataaggaatgattagcaactaggagatccaagtatgaaataatataattattagaaccaaagatatgaccaaattcatggatcggcagccgcccgaaataagataatactataatgatatcttacatctcaacataagattatgtttatgaataggaagtatatattattttgccttatattttgtgttttttaatacttagataaataataaggaatatattgatttagtaccttctattttcatgaaaaacatagttagtataccttgtatttttgataaataaaggggaaatatcgggtaagttgtgcaatcccacatcacagcttactcgattttttcccttacggattacgggactactgactgtcacaatcactccccttacaaggtttgacgtcctcgtcgaccacactttcagctgggtcaaggctttgatactatttgtaacgtccccgcttcaagtctctattgggcccttatactcaaggaatgatgactcttatacacgagtacgtaactctgactgcttcctagaatgacgactgaccctacaaaccaacacgagtatttccagcgtacttcgtcctcactcgcatacttcttgagaaaacttctcagttcacccatattctaaaattatctcaggtcaagcacgcttaaccgtggagttctttcttgatggcctgggctaccaaaaataagatgtactttgttgatataggtagtatcaatcaatctatttaagctctcttcaactgtgtagttacatacctacacgatcttagaatcatcacacttgaccttccttaggcgatgtggaattgcacagtttacctgatctttgtccttacagatcacgagactatactgactgtcacacaaaacgtcttaaggcatgctcattaaaatatgatgtaaaattaatagataagct

SEQ ID NO: 40581 - DNA, 1617 bp, Cannabis sativa
ccttctatcccacattgagatccgtcaccaactagccatttgaaattaaatattgatgctgcacaagatttcaaaactggcaaaatgggtctaggatttatagtccgagactgtaatggagtcattcttactgttgcgtcatttccttggacatgggttttttctcctcttctgatggaagctctttcaacaatctcttaagtggtgtattgagaattctcttagcattgattacattgaaactgattgtaaggttttggtagacaaccttaaacaatctaccattaccaacatccatttacaaggttctgtaacagatattaatagcttgttatcttctttccctcaagctactattagctatgtggcaggagaggccaacacaactactcactacctagcaaagtatgctttaggcttagataaagaagttgtatggccatcacttagacttttaattaaatatcaatggataaacaatttcttttcatataataataattataaagtaaaatattttttttataaaaaagacaaaagtaaaagataaaaaaaaattgtataatgttttagcttataaatagtaaaagtatctccaatgatactttctatttttttaagctaaaatagctaaaaaaaaaactaaaatagaaaattatttttattgttgttactttaatcatgctcatgaaaaagtaataatacttttgattaataccattaaaaaatattagcaaaaaagtaaagagttctatatatttagagagctttctatgcattagagataagggtggcaaaacgtgccatcgtgtcgtgttcgtgtcatattttatgtgacccgcttttatatttcgtgtcaagcgtgtcgacctattttttgactcgtgtctaattatctcaaccctaacccgactcgtaaaaaatagtggcgtgttcgtgtcgacccaatgtgacccttttgctattattgaagctgaaattgtagagaaaaataatagatttaagctccattagaaaacttatatacatttatgtatatatagtttgttatatatatattttaattttatgttaaagaatattaaatttaaaattttttaacttaacattgaatcactaaatatatatttttatataattatattattaatattaattttttattttactatatttaaaacaatcgtgtcaaacgtgtcacattggtgttacgcgggtcgtgtcgtgtttgacctgtttttatttcgtgtcaagttgtgtcgaccctttttcgacccgcatctaatttttccgatcctaacccgtaaaattcatgtcgtgttcgtgttcgtctgccatgtcgaaacccgttttgccacccctaattagagagtcattttttgtatagttggagttcttttttttaagtcccactccaaattttagcaaaagagtttgtttactagttacatttagctaaacaaatcgctgaaaaatttcttagttaaaaattagaaaagtttagcttatcggaaaatgaaatttaagtttgaagagtactatcgttaacctctattacaatttcttaatcaacttccgtgtttgaaaacataagctgaaatattttttttcacggtg

SEQ ID NO: 40582 - DNA, 1614 bp, Cannabis sativa
actactgtcaatttaattttactatcaccaatcacttatcttattcatatttttattagtatttatcaaatctaacggtgcgttaaaggtgtgtttgaaagtaattgttaaattataagtagtagttactattatgtcaagtgtacatgtaaattttcatttttatgaatggaaaccactttataattacatataaaataaatattatataatatttaagtatctaaatatagtcatattttataattagacagtataatatcatgaggataatatgaattagagagaatacatttaaactctttgattaatgacttttaattatatagttaagcaaataatgtgctccctacaactatttctaattttatgcacaagataatatattatatatatatataatactttatattattattttatactaatggtgcaccggccttgcatcaagttgaatctatatacatatatatatatatatataaatatttttgtaaggtcaaattgattatattggttgaaaataaaagataagttagaaagaaaatgtatatatatataattaagtaaatctaatagcacatattattttaagtttaaatctaacactaacacataaaatatcacacaaatcatcaatggtatattcttttcattattaatatgggattcattctttaatgcaaaatatattttgtcaaatgatattcaaaatgagatagtaaatattagtgagcactagtataatattcatatccctaattgggtaagaccactttcttaattttggtaagattgactttttatttctaaaaaaaaaaaaaatctctgaaaatagaagcacatgatgatgatgatcatgatgatgtcctctttatctttggtagcaaaatgggttggtggtgatggtgaagtcattttacaattatgatttatctcaactttaaaactccacaattcatggtttcaattcaattggtttcaagttattacaactttaatttgtgaaataataataataataaccttatattaaaggttaatataaaaatgtaaatattgagtcaaaaaatattaaaaaacattatggaatttgacgatagagaagtgattacttacaattacttattataacttttttttagtcatttttcacgtttgaaatcatataatgaaatatttttttttcaactttttttttaaagaggcattcgttataattatagtatcaaccttgtaaatttttgaaaaatttcgaatagtttacgataccaaaattaaagttcctaatatttcagttcaccacgcgcgtccaaaaaacttttaacgtattttcggcactataaattatttgaaatttttttaaaattttacaggaatgattggaatgatgttgttagtatatcgaacaccgtcataaaaagaaaattgaaaaattaaacacataatttttgtcatttttgtgatagagcatgtatttttgagcacacaaattaactaaaatattgtaataagagattaaaagtaacattactcttagattatattattaattaattaaacacataatttttgtcatttttgttatccagtattgctctatcaatattaaac

SEQ ID NO: 40583 - DNA, 1031 bp, Cannabis sativa
ttttctaatataagggctcaaaaaaaaaatttctcctatgacccactttgtttcagggccggccctggaaacaatctatactattacgagcttttcaaactatgaatagttgaattaaccccacacacatgtatttagtcaaaatccaaagaagattcatttcattcattcacataagaagcaaaaatccaatgaatctaaaatttcatagagtagcttatatataagtttagaactagagagagggacaaaaaagtaattcaaaggttgttgactaactaaagaaaataaaaataaaaagaagggcaaaatggtaatttggtagtaatgatattacattcttttgtatgttcttcaaaatagtctcttttagttcaaaggggtaaaagtccaagttgtctggtggctggcattggcaaaaccttcacttgattcattcatatctctctctctccaatccatattccaacctgtcttcttcttcattctcttcttctctctcaggacttttcacaaacaccttacctaattcaaatcttcattatcacaatgcagcagcatcagcagcaggtaacttcattcattcattcacttcttacacacactaatccaaaacttttgtattttttttgtttatttatttattttttgtgttgattaaattcagacgaggacagttcaagtaaagaaggtttcagatctagctaccgagagagaaattcatgagttcttctctttttctggtgaaattgaacatattcagatctaccggtacgttttaatttctgcttttggatatgtgttgttgtttctatgtttaggtttagttcgtctttgtttgtttggttgttgagaaaatatagcaatttatttatttatttatttttcataaattttcttttttagaattatatttaaaataaataaatgcatatattggaaacgtgtgaagaagagtcaatagcagccacacaaatatagatattttgcaaaatcaatataacatttgtagattaagtagttttatattg

SEQ ID NO: 40584 - DNA, 1273 bp, Cannabis sativa
gatacttctggtgctggctatgctatctccaataaacccaaccaaattggtggtgcatggttgtaggtcctgcacacttaaccccattttctccaaggttttcttatataataagttcacgctactaccatcattgatcaggattctccttaccctcttggtggcgattttagatgttatcagtagggggtcattatgtgaactttatacatgatgggcatcctcactggaaaattttatggtctggtcttccattcagctttgcctgggagcatgtttttttggtatggaaggagtcttatctgagttcttatgctcattaatatatctattttgagccccattattggtcattgcaaagtgtggtcctcctgatatgaccaacacatcctctccttctacaattggatgaaagtctaggttatgtcctggttgtccctcttgtggttctgctggagggtttggagcattggcatgtgggactacaggttgttatgcattgactccttgtgggttgtattaactattcctcgcatagtgggcaagaggcccattatgtatgagagtctctatctcattctcatgtttcgacactcgttagtggtatgccatttgtctttatggtattggcaatacttgtttagatccctttttgcatgacttcccttcaagagttcaggtatcccaaaatctacccgatgttcgtttgccacatatatagtttcttgtgtctccacaaattcagagtatattgtgaaaatggcctgataacctttgctcttcttagtgttgttttgagctcctccattgtcgccctttctcttattattgtgcccagagttattggcgactggagggttggcagttcttgcctttagattggtggaagtcgttgttgtagttgtcggagcatgttgtgttaagggaagaggtaggttattggctattctagcctcctcaatgcttatatacttttgggccctcttcataaattttttgattgtgggggaacctctttcttggaggctatctcatagtaaatacccatgaattatgtatgctcccagtgccatgagtctcccactgtcatcaacgttcttgactttggctacctcgatgttaaacctattactataggcctttatgctctcaccatgtcactgttttacgttggccaaggaagagcttttggtttttcgagacttggcggcacaaaattcttttttaaaataacttgacagtttgtcataagaggtgattgaatgcttcttga

SEQ ID NO: 40585 - DNA, 1120 bp, Cannabis sativa
tttgttcttttttcctctcaatatatataactcataaaatacccacccatcaccccatataagttttgaggatcaaagcacaataatttaactgaacatgaaatgaccactcaacagataataataactttgcaaaagaaaaaagcaaacatatataagaagctcaaaaagattaagaacctataaaagtaatgaaaaataaacaaaaataaaagaaagaaactggaaaagagaaagcacaccatggttgaatccataaaaagcactagttgtaccaccaacagcagagccaatctataaattaagaaaaaccccagaaacaaaatagaaaaaataaatcaaacccaacaattaaaatccaaataaaatagaccaaatctaaatagaaccaaaaaaagcatagaagataaatacataccatagaaaagctatccctaataaatggccgaacagtccaatcactggtttccatatccttagtcagaggtccagcacagtgatgacatcttaaactcgtttccccttgtttgggatctgccatattttctctctaaaagatacaaattaacagtgattcattagggttttaatcttttttggcccaagacaaaagcatctccttctaagcataacaagtttttatcaatcaaataaattataataataaaaactaatcacaatgaataactctgaaacaaagaaaaactatccattccataatcattaacaagtttatatatataatgtttatgtatgaaacaaaaaagatcaaaacaattgttatacaaagaattaaagctatggaaaaggtaagacaattgaaaaatcttacagtcgataagaagggggcggtggtgaggctgagaggttatgaggccgcctgaggtgtccgtacaggtcaggtgagaacggcggcggtgattggagagagagagagagagagagagagtgaagtggctgacctgagagagttagttagtggttatgtattgggccttgtgggcttagttaatataagcccaaatgttaatatttgtggaggaaattagatgggtttattttataaatatggcttttttgtaattggtttagaaatatatggagaaataaagaaatttta

SEQ ID NO: 40586 - DNA, 1645 bp, Cannabis sativa
gtctaagagcacagatattctccctgaatattctatgttattttgaagagaagtcacttgttccgtcacagtttaagacaaaatgatagttgcactctaagcatcttcatcccttttctcgagtggcatggtccaagactcattagagaaacctacatcaacatatattctctagcatgacatgattaattcaaccttcttaagatttttcgtgttaaaagggtatgaccttctctctcccatgatgggatgtcaatcaacatggcttcagctctcctctttatgtcaataagaggagcatgtcttttgacacagccagatttttggaaggtaatgtatctcgacagaagaacaggagtatagaaatactcttgaaagtaaaagccatagttactcttggtcatgtgtcctatgaaagggtcgaattggtggaagttgtaaaaaccttaatctctatgggttggactcctcttcaagtcacagagaaagtttatctcatgaaaagttagaataggccaactcgtaaggcggtaaaatatgaagaaggtggatagaatcctataaccattagggcttatctggtaggggcagacaccaaacaagtcaactacgcatataatccatggatgcaagggaaagtaagaacctgtattgatttggaatctcgaccaggcactacaacaagtattttgctaacctttgggagcaccatgtcgaggcttctgaacaacaatttcagaaggactgtaatcatcccaaatggtttaagcttgaagctcggtaagggtacttgacacaagaggcctaagcttaaaggcctgatgatctctcgaatcgttgctctcaatggaaactttaagaacctcaatttccatcacttttccaccacgagccttgtctaagttcttagacttaggcactgtcaacttagctctaatgaaatgagcaatatgggactcacattcatcaggtagcctgctacttcttatcaccctagccatctcaagttttgcaatttaggctagttacaactcaaggaaattcaaacttggatgcaaaaagtctaattagcttggaagagttctttcaggcaaaagaaaggtattttggaattttgggaggcttgggaaaattattttgagggtgttgtaattaaggagtccttggagtaagatcaacaaaggaagagaagaagaagaagtcaaaaaaaaatttctactctaccttgcttgaagtgaagtgaagaaggaaggcaggcttgaaggcttgatgaagatgaaatctcgaggttctctcaaagtactataggcgtgtggaatggaatgagaagagttaaaaaattggttctcaactcacttatttatctttgagtccaacttcctactcctaggagtcttttaaatttaaaactttctacggaggaggtaaatgataaataaaagatataattatatcttttcccttctcctttttatgtgtatttcgaattcctttacaattaggaaaaggaatgaaaatttaaaaggtaacaacaattcctaatgctattgggattaaggaaaaattagaaaaatcaaaggaaaaagataaatgataagcaaaagatcaaaagcctttttcacttcttcctttatctctctaattt

SEQ ID NO: 40587 - DNA, 1365 bp, Cannabis sativa
ggggagggtattatgggaaaaatacaaaaagtgtcatataaaattaattatatatagttttagtttaggggaataatatatgggttatttaagcatggaaattcaagtttccctaataatattaataaaaatttaattattaataattatcttattttttttttcagccattaagaaattttaaattttagggtatttgatcaacttcgaatatctcaaaataccatgatatttataaaattaacttatctcaagtgagcctatctcagagaaagaggagcgccaaatcctaaagccagagcgagcctctaaaaaaaaataaagaaggggtacgaaccccaatacatagaatgtactaacttgacgaatactcgtgagaacatttttcggtgacttggaacacgcccactactgaaagccgcctccaatgtagaaaggggtaaaaacaaaagagattcaagcaagaggtatgaatatcatggcgacgtgaggcacaccacgaatgaatgtgattatctgagagacgagataaaaaatttgatctttttcaaatcgaatctttagtgggaggtcaattcctactgaatttatgtctattcttttggacgatttgtcatcttaataaagtcctactgaatttatgtctattcttttggactatttgtcttcttaatgaagttctatttctattcaaaatatatataaaaaataataaaaaataaaaaattggagggcctaactcctctggcccccatagctcggtcattgacttctctattaaaattatattgattgtattaatttatagcaattcataaatacataaaaaaaaattacataataaatcaaaaattaaaaaaaaaaatagttacaaaaatacgtcaacaaggaaaaaaaatttacgctttgaactttttttttataaaaatatatcttcagtaaaaataattaactatttttttaatagtatatttataagtatattatagttgtcatgaggtattttttgtgtaaatttatagttgtcgtgagattgatttctcgttgttttttagttattttcttatattttgctaagaaaaatgtatttttataattttataactttacaagtgtatttttataaataaaaactttagaccataaaccataaaattttaaaaaatataaataaaaaaaatatttttgaaaattctccaataaataagatggctgaaaaataaaatatactaattgtttaaaatgtaagttaaatgtggaaaaaaaaatatctgataaacataaaatatggctctatactatatctgtaaagtctttttttggcaagttaggtgacaaaataatttttcctttttatggtaagat

SEQ ID NO: 40588 - DNA, 2022 bp, Cannabis sativa
  modified_base (1319)..(1319): a, c, t, g, unknown or other
  modified_base (1527)..(1530): a, c, t, g, unknown or other
agtctgttgactcacagatattacattcataatatatatatataaatgtataaaacccacataacatttaatatatatacataatggaactattctagtactatttgttggttttatggtactaaatcaaatacgcaacggaataaatatttctgattatcatcataccatatccccaagatcaccatatgtgtatatattaaatctaaaagtaaaatagatgaaaagattgtttacctcttgaagccaatcagggtatgcacaggtctttttgtatgttgtattcttagaacggcgacgtcaaactcacaccttgatcttcaagatcttccacccacacaagaactagtatggcctagtaggataaaatgtatataaatttcttgttggattcttaatacatgagcaagaacaattatatagtattttttggagaaaaaatttaaatcagattaatcctttttaggctttccaaaaaagttactttaaaaattctgttcaaaatttagtttatacggtatatttaaataaattcaataaaatttttatttaattaattattaaattaaaatcatatattaaattatatttaattattttaatacataatataaccgaattgtattatatatatatatatttatttcctataactgattgagggaatctctcaactactttgagaaaatatctcaaccactaaaatatctaaaactacttttcaaatttaaatctaaataaatattaatcttttgaattaatgaattaattaattaatcaacccaaaaataaatctagtgggggcatccctatagtgtaggtgcctatcactatgttagcacacagtgctagtgacaccacttatgtcttaacaagacattggtggtgtcttttgtccggaaaacttttttcttttctccaatttcgataattaacaaatttaaaaaataaattatttattgcaaaataaataattactattttgacaaatcaaaataatttttttcaaaattttatatataacttttatttctttccttgacagtgtttaaaggtagtgatccagaaatcatggacatataattataagctctaataaactagattattaattctcatcaatcaaataatcatgttgattaattccatgattaatccattataaatatggaatataactcttagtaattataaaattatatttactgagttttactacagtgtccattgatataatcaattcgtgattagccctccttgtgtcagttcgtaattatttttggtcaattattttttactcttctaattacttctttatnctttagtatcattaatttactagtgaaagtataatttagatccaatctaaatttgtgcaaaactttttagttccagaactaacgcttaaaagggaaccaacattcaatctgttaggaaagtcaggattctataattgtagatcatgttgccatccatccatatcattagatttccaaaagagaagttataagaatcatcttctctgannnnctttaacgagtgaatcaaagaacctaataacatgaccaagagttcatgattactcaagattcaggccgattgagtattgatcatctttatgatatgaattaggtctttatagtaaacaatatgtttaataaaaacaacttaattacatatcggtccatatcatatataatctctattatatgcagtaccttcacttagatgtcatactacatcaacaatctaaatttagattgcttttactgaataacgggcatcagtgaatcgcactagcaaccattgattaaagattcctaaactttaatatgatgatggctgttttattcatggctaagtgatcttaattctccatacaatacaagtcacagcctcatgtatgaataaagattttttgatatttatatataaattattcaatatttaaatattaataatttaacattcaagcatatataaaaatattcaacttacttataaatagaaatatctttagag

SEQ ID NO: 40589 - DNA, 1669 bp, Cannabis sativa
tttttttaaagagttgaccgagttgactgagttgaccgggtcaacccgccaacccgctaaacccgatcaaccgaaacccgccaactcgcgacccaccaacccgtcaagtagtgtcctattcgggttcggttttaactttttgaacccgaaacccgccaactcgaaacccagtaaactcgcccgatgttgaaccctgaaacataccacatatttgaatagtttcaaagttaattatctcgatcacaatcatctcattcggctatgaaattaagaccacataaatgaattattgacttttttgatatttacttaatattattatcataatatcgggcatagtctatatataacaattcaattcatttatttattccattttaaatatttatcaacaacaattgtttaagacactattcaattgtcatatccatttttctaacagtaaataaacaaatttgattacaatacacatagaatgaaataattaataatttagtactgcagatcgtcaaattaggaaccacttagtaagaatctaatgtgtgaagtcatctaacaaagatcacaatatttatgaattgaagtatttcaacattgttaagaaatgttcataaaagatatatcaagagctcggaatatgatgaccaactcaaagcctgcctttttatattttaaatatagacaattatttgtatttattaaatacaaataattgtctatgcatccaatactcaaaaataacaaagattcatagactaagtagactctactaaactacataaaatatttcttcttcttcttattgactacgtttttttttaggaaaaattacttgttattataaattaaacaggaatgtcatcatttacaataatagagtaaaaaggtagaggtaaatcctctaaccaaaagcaagtctcttccacccctaaagtgaacttagctaaactgtgaacaactatattggctgagcgtttagcatggacaacattcacttgtggaaaaaaaggaaagaagactagtaacatcaagtaaaatatcatgatatgaagaaattgcagtagatccatattgcaaagtgttagcaaccagaagtgcatctgtctccacaatagtaattggtaattgcagctgaataacccaattaaggctatgaaacatagccttagcttccattacatgagatgcaaaattaccaataatttgtttcgccataggagcaagggcatgaccagccgaattacgaacaacagccccaactccaataatgtttcggttagcatcaagggcggcatccacattcagtttcagatccaaactagttggcggagtctattttttagcagctggtgctggtgtaggcagtgtagtagcagaggttgttacaacatgatatttccttgttgctgatctaaaattggataagtaattaacagcaaaagaggcaagtatcgatgctggttttgtagaagagccatgaaccactcggtttctttctgtccagattgaccaaagtgtgcaaataatttgttccatctcttgtgggttataaatttttgagagatgtaccaaatagtctcctttgtacattgcagaagctttactccagtcaaaaatcagatccatgtggcgccatacagcttttgcatatttgcatccaaatagagca

SEQ ID NO: 40590 - DNA, 1230 bp, Cannabis sativa
aaataataatcaaatcttttatttatttgcaaattttcatgatttaactatatgtggtcattacaaataatatgcatataaatattgaatcaaccattcatgcaaagggttagaatgtctagtgtccaaaaactggaaatgtagtgtaaaccaagagctaaataattgtgattactaaaactcgttaataccctaactacgtaaaaattagtgtctaattttcttcttaatcatattttgtgtagcttaatatttattaaattcagtttccttcataagtaatgtaaataaaaaagtagtatttattgtgtgtcaaatttaacacaaaattatttaaatttagtacaagttttaatacgtattaaatttcacatacttcttataacactattaaagtagtagctttttgtaagtatattaagtagttttttttagaaaaatttacatgcacacatattttacaattaaattgtaaaaataattttgctcatttttaagaccgtaatttaccttttaatttgatcatgaacttgtatttttttaatattgttagtctgactctactgcagcctatgtgttgcatcctattatttttttttctcttttgtctctttttctctctatctttaactttatcaatttcactttttttttttataactttaaaaatagttatatatttgttgagctcaagaaaatagtatcattgccacttacattttaatgtaatcattttaaaatgtgaaaagtatatattttttcacttttgtcaaaatcaaaataactatttagttactaaccatatcaattatatactggttagttacatgtcactattgtataattataaaattaaaaaacttataagtaaccaattaatattatgttaatttaaatatcatcagtcaccaccaaaaattccaacatcacgatattttttattgacatcattagtaattgaaaagcttttttatatcaataaaaaatacatattaataaaagaatgaatcattttcatgttgtgtgggaaagtaacttcatagttacttctaagttttattttcggtatcataagcaactaaatagttacttttaattatggtgatgatgagcaaatatatatatatatatattttcatttagttaaccaaaaagtaaccaaattcgtacaattattttctgaccatatcgttacttgcttaagttaaaaaaattatcatcgtgatctac

SEQ ID NO: 40591 - DNA, 1669 bp, Cannabis sativa
cttgaacattttataaaaatacatggagaaataggatcatgtatatacttctgttatccacatttatgacattagaaacgtgggttccaagtcagcattcaagacccgttagtgggaccctcatcaataataaagtgggccaagcccacctgggtatgcccttctaggagctatcttggttttaaacttgtagagtcttccgcccttagcggatcgagcccagaagacacctccggtatcatgaggtcggaggcctaagatggtaccttctcggaagactcttccaatttccctatttattcctacctataaataaggaaattctagatgtcagatcatgctagaataacgtatcacgattaaaggggaaacttcccgtagcaaacgctatgtagttattcataataatcatccaccagtagcggacacggttttgacttaatcaaccaaacttcgatctgcctagtcagtagatcgtattcttcatgggctgaacttcatgaaaaagcttgaagatattgttcaattgtaaactccccggtagagggaaaatgggaaatcctaatgtaattctccaactactataaataccttactaatctcatggattaggggttgagctctcttacgtactttgctcaggaaaacttacgaacatacatcttgtgtatctcttaaagtgtttagaagtaagcagcttactgaataaaactaactcgtggactaaggctagttaacgcccaaaccatagaaaaagcggttgtctctttttatactttctctttcggtcgttatttcttcagttcttattatttttattccgtttccaaaaatttcaaaaaatattttggtgctttcattaagagttgaaggaagcagtgagaccaccagttaattacttccgagtaatcatggccctcaccaaaaccaaatttggtctttgtttcagtggtcctatcaccaaagcaggagatacgagtgatcccaaagaggtgactagcctccagaaaagctattgagacgaggaccaaaatttagatgctcctatcgtagaggatgcatagtcaggaaaaagtagttctgaagacgttaaagctaacgctgatggtgcgccgcagcatatgcatgaagacgacccttaagacaaagccactgagaataatgttggagaaaaaagccagcctgataaatccaaccccgttgtcattatggtgtgacaactgcaactaactgaaaggaggttatctcaacaagattaattcaatgagatattactttgcaagatggccagaatggaggctgtaatgaccgcattgactaagacggctctagacatacgagcccctccaacaacaaatgcacctgagaaggccgatttaaaggaccgtagaccttcaggtgttcacaaagataagaacaagggagtctctactgaggagccaaataggaatccttccacaaagtagcccaacaagtctaaagctcctgaataacctcaatagaggaggaaaggaaaccacgcttcagggcgtggagaccaaaccaattctagatgtagagtcacacagaaagacaataaaatagacgctgggacacagaagccagattcttgaaagaaaacaccccctcttagtgattccagcaatcatgacgaggaggttgaagaagt

SEQ ID NO: 40592 - DNA, 1085 bp, Cannabis sativa
ctgagattttcaacaactaattaatgaaagttgtgcaaaatgattagaagggtttatgcaagtatttttacgtggttgggacattaatcagtcttagtccacaagtcagtactatttaatatagtggtgtttctttacaaggaatattttatgctattttttccgatccccctcttcgaatgtggttgggagtatttatagccttatgaagagaaccaaaaggtctctattgtcgcaagagttcctttggcttgcacaagttcctagatttgaataatagggcatgcatgtctgcatagtaggttacataggtttttgctaggtgttaggtaacacaagcctttattcttccttgattaacgtgatagttcattatgtaggtatcactaatcccctcggttagagtgtaattgtcaaaagaatgggtttaatgcgtgtgacatgtcttttcagatccatctgcagacacttcctccatgccgcatttaatgctttcatatgattcatctccatagccctgagctcgatccaaaaggctttgcttagctctcggagaggaacaaaacgtctcttcctccagacccagctgtagctcctggagggacctctcaggcatgtccacttaatccaaataagtttacttaagtcatatcataaatacttcttgatcataagactcatttgccatgttgccgatcgtgaggttgccacgtatattaagacaaaagcagggaaacatttaccccctaagtcttattttacagctttgtaaaatgagacttaagacttgcctttggcctcggggagtgaagtaatcaatagtctgcacgtgcgtgggctatttattatttataattattctgcctcgtttttggcaagtaacgattcgattctcgcctgttcgatagagcccttcattaatgttattgtcagaggggtactcgagcatttcaactgtctttttctttttcaatcctctgtcaggctatcatgaccattggatcactacaatttggatagtttgaaccatggccgtcagatgacactcaattggcattgacattcatcctgaaaagcctataata

SEQ ID NO: 40593 - DNA, 3198 bp, Cannabis sativa
tggtaaaataatttctaacactagacttgcccatttggatcgtaaatagccactggcccatgatctcttccagacggctgggttggtgcatcaagttaaggacaaaaattgtgttggttagttcgcctaagacaatgaccttgcagtacttactagcctaccgtgtggcccacagtctgatcatgtggccttgaattggacaacctaccttcttgtgtctgaatgtaataggccatatgttcctctagttcgtattgctgtttggcttgttgataggtctgtctaattagagcagttgcctatctagatcgataatcaatcgctgcttgttaggctctcacaatctctgtttgtttatccatccactcttagaattggcatttttgttgctcgaatgctagattcacgattgctcgagtatcctcttgattatgatggagagtattagtgtgattttgcacctgtccaaaggcatccctcaggttttgtaattcattatcatcgccaatattcacttaggactcttcgatggatgggtctccgatacccagcccaatcgctccagcatagtgagtactggtggtcccgatttcctatgtgcctggagtgaatcctgtcaaagatgttgttattccccgtcctcctattggtggagctcatggaggcagactgggatttatcactagtggatctccttgattagtaagagtttgcacattaggatctatggtaattggattagttggacaagtggattgggtccttcttgtattaacaactatttttctaacgacttgtggagaatcaaatttacaggattgtgttcttttgcactgagtgaaagtactaaagtattgacctcgctttttgctaacgacgctgagtcaattaaagtgatgtgataataaataataaataatataaatgagcaaataagaatgcaaaatttataaaggttcaaccccgtgattatggtaatagacttctcctattttatttgtattacttcgaagaatcctcaagatcacaagaagttggccaagtgagtttcttaagaaatcttaataaaaaaagcttacaattgtttgacggtataaaatctctcaagaacataagatttcgtacccctgaataattagaatagctcctccatttataggggaaaatatatgaattaagtttactaaaacaaataggattaaattgagaaactaagctaatttcctattattcattatagtgcatgctaatttcatgaaaatagggatttatgtgggaaatatttatgggaaatatcctgaggaattgtgattcagccacatttaccctacgtggagtactcggctttactgtcacactggatgctgcccgggtgataacatttaccttgtctggatatttcaggctagtcatcaggctacaattcttggatataaattaccctaatcagtacattgaaggaaataccatctaaccaagtttgaggaggttctccacgtgtcaccttactggatgccacatcaccctgtgtagaatttgggataacaccttgaaaagacattccacttaaccaagtataagtaaaccacatcactagttaccacatctatgtaaatcctatgcacagataaatcacaaaactaaatagtatgaagcatataattacgattattttctactatggtgacaaaactataacagtgaataactatatgttcgagatttaacaaaatttatgtattaattatataattatgaaagtaatatttgaaccaaacaatatacaatagtgaaaaaaaatgatctatgctcttttattgatttactaaataagattacattaaaattgagttttatttaaggcattaaaaactgatccaatctaattatatttatatacattaaaaaaattatttatatataataaaaatatttgaaaaataatatatatatagtagctattcatttttttggtgttgaattcgtaacacttggttgttttgtatatttatttttatgtttctttattctatttattagttgacagtgttgttgttttagttatctcaaacttttagttgtattaaactcgtaagtatgatattttttttagagtattaaacttaaataaattgttatatttagtttttaggtatttttcttcatattttttaagttaatattaaagttaagtgtagttggttatcaaattaaaaaatcgatctaatccaattagtaattagattagattggatgacattttgaggtctagttggattgaattggattagggttgagcatcggtcggtttggtcagttttttctatataaaaatccaaaattcagtttttggtctggattggtacaattcgaaaaccgaccgactaatccagaacctatcttaaaaccgatcgttttgaacctcgatttggtcggtttaaaccgcccaaactgaacttttttttttaaaaaaaaaattcaatttattctataaatatattattctacattttacaactacaaacatacaaattaattgtttaaaaactaattatcttattcttttaattttagtattaataaaaaaaaatatatattatttttatatattattagtaactacaatacatgcaaaacaaaaacttaataaattaatatatatatatgtataacggtcggtttcggttttttcgatcggtttattacccaaaaaaaaaattgaccattcaatggcagttttaactgttagcggtttttttagtttttagtttcgtcgatttcggttccaacggtgttcgataggtcggtttgaacggtttttttggttttttagattttatgctcacccctaaattggatgttcaaatctaattattaattggattgaatcggtttaggaaaaaaaagttggactcactactacaaaatagagcttcagctacagattttttcaatcactaaaaaaaaaaagcattgctatagctaaaaggaaaaaaaaagtgtcttggaaccctttagaggcgagggggttaataggaaataaccgcctctaaaggggttgcaaacttataaatgggcttcaacccataagaaaaccctaagaacctttataaaaacctaacgaaaagcagaccgcctcaaccataaaaaaaaaccctaaaaaccctaaagaaacacgcattctctctctctctctct

SEQ ID NO: 40594 - DNA, 1116 bp, Cannabis sativa
gtttacaagtttcttttagaaaattatagaaaaactattttggacatatgtatcaacttctaatactccttgatacatatttctttcactctgatcaagtctcgtaatagttcaaacttggtctttggtagtgccttagtaaatatatctgctaattattcttcagtcttgtagtgcttgagctctatttctttgtttgcttctgcttatctaatgaaatgatacttgatgctatgtgctttattctactgtgaaatacgagattcgtcaccattgttattgctgattaatttgctgtcacaatagatctttatagcctcttcttgtaagtctcccatgtcttcaagtattcttttgagcaatatagcttggcttgaagtcattgctaccgcaatatcctctgcttctacaaataattgcgaaacagtagcttatttttttgatacccaagaaaataatcatgatccaagtgtgaaggaatatcctgacgtgttcttcatgtcgtctatggatcctacccagtcactatttgtgtagccaattagttttgactcattcgtgacttcgtacgacattctgaagagttttgctcctcgcaagtatctaaggatttgcttggctactccatagtgaacttgacttagatcatgcatgaatcttgataggagactaactgcatacattatgtctggtcttgtattagttagatagagtaagtttcttattagacttcaaaattttgattcatcagcttttggtgagccatcttcttttttgagagctttattgttgtttagtgaagttgatacagtcttgcatccttccattttaaacttcttcaatagtgtctctatatacttcttttgtgagataaagatcccatctattttttgagttatttcgatctggagaaagtagtgtattaatcccagatcggtcatctcaaaacttttcatcatgtcttttttaaacttctttatcatcttcttattatttctcgtacagatgagatcatcaacatataaagtgacaattagtttatcattcacaccttgtgtttttatgtatagtgttggctcatgtttgctccttctgaatcattgttcaatgaagtag

SEQ ID NO: 40595 - DNA, 1282 bp, Cannabis sativa
taataatattcaattgacatatcaaatttataaagtaaaataaatttaaaagaagttttgcgaccaaaaataaaataaaaagatttaacgtataaaaattaaaacataaaaaatttcaaaatcaattactctagttggtaatataaacgtagggtatatgggttaattttgttacatagatttaatcgaattggcatgacacaatatgaaatatatagtcttaagtatgatacgacacgacacgatacgacaagtacaaaaatatgacatataaacacaaatagattagctcgaaagtacaacacattaaaaatgctaataatttgataatattaacaataaataatatttattttttaattaattgatactaatattcaaattataataatatttattatttttatataattgtgtgtaattattgttgaagaaagatataaaaataattaaattataaaatatacatacaatatattttagcaattaacatatcaactgtaataaaaatacaaaaatttggattacaaatttgacccgtataagaaaatgagctgtttatttaaaaaaaaaaaaaaaataaaggattgatccgaataaagcatgaaaatccaagcacaatatgaaactcatagggttgcaagtttattgggtctatcctataagattattggtaagatacgagatgactcatagttttttataacacaacacgacagaattcatatttttttttttttatgacagcacaatacaatgcatattttctttatggtccagcatagtacaatctatattttaaaaattccaaataataagagtcgggccagcacgatacataattatagctctagttgaaaatacatattgataccgagagagaagataaaacttggttttttatattcaaagagagacaaacgtaatgccattattttattttattcaaataataacttaattataatattaaatataataataataataataatattgtgcctaaggttgtattttttttttttttgtcatatcgtgcctaaacacataattggatcgtgcttgtacttctcaagctcgtacatatcaaaaaactcaacccatatttatagtattattttcaaccatatttgggttacaattttttaattggcgtatatagatatgtaataaaatctctactactaccaaattaatatttcgtgaattaaattgctagagactagcagtgattttgtttgagtttgtgtttaatacttaagaatatgaatattaaaataaa

SEQ ID NO: 40596 - DNA, 1546 bp, Cannabis sativa
ttctttatcaacactttaaaaaaattgtgttgggaaaatgctataaaatttattgggaaattctttaatagacccccctataatagacacatcaatacttcccctataatccaatttaaatggtgatggtagaaaacttcttaaaaaatattattagcactagtgtattgaatcaaaatttagtttgatttggtcaaagtgggtgtactcatgcatactttaaattactatttaattggtccacctagataaatacaaaagagaaaaaaaaattaattcattttagagaaaaaaaaactaagaatagaaatcatttttctttctaagaaaaaagaaactgaagggaatttttttgctatgaagaaactgaagggaattgatggcattaatcccgtacaaaacagttttttttttcttttctttttcttcaggttcttcttcattttgttattttatagtgaccttaatattggagaactcatacaaaaataaataaataaataatgaaatttgtttctcttggtgtagcttaattatttataatatatattaattgattatggaagttttgtaaatccaaatccacatgaatgcaaaaaatatcaaaacaacattatgcttacgaatcagataaaaagagaaacttgcatataagagataacaaataaaagcctctagatgaaagagttcgaatcaaatcactcaatctcctctctgactttgttaaccctatttaaatttatttttttttaagtaaaataagattaaagattcaatgtgatgaggcacacaaaatatagtagacatacatattacaaccaattaccctttaatatttagggtgtctaccgataggcccaattttagggtgtctattgtagaattacccaaatttatttaggcatacttataaaataagtgttgctacatatcatcatcaaattataaattattaattttaataataattatactttcatacgataacactttaaaaataactgttgttattttatattgcaataaaaaagataacactttcttaaaaagtgtttctaattagcaatatttttttaagaaaattaattgtttcaaataagttatcttattattttattcgcacgtaatttttttttttttttaaatataactgttttattaagtgctcctacccactacaccgatttttttctactgcaacactcatcttttactcctactcatactcatttcttcttcctctcttaatgcagagagatgcaagtttctatgaaatttttaccctcaccaaggtactaactccatttttttttttgaagaaaagcgtggaatatattagcataaaatcagttagacctgtcggtcattacagaaaagattttcgggcaaggaggttggagccaacgttctaaacctctgatgggaaaaagcccacttggtcacattatgggccgcaaaattacaaagtctactaacatgttcaaaactgcaaacgataaaagagggagagattctgttacaaaaagagacatagttctcaagctcc

SEQ ID NO: 40597 - DNA, 2826 bp, Cannabis sativa
  modified_base (64)..(79): a, c, t, g, unknown or other
tatgtgtttaatttatcgttttagtaagttcatatttaaggtgtttaaacaacatacttgtgannnnnnnnnnnnnnnnggtaaaatatattccaacacttatatacatctaagcccaaatacaaacatatagactcacacttgaaaactaatttggatgggccctatcatgtttctaggtttatcatagatgaaagaaattacaaaatttacctattacaaattatttatttgatctattgacaattagactatgtttgaaatcagatcattggatctgtcaataagttaatcatagtaatttagataaaataaatactagatttgtcaaaaagttttgaattaaacaataaaataaaacgaacacaacatgtaacaatatgtgaacatgagatatttataaattatataattaaattatcatttaaataaccaactaatttgaaaatttaaaatatcttttcaaaatttaaaattgaaacttcttttaaaaatatctaggttttatttgaactattttatcaaattaaattaaatatctaataagataaatgatatgaaaataaccaactagatatttttcatatcattttctgatcttataatttaataaaattaaaataataaaacaaacaaattttaaaatagacatggttagagaattattcttttaagaataaaataataaataaataataattttcaaaatcatatgtcaaaatatctcatattaagcttttttttcaaatttctacaacaatatctaggttatttaaatatttaaaattttatttataaatttctgataagtaaaatgatataatattatcatcaatattatttttctaacttataatttataaataataaaatatttcacaaaataaccaatttatgaatttgaaaatattatggttaggaaatctataaaaatatataggttaatttcaaatttattattatttaatttatcatataagataattttaatataatattttaaattaaaatgataatgctatcatttaatttagaatatatccaatattaaaatatctaatcctattattaaataatttgtaaatataaataaattaacaaatttttaaaatctaattgttgacctcaaaaagtgatcaaccgacagcggggtcgtacagatctgatgcttaccacgtgtgtgcacaaataagaatgaaaagaaatagacaacacgatttgttatagaggttcgacccccttgtgatatcgggtaatgacctactctccttttatttttattataccgagggaattactatccagatcactataggtgggatctgctataatacccttaggattagaaggtatgaatcaatgcttggcataactcaagtgtttgacagcactagcgttggcgtgtgagagagagaatttatcaaacacttagagtttcgaagcaggtttctagcttaaaggaaacttatgttttcagtcagaggttaaggcctttatataggaggcctaaaaccctaggtttacaattcaaatcccttagcattcgtatagtttgttagatatttgtaaaagaccaaagtgctcctaattttagatattattcagctattcaactgggcttttggggccaaattcgtcgcccatcattgttgtccacatgtataagtgtccatcaaggcctgtagtgcactccttggttggcctggtccctgtggtagctaggctggcagaccatggtgttgtcccaaggctagctagccatagggcagcccagggatggccgaccagctcttgagagagagctagtctgtcacttgatccccgtttgagtgttggggtatgtgtttgagctagtgagttgtactgccacgtagcactagctctgtccacataagcatgccatgtcatgaggacaaaaattgggataacatttgccccccaagtccctgtgcgaatgtacgtacagatagggactttacctactatattgatgttgtcgggactgttgttacctttgctgaataaattttgatgcacttgttgaagtactatctcttgactatctaatctcattgcaatagagaaacaacttctttagttgcatttatgatgtgttggtgaggtaagtaagaaaaaggagcccacatgtactacataagtgaatttcggggggaaatccttttttcactttcattgttcacttttactttctctcactacaaattttctctacaaaaagcttttccttctctctaggtggccgaacccacaagcattattctcctcaagatttttgcactatttcaacaatccaagcttcccacattcatcttcattgaaaatcttattgtgggtaagatttctatcatgcagatcaaaataacgaatggactacaatctaacgtaagaatcaaggcatgttcaaaacaagaaataatgttcatgcattcatggctttgtttgaagcctcaccgaccataggtggccttaatggggtctggccggccatggggacaatgtcgctcggctggctagcctatgcctggaactagggctgtacaaaaatatttgtaaactgcccaaaccgaaccgaaaaaaccgataaaaattacaaactgaaataacccaaaaaaattacaaaccgcccaatctgttaattaggcgggttgaaaataggaccaacccgcctaattaacccgaccaacccgattttgtacctttaatttttttttcaactttttagtttttattatatataacataaatgattaaatataaaataatataaagttatatacttaagtattagttttaaagtcatatata

SEQ ID NO: 40598 - DNA, 2325 bp, Cannabis sativa
  modified_base (631)..(643): a, c, t, g, unknown or other
  modified_base (1285)..(1295): a, c, t, g, unknown or other
aaaaaaaaaaaatatatagttctcatatcttaaaatgttcgattacactagcatttttttaggcttgataatgatgtgaccaaaaattattttaaagttagattagagagagaaaaaagagagaggcaaggggtcatgtgagttattaaaaatgaaggagaagaaaagaaaaactttattaaaactgaaacaaaggaaaacgttactaaaagttaaggaaaaaggtaaattagatgagaatgttatttttgaaagttagatgtaaattaagataccaaatgtaaaaagtccttaaatatttctgacaccgtgggagtcttctctcggccgaatcaacaatctttctaagccaacttcagtcagtcttcattgtctttcattcggcccattccaatccacctcctaattccttactaagcccaactcacgcttcagtccaagattatctaatgattttagggattatttcacaaatacacaaaaacaataaaaaattataaaaatacgattttacagaatttaatatttttacggtttcttttttattttatttatagaaaatacggttttttatattgtactcttattaatttgttgttgattttttgttattgtatgttattttttgttnnnnnnnnnnnnntatttagatgttattttcatgtaaactttttattgttttcttgttgtttccatgaaaaatcgtaaaaatatataaaaaaaaattctttagacataaaaatgtaattttattacaaaaaaaaataatgcctcatgtaattaataattatcccataattttaagttcacttgtgcagttatacacaaaaaaattggcattaaggactatggagcattggattaaaccgtctatgggtgagttgaaggttaattatggtgctgctcttttttcaagggagaagagtcatgacttggggtggattgctagaaatcatgctggcttgtgctttgctgctgctgccgtcaaacttcagggagatgtcgaccccattgttgctgaagcaatgtcgatgaaggaggcactgttgaagagttttgtcctacagcggtggttatggagtcagactgtcttttgttggttaatgctattaatagcaaaagctaagttctttctcctcttggtcttattatttcggattgtattaatcttatatggtccatttctatttttcatgtttcagttcagtttgttaaacgatctgagaaccaagcagctaattggttggctcgttcttctgattcttgtcctgatcgtatttccagnnnnnnnnnnntcccttctggtttggaagctattttattagcttatttgctttaatgaaagttgcaatctttgtttccaaaaaaaaaaaaaatagagttcagtacatacttatgatatatcattattattttaatttattactagatgttagatattttaattcagaataaaatatattaaacttgctattaaacaattggatcaatcaagataagatactgtcaaattaacactacgaatgctatatatagtaatataccaatgctccctatgcaaatgtactagagttatatttctttagcataaaaaaatagtaattaagtaaattatatttactatttacattttgttatataacagaagtttttaaaacataatgtcaactatctatgctagtttttttaaaattacaaattaaatataggtatttttggagttaagaagttaagagcattactactagatattgtcaaacactaatataaggtgatattaattttatgatagtggcatgtttatagtaatggtgttagatatcattaaaatttatttttttaataagcgattctaataaattaaagacagaatggtaaagcgattctgtccccttgttccctttatttcttaatactggaaaatgaaagtgaacaatgatattccaagtacattatcaattggatcacaattatttaatattattgtagtacaagcttctctcactacagtgaatatgttatggtactaatggaggaggaaccttttcaaccaataagcagaatatttgagatatctttttaaattatccttgaaatcaatgtaagttatgccaaaacggactgtatagccagcatcccattcaaagtcatcccaaaatgtccaaacgtagtatccctttactttaaccccttccctgaaacaacagtaataattaatatatattaacttaatcaatctagaaaactaaacaataataaataaatgataaatccctcttctcttcttcttcttcttcttttattttttggtactaaattatttta

SEQ ID NO: 40599 - DNA, 1415 bp, Cannabis sativa
  modified_base (30)..(30): a, c, t, g, unknown or other
tgtttaatttcattattttagaattcatantaggatgttaatcaaacatacttggtagtaattctagatcctggtaaaataaatttcaacaataccttcccaagaacccgaggtgcagcaccacttctattccgagcagattgcaggcgaaggttacgagcattttatttgggaactcaggaaggggtggagacgatacttgctgtccaactggacatatattgtctagcctgacgtagttgataccatccctgtgggccatccaagttctggtgcctttggcattcccattccaacttctgccgtaactgttgcacgacataccaaccaaccaccatccagagataggatgatggctcgcacaaaaaagaaaaaaaaatatgcggaagattgctggaaccgatcctcacatggctctacatgccacaatgtcaagcactgaatatgcccggcctgctgccaaggagaaggatgatgagggggacgttgaagtccaagaaatagtggattagggcgaagttcatcctgatagtccctctgaggccgaggaggaaggagctgctctgccattgcgcttcggaggttacaacaaggtatgggaaccggtgtcggaggctggtgacgtcctagaagaaggtgaggattacgtcaccgaggagtacaccgaggcagttcctcaaagaaggcaaggtgcctctagagcttggtgggtgtctcctccgtccataataacccaggctcagttgaggagtttggagaaggatggatacctgggcggtgtcgaatgcttcttcccttctccaaatcacccgggcaactaatccaagatagggatactatgcctggccgggtgcacataccaagcagggtgcaatgctacccttgcatccgtacttcaaaaggattgcagactattaccacctctacccgactcagttcacaccaaagggcatcaagtacttatccacgctattcatcctctatgcctctcaaggatggggtgagccatccccgcacgacaccaattggctcttcgatctgaagtcaacccccaagtagaacaggtcggggtacttctacttctcccaactggatgataaatggttgaagagtactgtagacccaaaagtcagcaaaatagggcattttatggatgagtactacttcgtgacgagtatggagaccgtccatactcggttctagcagattcctttgtacttccgccctcctttcacattgggactcagggagagggcacaaaaaattctccaactgtcagaggatgctcggaatatcactttgttgaccactgaggccaactttgtgaagtacaagctctacccagaggattttgcgccaaagcccgtgaaggagaagaagaagaagaagaagttgttaggttatatttagcctat

SEQ ID NO: 40600 - DNA, 3022 bp, Cannabis sativa
ttgaatgtcttgccgaggctttcgagtcgaaaaatttggtgttccttcccccgattgcagccaatcaacacgtgcatgttgttgccaatatttctcttcattagcaagtaattcatctaagatggattcggcttttggtactgggttagcatgtgttggagatggagttggaatgttagaaagggctgcaacatcagcttgagcagagcatatcttctgtttgagttggccaaatttatgacgatgccatgatcttaaattatcagcacaagaggagagatttttgtttaaaacatcaatgggactgccatgtgaattttgccaacaatctgaaataatatttgagcagtcagcttctttgatccacattttctaaaatctgaaccgagaacgatattggacagcattatttgtagacagcaggttgattttgctgagtatagctctatggttagaaccatagtaatcaagatgagtgacgtgaggtaaattgaagctatcattccatactctattaataaagcacaagtcaagacgttcttgtaaagcttaaggatttcgtatatttttcgtccaagtgaaaggtgaacccgagaaaggtaactcaagcaaagagcagagatcaagtgtggtacaaaaatccatcatttgattgttagatcgtaaggggcccgagtttttgtgagaatgagagaagatctcattaaagtcacccacaattaaccaaggatccaaaggcgaggcatcggcaagtctttccaaaagaatccaagtatgttttttgttgatagcctcgggaaaaccatatatagcagaaaagtgccatcttggtccatcattataagagatgtagcaatcaaagtagttggaattcattgataaaagagataaatttacatcatcatgccataataacattaagccacccttaagtcctgaaagaggaacttcaaggccattattaaactttaagcattgcttaaaatgggaaatacaaccaaaaaataactttgtttccataagaaacaaaaggtggggagtttgctcacgaataagtgaacacaagcgacataatgcacttggattccccaaatcccgtgcattccaactgacgatattcatgatgaaaagcgggattgctgagcaatcaccgctgaaacatcctttaaatcagcagaatcttcattaaagtcagaaacttgttggtttgtgatcacttcaactaaggaaagagaaggactatgggcacttggggcacgacatctcttaaggattttccttagagaaaggttatcaaattgtctcttaaaagatttgttgggatgacaattctcctaatcttccaattcatccatatcagcagtgagtgtaattggttgagatgaaataacagtagacacaatggatttcccagccgattttgaagaaaggtccatattaactaaatggccctgtggtaagttggggatggtaggacatgggggatatgtggcatagtttgagacattgtgaagctaccaatatttggggtgaaaacatccttcagatgggccacattattgttgtgttgagccgaattgttaccctgggagagatttgtacaagcagcagtaatggcagtaggccactgacttattccaacagagtgaatggatgatggagttgtagtagtaggtaatgttggaggatggttacttggatgtttgtttgatgattccccctgaagtaactgtctcggatgagatggtggcctagtgtttaattgagggattgtggcagtcaaagaggatcgggccaacttagtcaagaggggccaagcattacctttagagaagtcggtcctgtaccaatcataactagaagtaggcaaaggtgcacctttaaggcttggtctatatgctaattcggactcaatgccattgtccatattttcaagatgaataagacatttgttaaaaacatgaccaatccaaccacattccatacaataatccggaaatcgttcataacaaaactccacccaaaattcatctttaattattggaagagttatcatttttcctcagagtagtggtttggtgatatccatacgaacccgaaaacgaaggaaaggaccccaaccctcaaagcaagagtcttgaaagacttcaagaagctctccaatgagatttcctaaggctttggcaagggattgagattcgctaaggaatgggagacggtaagcctgaacccaaaagggagtgaatatcatttgatgtgaagtaacagtgttaagggctgatggtgaaaacagaacaatgtggtgaccttggaagtgccatggttctttgtctaacacccttatcttgtcgcctatgcagccaaaagtaataagaatcaaatctgagtggtgttctgatattacagccttataagttccatcacaatgttgagccatttgtgtttgcaaagttgacaaccagactttcttgggagaaagtattcgaacaactaaaaccaagtcaagcctctcattggaatctggtgtaccatcatcaataatggctaccactgatcgctcatcatcggtcaaggagattgttgatttcattctcttaatgaaaggatccatgattgaagaactgaggggcgaaatgcaataggaaacttaaagtaactcgagaaaactagaaaaagtaggaaaatgggagaaaaatgatcataagaatttgaagtaattgtaaaaaaactaaataactgccgcagagcacaaatgtgggcaaacctccccccctttttttttaattctttcttttatactgccatacgattatttttacatttatattgcacaatatatgtactgtatattatgtaccatataaatttgtataatagagttttatgccatttgtcacctaaaagtgtattttactatatttttgtttaaaaaattaataaatattaatttgaagtggatttttatgtctgtggcagtttttattcatttttaattatcaaacaaattaaaaaaatagtaata

SEQ ID NO: 40601 - DNA, 3839 bp, Cannabis sativa
caacaaaagggaagtctaaaataatggtcatgataataaataatttagccatccattataactgaatcaacagttaagagggtcagtgctgcatctgccaaagataatgcattatccgagtacaggaacagaacaaattttgatgaggggagtttatatatttaaggggatattgaaaaaaaatatatccggatttacttctcatgtttttttccttcaacatatcatcaacaaaacaaaaggagacaaaaaatatagagggcacctccagccctcctgcaaccatggaccgttcatttgtgataaagtggccatccaaatatgaggtggcaaacaaaaaccataagcattgataaaaatgctcatgaagcagttgtaaaaagatgcactcacataaaatagataagcaaacttaagctgccaacatttgctatactcgagaagtaaacgataaagggcaagtatccaatgcattttagaatctatagagaatctaattcatgatatgcagattcaatccagtaggccaaaatatggaaaaaaaattaaaataaaataaaaagtacaatgaaagtaacccaggttcgttggggaactaggaaaccaccgaagagctaaaagtgcaccacaatacccccccaaattctcctctacatttttctcaaccccacgtcacatttatataacattctaaccaccaaaatactcatgctaacaaaccaacccatgacaattgccctaacaacacaattctaacgtgatttccctccccaaagtgaccttctcaatgtgtaggaaatgggcaacttcaagtttcataatcctgtaatggacaaaatagcatgaaagtcccccgtaggcaaagatgctcagcctagctcaaagatttttttctttattttttcttgactaaaagaaattaaggttcaattcaaaacatattccatgccctcaaaactcttccaatctcaaaaaaatgaggcatcatgcacaattgacctgagcaggacactaaggatgtgattggttatgagtaaataaacaaaccaataggaattgaattaaaattaatgagtaaaacttttaatagaattttattaaatctgttctatttgtgcattggaatggcttttcttccaacatcaaagaaatgaggcatcaacacatgcacacttgacctgagcaggatactaaggatgtgttggttccgcgtaaataaaacaaaccaatagaaatggaattaaatttaacgagtacaacagttaataaaattttattaaatctgctttatttgtgcattgtaatggcttttcctcactttagatttttcaaatttaaatttttaggacatattagaatatgtgctaccttcatgggttagatctatgaaaggaactacaatgttccttttcaaagcttttgagttattgggactagaggctacttattaaagttgatgtgctgcattgtcctcatttcttgcacccatctctctcatgaggaaaactaaacctaattcccttgatgaaatggaagagaatttaaaagaaaacctgaaaccccaaataagaaaatccaaaaacaaaagttggcgatcccatggatgctggttgagatgaagaaaatgcaacttccccctatttggcacatcaacccaattaaattttacaacaagaaaaagaataaaacaaataatgccaacaaaattattaagtctttagaaactattagaaacccctctccttgaaactaacatttaagaaaaataataaatacctcttcattctgggtttctatcaatgggaagtcaatggatgaattccaatcattagtaactgtagctgaatcatccctcttgcatgacacagcctatataaccccagaagaaacctttcaggaactaaatatcataagagaagatctcccagattcactatgtttactctaaattgaaagcatggaccaaaattgttcaagattatgcttcaagtacattacttgttactaaaaatcttctcgttttttcactttcctttggacttttacttttttctttcttttttccatttttttatagctaattggtactcctagaatctgcaagttttatgagtgaaacccttaaagagtaatggttaacaaaaaagagattccaactgaagaaactgccaccaccacatctacgtttaaaaggacaggggccaatagaaaactaacaacagctcattccctagcatataaacttcttctagtgctggaaagtgataagcccacacagcattttgtatataataataggagatcacgaaaataggggcttacttttattctggtttttatagattcttttccttctttttaatttagtggctgaatagtattttaagctgttaaatctttgtcaaagaaacatccgtttcaactttcaagtaatgttcaaggagagggattacataataatagcttttagttatcaaaacacaccatttccttatttcctagtccaacatccaaaccaaacgatactatatcttatacaagaaccacaaatatcaagccatgctcaaaaatctatgaaacataaatgttaatgttcaaggaaggaaagaccggtatgcaaaacagaaccaacttttcctaaacaatgccaacgacatagcaacagaggaaacaagaaacatgaaatataaggcagatccacccaggtagttttaactcatattactcttgcaatacaaatttagaaacacataatggaagcttgcgtaaaagccactaacctgaaagccaccgccgaaaattctaaaacgagaaagcaatcctagatcccaccaaggcattgtaccagctacgagaaagcaatccttgtggaggtggattaacaacaacaataataacgaagatgtgactattcccaatgtccaatttctcaaccgcacaaagcgtaaaccgatgaaacgcgtgcaggtcccagctgcagagttggtatggggtgtggcgctcttgggattcagattcagctaggttggtggactcaactacgtcggctggccctggaaccagttgaagctcgtcttgggcgtcggaactggattcgggtacagtcaaggaattgggtatggatactcttttgaatccctagagttttacagtaaattataactttactgcatattttggcaaatgataaagcgtttagtttccaaagcctacttgaagaaaaagatccttttttatccattttgatgcctactttgttaagctcaataattcaccatagaaaatattttaagtgtgttctagaacatgttaaaaaacaaaatattactacagagcattagatcagtgtgaagtttctaacacgattaaagattaatggttccatgtacgaaagaccatttccaccatcaacagcatctttggtctacaaatcacatttttctctttaaaaactaaattaaaaatgtgggcctttctccatatctcattttacagttaataatcactcagttccaaaacggaaaacatgaagaaaagcacataaagtgaaagagaattattaatattattttaaaatgtactgatatactgtaaaataaaaaagttctacacctccaattttctcagaaggcaaaacaattaaagaatacttaccaatttcaacttcgggcttgctttaagactctaacttttcaaactacaaagccaaagagataagttttaggttcacaaccagtaaatcctccagcaccaatacgattataaagatttattttgtaattaggatcaagtaataaagaaggcttcaagcttctagcagtagagagcaatggaaaatt

SEQ ID NO: 40602 - DNA, 3423 bp, Cannabis sativa
accatttatagcaaatttcctaaaaaaatgtttttatttagatttgttattggaaatttttgatgttggttgtaaatgccaaacaaatatgtttttgtaaatcagtaatagattttggattttgttttctaagtaggattttttttttttttttttgaaagtgttgtaacttctatgtaggagtttaatatgaagaaactaggtttaacagctttaacaaatttactatatttgagtttgaatattaatttacaaaaatacatatacactattttatttttattgtaatttatttatcaattgatctaagtagttattagttatatatattgtattaggtccgccacaatatactgattcaaacttcattttaacattattatttatttatttgagtgttttagttctctttgaatcatcttaggtgttgttggggaaatacacaagagcttcagggcaggaggtgaatttcaataagtctgaactttgttttgggagccgagtgggtgctgaagaaaaggtggcaatgggtacatatatgggaatgaaggttgtggctaatcatgggaaataccttgggttgccttctcttttggggcgtaataagaagcaattgtttgatgtaattaagaacagagtgtggaataagctacggggatggaaggcttccatgttttccatggcggggaaagaggtgttgataaaggcgataattcaagcaattctgacatacactatgagttgttttcggctcaccaagagtaccattaatagcatacacagaatggttgctagattttggtggggatcaactgaacaagataaggagacacattggtgtaagtggaaatatctgtgtaaacctaaggatgaaggaggattggggtttagggatttagagatgtttaatcaagccttacttgctaagcaaatttggaggtgcatccggcagcccacatcattgtgtagtagggtgttgaaggcgagttacttccctagcaagggagttttagaggctaagcgtggggcgcatgctttttttgtctggagaagtttggtgtgcgggaaggagattattctcagtggatatcggtggaggattggtaatgggagttcggttcgaatagtagaagacccatggctgccccgacctcggcgtttcaaggtatatgacaggcctagtattccttcgcaactacgggtgattgatttgaaattgttgaatggtgattgggatgaggatttcattcgtgctatttttaatccggatgatgcgaatctaatcctacaactactggttgctagttcccatatggaagacaaggttttgtggcactatagtaacaatggggagtattcggtcaggagtgggtatcgaatggtgcttgaattgaagaaagaggtaggacaagcggatgacagtcacataaaagactggtggaagttgatttggaagctgaagatccccccaaaagttaagcattttgtatggaaattggctcattcatggctacctacaaatgcaacgtttgcttcgcgaggaatgaatattgactatggatgtcagcggtgtcattcgggggtgaaggaaactatctatcatgctatctggggttgcaaagcaaacaaaggggtatggcaactcagcgagtttaagaacaagttacagcgtgttgggcatgaagatgtgatgacttttcttattaggcttgctaaggtatggactaaggctgactatgaattgtttcttattgtgtgttggcaacaatagtatactagaaacaatacgaagcatggtggaagaatacctaggccagccgaggtggtggactggtgtgctaggttcttgtctaagtttcaaggccaacatcagcaggagagtagtaaaaggcagcgaataagtgcgaggtggtgtcctcctgttcagggattgatgaagataaatgttgacggggggccaggccgagtggaggtgggtcaagcacgggttgtgtgaaccgtgactctgcggggggttttgcatgctgctactgctacttctttgcagcagcaggcccctccattacatgctgaactggtcgcaattaaggaaggtcttcgactgggaatacaaaggaaatacaggcaatttagtgttgaatcggattgtcttcatgccatccaattaatccaaaaaaaatgaggatgggtgtagggatattgatggaatattagattgtattagagctttaatgttaaatgatgcggttatgggtgttttctttgtatatagggaagcgaatagtatcgctcatggtttagccaattatgctttgttgaacaaagctagtgctatgtggattgaggttaatcctccttgtgtaagtctcgctattgagcgtgacatgcctaatcctatgtaattgcttgtttggaattcaaaaaaaaaatgcaatgcaacttaaaaataaaaactcacaaaataatgttaaatttataaaaataataaaaaccaacatctatttaaaagaaaaaagaaaaaagaaaaatccttgcaaaatataagcagagatgctcttttattgttgggctacaacccacacagcaaggtctaaaattaggcccagtccagtcaatatatggacctattagtatgggataagttgataaatatctcttttttgtattcattaatcaaaaatactctcatattatttttttattaaaatatacccactttttttgagtagattgcctaatatactctcactatctactgaagtctagcatataatttacataacctaaggggtctaatggggacatcatctataaaagtgggtatatttaaaaaaatataaaaatagaggtaaaaattaaaacaaataaagtaaagtgggtataaaatataatttcctctattagtattgtggactgggaaatggagtgtactggtcaaacctttattttttttctttcttgtttgctgaatagagaataatattaagaaaaatactatacatcgtgaacaattattatcataacaatattaagtcaatatcaatattttacctaaaattgtttccaaatatgaacattttgtccaagatatatattaagtatatataaaatacttatatgaattagcttggtttgaactgctactgatatttctaagagcttgactaaactagagaattttaaatggttcggattgaccaaattattaacaccgaattcatttggccatgtattaaatggtttggtccggattattagttagaatttgaaaccacgaattgcaagttatgtgaacacctctacgttttaatagaaaatttatatgtaacatttttaaataataatatgttaatgatatgttatgaaataatgatatgttaatattatgaaataatgatatgttaatataaaaaactcataatt

SEQ ID NO: 40603 - DNA, 1900 bp, Cannabis sativa
gggaatgagagattcagggagagggtgtcttgtagcaagatatgcttttggtttagtaatgccactttgagatctggttttcatttggtgagtacggcctactgaaggagttggtatgacatttgctttatccaatggaatagtggtaggagtaggagcaatgggaactgaggatgggacactaggatttaatggtaaagcatcagaggagggtggcaagggaatagacaagtcacgggtttcatggtttgtagagtgtattacaaggtggtacagggataggcatggacatgtcattgtttggagataaagtggatgaaggagtcgttgggatagggacatgtgatgagtcatttctaggtagggatggtgtctcgggtaaagggtgggaattgattaaagatgaggacacattgtggtcaaaagtagtaggtatattagtgtttgaagataaaggtgtagtattaaatgtagtaaaaggaaaagaggttgagtgagaggattggacctgatggtcaataggagaaccttttgcaggataaagttgttcattaaaaacaacatttcgtgcaatgtagacacgcccttcattattttcacaaatgtatcctttatggtgattggagtatcccaagaatagacattgctgggacctataatccatcttatggtgattgtaaggtcgtagatgaggatagcatgcacatccaaatgattttagaatattgtaatctagtttggtatgaaatagagttccatagggtgatagataatgtaagactctagtaggtaacctgtttatagagaacacagcagcactaaaagcataccaccaataagatagatccaaaccagattgtgcaagccaggttagcccagtttcagtgatatgtctatgttttctctctgccctcccattttgctcatgagttcttggacaagggtgttgaaaatgaatgccctgatcttctaagaactttttaaatgttctgtactctcctccccagtctgcttggacagacttgattggtagattaaactgcttttcaaccagtcctttccacttgataaacatattaaaggcttgagatttctgagttaatgggaatatccatgtgtacctactataatcatcaagaaagtagacatagtatttgtatccttgtttggcatcaacatgggatggaccccataaatcagtatgaattaaggctaaaagttggttagctcttgtgtcagaagtggaaaagggaagtgtatggcttttacccaactaacacgcatggcaaaaggtgagatctttgatggaaccagtgtgggaaagagaggataaaagttttatgagagtgtttatggctggatgaccaagtttgcaatgccatgaatttacatctttagtggtaaaagaatgatacaccacaggagagtaagcagcagaagtagatgttttattcattaaagtattagtacaatcggttgcttcaggagcatcatgaatattattcatgttgttacagacacattcattttcagaaaagggactagacacaagattgcattgtagtgtagctaaagtggatgatgcagagtcatctcccaactgatatagcccatctttaaccttccctttgatcagcacttgtccagtttccttgtccttgacaaaacaccaatgtttatgaaattcaagaaacacattgttatcttctattagtttagaaacactaactagattctttttaatggaaggaatttgaaggacataatttagtttgagggagtaattatttaaagaaggtaaaatagatgagccaacatgagagatacagattttcttaccatcagctacagcaagtgtttcgggtccattgtaggcagtagatgtgtctagagtctcaag

SEQ ID NO: 40604 - DNA, 1838 bp, Cannabis sativa
ataagtgagtgacttagtttacttgtattccagcaatagcatgagcaccaatatactgagcaaacttaagaactgctctttgaccataaggccttgcaaactagacaattatgttcttcaagttatcacgcatagttattataatgtaggttatatgctaagtgttccaataaccaattcgtgccgtcgatacttctctacatacagcaaggtagatgcctcattatgcgttgtttatagctccctcgatattatgtattctgaggcaagatggtttctcgtcaatacatgaattgatagtttatatatccatatctcgcttaagactatacagccaacgagttatgaacatactctatttattctatatttaatgagttattccatttttcatttaatgacataattatcattaaatctgttggttcatatcccatgagattggcacgtatcacattctgaagtacaaccgaatttcgagtataacaattgccccttaaaaagtcattttcattgaaaatgctttttaaatgattgctgagggtatatttattataatccattttgaaaaaagggatgctctttaatttggcagtttatgttttcaaagcacatcataacattaatgagccatcttttccacttctccctcgatttctatctgttggatcttttgtttcttaatctaacggagatcaaacccaatggtataaaactgaaaaaagaacatcctttccatcacttttgccatttcaaaaattcttgagcttttctgcaaaaaaattcatccgaattttttcgaagcttttgcatgccctcactgtcactgacattcttcttgcacatatacttggatttgatgttcgatttcaagagttcaaaaagatcatcacgtcgttcactccgtcttcagttgcagaattttttatcatacaactactggacttaaaatggtaagtgacctattcttctctattctttctttcacattcctgggttttgatcactatttttatagtttgcatttatgccattccatttggttttagcgattttggtttaaatttttatgggtaatttttagggtttaggcagagtacaaagttttaggtttatcatatttttaaacttctggtttgataaatttcatccagaaattgggattgctcttttttgtaaaaatatcccaatctagttcagaagtttattctccagaatccttagaaacagagtatcctagtgaacttgccatcccgtacaaacccagaatttcaaaaccccaataaaaattagaaataaatgatgcaaaaattacagaccatttaataaaaatcaaccaggaagatattgctagtcgttataggtgtttcctacaaaaaataacagagggcaaacgtcatttcttgcgagatgatgcctggcctcaacccccaaatttatcatctattcctttggctaagcccctatttttacctagagtcacaattgctttttcaccaggtgacctggactttgaaataatgtcttccaagcctcgtaagtcaaagactccccaagatccaaatgtcaccttcgaggctgaactcattgattcaaggataagagccataggggacaatgtttgtgatattttaaggacttgtggcattaattagaaataaaaatgtcgtgttagatctatcgctcctagtgaatttagttgatatccaccagtatgaattattcgcgaggcaagcgagggagccagtggtgaaaccagtggcaaagcaagtactagtggctcggctaggataggtgcttggagcctcaagcacatcaggactggagcaattatcccc

SEQ ID NO: 40605 - DNA, 1095 bp, Cannabis sativa
tgataggcattcccagagttggagagaaaaaaaattgagcagccactgtagtgttaggagaaaaagacatcatcgattttttgttattgagaagcctgatgccttgtgataaatgtcaagtgtcaatttaatggtcaaagctgaactatctgtagcccgataaaaaagtaaaatgtcatcagcaaaaagaagatgggaaactgatggagagtgtcgtgttagacggagccccttcagtcccactagcaatacaagagaagctacttttgccggcgcataagctcgcgcggcagaagtacgtgtaagtcgccgacaaacctttgccagcgcttagttaggcatgtgaatgagctcgtttcaattgttcttggacctcgagaagtatatgtgtcgtttttccaaaaacacggataacgtccatggagtaaaaaaattgagggagaaagagagattgaaaactataaaaaaaaaaaaaaaatgagaatggtgagtggtgatagtagatcttttgataaaatttgtggtgatggtcatctatgagagatggtaatggatagaaagaaaagggagtgatttgtgagaagggtaattttagcaaaaatggaaagaatagcatatttttaaaatagtgatattattaatgaaatattttttatatgaagtgtcacatgaaacataaaaaatcagtaattaatattaaaaaggattagtacaagtttaaaaatggtgatattggactacatgatgtcatatttttaggtcattttttgtaatttttcctaagggataattaaatgaaatattaatttttataaaaaaaaaattacattttttatatttttacggtattttataaaaacacaagaaaatcacttgaaaataacaagaaaactacatcaaaataacaataaagcaacataaaaaataatatgcaattacaaataacaaaaaattaacaataagataacaagaatacaacataaaaatacgccaaaagatcatattctatgtaaataaaatctaaaaaccgtaaaaatgttgaaaactccgtacaaaccgtatttttgtattttattattttttgtttcttttttt

SEQ ID NO: 40606 - DNA, 2653 bp, Cannabis sativa
caaaaccaaggtctctaccatagacatttctcataaatatataaaaatactaaaaaatttacatttttatgtgtttattgttttttatttttatattttcatgattttttttacagaaatatggagtgtcgatattccgttatttttgaaaaacaactattttgacattattgctatgggaaagcaacgtaacttttttatacaacaatacgaagtgttattcttctattatttaaaaaaatattttttttgacttacagctataagaaagtaatatttttctctgaaaaataaaaaataaaccagttgaaaatctgaaaatatatatatatatatatatataaatttgtaaaaatataaataaaaaaattcccaaaaatgtaaaaaagaaaaaattattttatgtgtattgtgtaaatttctctaatatcaacaatatatacatatacatacatatgccgaattgagaaaaatacctcacagggatgaccgtcacaattaaaacgcccaattacaagtacaaaataagtgttccaaagtttcctcaccacccccacacaaggggcaggtcacatcctctagatggaatctcttagaaagaatcgcgcgtacagggccttggatagtatacaccaccaaattatcttatggcattccaatatattactattccacagtttgttccagagggatggagctacatcaaagtgaggagcccgttctaataaagcttagataagataagttgatttacacgagaaatgcctattactctccttcgtccaaatccccctatccataccccgtccagagggtttactctttttgatcaggatagccgaaacagattctttataaacgaaaaaaaaaatatcaatttctgagtatatcccaattaatcccataaggagatctgacactttattataatccgtaactctagcatcattcaccttagggtagaactctttgtcgtgggagatctagggatcttcctaaattttcgtatcctaagtagaactctttgtcgtgagagatctagggatcctttcgtatcctttccatctgcgatcatgacaaccccgttagaaattctctatgtagtttcagcaatataaggtgcactcacccaattagaagtccatttgaaatacctcacctatgtatgggagcatattttaattctgcacagtaaaaattttctacatatgtatatataatatataaaccataattttctacatagtgtaaggcaactaaggccgagaaggaagtttcggccagttttcacagtagagtttgaattggactgagtatatgtgtgtgtcaaacttggaatttttactcgttattatattaaaaaaaaggtaaatacaatgaaagacttgtgttttacaaaatatattaatttaatttttattttgttaaataataaattatacagtgtattttctaaaataatattaaatggtatcttgaattgatcatcattttttttaaacaaaacttaataataactacccgatatagagatgttacgagaaaattgtttaccttttctgtatttatgttcacgctagacattatttttaagttgatcatattaaaaaaaattgtaaaaaattaaacttccaatcctatttatactattttaaaatatacataatttatttttgtcaaaaaatctattcgatgacttttacaaaattcaagttgaaaatagtgttaacatattataaaattattatattaatttataaagaacgttggtaccttataaacgggctgttgtagttgtcactttttggaaaattaattaaattatgacttagtaactaagcactatatttcagtcgtagttgaatatctaccaataattaacatataataatactgtctaatattgtcctatcagattatttaaataagtgatcatatataaacattaataatcgtaacactagcagactatttaattcacgtggtgtagtaaggtaattgtaggcttatacaattaatcattgagaggaaaaaaacaaaatcttattattatttttttctcttgatctttttccttataatttcttttttattattccaatatctagccaagatcttgctttaaattaatctgaaaaaaatacaaataagaaaaacaattaacattaagaaaatactcccattataaaataaaagataaaacaaaaattaggtacgtattttgtttatttagttttgtaacaggtacggattgtattattaatttaggatcaaatatataaatattgggttaaaaaaaattatatattttgatttcaaaaaaaatatatatattcacgcttttttttaggcagtaattaaatattctattaaaataatggttagtttaaagtcaatctctaacaacttatacatatatttgtagcaaaaagaaggctatgatttgggttgattaatttaagaaaattagataacaaaacttaatattaacctcaaacactataaaaatgatattgttgtgtgccagcaaacatatgttgctggttaatatatatggcgcgcgcgcactgtcaacaaaattcgtcggttaatatagatttcaatatttatcgtttcactagagttttgtcaagtttcaccaatatttgttttg

SEQ ID NO: 40607 - DNA, 1371 bp, Cannabis sativa
attttccaccaagctttaatttggtcgatgtatttggtccattaaaatgtatggtactttttgttaaaatatatatagtattaattaatattcaattgtaataatataattatgagaaaggttaaaaagtattattggtgcttaatatttttcttaatattagtataattaagtattgagttttctataatttaagaaaataatttttaaaaaatatcactaacaacacaatacaagtgtctctttagtatttataaggcaagtaacctaaataaattatgatcaatcatttgaaatttcaaataacttattaagacagtattatttcgagaactttcgaaatacaatattataaataattcaattaatcgaaaataaaatataaatcccttataatttgtacatggccttaaaattgtctaaaaaaatgaagagaaaattaacaccacctaatctccttttctccataaaaatatataaaataaatggcatgtagccaagaaattacatgtatattttcttttcttggtactttttctcgagaaccaaacatcggggacaaatttttatacgttgaagagaaaataagctaagcctaagaagaaaaaacgaaagaggacgaaaacgacatcgtatataagaatataagtgttacgaacaaagtacatcgttcattacggaatgattttttttttttttaattcttttataatgaaacaattgtacaataataataataataataataataataattttttttaatgatatctttgttccccattattctttatgctactcttaaaataacaaaaaaaatactatatagtcttattttttataattatattaacatcaataataattaatttataccgtatctattagataagaactagatttggattcctttcatttttatttttttattgtgttctatcttttgtgacttttttttttcattattattattattatatgtaatcttgtccagaatttctcttgttcagaatcattagctgatctttctcactacatataaaataaaagaagaaaaaaaaaattcatgtacgtgtgatatatatatacaaaagaattttaatataataatatgcaaaaaagtgttaaattaggaagatatatttgtaatttgtaaatgatacatgaaagtctataaatatctaattgtacgagaaaaatttgttaaaacatacctaaaaatttagactattcttttaatatgtcacgttcacctttatataaatattctatattctccaaacacctaaaacccaaaattactcttacaattcaaaaactctcttctcccactctctatgtctaacttcccccttctctctgttattccca

SEQ ID NO: 40608 - DNA, 995 bp, Cannabis sativa
atgaataaaccttttcaccaatgaaagacaaaatttaccatatctgtaaatatactcacattttggttggtgtctcatcttaatgagcttcaaagtaaagttgagagtttctagtttctaccacatttgtaatgtaaacaattagtgcccattttagatcatttattaataagaattgtggttaatttcaatctaagtttaaaaatattttatagaaatatgggttaacatttcatagagacatatttctgtaaattatatattaatacaaatgtagcaccattaattctatcgtttttgtgattttgtgcatccacgaaatacgattatatgtttaattttaagattttatccaatacctagttaatttattggaatgggcgcaacaattataaatctttgtcaagtaaaaaaaataattatatatctctttattagttttgagctcacattttagttaaatatattttgatattgattgatactattgtcaggtagctgagttatttgattttattcgagcttacaagtaaatcctagtccttgacatcttttcgagttaagtatgttcttttaaggttattcttcaaaagaaaaataaaaattctcttgcaactcaaaaactgaattagcattcttaaattaaaaaaagtttaccaaatattccactgaatgaataattacacaaaatactaatttttatatatttacatttaaagttgtttaatacatttttacgatattctataaaaacacaaaaaacaacataaaaaataatatacatataataaaaaaattaacaacaaaataataagagtacaacataaaaatatactaaaaaaatcatatttcatgtaaataaaatctaaaaaactaggagtgggcatcatccaatccaatataatttaaccgaaccgatcaaatctaatccaattacaaatagttggatattcaattacaattggattggattggatgctaaaagttggattcta

SEQ ID NO: 40609 - DNA, 1848 bp, Cannabis sativa
aataataactataagaaactgatgttatcgaacatcaccatggatttttcagctagctcacaacaaacccgcatcgatgtggatatcatcagcaaccaccatagactatcagttgtcgagtagaagcacctctattcccccctctgacaacgacaagttgcgctaaatcatcatcattaatcaagcgattaaaaatggaagattgctgaaaaatttggtcaaaatatgggtttaggaagagggcaggtgcgatttcttgatcatggtggtgcgatttctaattcaaggttactgtcagtgcgactgtgaagtttttaatttttttaagggtctggtgcgaccatgaatctttttattttgtgaaaaaagaaacttttttatggttgtgagctgtgagatttaatattcctaaaaatttttggactcaatatatatgggtttaggaagagagaacatatgaactctggttgatcatggtggtggtaccattaattgagggtttgtgtcaatagaaagtttttgattttatgtttgtattgttttataatatattaggtaaaaaattgaaaataatgagagcatgacacgtgtctactacactaacttctgttaatgggtaccaataacaaataattaaaattgagttttgagtatttatgtcgtaattgtttaaaatttggtacttattagcaacaaaaggagtatttatgctgcaaattttccaaaaataaatgactcatttattattatttttttgtcctaactataccatgagcttcacataagtttggggaaaaattgaaattgggtattatgtcttgaagagttaaaagcttaagaagattgagagagaatgtttttagtatgtcgcaatcattttcttcaaaaatgaaaaaaaaaacgaagaagaaaagtagtttcacaaaaaaaatgaataataaagagttattggtttgagttgcaatagtataaattccttgtgtgtattgcatcaagagggtatcaagatagttttaagatgaacttgaggttcttggaatgtaaaaaatttatggtataattgagtctaaatgactttttcatctacccttacctaagccaatgttataacccttaaagtcattttgatttcaaaatatttattgttgacattagttgagaaggttaaataatgcaagaatattaaaaatttagattgtgattttttttgtatgagttgagcatatatggtggagtataaattattgtggtcatttgtgaatcctattatttattttctattggactttaaagttaaactttgaggcacttgaattgaaaatcaagttaaaaattacaattaagattttagagaatgtgtaatatgtaatgtagataaaaatgatgactttctttgtgtgtttgcttttattttattttttgttagtttatcttggtctttactcgagggtgagtaaaggttaaatttggaaaaaattgttaggtttatttttatatatttttatagtctaatttagggtgtgttttagtatttttataattttatcgtgcagatttatgcttggtttttgttttcatttgttttttaagaaaaatatttagagatcttcaattttggtaattttggtattctacaagcttttttgagaaaaaattgagaaagtataatggggaaatgaaacttcttttagcttggatggatttcctattcaaaaataggtcaaaatggcattttcagctcttaaattcgtagtcaaaggttataatggtcaatttccaagtttatggtggaaaatcaaagaaaaatgaaacttggcctgtaaggccgcatcttggcttgtaaggtca

SEQ ID NO: 40610 - DNA, 1415 bp, Cannabis sativa
gggatggggcggggatgggggtataaataggtagcggggatttcattccccgtacattaactgcccaatttccatctctaagggagagtaaagatctagttgggggaatttttaggctatttttagctaagttttggtcgatgtttagagtcgtttttagtctttgttaatacttttaggacataattatgcttatttttctgtgttttcaggttcccgtggttttcaaatgtcaattgcatcaagattcaaaaagaccgaggcgtgacgaataaaaaaacatcaacacaagaaatattgcatctcgccacggcgagaatgacgcatggagatgtgatttcaagtttacacagttgccccgacgaggaagcttagagccgcggcgaggtattcattgtcgtggtgataatgacttatggacgcggcgagaagactcgcagaaagaccctatttcaattttgtgaagttgtcgcgacgaggccattggtagctgcggcaacgaagaccgtacggactcaaggggaagttttgtatttttgaaattttgagttgtgaattggttctatttgagaagatttcaaaatttgaaggtcaggcatcggaaatagaaccctagaagcaaagaggaagatgactagagcgagtgtggcaacccggatcaattccaccatcagtttctttcttctcccttttattttcttacgttaatttctgtttttagtttaattgtggatttgaacatggagattatgaactaatttcccaatttagggatatgatggatgttagttgattttatttcatgagttaatgttaattgttatttcatctttcttgattgtgcatttatttatttttgtgcttaatacatatgtttaagattgatcaccttaggcatgatttatcatctcaatacaaaatttgaaaagtgagtattgagaatactctaattgaataaacttaagttttgatgtaaaatgagagtatttgcatagcctttgtgacttttagattattgcttaatgcaaattgtattaatctatctcagagatgcaatatataacatatagtttaggaccttaatgatctgaaaagaattttggtcaattttataatctgttatcacataaagaaagaggaataataattagcattaataattaggtaattgatacaacaggattcacatccctaatttctcatcctttgttaaacaactttaattgctttatttttatttttactttcttgtcgttcattaacttcgtttaagaattatttttcaaccaaatagaagaacaaatctaatttcggggtactcaattttcaatttcctgtgattcgacctcacttgtgtgagtatatactagcaattgatacatatatttgcgtagagaagaaaataaataacaaaa

SEQ ID NO: 40611 - DNA, 1039 bp, Cannabis sativa
ttttttaaaaaaaaaaaaacctcaagaaccctaaaataaaaactgtaataacacaataaaaattaaaaagtaattaattagaaacaagaaaagtgagagacataaacccacgaactattattttaaaaataaaaaaaaactaagaaaattgtaacataatttaaacactcaattaaaactcaaatacaactaaaaaaacaactgataaatgaaagatctaatacactattcaagtttttttttaaaaaaaaaaaaaatctcatgaaccctagaataaaagtcgtacaataactctatgaaaactaaaaaataactaattaaaaacagaatagtgacataaacccatgaactatttctttagaaaggacaacaaaattaaaaaaaaaaaaaaaaaaaacctaaaataataatcgcataacaactcaataaatactagaatataacttttttttagctggacattgaaataactaaaatccacacaataggaaaaaaaaatacacacacaacagaaaaaaaaaaaaaaaaacaacagggaaaaacacaaaaaataaaaaataaacactcaaaatcttacatacttgatgttcttcaaagatttgatcattttggtcgttcgagcctctaccttaaatggtagatgcttttttttttttttaaaaaaaaaaaaactagaaccctctggtacatcacattcaatggaccttcccttttttccaatacctttcaacctcagtttggtattagcttgaacctaagctttgttgctcttctgaggagttttttagttttcttaggaagctttttagcaagtgaaggggagttcgaacatgacctgattgtggctatttatacagttggaaaatacaatcggttgaacaaaaataggagatcgtgagtagagagaggttaaaaatgatagatgaatcgtggctgaaatggatattgggaaaatgcaagggttagggcttcaacttcaacaaaactatccagggaagaaaagaaagaaaaaaactaggaagaaaagagagagagagag

SEQ ID NO: 40612 - DNA, 1516 bp, Cannabis sativa
actgggatgagaacccagacttgggacagtaacatgacccaaacttagaccagaacacataccgggacttggaccctgtaataccctaggattatgaaatggatagcgaaaccctaattagataattatgtattattgaggaattatattattatataatttaatatatgtgaatttttaagatttatgacgtgttaagacctcgttggagagtcaggggcattttagtaattttcaccagagaaggtttaaaaactgaaattaatttttttacgtgcttatggtactatattattatatagtatgcctttgttttctttttcaggtgtgttctaacaggttggcgcaatatagtaacaatcgggtatttcaggccgaaccaagttcggacccgaaatgcaatattgtcatttttttttaatgattaatctaaatttttatctgagattattcatgttggagatgacatttttacccttgccctatgtgtatactctattttggccttaggggcatttttgtcctttggcattgattattaattttttttattaaatgaatttttggcatggaagaggttcattttctggtttcttcttcctcttacccgaactctatctctctcaaactctttattttctactttgatttttcagttgaaaagcttgaatcttagcttggtttggagctttgtaactatagaattttgagcttgttcttggattgagtttgaggtaactttctatggctttaatctttgttttattgctgaaattaattattaaaagagcatgaaatgtgatgtgggtcgtgataatgaacttgagatgcatgttcatgtttgttgggttgtcttgagcatggttagagctttaatttcttgagtttgtttgggttagatttggacagaagttaaaggattttattacggtaatttttctgttattaaactctggaattaattgtttgaagcttgagttcaagttcttgataatggaaatttgtttgagattaagctcaaattgaagctttgattttcatggttgattaatctgaatttttcagggtacatagtgggttttgatgcatgttatatgtattttaatgccatatctttgagcttgataatttatggaaaatcactttaagttgtgtgtaaatgttgtatgaattggaggtgtcttgtggctgaaatttgtgttgaaacttgctggtttctgggtttggaacccaggtgctgcagcatgccttttagcatgccaaggcccgcccctttgaatggaacctgggaattggtcccaggtgtcgtggcatggcttttgcatgtcgcggcccgccctcgagtttcagggcagattcaagtgcaactttgaaaactcataactttgtgatccgaactctatttgaaagctcgttcccagctctatatgattatttatatttttaatgccatgaatgtaaattatgaatgtggaatcaggagttaaccctacttgtgtatatcccagtattttga

SEQ ID NO: 40613 - DNA, 2012 bp, Cannabis sativa
  modified_base (750)..(756): a, c, t, g, unknown or other
tagcagttccatattaaagattctcaatactttaatacactatcgacttgttttattcatatcgtataatctaaattctcttgtgtatccttacaagattatactttctccatatgaataaggaattttttgatatttaataattatattcttataattaatatatcatttatcttataactgtatttcaaatattcttctaatatattatccatcaattacttacttttagggcataaattccaacaactcgaacttgactcgaactttgagctcgaaccttgggcccagaccatgaacctcagactcgacctggacttggggcccggacccgacttggaccccggatccaaacacggacccgtacctctaacttgacccagaccccggatcccgacccatacacgagacaagacccagacccgaattcagacacgaacccggacctcgaaccctgaaccccggactcaaaccccatacttggaccctagactctggtctcgaacctggacccaaacccggtctcgaccctcgagccggacccggatccgtcctcgatcccgaacctggacctagattacgccccagactcggaccccttaaataaaatcaacaaatgaaaatgaaaataaaatttagagaacacattttttttttgttttaaaaattgaaaaacaaaagtgattataaaatacatttttgtttctcactaacaaaattttaaaaacaaattttacttttatttttgtnnnnnnnaaatttaaaaataaaaattttaccaaaggccattgtaatttccaccatttattaaaacaaagttgtattattttgtgttttgatttttttaacttgtacttaaatatctaatttgaaatttcaaaaatatcgatcccgtttttgttaacaagtaagtattatttgacgcaaatgatgttaattcatttgattgatctatatttaaatttaaccaaaaaaataaacaaaattacctttaacgtgtttttttaatcttattggtaaaattcaatttgttaggaagaacaataaacttcaagagcagtaaaataataaagaattaaagcaaaacaatttactcagtttgttaaaactactaaaagaaaaatatatttgactttatcacttctaaattacatatgttctttatcttaatctctctacccaaattccaatacactctttgctttttcacactctcactacacaacaaactcatacacacttctcttttcataacttactttttttctctacacacatacctctctcacacacaaaacacatatttataaagttacaaaatttgggttaaagacaacttgaggacaaagactttcctttttctacaattaataattacctaaaaaaaattgtaacttaacaaatatagataaataaagaaaaaaataaaaaatttgagcaaaactccaacacaatttcacaataaaaatattaaaaaacaatccaaattattctaccaactctaaaaatcctataaaaaaactgagttgtccaatgattttaaaggggttgagaaaaaggaagaatcatcaaagcctggatgtttattaaagcagttaagctcaattaaaatccagctaaagagttgttcctaggcttggatgttatatatataattatatatgtgtgactattttaacttttaatattattgattaagaactcactctattcttaatgaatgttaggtagtagttgtaaaagcatcagtcaacactttaacagtttggctcttgaatttattttcttttattgatgacttattaagttgggaatagtttgttgccttgttccttctaatctgaatttgaaagagtaatatatcatttgttaggaataaattatgtatcaggcaaaagatgaaaccagattatggattaagatattaaaatatctgtaattttgagtgatgagctttcgaaagctgaaaagctggtccaaaatatcaacttggtcccggcggggctcgaacc

SEQ ID NO: 40614 - DNA, 1213 bp, Cannabis sativa
  modified_base (28)..(29): a, c, t, g, unknown or other
gctaaaaaagttcagggggcatgatttnntacatgtcaaagttcgggggtaaaaattactaattagcataattatatttttaatgtaactattaaataattttttttttgaataaaatgcataaatatattaaagcataaagggttaaacctcatagtcattatataataagttatctggtataaagaagaatcgaccatatcaggtacattgcaggaaaaaatccacttagccatgtgggctgtgaaattaccaagtctacctataaacaaaaaaattacaactagtcaaaaagtttgaaagaattttatattagggcacataattatcaataccccaaataaaaaagtctcctttaacgtattgattaccgtctcagaattactcttaattatcacaaataaaaatgaaaatgttcttcattacaatataaaatgtctaaagaataacaaaagcacaaaattaatgataataataataataataataaaccaaaagaaaattagtgtatttttaatttaataattaattctagtgaaagggacaaaaatccttgacaatgaattacaaaaacaaataattaatttgcatagctcattcaatacgttcacatacagttttatcaaacaccgaatgagatcttaaaaacaattatgatttttatgaaatttctatttaatattccattttatgtatttaatgtaccgctgactatttgattttgaaatacaacgcggctttcctctttgacccattattttaaataaatattttaattatttataatttattcccactatgaattatagagccagccctattccatgttagtgtgttcttattcttattattattacaaatttatttatttagggtatgtttagatgtgattggttatcatctttaatagtgtaccattttactaaattagtgtaaaatttttatattatttcacttcaatggtataccaaattatgcataaaattgccgtgcactaaatttttcactattaatagtgttttatttttttttttacattctaatccttattttatttttaaaatataatcttccattttagtcttaaattaaaatttatcacaaaaataataattaatttaaaacactaacatatttgaaaatataagataacaataaaaaaattattaatactaatataataaaaaagtgtaacactaagttataaaactaa

SEQ ID NO: 40615 - DNA, 1044 bp, Cannabis sativa
  modified_base (869)..(869): a, c, t, g, unknown or other
aaatggtaaattgctaacataatagtagttttgggggtttacctgtaaaaatttgggttgtgggggtttagtgaaaccaaaataaaaatattgggagttttgccggcatttacccataaaaaaatagtcacacatatctgtagtaaaaatatttaaattttagttttaatattataaattatttaaaattttctaaaatattacaaataatcataaataattacattattttttttttatttttaataaataagtaagaatagtttatgaaaaagaaaaataaaaatgttgtcatgaagtgaaatttttacttagtcatggattacgctcactctttggaactctttagagtaataagattaagagaaaacaaaatccttcctatatgttttggaaatttaagcagtacattttttaaaaaaggttgttctgatagactttttatttatttcagtatactaaaaggttttttatagttcaattttttttttataattgtatatgttgtagctatataagattatttgtaaatttttaaaaattctgaatagtttacagtgctaaaattaaaatttaaacaatcgcacgtaaaataaaatatttcaactttatttttgataatgtaaattatttgaagttttatgaaaattttcacgcaatctttaataactaaaaatatacacgaatacaaaaaataatataaaaaaattaaactaaaaaattttagatactgaccacaaattaggagtttactaaaatacccctttaagagaatgcaatgtacacttgcccatatgttttaattgtggcagttctgaatgtatatatctcttctatataaaatgtggttatataacagaatttttggnttatgagaaattattgagtgacttattttttttaaaaaaaatttctattaaaaaataacagtttttttatttttattttttattgaggttaataaggttaaatccccaagttttttttttcgtcttctctctctcgtgaacagctctgagggctgaagccatggcaaaatcgcga

SEQ ID NO: 40616 - DNA, 1782 bp, Cannabis sativa
aaaaaattgttccgattacttttcttcttccatatttgcatgccctcattatccttgacctattttctgtgtgtttcatcagatttcgtcctcaatctcagagaatctcagaactcatcacttcagtcatcaaattcttactcgacgagttcttcatttcctagaaacttttgccaaaacagtaattggtttatttctttgtttttgctattccttttttcagagtttgtaatcttattttgctttcaattttaccttcattcattgtgtttggtttaggcattttccgatttagtttctgggtaatttatagggttttaaggaaaaattatagctttattatattccttggtttctggtttatattgaattaatttcctccagaaatagggatttttcttctttgtcaatatgtcccaatctggttttgaaatttcaactcctgatttcctagaaatagaatgtcctaatgaattagctcttccattcaaacccaaaatccagaaatctaaatccaaacttgagatgaatgatgccaaaagtagggaccatttaataaagaccaatcatgatgaaatttccaatcactataggcaatttttacaagagataactgagggtaaacgtcactatttgtgagatgcagcttgccctgaaccttaaattttatcttctattccttgagcgagagacccttgttttttcctcaagtcgctgttgctttttcatcaggtgacctagattttcaaattatgtccaccaagactcgtagatcaaagaccccctaggatcctaatgtcacctttgaggtcgagcttattgaatccaaggtaagggccattggagactatgttggtggtgtattaaagacttgcagcatcaagcaagggtgaggatgccgcatcagatccaatgctcctggggaattcagctgctttcaaccaaatcgagtaattcacgaagagtgtggtggcgccagttgtagtggctggtttggaataggcacttggagcctcgagcacatcaaggttgaagcagttctcccatcgaaagggtactacaaagaattctgtaattatcttagaattgccccttttcaatatattccaagttcttacagaattctaccaggcgtaaaagttttataccatattttaggctgggagtgtcccactcccctcgagatagtttatttttaatccgtcaaagatgttcccgcaaggaagcgaggttcaggaggtttttattacctttgtacccacacaaatgatcacaggatcattgcgaggttaccaaacatgaccgagttcaaggatgattttttctggactactggtctttcccttatcaacaccactatgtttcgcattatacgtaagaaatttctgtctcaaaaacttggttttgagttcgttttatatttattaaattgaggtcgcttacttattacatttattgtgttgacagcagttaccaaaagaccaatccccaccctcgagatggttgagcgtcataaaatcttgttgggtcttcctttcggatcgcggtcaacatatttcctattaaatgaggccaatctaaggactgtcaacctcctttgctcagaccagttcacctgtgactataaggttctgaaatactcttcatgggagaaggtcccagtctcaaccgcttaggaaagctaggattacgttgctcgcgttcactatctcaagaaagtaaccccttgggaagctaaagaagaagcatcctgaggtgatcaatgtggatggtcacctaccg

SEQ ID NO: 40617 - DNA, 1128 bp, Cannabis sativa
atagttaagtaaacaaattgaaacataacaaatgtttttaacaggtgtaagatagtctttcgaccatgctacataaaattttatagcttgacctactactgtcaatgaatcttcggctatgggacgggagcagtgcattctccacattgacttcttcaataaatacccgacgataatctttgtgtagttattcatcattttcaatggagaactttccatctttcaaatatttctccttcacaatgtggcccgaagcaaccttcagtaccatcccatcaggctacaactaacagtgcatccaacacggtaaaatctgtaaatccaaatcaaacaagcaaaaattcaatttgtaaattgaccttaattataattttgcattagattaattcgtaaaataacattaagattacctcttctgaactaccaccagtaagtggtggtgcttctgctagagcagaatcctctctaaaacgcggtggtgatggagtagagacattggcagcgactgacggttgtgctatgggatctggtggagtatagacattggcaagacctgatggttattctactagatcagaggcaaggtcaacatgaggttgttcatttgattctcctccaaaaccgaaactagacgcaatactgctatgctgggaactaataagatgaatgagctcatccattatttattctacaactttctattgctttcttctgtctcgcgcacgattctctccaaatcagatgatgcctggtttgacccattggtgtttttccttttagggcatggtgtttttgagtgacagcaaaattcatggctcgaacccggccaccatgctcatctgtccccagcgccatggttaacacgtcccttttaccttccacttgtacaggaccctcttccacttgcttacgtaattcgtcctataaacaaaacatatagagttagaaataacttatgaagcataacaattaatacaaatgaaattgaactttaaacatacaattcgtttaacgatttttgcagctagggcccccacctcacctttcgtgttcacgtgaagtcttttccaaatttcagatctatcaaattcagtaatttttctctatttgttcttgaaccatccttac

SEQ ID NO: 40618 - DNA, 1137 bp, Cannabis sativa
tctctctctctctctcaactctgatttctctctatctctcttttcggtaccttactcgaatgagtagtagcctacatataaaagtagcctcacaatgaaaagtctcaactatcataataaaatatttggtaattatgttatgacatataagttcatgtcttgaacgagcaaggagtgggaattagttctcataggagtgtctaaaatgtatagcccaacataacaatcatccacctctggctttacatttgaattttagtagccctgttgtagtagtaggttgttctggtcttgataaactcaacagctaaatatatgttcaacaattttagatagagtctatgttaggatttatacactgaaaaagtctgtaatttcttattattaataagagttgaacgttttgatatatgcatgaatattaaattattaatattgaatatttcataatttatatatatataaatatcaaaaaaattcttattcatacatgagactgtgatgatttgtagttgacggagaataattaagatcacttattcatgaataaaacactcaaaaacatattaaagtttaggaatcatttatcaatggttgctagtgcggttcactgattgccagttattcagtgcaagtaatctcaattcagattactgatgtagcatgacatctaagtggaggtgttgtatataatagagattatatatgacaaggaccgatatgaataaaactatccttatcaaacttaccgttcactataaagacctaattcatatcataaagatggtcaatagtagatcggcctaaatcttgagtaatcatgaacgcatgttcatgttattagtttctttaattcactcattaaactttctcagagaagatgattcttacaacttttgttttagaaatctaataatttggatggctaggagcatgatctacaattatagaatcttgactttcttaacggataaaatgttggttcctattatcccaatttttgtcctcatgacatggcatgattacgtggacaacataaatgccacgtggcagtacaactcgctaataggaaggccaagtcagcacctgaacaaacagagaccccgtcactcgaataggcatcaagtgacagaccag

SEQ ID NO: 40619 - DNA, 2074 bp, Cannabis sativa
ctcaaaaattgataacgatccgtttgacgaattgatggctctccgatttgagaattcagtgctagagttctgggttcggttcattccaattgcagcaagattgccggacattcccgaaaccttgctttgtgacatgtttattgggaatcttcctgtcaaggtgaagaagaaggttcgtgaatataagctgagaacactccccgaagtcatcgccaaagcattcttcgttgaaggacagctgaggttctgtcatcaaactagcacacaggaggaagagttgcaaaataatagggaacaatttgttgatcttctcgagtctccaacggaaatggtggaaatcaaaggatcaaagcatgattttcaatcggagtttctctctgaaaaagaaggggagaatatattaagccatgctacatcggagataaagatcgatctaccgatgcttgagacggtgccagtgctggacagggaggagtcgatcttgccacttacaagggaaatcgcacctggggttgatcgacgaaagaccagcacaagggaaacgatgccgatgttgaatgaccatcagcgtgagaagacgtcgagggagcgggtgtggccgatcgtggagagaaagcaatcgctgccttcactggacgaacagaaagtcgcgtataggaagaagacggctgaccagagaagctacaatattacgttattgtctcatttgttcttacaaccttaccaggagaggcccaagccatggagtcacttcctagaccaggcccacataaacaaaaagtccaaaaattaattaatcaagtgtatgagccggccctttgggatcctggtaagacccatgtcaccatttattcttcaactcaagtgcatgtcctatctatttcaacaattgggcttatccattggggccttgagaaggcccatgaaatttattcttctacaagtaaaagggatacgttccaacagcattccatgggagacttattggcagatcaaaattggacaaggatgtgccaagcatttcttcaggttttactcttgaaaacactgaagatcttgcagcaacagtgtatccgaggggtctttgacagaggaaaagtaagactttctatttcttctccacacagaatttatggaagcaataattcaaatatgactatttgcctcatcttaatagtaccatcttattcttatttgtttggggcttcctgggttgatgaagggcgacaaagcactggggtatggaagagaaaaaattgcaaatttatttggtggatttttgatagaggaagaaaattttgctctcaagagttttttatatggccaagcttacactacaccttttgggtcattagaaaaatggggcaaagaaagcatttgattttaattaatagtcactattaccgatacgtgtcattctttagttctccaatggtgactcatcatgtttatcggataaggccaattcttgctaatcctctattttcactttggttatatgatgataaagggggttatccatcaagaattttgagacaaatcatccaacatttaattttaagtgttgatgctattgatgtgcttggtactattccttcactgatgatgtttccaggacttgatgttctcatctggagggtcaacaaggcttctcctattcttcttattcttcttcaacagtggcttcagctttcatgggcttacgataatgatataaaaagtggcaaaaccacttttccctcggcagaaaaagaatttagaaaatgctcagcagagttggaagtattttgttaagaagaaaactgcagtaggcaagctcatcaacatcacttttcaggggcataacaaggagttgaagagcaaaatgcatttgttggactggtttttcgagagaggtcgacttgctaaaacttggcgcttctctcacagcttgctcaaaatgagatttctgctgggttcttggactaagaatgagcaaggttggcagttgaagcttcacgttcttcaccttgaggacaaggtgaatttcgggcggccggtattgttaggccttagggtataaataaagagggta

SEQ ID NO: 40620 - DNA, 1564 bp, Cannabis sativa
gtttatgaattcagaatacttttatttagtttttatgacgtttaatatatatagttttgtaataacattataaatttcagttttataatatattggagattatatttagtattatttcgatttttaatataaatttaatttaaaaattaatttataaataattctttttaaaaaaaaaaaaactttttctggtgcatgtgtcgtcggcatagataaatttaaaattaaatttatttttttaattaactttttgtcggcaagtaaacgcaccggcaaaaaacaggcgcccaataccctggttcgcgccaaaacctttgccgacgcagtacatcgccggtaaaacgtcgtcagagacacatcagccggcagacttattgccggcgattacgttataccggcaaacaaatttgccggtgtaaatatttttaccggtgcaagtcttgacgtcaccagcaaaaggtcattcaccgacgagccattgccggcagcttttgccagcgacaattggcaccggcaaacgtctgccgacgagttacacgtacttttgccggcgagcttatgtgccgacaaaagtggcttttcttgcagtgtgagcgatcatgccacttgagggtactgggttaattaacgaggcttagggtaagggccaaaagggcaactcccaaggtaggtccctttggcaaacctactgtctcctaagaggaataggataccctgaagcgaagggtgaaagagtgggaagtacggtatgagtggcagcaacaaatgatgcaaacttagaatcaaatcctaagcacgttttagcaacaaatgatgcatctggccagcaccattctaagattaaacatgctctcgatgcctctgattctaccatttaggcctcttggcattggatcttcttcacaggctgtccttcccgatgatgacaatgatgatgatgacgaagacgacgatgttgttgacttgtaattttattttttagtttgcagtgtaaataatactaatttttataaaccaatgatatttttatttagttttagacaatttatatagttttgtaattataatataaatttcagtttgataatatattttggattatatatatgttattatttaattttaaagattttggctttatttaatttaattttgattttattatacataaatataattttttttaaaaattcggcaaactatatctcgccagcaaaactaaaagaatttttttttggaaagttttgtcggctaagtaagctacgctagcaaaacttttgggggtaaaaaactttggcacgaaagttttgtcaacgaattattttgccagcaaaacgtcgcctgacggggaaacttaatgtcgctggtataaaatattttgccggcgaggtatggtatttcgctggtaaaacaccttaggtcgacgaattaatattgacatcctttgtcagcgtaaaagctcgccaaaaaaacaatactgtcaactacttacgcctatttttatcggcaggaaaacttgctaacaaaatttctttttcttgtagtgagtatagtaattagcacc

SEQ ID NO: 40621 - DNA, 1140 bp, Cannabis sativa
atacgtggcagaccaagagaagccaggtggcaatggaactcatgttacatgacatatcaccctaattactcttggagaccattattttcaaggagtactaacacgttagtcatctccgaagggtccacttactccctgggcaactctcgccccttccgctccacgagtgaagtacatacggagatcgaaacaagagtactaacaaaagatgaaatgttctctctcaaaaaaaaaacatgaaatgtcacgcaaagatcgagacactatacatgcatttaatgcgtcatgagaaagagcgtcagacacctactctatcaaacgtatttaagggtttaaacccattatttcctgatttcacgaacttttatacattaatcgacgactgcataaatgagtcatcaagtcataaagaagggatatataatatcccaccaaactcctattggtagcctaaaacccatcttaaagtaggcaattatgccctaagtcagagttgggaaattatgcaagtatgttgtaacaaatacaacaatagtggccttttacaaccatcagaagggttaatcaagcccgttaacttggctcgatattgaaactcaaaattaggtccatagctttgaagaccaaggacgtaggtatcttagctttacccaactttgtaaaaatcaagagtttgcaaattcttacccttgaattctttacattacaagtttgattatttgctatacattatattgcttgtcatattacttgcaattatttaattaagtgtttaattacatagttttgtgctaaaagttttaatttactgaaattagcttaaatgtctaattcaccaccctcttggaaatatatcttgggctaagagaatcttcgacattttttaaacgttagctacactatagtcgatgattataaaagcattggctatagtatagcagatgtttataaaccgtcaaagattctattttaaaagtgttaagtttcaatttagtaagtgttttaaactgttgcctatactcaacgacttttactagagatgatcctttaaaaaaagtaattcctgaccagaattaattactgtaataataatatctaatatgtcatctaaattttaaaattttaattaatataaaattg

SEQ ID NO: 40622 - DNA, 16229 bp, Cannabis sativa
aaaaaaaaaaatacgaaataataaaaggagcaatactaaacttcttgatagaagtttggtattgctcctttagctttattttcaataactactcatatagactaataccgaagttttatccatttgtagatggaacttctagagcagctaagtctagagggaagttgtgagcattacgttcatgcataacttccataccaagattagcacggttaatgatatcagcccaagtattaattacacgaccttgactatcaactacagattggttgaaattgaaaccatttaagttgaaagccatagtgctaatacctaaagcggtaaaccaaatacctactacaggccaagcagctaagaagaagtgtaaagaacgagaattgttgaaactagcatattggaagatcaatcggccaaaataaccatgagcggctacaatattgtaggtttcttcctcttgaccgaatctgtaaccttcattagcagattcattttctgtggtttccctgatcaaactagaggttaccaaggaaccatgcatagcactgaatagggaaccgccgaatacaccagctacgcctaacatgtgaaatgggtgcataaggatgttgtgctcagcttggaatacaatcatgaaattgaaagtaccagagattcctaaaggcataccatcagaaaagcttccttgaccaattgggtagatcaagaaaacagcagtagcagctgcaacaggagctgaatatgcaacagcaatccaaggacgcatacccagacggaaactaagttcccactcacgacccatataacaagctacaccaagtaagaagtgtagaacaattagctcataaggaccaccattgtataaccattcatcaacagaagccgcttcccatattgggtaaaagtgcaaacctatagctgcagaagtaggaataatggcaccagaaataatattgtttccgtaaagtagagatccagaaacaggttcacgaataccatcaatatctaccggaggggcagcaatgaaagcgataataaatacagaagttgcggtcaataaggtagggatcatcaaaacaccaaaccatccaatgtaaagacggttttcggtgctggttatccagttacagaaacgaccccataggctttcgctttcgcgtctctctaaaattgcagtcatggtaaaatcttggtttatttaatcattaatcatcagggactcccaagcacatgaattctctataaatagagatagagaattgagggcttgttattcaatagtataacatgacttatatacgcatgtcaaccagtctcaacatccaaaaatatatctagacccttatttatatatctctatttatccattttttttgtttgaataaatgaaatgagttaacaagttcatatttatagacataggatttcaaaatattaagtataatgggttgcccgggactcgaacccggaactagtcggatggagtagattatttttagaaaataaaaaaaatatataataaaaaactatataatagatatcattaacaatctctccccaagccgtgcttgcatttttcattgcacacggctttccctatgtatacatctaaaattcagatccttccctagacaggactttgaatactcagttgatcaacccttactgcataaacatttcataatagcaaaaaattgcatttttgctatctcttccttcatcatttaaggataatttcaatttccacggtcgaataaccaatcattcataattgaccagatcgttgatgcaaaaaatatccaaataccaaattcgccctttatataacctccgcaaagtggaataagttcttggaaaaatcaaagaaagaacctcttcttcctccgtaaagaattcgtccaataattctgaacccaatctttttaaaaaagtgcgtacagtacttttatgtttacgagccaaagttttaacacaggaaagtcgaagtatatattttactcgatacaaactcttttttttggaagctccgctgtaataatgaaaaagatttctgcatatacgcgcaaatcgatcgataatatcaaaatctgataaatcggcccaagtcgacttactaaggggctgccctactacgttacaaaatttcattttagccaacgatccaatcagaggactaattgaaattaatgtatcgatcttcttcatagcattatccattagaaatgaattttctagcatttgactccgtactactgaaagatttattcgcatacttgaaagatagcccaaaaagccaaaggcatgcttggataattggtttatcgaaatacttcctgcttgagaccatacataaaaatggcattgccataaatggacaagataaaatttccatttattcatcaaaagaggcatatcctttgatgctagaattgattttccttgatatctaacataatgtatcacgagatcctgaaagaaccataggttagtcggaaaatcatcagcaaatacttcttttacgggatgtttcatttttccatagaaatatattcgctcaaaaaagccttcagaggatgttaatcgtaaatgagaagattggttacggagaaaaagtaagatggattcatattcacaaacataagaattatacaggaacaaaaagaatcttggattactttttgaaaaaaacgaaatagatttttttggaatacgaatacgaaatctattccaactataatactcatgaagaaaaagccgtaataaatgcaaagaagagacatcttttacccagtaacgaagggtttgaactaagatttccagatgaatggggtagggtattagtacatctgatacataatttaaatgggggaatttgtcctcgaaaaaaggaaatgttgaatgaattgattgtaaattataatattttactaattctgtcccttttaaagaagatactaatcgtagggaaaatggaatttccacaacgactgcaaatccctctgatatcatttgagaaaaaaaaaatttgttgtacccaaaaactggattttggtttgaatcattagcggaaataatcaaatgattctgttgatacattcgagaaattaaacgttttacaattagtaaactagatttattgtcataacctacattttccaacaaatttgatttatttctatttaaaccatgatcatgaacaaatgtataaatatactcccgaaagataagtgggtataggaggtcatgttgccaagatctatctagttctaaatatccttgaaattctgtcatttaaaattcaatttgaactgaaaatagagtaggggatttattgggttatcaaatgatacatagtacgatacagtccaaacaaggtattataataagaaaaatatatacctcggaaaaaaaggtaagactcatcaagggactctctatcctctcttttttcacctaatcgatttaggttcattttaggataacaagatggttagaaatcctttatttttacaatccaatcgctcttttgattttgaaaaaaaaaaatctctttatcaatatactgccttcttctacacatttatctccaccacataatggtaatggagtggagatagctaatagttaggactcataaaaaatagataatccactcatgggaaaggcctttcccgcatcaatcactaatatatttttaacgtctaattagatcgggtaatcgttcaaaaatttaagaacaggagctcgttactttttgtttccttataattggaacctctagtagggttctatccatttatttactcgactccattttcactttagttttcatttcttttttttttatttgttctctggcaagaattcaaacaaattaaagaaagtttgtggactattatggtaagaatgaaagattctcagaattctctattgatacgacatgctgctttttccattcattcctttcaggatcagtcggggtcttacaaactctattgatagtatagatgaatccgttgcttcatacaaatgtgtaaaaaatgctagccgcacttaaaagccgagtactctaccattgagttagcaacccgaactaaaataattcgaatgtatagatacaatcggaatcctaacaaaaatagaaaattttataatcaattatgcacataataaaaatgaacagatctaatgaaaataaagatatttgtagacctactcttgtctcttatgttattcattattctattttaatcattttaatcaaaaccaaaaaaacttcttgtattacatattacagcaaattcaatcaaccttttattttttgttttttgaatgaaataaaatctatgggacggagataaatagattcatttatccattctccatgatcggattatatttatttgatagactgttgtcaatatgaatgatgaatttaaatgttgagaaaaaaattcaatggataaatggaaacaaaaaaaagatttctcttggattggcactagatagataatcgacatagagacaaaagaaaagggtgtagacgaacgaataaatgaaagaagaagtcgaaaaacctaggtttatttactcacttaatatcaatcaatagaaaaaaatacgtaaaagatataagtcaaagtaaaaaaagtgaatgctttactttttatttgttcatagaatttctatgaaaaacaaccattgatatcacaataatatcaaaaatggaagacaaaattgtttattctcttgatattttttctatctattccatcaataaaaccaaaaaaatagatttttatttttataaatttataaaagacgacatttttatttattttttttctatatttttctatatctctttactataaaaattatagtaaacatcctaaattaaataggatataaattgaacaagagaaaaaaaaaataaataaattaaaatagcagagaaaagattataatccgaactttatatttatttgattaattgaattttggttggtgattaaggcgaagttccataaaaacccctgccttttttgaaatatcatgaacagttcctgtaggctgagcgcctttttcaaggaaagatagaataacaggaacatttaaataagtttgattctttatcggatcataaaaccccactttccgaagagctcttccttctcttcgtgatcgaacatcaattgcaacgattcgataaatgggtcattttgggatagatggtagataaaaaatccccccccccccgagaaacgtatacgaagttttctcctcgtacggctcaagaaaattcaagttatgtttatgtagagaattctaatgtcaaatatattcataaaaaaattaaatcaattagaccaagaactgtctttctttatagttaaatacttggttattattctttccccaacaaaaaaattattcgtatttgtaatttgaactctcataactcaagttgtataactcgcaaaggaaatcctttaaacagtttatttattgagcggtctctaatcctccttttgtctgtctccgttcaaatctattttaattcttcatttaaatcgagttctagttgttgagacaattaaaacggtatttccttgttctgggatcctttatctttgccttgaatcgttgggtttagacattacttcggtgatcttgaatcatttcaaaatagcagcaacataccattttgagggatttctttctatcaaagaatcatacgaatggttgattcctgtgtaatacacttttgattttattgaaagagttttacctattcaccaaaaaatttacttttgaatttgaaacttgcttaaattggactctttcgatttctccatcgaaaatttacttacaaagttgtcccaatttattaattgatactaaccttagattcttgcctccgagaaacgaatcaatacgttctgctcgagctccatcatggatgatatggtttacatcacaacccccggttctagtggaacagaacaaatgatgtcgagtcaagagcactttaattcctatatataggaaatgaaatggtggatgtaagaatccacagcggatcgtgtccttcaagtcgcacgttgctttctaccacatcgttttaaacgaagttttaccataacattcttttagtttgaaagctgtatgtaattaattccatttatagaattatgaataatcattggttcggttagtacttaagtaatctatgtaatctatactttatttttctttctatatgaaatatagtttataaagaagtttcagcaagaattcaatttcactccaaatacatccaaatacatatatttaaaacgattttatttcaaatttcatttaaatagttaaaaaagagttgaaaaaataaactcaaatcaaaaattattttgaaattaaaaagaagaaaataacacgaagaaagtaagttatttttggcatcgtcaagtaactttaatatagataaaaaaaatccaatttctttttaggttttttttatactaattgaaaaaagcagaatcgaaataatatgggatcctgaatgtatcagatagactaaacaattgttactgaacgaaattctattatacctataatatttactattttaaaatatttagagatccaaaatgaattgaattgtattccatttgcatttgcgtgttatttgaactcaattttcattttcagagaggactaattaagactaagaattccattttttcaatattagactctgaaaataatctactcttaaacagaaggttgttcaaaaagtaacctttattctgataaaaaaaaaatagtatataatactaaatataagatataatatgagtgaagtatggtttaagtatgtaataatatcatcacataatgggttgggtgtgcagacgaatatgctctgggacggaaggattcgaacctccgaatagcgggaccaaaacccgttgccttaccacttggccacgccccatttctatttgacactaataaagactaatagtaattttgattgttcgtcaactcccaaatagaaaaaattattgatagaatttttctattatgtagatattgaattaaacggatgaatttattgatcattacatctaattcaattaagatattgtatgaaagtatgatttattctattcacttttaatttgagaattgaaggggttttgattgggcgagaaaaaatcaaagaaggtcttttggtatatctaatttcatttatttttataaaatttctttttattcagcttgccttatatcaataactcgccttattaataactcaatcaaaataaatacaattaccctcaagaataaaatgtttgttatgcttaacatatttagtttgatctgtatctgtcttaattctgccctttcttcaagtagttttttcatcgccaaattgcccgaggcttacgcttttttaaatccaatcgtggattttatgccagtaatccctcttctattttttctattagcttttgtttggcaagccgctgtaagttttcgctaagattttgaatactgtgctagacaaattcatcgtttatttgaaaacaaaaaaattatatcaatagatatgataagatcagactggtatagctgtaataaatcaggaacaccacatttcacttccttattctggtctttttccattgcaagacctcttgaagtcttccacaatgtctaattgtgggtatgaaagaaaatttttggtaatgaacaaaaactccactttgtattaaaaagtattttaaataacttttttgaaaattcttttctatttctagtctcaaaaagtactttagtttctttcttggtatcaaaataaaaatagaaaaaagtagggtatgcgatataaaatacaaatagagaatctattctcttttttcctaaaaaaaagaatcttggagattgtttaatgcttactctaaaactatttgtttacacggtagtaatattctttgtctctctattcatctttggattcctatctaatgatccggggcgtaatcctggacgtgaagaataaaaaataaagaagattttttgttttttttgcttgattttaaaaagttcttagtagggttttagctatttcccacttttaactataagaaaataactaaaaaaaagggaactcgcgaaaaattcgaaaggaaatacaaggttattgacgaaaacggaaagagagggattcgaaccctcggtacgaaaaattcatacaacggattagcaatccgacgctttagtccactcagccatctctcccccaattgaaaaaaaaaacatatatataataagaagggttttttcaagccttattttggcttatggaaccttatggaacatagtaattattcttattatatatatatttttttttttcaatatagaaatataactataaactatataaaaaaaacaatataaaaataagaattaagaaataaaatacaaaaaaatactatatctctttgattttttccaaagaaaccttattctttccgcggcttggcctggtcaatacctagctgggccgggcctcttttattccaaaaaatcaaatttaaattatttaatttattacatttgaaaacacaaatgcttattacttattattaatattaaataatattaaaacaatcataagatcataagaaagactgttttgattcctttgatatataatcacaatgtcatttcttattattttttttttttaaacactaaaattgctttgatttactttataatacaccaacacgttttttattatattgttttgattagatttctttttttttttaattaaagggactgtaaataaataaaaaattaagaaaaaaaaaaaagaaccataaattcttgaacaatgcatttttatgttacggcttaaatagttttgtcaagtcatatccatatccgtcaaaaaccgctagcaaaagacttggtttttagttagttaaatgagtctgcgtttcctaatctcaatctcattaagtcctcttggtaccgctctaattttcatgattcttttttgatcctattttttaattacacctgagttgcttgttcgacaaaaagtccctttatatataataatgggattgtagcgggtatagtttagtggtaaaagtgtgattcgttctattaaacccttatatagttaaggggtccctcggtttgatgaatattccattccgatcaaaaactttatctcgtaaaaaggatttaacccttttcctctcaatgaaaaattcgaggaaaaatatacattctcgtgatttgtatccaagagtcaattacaaattgaaaaattggattgtggaattacgaaacataattttaaaaaattggatcaatacttccaattgaatgagtatgagtaaggaatccatggataaagagagaaagtttatttctaaccgtaactaaatcttccatttttttttgttatagggaaaattgaagcaaaatagctattaaacaatgactttggtttactagagacatcgacaaattttttagctcggtagaaacaaaatgcttttcctaaggattctttaaaatagaaatagagaacgaagtaactagaaaaagtgttagaatcctcttcttttctataaggatcatctagaaagcaggtcgttttgaatgcattcatacagaaaagctgacgtagatgttataggttgaatttttttaatttcattcatatcttacatttggaaatttattcatattccataaaggagccgaatgaaatcaaagtttcacgttcggttttgaattagagacgttaaattaaaactgatgaatcaacgtcgactataacccctagccttccaagctaacgatgcgggttcgattcccgctacccgcttgtgcttacttgatttcttatctctattcattattcctaacaatctctctatttttatattagaaaaatttttctatttttaaactaaatattaaatacaaattcaaataatattgaattttttcatttgaataaaaatattcaaattaaagtataataaatactatttaggtataataaatactattagaaataaaatttttagaaaatattctaaaatttagaaaataatcgaatttaataattcgaatataattaatgtaattcattattaaaatgcaaattgaatacccaattcccgaccctgtcctatattcgttttttacgaacaagaaaaagaaaacaagaaaaagaaaaaataaaaattgaaatgaaaagcgtccattgtctaatggataggacagaggtcttctaaacctttagtataggttcaaatcctattggacgcaatttatttccatatgtattttatttgatatttctatatcaagaaagatgttttgaatggcttaaataaaagatccgcttcttatatacacttcttacttaatatagacagatttacggatttaaagagatccagttatttagacttgttcttgaagtagaaaacgctccatttgttcttgaatcgcttgtttcaaaagggcttctgcttcttcagtaaatgtcttggtagaagatatgatttcttggaattgaggtttattcgtttttaaataattccgtaactcaagcagaaatttccttacctggccaatttctaatgaatcaagataaccgttcgttccggtataaatagtgattatctgttcttccaccgaaagaggggctgattgagattgtttgagtaattcacgtaatcgttgacctcttgccaattgattctgagtagctttatcgagatcagaggcaaattgtgcaaaggcttctaattctgcgaattgtgccaattctaattttaatttgccggctacttgtttcatggctttaatttgagccgcggatcctactctggaaaccgaaatgcccacattaatagcagggcggattccagcattgaacagatcggcggataagaatatttgtccatctgtaatcgaaattacattagtaggaatataagctgaaacatctcccgattgggtctcaactattggtaaagcagtcatacttccttcacctaaactagaacttgatttagcagctctttccaaaaggcgtgaatgcaaataaaaaacatctccgggataagcttcgcggcccggtggtcttcgtaataaaagagacatttggcgataagcctgtgcttgtttggaggggtcgtcataaatgattgaagtgtgttgttcacggtacataaaaaattcagcaagagctgctcctgtgtaaggagcgaggtattgtaatgtggccggagaatccgccgtttcagctaccacaatagtgtattccatagctcccctttcctgtaaagcagtcaccacctgagccacagaagatgctttttgaccaatagctacataaacgcatattacattttgcccttgttggttgagaatcgtatctgtagctactgctgttttcccagtctgtctgtccccaataattaattctcgctgaccacgtcctataggtatcatagaatcaatagcaataagtcctgtttgaagaggctcatatacggaacgtctcgaaataatacccggagcgggagattcaattaaacgagattcagaagttgaaatttcacctcgaccatcaataggtttagccagcgcatttacaacacgacccaaaaaagcctcacttaccggtatctgagcaattcgtcctgttgcttttacagaactcccttcttgtatcagcaaaccgtcacccattaatacaacaccgacattgcttgattccaaattcagagcaatgcctatggtaccctcttcaaattctactaattcacctgccattacttcatcaagaccataaatacgagcaataccatcgcctacttgaagtacggtaccggtatttaaaatctttacttctctattatattgttcaatacgttcacggataatattactaatttcatcggctcggatggttaccatgaatatttcttaattcttttttttctttcaaacaaaaaaaaataatccttgcagtagaaggactaatccgttatttctttcatcattccaaacatgtcaatattagtactgatggtacgtaaatgtaactcgttgttcaaacaactattcagagttcctagagctccttgtaaggcttgttggaaaacctgttgtcgaacttggttaatcgctctttgttgttcaaaacgaatggtttcatttttgtaattttttaattgttccaaagtcttagaagttgaattaatcaaattcaatttttctcgttctatctcagaatatccattcactcgaaacagatccgcttccttttctacttttagtaagcgggtccgggctttttccagttgttctagggccctcccgcgtagttcttctgaatttcgaatagtcttcaagatcttctgttttcgattatctaataaatcacttaatgaaagtagattatctttccattcatttcaaaacttccacgatcccttcccgaaccaaacatgaatctttcgattcatttggctctcacgctcaattacttctgatacttatcagaattcccaatatcttttttttaatgtaatgagcctgtcctctcttctctagtcatattcgaatataaaaatattgaaactgctcactaatccaataaaaaaaatattcggaggactcttctgaccaaacaaataattgtcagcaaagttgtttcttttttttcctcaaatccaaagaattcctcttactttatacataggtcatccacttagcattggataaaaaagataaaaaaagggtgttgaaatacacatttttttatttcattttttcaatcaaacaaaagaaaaggtttaaatccgttttttatcgacatgagtgttttatatcgaaaaaaattccaactcttcattttgaaaccatttctggattaacatggtagtagaaagagtaccatgcttgtatctggacttcaaacggtgtagctttaaccctgttaatggtcccacattattggttgatagagaatcaaagtagatttaccaatgaatcacgaaatgctatagttcttaaatatgatttcttaatttattcagaagtaattcgtggaatcatgcaccctttctttcctacttaataccaaaaaataaagtgcagttggttggatccaacctattcttgaaataaacaactcgcacacactccctttccaaaaaaaatcaatacgccaagcactacacttagatttattggatttgttgctaaaatatcggtattaaacccgaaacttccggcggatggccaataacccaaggaaaggaaaggatcggttatatttttcatatggtctcctctttcttatagaaagaataattattagatagaataattatctctctttttttttatttattctattatttttatttttaaaaataccactaaataaagaaataataaatagatatagatttttctttgtaagattaaacaaaaggattcgcaaataaaagtgctaatgctacaaccagtccataaattgttaaagcttccataaaagccagactaagcaataaagtacctcgtatttttccctctgcctctggttgtctcgcaatcccttccacagcttgtcccgctgcagtaccttgaccaactcctggtccaatagaagcaagccctacggccaatccagcagcaataacggaagcggcagaaataattggattcatgataagtccctcgcaccaaaacaaaaaaataaagaaatagttaatgatacaatcaaccaatgaattatgacttacttatcccatcgctcaaatttattcagtttaaagtaactaagaaccctgaattgaaataaaataaaaatattcgtgaattatcagaactacttcaatatctctttttttttttagttcttatccacgtaattttgtgaatccgtaccactcttgttcttccatttctttcttttttcttcggaatcattctttgaattctttgttctttaattcgtgatttcacttcattcaatatttaaatcaaaattacagacgaaagagaaagactttcgtcggaattcctagataacactagtagtccaaagtagtccaaataagatatatttttagttcatatatacctagttaatatataatattacatatacatgtttttcccctataacgtaaaccaactattcgtttcttagattcattcggattctagaatcattctttgaaacatccacaaaaattgtcttatagcgagtagattacatacacctagttcgatccccccctccttcgctaataaatcccctttgtttcttttttttttttttattccttttttgtaaactcttatcttccctaagcctaagtggattcccttgcgacgcgtatgcattgtgtcaggctaagctaaaaaaagactatggcgaaaactagtcaatgatgaccttccatggattctcctatataagccgcagctaaagttgcaaaaataagagcttgaataccacttgtaaataatcccaggaacatgacaggtataggaaccactaaaggtactaaagaaacaagaacaacaactactaattcatcagctaatatatttccgaaaagtcgaaaactaagtgataagggttttgtgaaatcttctaagatgttaatgggtaaaaggattggagttggttgaatgtatttaccaaaataccccaatccttttttgctaaggcccgcatagaaatatgctactgacgtgagtaaagctaaagcaacggtagtatttatatcatttgtgggtgcggctaactcaccatgaggtaactctatgattttccaaggtaaaagagcccctgaccaattcgaaacaaaaataaataaaaacagagttccaataaatggaacccatgggccatattcttctccaatctgagttttgctcacgtctcgaatgaattcaagaacatattcaaaaaaattctgaccgtctgtaggaatagtttgtggattacgaacagctagaatggccgaacctaataagatagcaattacaacccaagaagtaataagtacttgggcatggacttgaaaacctcctatttgccaataaaaatgctggcctacttccacgccggatatatcgtataacacttttagtgtgttgatggaacataataaaaaattcatattaccctctgaaagaaatcgaactttaaaagaaattattttgattcacctagctctttttcgactcgcccacaggaattgtctattttgaatatcaactaatcacatcaaagcctcagttatttttatctcttttgtgcgattcaggatatagtaaccggttcaataaatctatattatatggagttcccaaaataatttccttatttccttatcttattattaatcaagaatttcgtatatagctagaacgaccctcacaaatcgcaaatactaatttgttaagaattaatcggattgaagctatagcgtcatcattcgctggaatcgaaatatctgctaaatccgggtcacaatttgtatcgattaaacaaatcgttggaattcccaaagtgatacattctcgaagagccgtatattcttcttgctgatcaacaattattacaatatcaggtaaccccgtcatatatttaatcccgcccaaatatgtttgcaaatgagatagttgtctcttcaacacagccgcatctcttttcggaagacggttgagtctgcccgtcttttgttccgttctcaagtctctgaacttatgaagcctcgtttctgtagtataccaattcgttaacataccaccaagccattttttattaacataatgacaccgagcctttattgctgccccggctactgaatcagctgctttatttttggtaccaacaattaagaattgttttcccctacttgctgcatcaaaaactaaatcacaagcttctgataaaaaccgagctgttctagtaagatttataatatgaatacctttacgctttgcagatatataaggtgccattctaggattccatttcttagtaccatgaccaaaatgtactcctgcttccatcatctcttccaaattgatgttccaatatcttcttgtcatttctccccacacttcttctctttttttttttcaaa

SEQ ID NO: 40623 - DNA, 1986 bp, Cannabis sativa
  modified_base (506)..(517): a, c, t, g, unknown or other
tgatcagcgctcccactcaattgaactaccatattcccaaaatataaatacctgccagaaccattggttagggtccacgaacaacttgaagaacatagacctaagatcaaccattgatattgacttagaaagacataacggtaagtttatgatatcttatccaagtttaatattggtcccttctaatgtatataccacacattcgatactgataaactttgccaatgccctagaaaggacataacacttattcaaggtgtaagtataccatatcggcgattatcatgtcaatctaaatccagtgaactaacaaatcatgggaattaaacttttgaacatataatcatgattatattctactgtgctgacgatactataatcatgaacaaatatatatttatgtatgttctggacttaatagaatttaatcattaatataataatgaaataaatcatgtacaccatggaacatgaaagcgatttctgatcttatattaattagtaannnnnnnnnnnntgaaatagattttatttagggcacaaaactcaacaaaaatgataatagtgatagtgtggtggtcatggtatttgtggtggtggtgataataatagtggatggtttggtgccatagttggagaagaacgaaaaagaaagaagacgataaagaaaaaaaatatttatttattttaaaatttatttattatttaaatgattttgtaaattgttaatttcttttataatgttttaattattaatattatgtgtactacttaaaatttgccacatgtacacttctgtgtacgtgtgtacacgtggtcaatttactgtgacatttaactgaagtttttagacggaatggtagagacaaaaatagaagtgtagtttatgtagttttgttttgaaaagattaatttttatggttaagagtcacaaatcgtataattcaagtgattttaccattaatatcccttattactaacaccatgatgtgctaaactggtgtaatggaatacgtatgaatcatttggcttgtcgagatctatattcatattaatatatagaccatgttatatagcgtagttgtaggaattgtctttaatgacattcttttttgtttgggtcaaggatttgaagatcaccacaatccctctcgaaagggtttaaaggcttggctattctgaaggctagcttagttgtgggtagtgtcatctgtgtaatgagaatacttgaggtactaccaattatccaatcaaggtaagataagatatcatgctcctatagctaagaagtggtctccaccaatatgaccaagagggtggaaaaagaatacgaatgattttttttaagcaaatatatgtatataaaaagagtagtgttaggagacataaattacacaatttttaccaaagacgtgagattaattaataaataaaattgtactgtatatacgggtatggatatggatcaatcgttatttataaatatatactagcacagttctctatactcaattcaattgcatgttactatatcttactattataaaagtgtgataatggtgtgatattactataccacttttgccccttacaaacatatataattacattgatattaataaagtcaaagtataaaataatatgatatatatagtcaaatctcatataatattgtgataattctaactcttactacataattcatattagtaatatgaatatgatagtagagaagcaaagtttaatattttgtcttttactatctcatttaccttttttagcacttaatcataataataaaaaaaaaactttctaattttgttttattattattattactactcacctcaataaattaactaaatctcttttaattggaaattatattaatttaactttattgatattaataaagtaaagtataaaataatgtgatatataatcaaatctcatataatattttgataattctaactcttactacat

SEQ ID NO: 40624 - DNA, 1349 bp, Cannabis sativa
  modified_base (607)..(607): a, c, t, g, unknown or other
aaaaaaagccaaaaacgttaaggctgtatattgtattattattactataatttgagttttatgaagttatttttgtatttttaatagaattaaaattaaaaaaaaagagagaattaattaaataaagagagaaaagagaaaaatagttttagaacaattttatatgaattaaaaattaaaaaaatgagaaaattaaagagagaaaaaaaaatagctttaaagcaattttaaagtactatgtcaccgctttatgtctctgttttatatatagatatatatttgtatatatattgattgatagtttatgtatgtatataaaagaaatttacgattaattatatttgatttaagttttaatatttgtttggaatttattttttattttctaacttttttttaaaatattttatatttttataaaaaattaaaataatagtaaaatatcaatttgtagatttatattttttttataaaaaaattaaaaatagtaaaatatcaatttgttgatttatgttttaataaaatattaaaattgaaagaattaagtaaagaagagaaaatagtttttgattgattttaaaatgtcatgtcaccgtctcatacttcncctttatatatatattgattgatgattagtgaatatgtactaaaaaattattattatttataattattcacactattttaaaactagtaaatatttaaatatttttaatttgaatgtaataaaattaacaagaaaatctaaagtcaaaattgttttattttttattaaaaaagtgttttgtactctttttatcttcttgtgtatcatttatcattttttgcaatcaccatttctctcataaaattatattattgttttattttttttccctttactgcaaaaaaatgtggttttttgttaataattttgtttgtgtttctttctcctcaaatagtggaggcataactttacgatgtcttgtgaaagaataaagagtaatttgcggcataaccttcttaagtggccaagtttttgtaactaacccccaattctaaaattttagtggtaaaacctcctaaacccaagtcttgttagcacttagccatttccatccatttttggctgttaactaccatggtgaaatgtccacgtgtacacagtgtacgcgtgacacaattttattagtccacgtaaataaatatttaaaaaatttaaaaaaattaattattttaaaaataaaaaataaaaattttctttttctttaaaaattaaaaaactaaaaaattaaaaaaataattttaaaaaataaaaattaaaaaaaaaacctaatctcctctcacattctcttctctctctctctctc

SEQ ID NO: 40625 - DNA, 1832 bp, Cannabis sativa
  modified_base (1622)..(1627): a, c, t, g, unknown or other
aaaaaattatgagtgcaataaaatattttaatattctttttggcattgtaatttgaattttttattttttttacaagcgatcttaaataattacaaacttaccctaataaaaaataaaatagaataaaaattccctttgatataccaaaacaaatagtggtatgctaacggccatttaagaagtgtattaattaataaaatatttataaatttaatacatgttacataaattgttgagttattctatattatatcttctaaaatgattattttggtacacctttaatttgtttttgcatccaagaaatttgtttagttcaaattattttcatgattatgtaggttgtatttatttaaaatcttttataaattcgtaaaaaaatctgaattgtttacagtgccgaaaataaggttcaaaaaatttattgtacacgtaactattttttctttatgtggtaagtaattgtttaaactttattttcggcatcgtaaattattcagaattttctaaaaagttacatgcagtacgagaaaactacaaaatacgcagtcatgaaaaaaaaaatagattaaaatacttttttagatgtcaaaacaaataaaaaatgtattgaaagaattttttagctaggagttcactatatatttttccaaataaaaattaatagttggcctcctactaattaagtcctggttccgcccctgactatgatactatacttgggtttattttttttttttcaaattttgaaacaaatttaatttttattttctattgagttatgctattttttttattagtatatttttaactttaaggcaaatttatattttattttctatgaattatgaaggaataataaatatttgtgagaatattgatttaatttaaatttaaaagtttttttaattattttaaattattaatttttttttttgaaaataaaatgaaactttattaacaaacttctttcatgattacatcactaatattagaagtaaatttatcactcctaatgacacaatcagcgattatttaaatttttttatttcgtcttaatagataattaatgagtccctcataaccgatagatattctcctactcgaatctactgtctattagattgagatggaatggggatgaaagtataaataagttgtatttgggagtgaagattgcatttttttatacattaaccgcgtaatttccatctctaagtaggaaagtgttgggtaaagttaggggtggcaaaacatatcatcgtgtcgtgttcgtgtcatattttatgtaacccgcttttatatttcgtgtcaagcgtgtcgacccgtttttgacttgtgtctaattatctcaaccctaacccgatccgtaaaaaatcgtgtcgtgttcgtgtcgacccactatgacccgttttgctattattgtagctagaactgtagagaaaaataataaatttaagctccattagaaaatttatgtacatttatgtatatataatttgttatatataaaataaaaattaaaaaaatcaaaatatttttaatttcatgttaaataaaattaaatttaattttttttaacttaatattgaattactaaatatatatttttatataattnnnnnnttattaataattttttattttattatattaaaaaaaatcgtgtcaaacgtgtcacattcgtgttaagcgggtcgtgtcgtatttgatttgtttttattttgtgtcaagtcgtgtttgtaatatccagtttaaaatagtatttaatttttcgtttggatattaattgtgcgaggataattaattcatttatttgtgttgttagtga

SEQ ID NO: 40626 - DNA, 4119 bp, Cannabis sativa
  modified_base (44)..(62): a, c, t, g, unknown or other
  modified_base (172)..(173): a, c, t, g, unknown or other
  modified_base (268)..(268): a, c, t, g, unknown or other
  modified_base (503)..(503): a, c, t, g, unknown or other
  modified_base (4079)..(4092): a, c, t, g, unknown or other
taaatgttatttctgatctacattaataagtaaatctgattatnnnnnnnnnnnnnnnnnnnagggcataaaacccaacataagataacccataaacatgaagactacatgtaaacataaatgacttctaatattctattgataacaaatcaaattatattgaaatgggttnnatttagggcataaaatcccaaaaacatccacttgcactaacataaaacaagaagtgcattctaacaaatccattgtcttgatatccagatcaagngtagtgtatttgactaaacccaaattacaagaactgtaagcctatggtaagcaactgctttctcaactattacttcttttgtgttcataaaacattatacaatatcatttttctatatgcattactcctctacggatactgaattctttattgcttattaagtgtatttgaataaacagaagacatgtccctaattctatccaaaatggaatagagataaaaatagttaagaacntttttcagtttgaataactttccagtgcttttcaaaataactaagttatttagcttcactggtggaactaaattattatagatgggtttttacatccttctacaataatcccttcacccagagtaaccaccatctctaactaagttctgagttggtgtagatataaggattctaatatacacccctatcatttaacatataggtcactttcataattctttcttgattgtctcttaatattccttatttgattacatcttagatggcccccactcaatagtcggagtctggttaaattcgtacacaagtgtagacttaacctcttactattggtgcttaggaacctcttgttgtgacattttatcttagtctgaaacaataagtttcttccagaccaagtcatgaacatagtattctagtataaacattaatgtaaaatacttgcttaagattaagtaatcaatagaaataccataaaataattcatatggtatttctatcttatccttataattttgataagtcatttctatccatatgaatggttagatttactttctttgttttattctaaagttcctatcatgatcataatatagtaagctatcactagtgtcatccaaataataatgggctagagtttaaaaattctcccactaagataaggtactgtgatactatgtcgaagaacttcattagtatcaatctctattactacagtaacatgttaaatggaacacttataggacgaagaataagttctaatggtttgctagttcgtttattatattatatccatgtccaatcaaaatatgtgtgccatagagattctgtggtgtattgagtatagcctagagttcaaagttaaaaggttttgaactacatatatccataacttcttccacccataagtattatagagatcttatggagttatgaatatagtctagagttcaaaagatgtaaaagatctttgcactgcatatattgtttcttaacttcttccacccctatcagatcaaaagatctttatattaaacaaaatcttaataattgcttaagaaatgacaattattcaaaaacattgaatttaaattgtaagtttatttggtattatctcttttcagaaaataatataccatggactttgtatcaataataaaacacaaaacacataaaacatgataaacatataaatacaatacggtattggcatacaagttaaagtaaatatgaagctcaattttataaaagcaattcataatgaaatcctcttaaagagaaaaaatttattaatattctcaaaaatgttctaataaattgtctgcaaaatatgaaatagagaataaaatctcaaactaataattgaaactaaattgttcactaactaaaaacaattaattcaaaaattaaagaaaagacgagctttaatttcaacttggacaatctccacccttctatccaaccatctgactcaacacggtaggatagcaatccaagtttaagcagctagagttgaaataagaagaaaataaacatggttagtagatcaagaattaataacccaaggggataataattctctaaaacacatgaatttataataaagttagaaataccttatttctttgccaaaaacttaggacactggagtttttagtggccttttttgttgcaatagatgcacttttctttttcatttgacttggaattagcaacctttttcttattagctgtgttaacaactttaagaggcttcttgctattcttccattcattctttttgctgggttttgaagtagaggcaatattttcctcaagtttggtcgtaccattagtagcattactagaactaggagctttgcttcctcttttatgtggatctctaatcaaattttcaatgtctgaaggttgttgattaactcatggaagtcaaaagtcaacttgttcatggcataatttgatgtaaagggcagaaaagctagagtcaaactatttaagatcaaactcacttaagtttcatgatctataatagctcaatgattctcaacttcctagaagtaacttgccatttggagtaggtgatcactcaagtttgatgaggtttcatccgtgcattgataaaattcttggtcgcctcaaaacgagcttgatctgacgccatcccaaacagtttagtcaactggttcatgacctctacagccatgagagtattagcaaaccttgtcttcaaggtgtcaaccatgctagacagcataaagtatcaagctttgttgttagcattctgccaatgctcaaacttttccttaattgccttggttgcattctcacctggctgctcaggagcttctttagtaaacacaaacagtgcactttcacttatgagagcaatattaatgttctctttccatttgacaaagttagctccaaagagcttgttgtcagttaacagtgagacaatggggttgttcatagtcatattgggtactacaaatatcaataaatagaaatcaagtaaggttaaatacaaaatcataaacattcaaaaattattaagcacttagcaagtaggaatgactagtcaaaatacaaaaacaaacaatcctaaataatttacaaggtttcaaacaaattgatatagtgctgcgtattaggcgagagtcaaagatattattcattgaatatagcaatcaactcatctaaaatgaacaccattctagcaaccttatactcgatcaaaaagagaatcctacgttgcttcgttttagtcgagagtcaaggtaattcttatttgatgagcttctaccattgtttcatactttgtaagtcctactcttagtagccactatttagatggacgttactaagaataaaacacttacaataatacttttctctcaagattcaacggtgttaaattgctaatgaatgtccatctattggggatgaatctcactaaaataagaactatgtagaaccaacaatggagatcgaatatccttataataaagctcataatttaaagctccttatagctggctaatggctacacaatgaggggtgttgctgagccagagatccctggctggcccccatgccgctggttactgagatctggctgttcttgtgatttgacctttttggaaaggtttgtcctccctctggtaggggaagatctgtcctagttcctgaggaacttggtggcagtcctccttgaagttgatccctaaggagatcctcgcctcttctatcggttctctaattgaattgtcttattagatcgctggcctctcagtttcagtaatctaattttgctgagcaaaaaacatcgcaatcagtagcacgtggttcttcagttacgcttccacggcctacaactccctgagtctatccaactcaagatcttgtcctaggtctaggtggggcttgccaattattggctcgcccactcccgggcctgtctctccagcgtagaactggagttgagccagttgttattccagggggttctctatttgttttagtatccgaaataattttttagtctaattttttctcatggtcatgtaaattatnnnnnnnnnnnnnntcctgcaaaattttaaaaaattcggaa

SEQ ID NO: 40627 - DNA, 1289 bp, Cannabis sativa
gaacgtgcaaggctacgtgagttgagattgagatgtgccccttcagaaattgattggcaaaatgctcaacaattatgtgataagttagaggtgtttcatgaagtgacaaagttattttcttaacaaagtaccctactcccaatattttttccccaaaaatatgtgaaattaagacaaacattgattcatggatgtcatcagatgtgccttttattaaggacatggtaattcaaattatgtctaagtttcaaaaatattggagaatgattcacgggcttatgtgtgtggcagctttagacccgaggtacaagcttatgttgctcgaatattatttccctgcaatctatggagatgagcaatatgtaactgaaattacgaatgttcgttagctttgttgcgagttactggaggagtacgggtctaagtttcctcatttgagagagagaagagtttaggtagaaaatatatcaccatcttcttcgacacggcgaatggatgccctttcacactttgacagatttgttagagcttcatatcgagtagagaatgtgatgtctgaactagatttagatttggaggagaacttagtacctaggactgaagagttatttgatatatgtaattattggaaggtggcaggcctcaaataccttttgttgagtatgattgccaaagatgtacttgttgtgcttgttagctttgttgcttcacaatctacattcaaaacagtaatggtggtagacacatgagagctcatcgatcgaaacttcatccttctacattagaagcattagtgtgcacacagaattgattgatgactgacaaaataggtaaatatcattaaataaatatttatatatatgtgtatatgtttcataattagtattagttttattttattatttttttatagtaacaataaatgatgaagatgttgatgttgatatccaccaatggtaactagtttagtttttgtaatttatcaaataaattatcattaattattaataatacttttgtttattttctttttaggagccttattttgtttttgatcttgatgatatcttgatgattagaatatatgttattttattgttagtttttattattaatatactttgttaatagtaatatgagtgtaattgatatttcaacttcaattcaactcaactcaaattagaaatgggaatttgtttagaacttctttttttttttttgggtattatttagttttaatatgaacatctttagaaatttatgtcccttaaaatctcgtttagaaattt

SEQ ID NO: 40628 - DNA, 1666 bp, Cannabis sativa
gcaacataccataccccacccatgcatcaagttgggaagggaaatatcatttcattttcttttcactgatttggcgatactttcatgtctatctgaaattatgcattgctcttcccgttccccatatgtttgtttgagtttatccatgaagtattgccatgacgcatcattttctgaatcgactattgcaaaagctagtggaaatatatgtctgtcagcatcttgtgcattagcaactataagagtacctccatatgcattcttcaaaaaagttgcatccacaactattattggtgtgcagtgattccagcctttgatagaagatgctaatgcaaagaaacagtatttgaatctcccctcatcatcttgtacaagatctgttattgttcctacaaatattacacattatgatatagttaatttatgaaacaggtactgttttgttactaattgtttatataagtttatttgtgtacctgggttgcatttttgaatcatgtataggaagccagggatttcattgtatgaatcatatgggctaccctttaacgtcgaaagtagctttttcttttgctctccatgctttgtggtaggagatggagatactataatcttctgctatgtcttcaacaatgtcatttggtttgtagtttcttttggggtttatgatccttcgtttgatgcaatcagcaattatgtcacttgttgcttgaggatggtcttcataaatgatttctagggagcatgtatgagtgtcattgagttttctgaccttaaacatgtcggttttgccatgttttgatgctaggaagtaccatttgcagttactgtcaacacatattaggctgtagtccttggatgatgacctttttaccttgtattgttgattcatttttatggcatagaggcttatggcgagtttcattgtgtctttgtctttataaagctgtccaatttgtatgctttcaacccttggatcagtaattatgtttgatgtgttctcccagcttgtgttggttgctttttcaacttggtctgttatatattctgcaattgtttgtgcaagttgagttgttgtaggtaactcttctgtttcttgtacatacggttcagcattgctgtctatttgagttgagtggggaatgcatgataattgttggtctgatagactttggttggggtctgaagacactgaaaagttaatgagtaatgggtatgcagcctcatcatcattttttttccttatttgctcatagaatctgcagccactgtcatccttgatcttcattggtggtatagttggtcgtatttgaaactggatttccatactgattagtgtcttgttgttcaagtctaactcactacaaattttggtttgtaggtcattgtatgagaaactttttggtaatagtatccctgtgacttcataatcagtgtatatgcatttatccacaattttaccattgtagtaaagcaccaatgtcatcaattccatttgtctgagattaacaatgtaaagattttcagaaaaaggaatagaacatgtctagttgaatgtgcataatgaggtataaatgtaatattaacttttctgttgaaaaattacaaatgtatgttaggataatcctttaattacctctgttttatagagaaattacctctgttt

SEQ ID NO: 40629 - DNA, 1906 bp, Cannabis sativa
cctatttctctctctaaatttatttattaaaaaaaaaactaaaaagagatataaaagggatatgttaaatttaattaattatttatggtaataaataagcacaatactctagaaaaatattttttttgagaaaaagttaatgctgaattaataaaaaaatttaaataaaaaagaaagaaataaagaaaaaagaaagaaaaacaggtgatctcatacgtgtatatacactttgactctctctcctttgcattcaaattgcaacaaataaaccctaatttttttcacagctatctctctttctcgcctctctctctctctccttaaaataaatttctttcagccaccagattcaccattctccctttcctgagcggcatcgacctctgtccattcaccataaccgaagctccaactccgcccctcatcgtcgattgtagctccaccgtcgttgacgtcgatcctcctcgcgcgcccaactcctcctccgtctacaagcatagccaagcagtccaccaattcttcaatatttctcttgcccgatctccctctctctctcttgctcatctcccactctaacttttagtcttaggtctaatggtttcttctttcttaggtgacttcaagattgtattgagaaactttcagggtttgggcgcacggaaggaggatcgaaaactgatataggcagtggttttaagtttgtagacgtggtgggaacttctaacagggatttactgaatctgaaatttgttgtttttccttggattttattttttaaatcagtttttagggttagttttttattttgtgttgatatatgttaatttttatgggattagctagatctttaatttgtattgcatttgtttatctttgaaattttactgaattttttatttatgatgaatgaaattgatgtttataccttacaataattaatttagaatttgaaatttttatttagttattttgaaattttgcctcaataacagaaataagcaaagaaaagaaaattattaatattagtacaataaaaataaataaataaatatttataaaaataaaaaaataaaactctatattaaaaaaattattaaaaaaatcaataggtatagtggcactttttgtgtgtcactatatctccaaaaatattaataaaaaaataaaaataaataaaaaaaaggatatagtgacacttcatgtgtgtggctgttaccttttcagtctgacaaaacctgactctatacgtctatagtgacgcgcaaaaaatgaatgtaaaagggttcagtgacacgtttgaagtgtcactaaaaactgtctttccagtcaccctcattagtgacgcgcgttgaagtgtcactatataattttagagttacttaaggtgtgtcactaaaacccaattttctagtagtgctagctaaatactattttagtcaaactactacaatttacccttttagtgacactatatagtgacgcacagaaaagtgcgtgtcactaaagagttgagagtgatttttagtgacatgcataattagactctaaacattcaatgttagcctcttgtaacgtgtgtcactaaaaatatagagtgtcactaaagagtaaaacaatttttttttaatttttattaatataaaaaatattggcatatagtgacgcgccaggcgtgaatggataaatatatccccacacatctggcgtgtcactatatcataacttaattttttatataaaaaagtacagttgtaattaataaataaataaataaaataaaaaatatattaataatggtaaatcatggttattcacgccaccctcttttctaaatcaattacaattctcaattcattaaaacattatcacccaacataaaaaaattaaataataaatataaaataaa

SEQ ID NO: 40630 - DNA, 2558 bp, Cannabis sativa
  modified_base (929)..(938): a, c, t, g, unknown or other
  modified_base (2130)..(2130): a, c, t, g, unknown or other
tttaatctcaacaccttgatatccggatgaagtgtagtatgtagtattctctttgtaataggatttggcaaggtgtattaattacaacctttctctaccattacatatccttaatcacaaaatcttgatattgtgaaattcctctctatatgtctattactcaaggatattggattctttactttttggcaactacttttgtgttactcatgaagtaacactagtagttaataaattattggtacaatgccaaaaactttgtagaactttccacagattgaataagtatctctcctataactttaacattcagtctcactagtagagttagagactcagatagatttttaaacttctccaatatcactactccagcccaagagtaatcaccatctcatcagtagactttctagcattaaggcaagtctaaaaacttgatttggtgtagtctaagagtattaaaataccacccttatcgactaacatatagttcctctttttttttatcatatgatttacttgattatcttccaaagttcctttcctagattaatatgatacaaactcattactcccactcaacagcatgtgtctggtctaacacatagcaaagcatatttgagacctctcactaattgatcttaaggaattcttttctttggcccttatcttttttggaatagttaaaacttttccatagataaataaaatctatgtctagaagtctaaaagcttcctatagattgccattagaaaaacaaatgcttcaacatcttactaaagttagttgctcgcactagagtaattaaactacctggcataccagaacccacaagtttagataatctcaaacctatataatactaggatcaggaagtttcgttaagtccattgaatatacataattttcaaaatttcctttcttgtcnnnnnnnnnnaaaacttttggttattccatatgaataatggtttaaaccacagttctcttggcttttcttcttagttccttattttgactatccattacttgtttaaactaaaaatggattttcatcacaagtgtctttgaagtcataacagggtgagttccttgaaaccctcccactacgaaaaggtactgtgactttccatctaagaacactaatggtattgtcctcatcggttatgtcaatacaatagaggcagtgggaccatcttatataaaataagatgatagaacactttggaatagaaaaaaatatctcctctacttttctactttcagatttagtcatattcttaaaaagtagtatttgttaaaacaaacactttcttagcttaatgaccataggattgtccacccctaatcacttaaaatagctatcaaacatgtaaacctaagttaatacttctagcttttcttaaggtcacaatcaggatatccatgaatctagaaatgcataaccattccatcattctgaaattttccattcactagggtactccgaaaacacttaggcaactgttagtaactaatcataacctttcactttcatcaatatgcaatccaaatttctagggaggtaagtttggatacaattcaaaattcaacttaatgaccattgaactgtatatctaggaaatatttctccacccctatcagttcgtaagatctttagccacttaccttaatagtttttcaccattgctagaaattcatgaaatttctcaaacatttcaaatttctttgcccaaggtaaagtctagagtggtcgttttaaggaatttaataataactcatacccaccgctgaatgtacatccatatcttcgaatatgaatgatcttactttcaagtggatataggcgtattgactctttgcagagaatgatcttattaagaaacactatgaacgagataggcataatataatggttttggtcttttaatgacttaggtctagttacaataaagagttcttagaatagtccaagtagaacctggtcatagaatactaaactcaaattccatgcattaacatattgtttgaatccattgacaaaaaatggatattaataacttgtgaaagtcatactgtattgatcaatgtattctggaaactgaaattaaaaatttctatttggaatctanaatttaaagtcaaaaacttaaatttataccaaatatacatgagtaattatcctagcttggacctccactaataatctaactctaagtttaggttgtctttagtaagtatatacaagtaggagatttctagattgaggatttatattatttcgagatcaaatgtcatgaatatagtcatttgcgccattcaatttcatagaagaaaatagaatgacatcataagtagatgatttataaactattcctccaatgatatactatctaagaaaattctaaatgaaaagctaagaggaaaaataaaggataattttgattagaataagaatctaacaatgtgatagtaggcgagagtcaaagttattcttattttataaatatcttcattgtttcatattgtaaacactaagctatgttgtcatctttagatg

SEQ ID NO: 40631 - DNA, 1885 bp, Cannabis sativa
attgaaattacttttggttaatgataattgttatttctcctttcttgattgtgaatttatgcatattcgtgtttaattacatcactactaaaaaattggctttcagtgacactctttagtgacacgctcattcgcgcgagtcactaaaaggttaggagtaaattttagtgacatgcacagttagtctctaaaattcgatgttagtgtcttataatttgggtcactaaaaatgtgaagtatcactaaagactaatacccattattaattttatgaatttttttattaaaaatattcatcaatagagtcactccaagagagattggcaaaatatgtaccaacacgcattgcgcgtaagccacttcacactggtacagtggcaatttatttatatttttaaaataatatttatttattcatttatattaaattaaagggaaagaaaataaaaataaaaaaataataattttagttttagggtcggtggttatttttatgggttttgttattatataaataatataattaaatcaaacataatataataaataataaataaataagattaagatatgaaaccctaaacatctcattctctctcaccctctcttactgcctcctttctctctctgaaaatatctcagctctcaacgtgaacggtcgttccttcctctccctctatctcttcgtcttctctttcgtcttctccttctgcgcctctattgaccccagttgaacggtgaacgacgaatggcaaacggcgaacgacgaacaacaaaaaccaaatatatagtttcgctctctgctttttgctctcgtgtagcgattaatctttgccggacatcgcaatggtaattttctttgccgttttcgtttgcttcaagaaaatctaatatctttaattattctccagaaatttatgattccatttttttgttttatttttgatttgcaattgcaggcgccgaagaaggaaaagactggtccaccgtcatccaaacccgctaagtcagggggaggcaagcagaaaaagaaggtattgttatggttttaaggtttgaagcttttcttagctgattattgggcttagtgcttctggcttgctaggatctagtgtttaagttgttgcatatattctgcttgaagtgtattatgccaataaatgcctaattttattaaatgttagattcattaagattgtagcagattgttaaactagaaatttttttttttcaaacatctaagcgagtctttgatttagggattttttttaagtgacttaaaaatgaatgttttgagggaatgatcaagcataggtaaacttatcagaataagttatcatcttgatcatcttcctttcttcttctcattttgtgtttgtttgtttttttttttggttaaaatttatatttatacccattgtgattaactcatatttttctttgcaaactgacagtgatggtggcgatttaaggtggttctggccgagattgaagagccattggatttgagaattttgtttgtttttttttgttgtattattcataccaatttctaagtttgtagtcatattttttttttgctgttattgtattttgtttatgtatttttttttaataacttattttgtgttactgctattaattttaatataattatttttgtgtattcttttggttattaatttagatgtatttatattattttaataaaatctgtatgtatttatataatttgtaatttaaattgataattatactcatttaaatttttaatacagatttgtattaaattaaattgaatattatttttttttaaaaaaaaatagttaatatagtgacacttattgtatgtcatatctcgaaaattattaatcaaaaagaaaaa

SEQ ID NO: 40632 - DNA, 1360 bp, Cannabis sativa
aatcgacaacctgaatttttcgggaatcccagctgcaaaaattggttacccggttttctccaaaaaacccaaaaaaattcaaagcttcaccaaatcgattccaaactttaccaaactctccagatctgcatattatcccccaataaagtattttcgagcaacaaaacaacaacctaagcttagaattcaaaatcaccattaaagctcctagtttgagttctaaaactcaaaacttagttaaatctcctaatagccaccaattcaagcttaaatcaatataatctaacataaataaacctctgaaaatagtatcaaacaacaacagcaacaacagcacctaatacccaaaatcattcaatttcacaaacttgaaattcaagaaactagaaggcaaagtgttgggaacttacctagagcttgagatcacttagaattttctggaatttgcttgtaattgagaaagaaatccagaaccctagctggttctatacggctcgagcaagagcgagtttagagagagagagagttctaatcttttctagcttgtatttactaaataataagttaatggaaaatggtttgttttattgcaaaatatcaacttattagtcattaaaattcaagttaaataaacttaacataatctcacaaaatgacaaaccataaatttgcaaagtgaccattttgcccctcccacactaaaatcataaaagttcacttaggggtattttggacaactctaaaatcttgcctattcccgacattctcaatgtccaattatactaccccgctataccagaaatactaagatgtgattctaatagctaaacaccgcattctaatgttgccggcacaaaacatacaaaattatgaaattctatatataacatataaattgcattttaaattcaaataaattttcataattaaataattcacagcaaataaacaagttctatataattaaaagccatataattatctgctaatttcaaaattaaagctaagcagtctttacaattatcccccctcaaaaggatttcgtattcaaaatctaacctgaacaactctagatattgagcgcgcatgtcgggttctaactcccaggtggcttcctccaccttgccatttctctaaagtactttgaccaaagctatggttatgttccgaagaaccttatccttttcattgaactggctattcttcatatgacaagtctagttgcagctcaagattttcataactaagtacatgggcagggtctgaaatatatttccttcgcatagagtcatggaatacgttgtgaactgttcaaagagctagaggcaaagctaatcgatatgccacttgtccaaccttc

SEQ ID NO: 40633 - DNA, 1128 bp, Cannabis sativa
ttgacctcccccaggtagtgtttacagcttacccggtattggatcacgggactactgacggtcacaattagacatcttaagatgtcaaataatattgtttatattacaaaaaaatgttacttttagtgacaattttttagtcacaatataaatttattgtgactaaatatgacttttagtaacagcaaaaagttacttatgactaaaatataatatttagatacaaattgtcactaatttataagcattagtcacaataagtattgtgactaaaaatgtatttagttataaaaaaatttaatttttgtgattaatacttttagctacgaacttttagtcacaacataaaaatgatgatttataaatattagtcacaatattttgttaaaaatcgattactggttcacaacatattgatcttttaagatttgttaaagggttacacaaggaaaaatatttcagcgagaaatattatgaagattgatcttagtaaggcttatgatacggtggattgccaatttgtttttgagctccttaggggtctttgcttcctgtcccgcttcatcgactggattttggtctggttgaaggggacctcctactctcttatgctcaatggtcgtctcaaaagggagaaaggtctccgtcaagggaatcttagatctcgtctcctttttgttctgatcatggaatacttgacctgtttgttgatccaagcttctcattccaaaggctttggcttccatccgttatgcaaaaatctgaagcttatcaacttatgctttgcgaatgacctagtgattttttgcaaaggtaatactaattttaacaaattgtccaatcgacaatcaatagcttttgtaactctacaggccttgcaattgataaatcttaaatcccatatctattttggtggggttgtggctaaggttaaaaacctgagcatagtgatatggtcgaagagggttcttttcctcttaagtatctaggcgtgcatttaaagcttactaaatggagagcggctgattgtggagcaatcttagataaaattcagtgaaggcttcataattgggctagtaggaacctgcctttcgcaggaagggtgcaacttatccactcggttttgtt

SEQ ID NO: 40634 - DNA, 1218 bp, Cannabis sativa
tacttgctcaaaaaaactcgagaaattacatttattatatttccaaaggttttccaggctaaagatttacataataaaatcgactcatggactagagctagttaactccctaaacacgtaacaactatttgtgtccttcttgctttttctgttttgattatttatttcttcagttctgattatttataattagttttcccaaaatctcgataaataagtcaatagatcattgataaatagttgtgattaattaggaaattaaacaaaaaaaaatgaataaattacatttaacctgatactaaaatgatgttatttacttttttataaatatataaaatatttataaatattaattatcaaaaggccttctatatgactagatataaatacagggtcttcttcacaaagagtcctttctgaagaaggcttttgtaatgaccgcatagctaaactatattgttatccgcatttttagctttggagacgtggagtccaggtcagcatcgaaggctcatcagtgggtcctttagtaaaggtaaagtgggtcaagcccatttgaataagtctttttaggaacgtatcccagcttcgtaatcataagacatcccgccttctggctggacgacaatccgctacactcctaaccgtctctcgaacaatgctttcccttgagccaatatgctctccagaaaagcctcattgcccatgtatgaaaggttaacattggagttgcgcagcttgaactcatagatgagttttgaagacaagtcaaaatactcatcccatatggcctgctagctagcaagggttgctctcaactactcttcacaccccacaaggtcagcctccatcctagtaatagtagcagcctgcgtggtgttttctttgttcctagtacaaagcatagtctccaaaccggaaatcatgctccgattctctaggttcatagcctccatctcagatatagtctggtccctcgccaggagggcagcctccaaggtcttcccgtgctcataaagagcactcaaagacccccaggagttgccacgtgaaacgttagtttcatcaaggcttgaaagaaaaacaaagtcaaagttagtgtcaaaggaacacgctggtcgacaagcctttttctaaggttgcttggccgtccagaccccttaaagacaaattattggtcgactaacccatggatgtctgccctaaataaaacccatt

SEQ ID NO: 40635 - DNA, 1572 bp, Cannabis sativa
ctctggatattgttgagtcctttccttacctcatatcatcagacagactccaattcccaagtggcttcctccactttactatttctccagagcacttaaccagtgtgatggtttacttcaaaggaccttttctttcttatccagaatttgcactagttgcttgtcacaaaataggcccggttgtaattacaatgcctcataactcaagatatgtattggatcagatacgtacatcctcagcatggaaacatgaaatacattatgctcagctaacaacgatggaggtaagcaacctgcctagtttcaagtatttcaaaaggtccaataaatctaggacttaacttgcctttcttcccaaagcatttgatttcctttcattggggacactcgtaggaaacatggtttccaggtttcatcttgacatttagggtctgcataattttcatgcgtgctttgagaagcaagcattcgagctttaatcttatctattgcctcattagttttctggatcaactcagggcctaactattttcgttctcctatttcgtcccaatgggttggggaatgacatttcctgccatagagcagctcatgaggagccattcctatggtactttgatagctattattgtaggagaacttaatcagagttgctctatgaccctccaaaatccatgacacaagctcgtaataggtctttgaatatctgaatggttcgctcagattgcccatcagtttgaggatgaaaggtcgtgctccatttcagattaggtcccatggcctaccacaaactgatccaaaacttcgaggtaaatttagggtctctatctgaaacaatagatttcggtatcccatgaagacgaatcaatctgtttcacatacaagtcagcatactgatccactgtataggttaccttaacgggcaagtaatgtgctgactttgtaaagcgatctaccacgacccaaactgagtcgtacactcctgtggctctaagcaaaccaaccacaaaatccattgcaatatcttcccacttccattctggaagtgttagtggctgaagtaatcctagaggtcgttgatgttcttcttaatttgttgacaagttaagcacttagtgacatagtctaccacatcccccttttcattccataccaccagaaatatggcttcagatcttgatacattttggtggttcctggatgcagtgggtaagggtagaatgtgcttcatctaaaatttctctcttaagctcggtgttatcagggacacacacctgcgtcttaaacaatagcatttcattccaccgccaaagattgaatagtccttagctttgcctgctaagacatcttctcgaaacttagtcaattcagaatcttctaattgagccactttgtttctttccaacaagtctgactgaagtgtcagattatgcaatttctcaatcaccaactcaatgtatttccctagacatctctgagattaactgaggagaaatcatgatcatattgaatatctgatcaggtccttttcgacttaaggcatctgccacaacatttgcctttccaggatga

SEQ ID NO: 40636 - DNA, 2264 bp, Cannabis sativa
gactttttttcggttgtggtgtgcctcctaaactttaaaagtcattaaaaatgccccctgaactatcaaaattgttagatttaagaacttttttccaattttagtaaaaaagtctaacatggatgaaagttcgggggctataatttagtacatgtcgaagttcgaggggcatgatttggtaaatatcaaagtccgggaagcatggtttagtacataaacaatcaatgaaatagtaaaattaaatgaaattagaccaaagtccttaaatctaacaatctcaaaagttcatgaagtatttttaacgaccttaaaagttcagagagtatgatttggtacatgtcaaaatttaaagagtaaaaatcttaattagcctttataatatatagtaaaaaaacgaagaattaaaaaaattaataaaatatggcaagtcccactatcttaaattaatatatgtatttcaaaaaaaaaaaatatattgaaagaagataattgttaaaataattaacagcattacgtagcttctaacttgtcgttagcactttttataactttccgtttattattttaacaattatcttttttcaataatatataacttataaatagtatccattaactttacataatcaacaccattaacttggggtacgagtatataaatatatatacttgattatttataattgttagatagttacattaattagagagatgttattaattattataaatgaaaatatgaaaatcaaatccagaatttatcaatatgcaccaacataatgaaatacattctaattttttttttttttaaaaaaaaaaagaagtaaatgcactctttgtgatctcatttgttataacaagtctcatccaaattcgtactctactaaagtcctacacctcttttttttttgttcacttgatctatattggtaattgcattgttgaccttacatgtgtgccatttaagttgtttatgagaatttcataaacggttggctaatcaaatgattcctcaaaagaattttgttactagtggggtcttagtgtttgcttcctaccaaaatattggtggttcatgctacttacttaccatttctctatttgtgtttttcaaattaaattaaatagttgaaagtgattgtgattgtgattgacaaaaaaaataaattaaggttttatttatctattgattttatatttaagtggtgactcaccgaccttgtcgtttgtctgagaaaaggaagaagaatttaagtatgattaattagtaagtcaaattagtgatttagtgacataattaaagttgacccacatctattacctttttttttttttatatatatatttatttttggattttgttatatttacaaagatgaatacaatctccaatctaatacgccctatgactacaggtacgtacacccatggaggaggacaattacctctactactgtggaccaatgatagattccacctcaaactcaggttacaaaaagcatgagctcccaccactaaactactaatgtggtgttccatacctgtttaatttttcacacatcgtttttcagttaatgttgtaaactaggttgtttatcatttcaattttctagaggtgtgttgggaacagatttaagtagaacaacatttaaaatgtcatttacagtatcaagtgaggtgtcttagaaagagaattagattgaacaacatttaatacgttggaagagttgagtaactaatcattgacctcactatttttatcaaagttcaatgtcatcactttagaacactcttttgttgtggagttccagaagagattaattgggatacaattccaagttcatttaaatgatctttaagctatatatctaactatttttttgtgaatgagattgtatattcattactccattaataatttttgtacatcctataagcacctttaaatagaaggccttaattttatctatacaattgatatttacaaaagatgaaaccaatttatatcctcatgacttactttttttggcattacaagaattactctatttttgacaatccatttcagctactacatcagctcagaagaatgcatcctttttgaattccacatcaggtcatttctaacagcccaaattaggtatactaaggctgctattccagtcgattttacacatttcctaaacctggactacttggctctccttatccacttcagtagaccctgtagagtaccagctgtggtattccacttgaaccatgct

SEQ ID NO: 40637 - DNA, 1865 bp, Cannabis sativa
ctctctctctctctctccttcatcctctcacatgcccagctgaggctgtacaacaccttaggttgtccaacacttgagttttgctagacattgattcatacattgtaatcctaaaggtactatagcagatcccacatatagcgatctggatagtaattctctcggtttaatataactaaaatgggattaggtcattacccgctatcacaagagggttgaacctctataacaaatctcattgtctatttctttttattcttatttgtccacacacttggcaagcatcagatctacacgaccccgttatcaattgatcacttttcaaggtcaacagaattcgaatcattagaaaccagaagaacagatcacttgctttctcacaagcagcttacattgataaggtgctagagcatttcttaatgaacaaaaccaaaagggcagttatgcctttagacatggagtgcgactatctaaggaacagtgtcccattggtccccaagagatagaagataggagaagatttccttatccctgagcacttggaagtctaatgtatgctatgctatgcactagactagccgtttgctatgcaatgagaattatgagcaggtatcagtcgaattgaagaaaggaatattgggctacagttaagcatattctgaaatacttaaagaggtaagggattgtgtgttagtctacaagggtggtgctctaaatctcgtaggctataccgacttagatttccaagcttatcttgatgacaagaagtctacaaatgggatggtattcactcttaggggtggagtagttgtttggagaagtgtcaagcaatctgcaatatttgactctaccatggaggctgaatatatagctatcgttgaagttgctaaggaactggtttggctaagaaagttcttcatagaacttggtgttgttctaagaatggaaaacaactagtgttactttgtgacaacactggtgttatagccaacagtaaagagcctcgaagccacgagaggagtaaacacaatggaggaaataccacatcacgagacaatatcttgcaagaggtaacgtgtaggtggaaaaggatgatactaaagacaacctagtctacccattcaccaagactttgacagagactgcacttgaaaaccacagagagaatctaggattaattgacattaactgattattttatgttagtgcaagtgggagttttttgggttttgtgctctaattaaaactttatttaaatgtaatcttgaaaattcatttatcaataaagaaaaagatttattttattacatgtttaatgtattacttggttcacatgtttatttcatgatcatttgtttgatttatgaattcatctaaatccttatcacatttttattcatgattattgtgttgtctacacagtgtaaagtaatcaagattatgtgattaaataaagtcccacgatttatcagtacaaaagatttctactgatatgataatcaacaatgtagtttacttacaccttagataagacctttctagggcattggcaaagtagcttgggttggatgtattattatacatcagacttgaccgatattgaacttgaataagatatgataaacttactgtaatatctaagtcaatatcacttagttgatcttagatcagtgatctcaatcctgagatggttaggttatagttaattatattatttgtgttctttgatttgttcattaaagtggaccaatttgatcttcccaatacttacagattaagaatatggtagtttatttgagtgggagaaccaatcatagatacagaatcaatagcttctataaatgcatagaagtgaaatgatgatt

SEQ ID NO: 40638 - DNA, 2986 bp, Cannabis sativa
attatgccaaaacataagccacaagaaatgtaaacctatgtacaatgaagaaattactcataacaaaaattgtaaataaatttttttatccctagactaaagaaaagggttttttttaaataaaatactgtatttttaataaatctttttgattttactgtcgcgtggtagaaattacatttcttttgtcctccattttttttttcttttatactataaacataaagaaaaatacgaggcatccatcttccacacccatagataaaaccaccacaacaacactaggatagctggaaaacaactactaattccgatgagattgataaaaacgtcaaataaataatcatggaaaaacaactataaaacaatactaaaacaaataaaaaaaataaaggaaaaaaagattaaaaaaactaacaatcttctacacaacctcaataccaaatgcaatagtgcctatatttacaagcacggtcctgcaaaattagaataagaaaactactaaaacaaaatttaaacaacacgaaaataaatgtaaaataatgaagcagatataaccacttaaaaaaatataaaagaaccacacacctcaaaactcttttgtcagtgagctcgtcaaatatatttataggagaaccataataaaaaaaacataaaaatagccaaagacaacgaagaataaatgtatctatagcctccatctttcacacccacggacagaaccaccacggcaacacaagagcacccaaaaaaataactattaattccggcgagatagaacaagagcagtgaaatcagtgtcaaataaatatatcatgacaagcagccataaaataacactaaaacaaataaaaaaaatgattaaaaaactaactaatcttctgcacaacctcaatactagatgcaatagagactatatttgcaagcaagttctagaaaatcagaataacaacacacactaacacttgtattttcccaaaacgtaactaaaacttcaaaaactaaataaaaaaatcaaaagaagcactgaacaagaaaaaaaagtaaaaaatttaaatgttaatggagaaaaatagagagaacttgagtagtgaaaaaaaaggaggaaggtgatgaataggaagagagaataataagaaactgggattaaagtgaaaagaataggcattaaatattattttgagtatcactttttctatcataattttagaaaattaaaaaaacactaaagtgacaacacaagtcaagtcacacttttatatcacttaaaatttaatataattttaattaaatgaaaataataataaaaaaaaaaactgtaacttttttgtgatagtgacaagattacatatttaaatttttattaatttacatataatatatagtaatatatatagaatgtgggtaggctgtcaaaagtacaaaacagtataagaaaacacagtaaaaaaataatattttccttatagcaataaaattgaaagaaaatgagaaaaatagtatggggtctgtaaaatcccctaaaaaaatgacactcgttaatgagtatggccttaaaaactccgtaaactaatataaaaatagttattggaaatatattgtttacataaataatagcaaaataaaataaattattgttgttttttgttttcaaaaacaaattcaactaaatacaacaaaaaataatatgtcctaagaataagaaaaaaaaattgtatgtaaaaaaatattttgttttattttaaattatatattttttttttataagtaagaagagaaaatatattaaatatacaatatttttgaaatatatttataatttttaaataattatttttttttactttaatatatatatgtaaaatggattaatctaatcggcataagtgcatatatttccactttacatattagattggattgaatcgtgcgggttggattagattaagtattttataaacacccctattcgctaatgacttcgtaattaacataattcatttcttaaccaacttgtgtgatgaattgtagcgaaaatagaattaattactttttccaaaattttgacaatacaaatatagtaaggcaactattaaataactaaaaataacttagggtcagtttggcacagctgtgctgtgggaaaaagtagtttgtagctatgctttagggaaaagcagctgtaacaaaactgtagaaaaaagttgagctgagtgtttgataaattataaattttaaagtgttacgagttgttaagattatattataataataactagggaacttttatatataaatatatattgtacttataataagtgatataatctaaaacataactttttaatgtttatattattattaattactataaaaaattgattatagatttattaatttaattatataattaaattcaattctatcattatttataatttattattttatataattttttttgagtaagtatatcaaatatcacttagaagagaaataaataaaaaatatggaaaatgaataaaataatagattgctaactcacatttttttggcttataaatatatagatatattatacaaatatataaatttgatttgatgacctaaaataatgataaaaaaaattaaattataattaattgagcaagatcaaattatcaatcacatatatatttttgaataaatcaaaataaatgtaagaatactttgtttatagtatagaagtatactaattgtaatttttaaatgtgggatttttacaaataataaagaaaacttactaagtcatatacctcaacatctacaaatatctaaaatgtattaaatttactaaaactattttaaaatagattaaaatattatacgatggcacctcattatctttagtactttcctttatataaatatatgggtaaatactattttagatcatgtattttgcaaaagttactaattggaatatctgttttgttaaatgacaaaa

SEQ ID NO: 40639 - DNA, 1423 bp, Cannabis sativa
aaaaaaaaaagattaccactgctcttgttgaggcaaatcttgaacgataacaatttccaaagggtctgtctcactctttccttgaaaaaatcctgtgctcttatcaatatctttcctttgatcataaaaatttacatgtgacaacaaaataggcaacatgacagcaaaagcacgaaccaatttttctgagttcttgtacctcccaaatctcatagaattgcacactttaagacatctcaaacgtatgtcaaaaatgcacataatccagtgagccaaatcaatcagattaataggcattaagacattatctaattcaatccattttctactgcaatacataccaaaaccagctacgtatgcagaagctttgctgtccttcttaacagattcaatgtcacaatcattcttaacaaactcattatacatctcaaaaatctgggcagcaaagaaacaatcagtggtattaacaaaagagtttacactctcattgtactttatctcctttctcaagtagtaaaaacaaacatccaaatgctgcatcagaaaaaaaaaagccaaaataaattcataaaaaatcaaatataatgtaaaaacccatttaaaatcaaacataaaaataaaaaaaataaatggactaaccgagcatgacaaatttcttccaggagtcagcaaatcataaaaccacatcttatcatcaatcttcataattgcaaaatccaacgggactttcaatttcctatcaccgttctttaaactttttaatcttgttcctatcattgaaaccgaccttaaaccactgctcaaaaagtttagactgaagatcatcaatacggtcaagtgcaactgaagaaaaagcaagcaacttagattgttctccctttggtttactactactcccaatagaaccaaaatcagatgtaaatggactcctcaatgcagatccaatattgggaaccctctttgcaaactcataagaattagcttctaaattcttttcctagaaacaaaatcaaacagattaatacataaacaataataaacaaaccaatatacaaacaaaaaaagaaacactttgacaaactgttaattcttaacattatacgtacctttttcaggcttccttcaatggtttcaattttttcattaatgatctccatggctgacaaagtaatactatcttctgtaccttgactatcaaacaagttaggagacccaatgacaccagccacaacaacatcaattgcagatgaatcaaccatattttttcttgcttcaccaccaacatcatccttggtaactgatccaccttttttagatttgtcatcaccctcattaattccctttataacttccttgacaatagaagaaacagcatcaccacccataccctaaaaaatgaaattaacatataatgagaaaaaaa

SEQ ID NO: 40640 - DNA, 2570 bp, Cannabis sativa
caggaaaacatgttctcctgcctaaaatgtaacgtctctacgcttcggatcagcataacttttctgcctgctttgggaagcaagcacttgagccttgatcttctgtataacttcattggtcctctgaactaattccggacctaagtacttcctttctccagtttcatcccaatgaataggggagcgacatttcctaccatacaacatctcataggcagccatccctattgtactcttgtagctattgttggaggagaattcaattagaggcaagtacttactccatgaaccctcaaagtccatgacataggctcgcagaaaatcttcctgtatttgaattgttctttctgattgcccatcagtctgagggtggaaagttgtactaaacttcagctttgtacccatagccctctgaagactcacccaaaattttgatgtaaatttggatccctgtctgaaacaatggatttaggagctccatgaagatgaactatctcctttacatacagttcaacatattgatcaactgcataagtaactttcactgacagaaagtgagctgattttctgaaactgtccgttatgacccatactgaatcatacattcgtgtggttctgggcaaaccaaccacgaaatccattgcaatgtcctcccacttccactcaggaagggctaatggttccaataaccctgtcggcctttgatgctcgactttgacttcttgacaggttaagcacttggacacgtaatctaccacatcttttttcatcccatacaaccaaaagtagggttttaaatcctgatacattttggtggttcccggattcagtgaataaggtgtggtttgtgcttcatcaaggatttatttcttaagctcatcaacactaggaacacaaacctgagccttatacagtaacatttcattattcgagattgaaaagtctttgggctgaccagccattacctcatctcgaaccttgactagctcaggatcttctaattgtgcctttctaattctttccaacaaatcagattgtagtgtcaagttatttaattttccaaccacaaattcaattcctgcattaaccatttctaaagctagttgaggagatataatgacaatggtgaaaatcttcctgggacctcttctactcagtgcgtcagccacaacattggctttcccgaggtgatatagaatctcatagtcatagtctttaaccaattccagtcaacttctctacctcatgtttaaatctttctaggtgaaaaagtacttgagacttttatgaccagtgtaaatctttcatttttcaccataaagatagtgtcgccatatttttagagcaaatactacagcaacaagctctaaatcatgggttgggtagcgttgctcataatctttcagttgacgagaggcataggctataactttgtcatcttgcatcagaacataacccagaccctgtcttgatgcatcacaataaacaacaaatttttcttgatctgatggaaaagctaacattgaagctgtaattaaacgttgcttcaaatcctgaaaacttgcttcacacttgtctgaccatacgaatcgctgatttttcttagttaattcggttagtggcgtagagatcttagagaatccttcgacaaaacatcgataataccctcctaaattgagaaaacttcgaccttctgtcactaatttttgccttggccaattcttcactgattcgatcttacttggatcaaccataattccatcttttcgacaatatgccccaaaaaagatacctttgacaactagaattcacactttttgaacttcgcatacaacttatgatccctaagtccctgcaataccattcgaagatgatgctcatgcttctcttctgactgagagtatacaagaatgtcgtcgataaacactacgacgcaattattgaggaaatccttgaatactatattcatgagatccataaaggccgtaggagcattgtcaatctgaataacattactagaaactcatagtgctcatatctggttcgaaatgcagtcttcggtatatcttcttcccaaattctgagttgatgataaccggatcgtaggtcattctttgaaaacaccgtctttccctgaagttgatcaaataaatcttcaattcttggtaatggatacttgttcttaattgtaagtttgtttagttctcgataatcaatacacattctgagggaaccatctttctttttcacaaacagaactggagctccccaaggcgatacattgggtcgggtaaaccctatatcaagcatcccttgaagttgtaacttaagctcattgagttctgatggagccatcctatacgaagcttttgaaacaggttcggctctatgtgccaaatcaatcacaaagtcaatttctcattgttccaacaatcccagcaactcctcgggaaatacgtcgagaagatctttaacaaccctgactaccttaggcccaaatgtttcgggtctgcaggagtcaatcacaaccgctaaaaatcctacacatcaactgttggaaattattttac

SEQ ID NO: 40641 - DNA, 1191 bp, Cannabis sativa
tactagttattaactaatccaaaataataacaatgttgaaaatgatgtttacccaaaaataaaagtatcgtcacaataataaatttatataaaaatatctttataaattacttatgtaaaattattatagggacacgattttgttccgtaatgtacttttacggaatgtattccgtgatacattacatgggtctcagtgtatattagatgtgtgtcagggtaggttattattttttaaccccaattacccttagatcaatctcaggccttagatcaaataactccttcatctaacggctgtcgtacatcacgaaatacattccgtaaaggtacaaaaatgggacaaaatcatgtcccaattattatatattgtcattttaagaaacattaattgtaaaattgtacgaaggcaaaagtatgctcattgttttactaataaattttaataataatatatttcttaaaattaaaaatagatattttacacttaagaaccaaaaaataataaaacacagaagacgttattaaaaaataaaacagaaaagacgagaaaacagatctatcatatcatacctaaaaatttaaaaggaataaatgatcaaataatgaaaatatatattttttacaagatttaaatataagaaaaaacatctttaaaataatatatttttttttaaccgagcggcttgttaatttatatataactaactaaataatgaaaatgtattgacacacaatattcatttcgatcttttttaagattttattattattttttttatttagtatgctttaaactaaaataatgtcaatgacgggtgtgttatttaaaagataattatatgtgctatatgtatatttatatgattatatctttttctttttttttttctttcaaatttaattaaaaaataaatcagttaggcctgcttttttcttgacgccaacgtaacgtattataaatcctaatcctaaaaggaataagaaactatcagtaaattagttctctataaatatgccccttttcctctttcacaaactcaaatattattactgcctacgtatacaactaataatacactctctatttcaagtttcaagggctcattttaggatttgatcaaattaatttcacaaattaataataacattttccacaatgaattctctgtttagtagcttcgaaattag

SEQ ID NO: 40642 - DNA, 3117 bp, Cannabis sativa
gtcggtgtttggatttgggacccagccccggacccgaacccaaaccaggacccgaacccaaacccagaccctaacccaatcctagagccaaacttggacccgaattcgtaccctgtgatctgaaatttgaaccaaaactagaagtagattgggacccgagaacgggactgaaacaaggacttgtacctggacttggaaccgtaactagacgtggacctagactcggaaccgtaactagactaggacctagactccggccccaacctagacccaaatcgggacccaaactcggatcccaaccaagacctggacttatgacccaaacctagaacccaactcagacccaaacatggaacaagactcgagacacagaactggggtaagggcctagaatcgcaccccagtctcggtcccaaacaagtactcggacttgggacccgggaccaaaaccagaactagatcgagacacgtgacaggtatccagatttaggactcatgcaaggactcgaacccagaccaagacccaaacccaaacccgggacctaaaattggaaattgtacaacaacttccaaactaggaccctcgaacaagactaggaccgtgaccaggactctaacccacacctagaatcgaactcagacctagccccagacccaaactaagaccgaaactcgggcccagtcacgatcgtgtacccagaccgagaccgacacccagactcaaacctggaccaggacctagacctgggaccgaatcctagacctagactcggacctagatagggatctcgatacgaacctggactcgaacccagacctagacccagatcgggatcaaaacttaggacctaaattcggactgagaccctgactaggacccaaaccttgacccgcacctgggacctgaactcggacctgacccgaacctagacccaaactgggattttgacctagacccagactcaaacatagactcagaccaggactcatacctcaacccaaaccccaacccaaacattgaatcgaagtcgatactgggactaggacccaaacccgaacatggacccagatcgggacctaggacacggacctggattgaggacctagacttgggcctcagaacataaacccagatcgaaactctggactcgaacccgaacctggacatagactcgagcccagatctggacccaaacctagatcgaaacccaaaccaagactcggaccgggacatgaaccccgatatagtcgtggactcaaactgggacctaggactcgaacatggatggggacctagatcgaggacacggtcatcagaactaggactgagacccaagccttaaccccggactaggatcctgacctaggacttggaagcagaaccagaagtggaccgggaactgggaacaagaccaggggactaggacctgacctcgatctcggaactggaatctaactaggaaccagacccagacccaggctgagatggcgacccgaatcaaaactcggatcacgactcaggacactaacccaaacccagacacgaacgcatgacccggaccgggattggagactcagacctagacccaagtccctgacctagattggggacccaaactcgaaattagaaccatagacacaggactaggactgggacccaagacttgagcccggtctcggtcccagacccgttccgagacacggacacggaccaagaaccaagatctgaattggacctgaacccaaatccggacctagacctagaccaggactcggacccatacccacactcgaaccttaaatcgtaccctgtgaccccaaattagaaccagaactttaagcagacccttaaaccctaaaccctaaaccctaaactcttacccctaaaccctaagccctaaaccttaaactctaaatccctaaatactaaaaccaaaaccctaaaccttaaaccctaaccatgacacgagcctagactcatatccataccgggatcagaacctaagacccagacctggacccgaatctagacccagacccaggacctgaacccgaaccaaaacctagaccaaaacctcgtctgggacctagaccttgactaggaccaggatcgtgaccccgacccagacccgaacaggggcctcgactcaaactggaactcggagccagacccaaacctgaatccatactggaacctagactaggacccgaactcaggatccaaacccaaacctaaacttgaacctaaccgggacctaggatccgaacctagatgggggaactgggcaaacctagacccagacctagacaaaggatgcagacctagatgggggacttggacccgaaactaggccccagaactgagactgagacccaaaactcgactccagacacgagacacaggacccgaccctggacccagaacccaggacctggataccggtacacaaccccgaacccatacaaaaacccaaacataggacccgacccaagacccgagagccaaactggaacaagaccgagatctgaatctagacctgaggcttcaacctgactcgtagtcagtgtttgaatccaagacccagacccaaatcccagacccagaatctgaattgaaccaggtctgggactagaacccaaacttgagatagtaacaagacccaaaactaaacccaaactcatactagaacacataccgggacttggacccagactgggaccggtgacttgggacctaaaccaagaccaggacctggtcccagaccgggacccggacccagacccagacccaaacccacacctaaaaactggggtcagacccaggatctaagaaccagacttcagaccagggacccgaaactcggacccacactaggaactggacccgaacttggacccaaacccaaactaggtcttggactcaaaccgatactcgagacccgaaattgaaccgaaacacgaacttggacccagaccgagacctaggacctaaacatagatgggaaactcaaggaattgggcccccaaactgggacgagaacttgggccttggaacttggatcgggatctgagaaccgaccccagaccccaatttggacctacgacccaccacgggac

SEQ ID NO: 40643 - DNA, 2732 bp, Cannabis sativa
  modified_base (1376)..(1379): a, c, t, g, unknown or other
cagcataggccagccagcttttggacatcatatggccgaccaacatgcactctgcaggtgcacgaccatccaacctttttcctggcaggattttggtgcacaactttcatccatggacagtaagtaaaaccacgaattaggctataaccgcccacaaaaatagaggaaaatatcagcaatttccctattttcaaggggtaattcagtcatttgtatttattcatttattgtgtaaataatagctttatttgcctaattttaagggatattagggatgtaagctctcttatataaagtgcattagtcaagccctaaaatcctaaatctcaaaccctaagccttatgctctaagcatgataactcatctcatctctctctctctctcatacgcctattactttactctcacttgagatttgctatactgatctaagtggtattatctctgatatcaatacaactaaaaggggagtaggtcattacctgctaattaaggtggccacacctctataaaattctatgtctatttacttttctattctaattgtgtaacacatggcaatcatcaatattaaattcaactccgctgtcagttggccacatctaaggtcgacaagattaaacaagtaataaattttaaatcataaattaagaagagtcttaattaaaatgatcaaagagagtggacaaataggaaattgtctaaatgagtgggagtattaagtatgttgggagtatatttaaaagaccattcataaggaactgtctaattgagtaaagatattaaatatgctgggagtatatttgaaagaccattcaagaggtgaatctatttgtgtaaagttattagaatttaagattaagggagataattaattgaatgtatattatagtattatttgagaaacgagaaataaatattcttattatatataatcttaaattaaaagaatcacttaattgtgataaggatgtgaaatgaaatagtttattccattcgtccgacttgactaacaatgggatctattgagttcattaattatcttaaaataaagttttgaataaacatatttaatatttagaatattaaatgattaatcaaacatagtgaacctgaaagaaatataagagtaaataaacaaaatatactagaatctaattctgtatatttatccaataatgaagtggtggtcttcgtgatctaggactgcatcatgtggagggtctcattcatatgacttagtctgaacagtcgaataagatataatgtctataagagttatagaatcagctacactcttagtgcaagtgagagattattgggatttatgccttaaaagtaagtaattaatagataatatattagagaatatatnnnntacaattataagataaatgatatattaattataagagtataattactaaatatctaaaaattccttattcatatggaagaggtataatcttgtatggatgtacaagagaattatgattatacgatataaataaaataagtcggtagtgtattaaatttttgagaatctttaataaggaacttccaagtatgatttactatacactgtacttctagtgtgtgtgattttgattcagatcacatatgtagatggacatgtagtaaaggtactgtgtacaatcagattatgcatgactagaccgatatgtaaaaaacatctttcattaacttggcatttaccatgaaaaaagttattcatatcacaatgatgatcattagtagatcaacctgaatcctgaatatatatgaactcctacttttgtattgagttctttgattcactcgttaaagtttctcagagaagatgattcttataaattctattttgggatcttaataacatgagtggcaaaaaacatgttatacaatagtggaatcgaagatttcttaacggattgaatattaatttccttctagtgttaattctgggagtactaacagttagatccaaatcttataatgagttatagattaactgttcacatcaaattaatggtacataaggaatcaagagatattcataatagtaaagtggtattttgaccaactctaattatgaactaataattaaagggtgagctacttatattgattatatatataaactacaagtaagaatttagtaaacataattatatactgtcaaagagtgaaattccattttcatagtagattaataatataattaataaattagattattctattcatgagattgataataatcttagatttattagagctttgaaatatagattcatggtccctaagtcacctctatacaatattgtatcggagaaggttttatttaatgaatgaatttcgagtaagaattaatttctatgggaaataaattcttaagggaaaaatataatttgtgaaattaatattttgattatttatggaaattatgaattgtataattaataatatttaactatatagttttattggataaaattatattaattagttaaatataatagtattattaaataatatataagagagaaataaattattttagagaaagtaatatttattttaatcttagtgaaataagatattaatgcgaattaatcaattattatttattggtagaataaataataaatcttatttatgacaaaattaagaaattaattttggatcttaaaatatggcccacacttgtaggcccattctacacgtgtag

SEQ ID NO: 40644 - DNA, 2017 bp, Cannabis sativa
aattatagtagcttaattaccttttctcttatataataagaacgaatgaatttagagctttcacaatgtcattaatgtacctaagtacataaaaaccacattcaattcccaatgtttgttttggacacgctgcaacggttactcctggaaatgttccaagtaactcgttggaacctccgagcagttcatatgccctaattaaattcaatgatttatattgatttaattagcaatagttggtataaatttatagaaaattaaaattataattttaaaatgaaaattgaaaagtacctttggagtgtgaggtcaatagtcatcttagggcgtttatgtctaagccaagggtccaagtgaatgatcttcccagcacaaacgatctcaagcatccaatgacgtctaataagaaattaataagaaaatattaagtgttaatttaaaaagaagaattaaattatacttaactagtccttaaatagtacttgtacatactcgtagttccacggtatgaagaacatctgagatttgttattcattgtattcaaccattcagccaatttgataacaacttcttggtggacaattccatctttgtccgtggcattgagtagctctgggtcaaagaacttgaaatactcccgcatattcgttaaatcctccaaatgcatctacataaatttatcatggtttaagtgttacattttaataaaatgggaaaaaattatgtaaaaccataacttaattccaaaaataattacgtaaaacatacctaattccaaagatcatgccttgacatccaataaaatttaaggttccaacctgctctacatcctctgatgacaagataatatgtgtgcgaggtggcatgaagtctggatcagttggaacttcaacaacgctccacttccctttcctccttataaattcttcaactaaaaagtggagacatacaggtatttgagcccagacctccggcttgaatgttcattcttgtccacttgatctactgacatttgatatccagccgaagacatagcaggaagagttgatatctgtttccctttattcggtgatctgtgaggggttgctatctgcttcccctttgacgatgatttatgggtggatgcgacatccgggaatatgggaacctgtaaaatatgaattatagcatcaatatacaataaatatgcattaatcatatatgacaataaaaaaataatttttaccttatccaaatttaaaattaaatgttttggccaaggaagaaatgtgtcctttgtctcatagacatatcggatattttcgataggatgagcaatttcagcctcctcttgaagttgttctgtaattaaaactcgtgcaatcccttctttatactgcacggtatgaattgttactggactaacagattccagaagcacacctttggccactatattatggatgttgtctgaacacaaaagtacttcgttgttattagtggatgagaagttgtacatgacaggaggtgtctgattatcatcttcgtaccctccaaactcctgatgatcatctaagtgatcatcattttcttctgaggagttgtcattaccatcatcttgttcttgtgcagcatacagttttttcttcaattcttcaatttcttttttgagttgaagaatttcttgtttttgggaggatgattcactacatttagcccttttctttcgaccaaatatcttactggcctttgcagtgaacctacaaataacagttggaacactcatttaataaaaaattaagtaaaataaataaaaaataatctaacattaaatcaagaaagtggcatacccagcagctctgacccggccagggtgctcaggtgtccctaatgcttgagtcaatatgtcattccgaccactggccaaaacttcacctgagtttactttttcctcgagttcagcctatgcattatgattgataatagttaatactttataataacaaatcatatattcatgttattgaattgtgttag

SEQ ID NO: 40645 - DNA, 3327 bp, Cannabis sativa
tatgagggtgctagtccaccgtccttctgggggtagtcacctcgctcaacctagggggaaagatgaccgtcagacttctcttccaacggtcatgataaccggtcatgagtaacgatcatgaccaacagtcatgactttacacattctttatcaattcagtttcggtatcctcgtgccacatgtcatcatttttgccacgtcattattatcaaaattttggtaagcagagtgcgacaatgcgtatattgaggtacctaaagggaactctacatcaacctattcatgttacctctaaagcaaaataatgattaaatgtacaaaatcaaatcaataaaactttaaacaatcaaacaattagtaatgacaagattttaaattgagaacaacaatcgtatgaaaaataggggcaaacagagtatcaaaaactagaaaacagtaaatgtagaaaataaaaaaatcaacaccaagatatatactggttcaagtccgatagatcgatgtgatcaatatggctctactctagttttagaacaccaccgcaatcttcctttattgattgagcaagaatatgtacagtacagtcgagccaagattcactgtcgagtcctcactaagtgtttcaactctcacacttacacccaagaatcttcttcatctacagaagattcttcttaaaaacccaaactcaatctctctctcttttctctgcatctctctttctaccactcaatcttttctctctcaaaatctcaatctcatcttaatagagttttcaaactcgtgtgttcagcctctgtttttcatacgattattgttctcgatttgataatcttgtcattgctaattatttaattatttggagttttatttatttgattctgtacatttagtcataatttctcacaaatcagagctaagtaatcgatcaagaacgcagaattaagattctttccacttcaatcttgaagaaactttgaatgccaacaatggcgagatttgaattggagaaatttgaaagaactggggacttttttctctatggagagaaagtctgaaaggaatccttgtgcaccataatgtttccaaggttctcggagacgagaagttattggaaaaaaaagaaaccaaagaaaaaagcagaaatgagagagataacataatcagtatctatatcaaaacagtgtgttcgaaggaaactcatcatagagaagaagacaaaaagagtttggaataaattggaagaattatacttaaaactatcaattgctagcaagattaatttgctataaagtttatacgattttagaatgatttcttctctttctttagatgataactttgaaagatttaatgagattattgtaggattggaaaatataaatcacaaaattgatgaagaaatccaggccattattttgctgagattgcttccaatagcatatcaagaagtcaaggcagccatcaagtatggcatggatgttattgcattagaagatgttctttctccacttaagtcgaaagattttcagttacaattggataaggaatccaagaaagaaaaagtgtatttaacaagaggaagatcacccaagaaagtgagttcaaagagtaaacaccatcaatctcaatcaagatctaagtccagagagaaggacacaaggaaatgttaattttgtggaaggcctggacacttgcaaagattttgcaagaagtacaaggagcgacaaggcttcaataaatttcacaatggagataggaaggacttccggtaccatcaccacgggaaagactctactacaatcacggaatatagtgatgactgctccatggacggagaattattctctatcttagagtctttaatgaacaaggagtggattctcaactccggatgcacttatcacatgtgttcgaatcgagagtcattttttgattataagtcagttgatggaggtaaagttctcatgggaaatgatcattcttgcagggtcattggaaccgaaaaggtggccatcaaataatataatggtaaaatcaaggtgttgacaaacgtaaggcacatcccggaccttagatgaaacctcatatcatgggtgctcttgtggatgaaggatacggatacaagtccattcatggaagcttgaggatcaccaaatattctttggtagtgatgaaaagtgaaaagataaatggtttgtatgttctccaaggagaaagtgtcctagctaggtaggcaagtatggtgaaaggactagaatcatatatgaagttgtggcatcacagacttggacatatcagtgaacaaggcctcaaagaattgcataaacaaggtataattgaaaatttaaatcttatgccttacaattttgtgaagcttgtgttttagggaaacaacataagatgaagttcacttcggcaaggcacacaaccaaaaagatactgcaatatgtgcacgttgacctttgggaccgttcaaggtgcctactcacactggagcaatattttctttcaatagttaatgattacagtcggtgtgtttggacctacttgttaaccactaaggatgagtgcctggaacagtttagaaattgaaaaactcaagtggaaaaccaaaccaatcttaaaattaaaaactttagaactaataatgggttggagtttgttaactctgaatttgacaaaatgtgtctatattttgggatcattaggcatagaactgtagtcaagaccctagagtaaaatggtgttgctaaaaggatgaaccgaaccttgttgaacaacaaagttaaatgcttactgttcttcaattctaggttagaaaaaccattctagggggaagctttaacaaacgcaaactatcttataaataggagcccgaatagagtaacatacctaaaaagaccttataaaatatggtaccacaaaacccccaacctaacatatttaagaacttttgggtgtacatcatatgtacaccaatccattgacaagctgaaaactagatccgtgaagggaacattcctaggttattcctcaaaaaccaagaggtatagaatctacatttctagaaagggtaaaccgaaggttgtgattgctagaaatgttgtttttaatgagttagaatatcctcacttgacctccaagaaaggtagtgctccgtgtgatgtaggaaaaatagaaaacaaaggcactacaagtatggaaatggagtatggaatgaagctcctgaaagaaggtccacaggcaaaagatagtgtggaaccggaagacaatgcacaaacaaaagttgttgtggagctcgaagaacaagataatgaagaccaaaca

SEQ ID NO: 40646 - DNA, 1463 bp, Cannabis sativa
gttacttgtacatgctggaatagaagaatctgggtactattacagacattgtcatagaggataacaggttcaagtactgtttctggtcactggatgcaaacaactaattatttctgattgcctttgcaattgttgatagtgagaatcatgactcttggaagtatttcttgtagaagttaagggaagcaattagggaggttgaaaacttagtgtttgtattgaataggcatcaaagcgttgaacatgttgtcgaggttattttccccgaagcatgccaatgtgcatgctacaaacatatttctatgaatgtcacccacaagatcaagattgatgtatgtaacacgcaaatatggctggccacttacgcatggtcatagagggaatgtgatagacatttatagatgcttcgacagatggatccttgcatcactgcttatgttgagagtataggattggaaaagtgggctcgtccttattgtctaagagacaggtacaacataatgataaacaatgctgttgaaaacctcaacaacatgacagaagaattttgaaaatatccaattactactctagttgagttcataaggttcacattgtaaaattggttcgctgaccgtctcgaaaaggcaaggaagtgcgctaccccttggcaactcattttgaggaagatttggtaaagcaacatgagtatggtaggtttagaagtggcctacgtaacggtgcacaattgttttaacgttgcaagaagatttgacggttctgattatgagaaaggtggtgatgtgaacttagttgagagaacatgcacatgcgacatgttccaattgttgaaaattccttatccccatacatgtgttgcggtgcttactcagaatgtcagtttgtacactctgtcctcccctattacacaaaagagacgtgaaagaatacttataatgcaacgattaatcttgtcggcaaggacgatgattgggtgcttccagaatacatgcagaacatgagagtcagggtaacagtggagaagaaacccgcaggtcatccaagaaagagcgatgcaggaagaatacggactaaccaatatccatctaacggttaaaaagttgtggaacctcgccattgttcaaactgtggcacttggaacacaacaatgctacatgcaaggccagggtttgagcatcctttttgtattttgattgcatgcattattagtatggtttatgaaatctattttgtagttttttctgtctaggtatgtttttaacgaaatttttttttatatatttcgtgacaatttgcgacatgtaacgacatttcacgattgactttgcgacatacaaaaacataaatagttttattagaacataattagtttctaataatatcgacattttgtgacattttgatgatatgttttccgatatagagacacataatttgttttcatggctttcaatttgcgatat

SEQ ID NO: 40647 - DNA, 1906 bp, Cannabis sativa
tcacatattgctggaagtaacctcgcgagataagactttctatctcgtctttcggctaacggcattcttctgtcacatgcccaatgtccttatgatacttataaaaaaattttgcatctcttttatgtctcgcatgcctcatgggttcaggtttacggaatgtgaccctgtgctcatgtgcgagatagatattttcccgaatttcattaagctcggtataaatagtgtagattggcatgtacttgtcgtgcttcttctattttttttttttgtccttagctgattctttagagtcatctttcctcttagagcctcttggattgttagctttcgttgagaaggtacttgtcgagacagtgttgggtttacttcccaagccagtctttaacaacttcatctcttttcttgcttcctattttcgaacaaacacctgagctctctcattgaactcactgatatttttcactgggcgaccgtgcaagtcatcccacagctcgcctccagcagttgagagatcagtcgtgatctctgcttggaaagcattaagctggagactgtcgtttaaatttctaacccttgcagcagctgtactaaaacgactgaagtaggccttaagtgtctcgcccgactgtttctttatgttagtaaaagaagacgtttcaggttgcctatctcctgctgcctggaactatttcttgaagtccttagacaactgttccttagaggtgattgaatgatgggtaaatttattgaaccagttgctcgctgtcccaactagcgaggtagggaataaaatacactataagttaatcattacattgctggctcgcatgatagtattaaaattattgagatgagcgactagatctgtagtctcatcgtatgacgagacatgggggtttttaaatccttgggggaattcagcgctcagaatgtctgggtggaaaggctcgggctccttgtttgagtcgtaaccaggcagtttcccgaattcccaatcttggtatctcctgaacttgtcctccaactcaatgattcgcaattggataggatcctcttgcttttgatcgagttgttagcgtaagtcaggtttcttttgatttagctgattacgaagatccgactgttgtggatcatagttacttacaaacctcatccttgagtaactttcagctctagttgtgcccgtactctctcgatcagtaatgcgatgagttctatcccctcctcgtctagatcgactatgagttcttgtacatcccgagctagaacttgcctcatcatggaccggccttctcctttaggaacaggttgatacatgccttcgcttgggatttgtatgtgccccttccctatcagtgcgagaaggacattgacggtgtctcagtggcaacccacttgtcctaggttgagtcccaagatctctctcgttaccacaagggatacctattccctagttcggggttgcctcatgcttgcattcatgcgagaagattctggtaaatcacgatttccatttccctgggttgtaaatccctgaggcctccgaggcacttcttgatgatgtgtctggtaattcagttgctcatcttcagggacatcctcagtttccccaggttgttcttcctaagcgttttgagggtccacctgagttgtctcctgcttcttggttcgtgagccgcgaggtctgccttgtggcctccttaccccaggatcaagttggttttgagtgttgtcttcctaagccgccctggccacggctgcctcccattccaactcagcatttcatcggttcgcctcctccaaacatcgcttaatttggcgattttccaactcaaccaacggtacatgtaacgccctaaataattaggcacgctacccaaaaaagattatgaaaccctaatcc

SEQ ID NO: 40648 - DNA, 4663 bp, Cannabis sativa
gatcttatacacacttgttataaggctaattggtctaaagtcttttaccttgcagctgttcagttttttgggaatgaggcaaataaaagtttcattcatactcccttgaattctgccttccgtttcaaaagccttaaatatttctaaaaggtcacctttgattgtgtcccagttcgactgcaatactgccatactaaaaccatccggccccggggctttgtttccatcacaactaaagagagccctcttgatttcatcttcatcaaaggggatttcaagctgccgagctgaaaattctgagattttttgccattcgattccttctatatctgccccttgttttctctcagatgtgtacagcttggtgaagaaggaaagtagctcgttggttatgtcttcttccctatcaaggatagtcccgtcttctctctctatccttgatatggtattctttgcctttctagcattcaacaaattgtgaaagaatctagagtttgcgtccccttccttggcccatttacatttagatttgagccagacgtttctttcttcctcaaagactttctgctgccaatccttttttatacttgttctttcatctgccaaggattgagtccacatcgaggtgccttctaatttatcgatctccataattcttctttccattgctgcctttgcaattttgctgtttccgaaggttgtcttgctccaactcttaactttttcttgtacaattcttagcttggtcatgaatcttgttcctggccaccccgacacagttgtcttgctccaccaaatctcaaaaagttttgagaaagagttgttttccagccattggttgtcgaagcggaatgggcaagggccccattttggtgggttggaatcaatgactaccggactatggtctgaaactagtctaaccatcatttcttgtctcacaaaaggaaatatcatattccaatcttttgtgaatagaaatctgtccagtctactacatattggcacttctctaaagtttgaccatgtaaatctcccattgttgagttttgggtcaatgagtcttagttcccgtatgagttcgtcgaacatcttcatacttctagtgttcgaagtgctatttagcttttcccccactctacggacaacattaaagtcaccccctaggcaccacgaatcgccacaaatttccttcaatcctgccagctcatcccaaaaatctggtctaagtttgtaagagcaaggtccatatatccctgaaaaccaccaagggcttttgtcttctgcctgaatcaaggcagaaatagaaaaatctcccactaatgagtccagaactgcgacgcttctagtgtcccaaatcagtaaagtacctcccgatctaccccatgctggatggtaaatccaagctttaaatctagacctccatatgttaccaataaaacttctatcaattgttgttcttttgacttcttgtagaataaccaagtccggattgattttacaaatagtcgccttaattgctctcttcttagccttgtctccacttcctctgatgttccaagtgagaatcttcattagtgtttcttttccttccctgattctttctgtttcttctcatagttcacgttgaacgttagattagataattctctgctctgttttttacttggcttggcctttgtctccctcctgatttgtggatccaaatttggaattatcttcattcccatctcagcaagagacacagtcaaagaattccattcctcttggttaatctttgcttctctattgtcattgcttgtttccacggtctgagtttgtactttaaattcttctttccacagtccgtttaagtcacaaataatgtcttcctctgtttcagcattgtcttcttccgcatctgttgtttcttcttctgaattttcactatccgaactcatgacttggggttcttcatcaatgaaatcgttgttgacctcctcctcaaaggaaaactggttttcaagtccctgactgccactatcttcagcagttatcctcagtgttttttttgcttttttccattttctctttctgtaatataccttcgtcaacctcttagacacccctgtatcatctttctcttctacttcatccatttgtaagactgaattcttatcttttttggcatgtaactcaaaatctttccaagaaaaaatgactgctgatcgaaaatcattgcgatttttggccttgatggttctgagatggcagttcataaactcattgataacttgttttgtattttcctttcttgagagatcctttttcatattcggcctactgtacaatagaaagggcttcaatctattttctggtttaaaataaacctccaccggcccaattgattccagccataagattctatgttgtataggcaaatggatttaatgttataaaaattgaactgatttcatttggtgtctttcaggattatattacagatcctgataggaggattgctgctgacaccattgctgcaattggcatatgtgtgcagcgacttccacagatggcccatacatgcttagaaggactcttgactttgaccagacaaggtttgtgaaagatgacaactgagaaatgtatatgtttcataaatttttcttggctttattcccttcctaattacatattgttgcagaaatttttgctggtgagtttggatctgttgatggagaagcaaatgttttggtgcaagcaataatgtctattaaatcaatcattaggcacgatccactctgccatgagaaagtatacttcttttcatatttttatgttgatgtgttttatatattattcatggcatgtattatatatatatgccttgtgaaagcatttgtgcactactaagttgggttttgagatattagtggatagtttattttgtccctttaatcgactactaatttatgagtatattagtgggggcgccactttgttcctattgatagaagtatctttgtctttgacacatggagaaagtataatctaaaatctttatatgaagatatatattgtagctataagatgcatcccatcaacttttgggaaattccagataatttttggtgatataaacaagttcaaattcactattttgaaatctattttcagtagtataaattattcggaattttctgaaaactggtgggatgccgactataaccatcataactacagtgtattatgtcatataaaaacatttgagttataattttttcatgtgccgaaaacaaagacgccctactggtaagggcaaaagtggcgtcctcactatagagttgccctatatttatatacctattttgatgacattgtgaagatgttgcatttcaatcttaggcatgctattatgtcaatgcacatgtaatgatagccaacaaaattaggtacatcaatttagttaatctgccatttgtgagacctaaatgttcaattcttgtatccatagagtaaactctgctgtattaactaaagctgatttttgtatttgaaaggtaattattcgactggttcgtagtttggattcaataaaggtgcctgctgctcgtgcaataatcatctggatggtgggggagtacaactctttagggaagctagttccgaaaatgttaaccacagtacttaagtatcttgcatggtgtttcacttctgaatctttagagacaaagcttcagatacttaatactactgtcaaggtatttttttttttttggctggaaacagtcaaggtactttagaaactatattttttgtcagatttatttatatatagcagttgataagattttgtagcatactgtttatctgctggtttctttgttatgatcactagaccaaactaactgtttataaattaagcattatttttgtggccctaattactttaaaactcttttctgtgcttcttcaaggttgtgaatcctacataggaaaatgatgcattttcatgtttaaggtcatattcatccgaatgggagatattgttagttttatagtaagaatcttattgtcattccccccactggcggagagcaatgtattgatactaatgctatatgttatattcatctgtataagtttttcttttctcattattcccaaaattgggttggtatcattactttgggtgtatgtcacgaactttacttattcaactggtcttttctgtaggttttagtgtgtgcaagtggagaagacactctgacatttgaaaaagtcttaagctatttgcttgaattggccaaatgtgatttgaattatgatgttcgtgatagagcttgttttttgaagaaacttctatcgtcacacttagatcaccaagctgcagaagcagaaccagggggcctacataagaatagaggcttgtcatgcttacttgcaaaatccttatttgcggtacaaacaaaatcagctcttccccagccaaataatcatcgaatttatcttcctggttctttatctcaaatagtacttcatgctgctccaggttatgaacctctcccaaaaccttgtagtttaaccattgatgttcgtgaaacaaatgaatctggtaatctagccactagtgatccttcagtaacagatgatctctcagtatctggatcattggatgaagaaactg

SEQ ID NO: 40649 - DNA, 1745 bp, Cannabis sativa
  modified_base (85)..(89): a, c, t, g, unknown or other
  modified_base (722)..(729): a, c, t, g, unknown or other
  modified_base (1394)..(1398): a, c, t, g, unknown or other
cgctcttccgatctttatgtgtttatttcattgttttagaatttatattaggatgttaatcaaatatacttggtagtaaatctannnnntggtaaaatatttccaacagaggggtaggacagacttcatgcagtccttccaatccgagaaagagagttgaagatctatcgcacccctagcgatctttcctgcatgagaaacaacgtgcatgtgagactcatgttgaatttttatgtaacaagcttcgggttccacgaaggaaggatgaagttgtataaaaattcaagcttagactttgcctgaaaagatcaaagggaaaaacaccacgaggggtaagatagacttcaagcagtccttccaattcgggaaggagggttgaaaacatatcgtacccccagtgatctttcgtgtatgagaaatacgtgcatgcaataatcatgttgaatttttatgtaacaagcttcggcttctgggaaggaaggctgaagttgtataaaaattcaagcttagacttcacttcaaaagatcatagggaaaagcatcacgagaagtgagactgatttcaagaagtccttccaatccaggaaggagggttgaagaattatcgtacccttagtgatctttcctgcatgagaaatacgtgcatttgagactcatggttaatttttatgaaacaagcttcgacttacgggaaggaaggctgaagttgtataaaaattcannnnnnnnctttgcttgaaaagatcaaaaggaaaaagcatcacgaggggtaagacagagttcaagtattccttccaatctgggaaggagcgttgaagatgtatcgtatccccaatgatctttactgcacaaaaaataacgtgaatgggagagtcatgttgaatttttatgcaacaagcttcggcttccgagaaagaaggctgaagttgtataaaaattcaagcttagactttgcttgaaaagatcaaagggaaaagcatcacgaggggtaggacagacttcaagtagtccttcgtatcaaggaaggagggttaaagatgtatcgtacccccagtgatctttcctgcacaaaaaacaacgtccatgcaagagtcatgtttaatttttatgtaacaaactttagctttcgggaaggaaggctgaagttttttaaaattcaaggttagactttgcttgaaaagatcaaagggaaaagcatcatgaggggtaggacagactttaagtagtccttcctatttaggaaggagaggtgaagatgtatcatatgaaatggatggcacaaaagattatattcctaacattctatcccgaaatgatataaatccttgatcttagaaatctcctacttgtatatgcttactataggcaatctaaacttagagttagattagtannnnnggtccaagctagaataaaactcatcgtatatttggtataaatttaagtctttgactttaaattttagatcccaaatagaaattttatttcagcttcctagaatacattagacaatacaatatgactttcacaagttattaatatccatattctgccgatggatccaaactgtatgtttatgtatggaatatgagtttagtattttgtgactaggatccacttggactattctaagaactctttgttgtaactgttgaattttaggccctaaataaaacctatttcaatataatatgatttactaattaataaagatcagaaactgcattttatgttacatggttcac

SEQ ID NO: 40650 - DNA, 1950 bp, Cannabis sativa
cttttagacaggtttgatactaaatttttggccatggaggaagctaaatattttagcacaatgaaggtggaagagttaataggttctttgcgtacttttgaaatagatcaacaaatcaaacaaaaggacaaacccaaatccgtcggtgataaaggtaaaagcatcactttaaaagttgttgagaaagaaaattctgataatgagtgtgatgatgaaattgctttattaaccaagaattttcaaaaatatatgaaaaagatgggtaataaacagaataccccaaaattttcaaaagagaatacaccttttaaaccttctgtgactaatagaaagggaattcagtgcagggaatgtgaaggttttggaaacattcaatctgagtgtgcaaacaccgtgaaaaagaataagaaatttttcaatgtcactgggaatgatgatgaaactgagagtgatgaagaaaattttgagaatgtttctctaaccccgattatttctattgtgttgtgtgattaacaggtgaaagaaagattggtattttgaataataccattgaaaaagaagattctgattcaaatgattctggaatctgtgaagagtctctcgctgaatcttataaggtcatgtatgaaaagtgaatacaagttacttctaaaaatagaatcttatctaaaatgaataaaaaactctcatcaaattgaaacttttcaattaaaattaaaagattatgagactgatttgtgcattaaagatgaaaagattactctattaaagaagaaacttgaaaatctcaagaaaaatttccaaatgcttaaccctaaatcttctattttgaggaagttcagaatgcaagtcaaagaggttttgctggaattggatcagatggtactgaaagttatggaatcacaaaatttgtaaaatctagtgttccaacgaattttcttactgctgcaaattcaaagtctgtcgctacaaatgcagtatctgtagaagcaaagtctctagtaattacaaaaagtgtaagatctcaggtaaggagatttatccctattttttatttttgtggtaggaagggacatattaggcttaaatgtttcactatgtagaatatgtacaaaataaattattttagtaattttaaaaaatttcaaaagaaacatagtgttatgaaataaaaatggattgaaataaaaaatatctagctagtttttctgattaaaaaaaaaaaaaagaataattgtaccaccccacccaaaagcaccttgagctatttgagaacacacgaacgacccaaaaggtggcaaaactatctctcctcatcataaacaaaatatacttgtactacaacaccatcattaaaaataaagacatgcataaaaaaccagctagatactctgtgatactttacctttggcgacataattagttttttagtttaatgtactatcaagattttcttccttattattttaaatggtgtagttagtctattttttatgattctattctcaatgcttcatttatataatagaccattttgtctgatttacattccatttttctcaaacattttatttcatacagatttgatctaatcgtgtgttatcatgtttaccccactttacccacatattcaacttatgaaaaaatcctctcgtattttagtaagcaaaaaacgacattttttaagatctttctcacagtcacctagtctattattattatttattattattgaacttgacctagttattaattagaatttttaccctccgaactttaacaatcatgctccctgaacttttaatgtcgttaaaaatgtctcctgagctattgagattattgtatttaaagacttctgtctaattttagtaaaaaaaaattctaacatgaataaaaatttaggggcatgatttagtatatgtcaaaatatggacataatttgataaatat

SEQ ID NO: 40651 - DNA, 2529 bp, Cannabis sativa
ttgggatagataagcagacttacacgagaactgcccgttactttccagcgtccaaacccatctatcttgaccaacaccagaggggtgaccccctttcaaaatggccgcaaccgtgtccttctcaaacagagaattcagcttttgaaggtcccagtgaccatcattacagagtaactcccctacacaattaaagatggtaggggcacccctcctacgcttcgggcaaaagcctttagaatgaggaatccatgggtccgaccatattttcgttgattctccgttagcaatcaacttacaagccccttttttcaagatagaattagccttgacaacatttttccaaaaccaagaatcagaatttttatacctgcaagagagaaagtcatttccccggaggtacttcgcgttcaatacttgagtacatagagattggctaccggttagaatattccacccccatttagccaagaaggcctggttcatttcttttgtcttgcggaaacccaatccacctaacgatttggggaggcaaagcttgtcccaagcctttaggtggatcccatggtttcccttctcaaaaccccaccaaaaatctctaaccagactatcgatcctattaaccatacgagatgatagttttgtagtttgcatagcatacattggcaaggacaagcccacggactttattagagtagcccgccccgcctttgaaagagtctttgccttccaaccttgaagtttagccgtgaggttgtctaaaataaagttgaaatcagcgtccttttgcctagaccggaaaaggggaagacccaagtattttaagcacccctcaggataatcaatacccagaccttccttgatatccctccgcatgttcaccggcgtattcttactgaagaaaattgtcgtcttgagcttattcacctgttggccagaccatgagcagaatttttctaagcagctccagactccattagcttcaactaaattggctctgcccaccaaaattaagtcatccgcaaagaaaatgtgggatagcacaggaccacctctactgagtttaatacctttgatagaaccctggtcaagggcatcatgaattaatcttgaaagaacatcagccgcccagatgaaaagataaggggaaagcgggtctccctgacggagcccacaggaagggttgattttgccaacaggacccccattaagacaaatatttagggttgtagtagaaatacattgcgatatccaatggcggaattttggcggaataccataacactccaagacatgatcaataaatttccagctcaacctatcgtatgctttaacaaggtcaatttttatagcaaagaatccctcctttcccttctttctattaaaggagtggataatttcttggacaatgacattgttatcatggatgtttctacctgggacaaaagcagcttgcgttggacagataatggaaggaagaatgggtctaattctattagccaaaattttagctatgactttgtacaccacattacacagagagatcggtctaaaatgattggttcgggtagggttttggaccttcgggatgagcacaatgttcgtggcattaatccctctatgcatattaccattcttaaagaagtctaggatcgcatcacagaaatccgatccaacggaatcccagtaatgtttgtagaaaaggactgacatcccatcaggacctggggctttatgggtgttcatggtaaacaaagtcctctttatctcatcagcactaggggtaccaacaaggtcattcaactcctcctgagagagtcgctcatgaatcaactgacagcagttataatctagagaggatgaagcttccgtaaatatacctttgaagaactcaataaactccctcccaataacctcacggccggaaatccaaacgttttccttgttcataatactctcgatggcatttcgccggcctttaatagcagccgaaagaaagaaaaacttagagcacttatccccatctttgagccaagaaatcctggccctttgtttccaatagatcgctttcctttctcttgattcattaagatcccggcggaccacccgctcctgattccagtcccgagacccagccgggagtctctgcagaaagtcaagcttccgttcaagttctttaatagtcacatcaagcttaccaaattgagatctatcccaattcaggagagccaccctggtggcgcccacctttttgaaaattcttgccggagcccaggcgtggttaacctagttccaagcattggccaccaccagattgcttctacatcacgagtccatccttcctcaaacttaaaggaccttttaaacttggtcgtcgggccatccgacataagacataaaggcctatggtcagagttacaagtctgggacgagcaaaggatagctcttgggaataaattgagccaagcaccattcactaaacctttatctaaagcagatttcacatgctgcctcccagaccgatggttatcc

SEQ ID NO: 40652 - DNA, 1405 bp, Cannabis sativa
aaatcaaatatggaatgatcccatatcaaaatatagcacaatgcataacaaaagtgaggtgattgcttcgtttatagagcgaaccaataagaatatgacatgtcaactaactggatacaacacatccaaactaacttaactaacttactcagacaccctttaaagatagcacatcaccattcattggcaccttttttttttcccttatcctatattgtttgagccagcaagagcatttttacatgaatgaaatgtcagatcttcaagtacatgagtaaggcagcctgcttctgagtcattcgagtttttcgacagcattatctgctctgctcgataatctgcttttacagtttttgaacacatgggcttcaaatgcctagaaaggaaaggtgatgcagattttcttcaagatcaacttccatagaaagaacaattggcttagttcaatgatcatctccattattagctcatgctgaactaataatagttcaaatttccttatttgatcatgcttccatgatcaagaacaactcgagcatagagagccacattagctgctgaactacctttgttcttccacaacacatcacagcctcctcggccaacataccagaccggttccagaacatcccaccaaacacatggaatataaacaatctctagagcaacactagctggactaacaattctccaagcctggatgactagacatcacaaaaggacaatgtctagcccaactgacccctgcagataatatctagccttataataaatttggccaactagttgatattcatgtagcagcaacctccaaccaaggccaaagccaccgacatgcttttgtatacacattcgatcggtctcaccccatccaactaataccatgagaatttcgattagaagaagaccaacaatgcacatacaccattatttccaagcttatacaagtctttaaaaggaagagaaaaacagacattgcataacttttggatgagctagagccactgctttagacaaaaaacgacatttcatactatgaattatttctacattttatgccaccccatgataaggcatccccaaatacaaacttctttcatcagcttctatgattcccatcaagttaagatgcatacctgttctaatttttgaccagaagccaactcaagcaccccttaacatcttcattacattttaagctgaatcttattgtcgtctgcaaatagtatatgagaaataatatgagctccatgagccactttacaacctctcaaattccctttaaactcaaatttcttgattaacgaagagagacattcaacacaaatgaaaaacaaatcattttggtactaaacagtagaaacatattgcaaaattataaaattgaacaagaatttgaaacttc

SEQ ID NO: 40653 - DNA, 1534 bp, Cannabis sativa
tgcttttgggggaaaaaccctttttagtttttacttttacttctcccactagaaattgacatttaaagagtctactcttctctctagagggctgaacccaccaagtgccattctcttagaatttttgtgcaatttcgacgatccaagcttcctacattcttcctcaccgatttcttgtagttggtaagctttctattcccgctatttcacttaatttggttgtttacgccatgaatgtatgagcattattctttgcttcgaatatactttgattcctacattagattgttgtcattttggtattttgatccacatgatagccttagaatacacaatgtgtgatttctagatgaaaatgagttgaatctaacctttattgtgattctaggctctttgagtcacgaagaacatgaggaatgtgtttgagttcttgaaaaaacacattattggatccgtacaagtcttagccagccaatgatgtcttatttaagacttggtcgaccaagggtgacgattaaggggtatggccggccaaaggggtacaccccataggctggccagcctatgcctagaaaatggattcctaggcagccaagggtggctattaaggggtctggccagccaagggggtataccccataggttagctagcctatgcctagaaaatggatttcttgctatcctttggctaggtcatcaagtttggccgacctttaaggcttggaaccctggtcggccaaggccaaggctctgagtgggtgaccagttttttaccctctgctgacctcggctagggtctcggtgatgaccccttggaggcatatacagcctgtagtcttatgcgtggttctccttgggaactttaataaggctccatagtgagtccattatagttaattgtataacttagggcttatcatatgtataagtaagtgtacttaacgcggtacttggtcgataattgatctcgtgcactgtgatttacctagagtgtacccttagcaactgttgactacaatgtgtttgtagctttgtcaagttgctcacctccccttatcccttctttgcaggaggctttgagtgttggataagggaagtgacagccgcgtaggtcccttagtcatcatgtgattatggcccagacaaagaagacttgtcatagagtgtctttgtgcgacccccatgtagccagagtggctacaaggagtcgggtcaggattgtagacgagcctacttagccttatgttgatatttatctagaggttgaccaagtagaggttcttgaggtcgactaaggggctgagtgtcccgatactgagtctgatcttgagaaggccgcacgagttaagagaaagagatacaagacttgtattgtcctctccaaccgccctttgggtacctacaatgctgatgataacacacataataggcttggtgaaccttcactgttaggcttggatcacgtcttggctcagtcttttgagcctgagattcagatgtgagatcacagggagatagtgttgggttttatgcc

SEQ ID NO: 40654 - DNA, 1701 bp, Cannabis sativa
aaaacgttttaaaatcatagggctctggggtgtctcgccaggaactcagtaccaatgaccttgatagcgacctggagtttttcccttatctttccgaggttgattacgtacacctcgttgcttatttgttaaaaggcttaacgctttattttgacaatcacaattcttatcaacagagagtacttcggcagtcatcataatttgaatgtcagcttctgactcgtcaaaactataagtctcactgaaagatgtctgaagttgattggtgaaagtaacacgggtgcaccttcctatagcaagctaggtgcctcgcttattaggtcttgagtccacccaactgttatacttagtttgtacattttacactaagtgttttcacagtcaatatgcatcgctttcgtcttcccaggtgtaacgaagttgatatctcgccttacacatacattgtcgtatgatttatggttaatacatgaagcaacagtttgtatatttttatctcgcatatgactttatagtcagtaagttacaaacatactctgtcacttccgcatttaatgagttattccattaaaaatgattaccatctcacgcattaatccatattccccttaacttgacacgtatcctctactgaaatggtagctgaatttcgagtttaacaattgctccttaaaatgttcgatgtaataaaagtactttttaataattacagagggtattttcgtcataatcccttttggaaaaacgtgtccttttactttggcagttgtacgatttcaagggtcattatgaaccgtcttttcatcttccgcctcactcccaactgttagatctcccaacctttggccttttcatttacttggttttgagtataaaatggtggcttaggcttgccatcttccataaattcctagtttttggtgagtttcatcttgagattggattgtcattctcttgctaagatgtcccatcaatgttcagaaacttattcttcaaaactcgaaacaccagaatgtaccaaccgcttttcctctccgtacgttcccaaaaactttaagcctcaatttaaattagaaatgaaggattccaagactgaggagctcccgatcaatccaaactaaggatatgcagttgattgttacagtcgatcctcacaagagatttttgagggtaagtatcatccctcgcgaatggtggtctggtcttgattattatatatatattttcttttgttgctctattgatattttatctctgtctccacaggaatgggcatagattttgagagcaagttcagaggtcctcctcaggctgacaaggaatccaggaagaaggtagtcctagttggcgtggtcatggattatactaaagaacccacctggcccaagacccaagctggcataagaagacctatggaccagccaatcttgatgttgaaaaatttcttgaggccgagaatgaggtcttggctgtaggaaatgggatcttttgatgcggagaatgaggtctatgcaaaggtcgagaccttttaagtgtagacggtctttctcgagctatgtgtagacagtctttctcgagctatttgttgacggtctttctcgagtgcatcaaccccccatgaataaccttgtattctttgtttaggaaaatggcttaatggtttgcccctagtggcatttttgtaaagaccagtttgcaaac

SEQ ID NO: 40655 - DNA, 1797 bp, Cannabis sativa
aaaaaaaaaaaaaaaaaagtagtctttgaagtggtatttaacttggtcagatcatgttatttgagaacaagtgcagtgctggtgtgtaatacaaggcaatacattgctgcatgtatattacgagatgattcatcactactgtgtattacgaggtgattcatcattgactgagtattacgaggtgatttatcactctgtgtattacgaggtgattaatcacgtactgttgcgtattacaaggtgactcatcattgttgtgtattacgaggcgattcatcactgctgtgtattacgaggtaattcaccattactgtgtattacgagatgattcaccactactgtgtattacgaggtgatttaccactgctgtatattacgaggtgatttatcactgttgtgtattacgatgtgatttatcactgctattataatgtgatttatcactgctatgtattatgaggtgattcatcactgactgagtattacgagcagctacaatatctttgttgcgaggtgttgaatgtttatcgaaataacattccaacaatgttaaaatacctcatttcatgaaccttgtaatctttatttaaatgagatacctcgcaggttgtgtgttaagtttttttttacctatatatttaagtatttgaataattttcgcaacaatcaaaaaaatatataatttttcttatatatatttaattgtactaataggaatataacacattgaatgagtccaaacacaccactacagcatatttcataatgaaataaagtcattgtaatttattgatcacatagttgtgccttggaaaggtatcaaataaaggttggtataaccatcacgtgtatagtggataagatgaatatatataatattaaatattagttcgcatttggtaattttttttaattaactttttttatttttttaattaaaaaactaaaaatatttttcaaaaacgtgttctataaagttgttttcacttttaaattttttaattgagaatcaaaattttaaaaacaaaaataaatcacctttaaaaattttttaaacagtttttttataatcaatattttagactctgattccaacctgaactttgagactcgaactccggcctcggtctcagttctggactcagactacagccccgatcctagacttggaactggacccgtttaaataaaatcaaaaaataataataaaaataaaagttatagaacacacttttattttttgattttaaaattaaaaaacaaaagtggttagaaattaaatttttattttttttttaagcagaaatttacttttatttttataattaaaaaattaaaaaataaaaatgttagctcccaaattattaactgagatattgtatatctatatttttttaattcgttaagcatgcatgtggctagcacaagttgatttgtagacatttagaataaaaaaatactataataatgttacagtctagataacatgtatttttgaagagtttgttattaggcatttgaggatattccatgcatatatcaagttaggtatgtaaaattgtggattaattaatataaaataatgtagagttttattaagtatatataactatatgattgttatttatgtctgtatctcattaattagtaagtagtctcaattattgaccaaaaatgtgcaatttaaaattggattatttatatatattatcatccaagacttccaagatggagatttgtaattttgtataaaataataatagcttgttcaggtttaatttctttagattaatcata

SEQ ID NO: 40656 - DNA, 1296 bp, Cannabis sativa
catttatttaaaataagtaaatctcagtttggttgttgagaaaacttaagaaagaaaaagaaacccacaaaagtaatcataatagtccatttaagtcacatacttttggttactcctagattatcattaaccaaacagagcaaaataaaatttttaagagaggggaatcagaacttatgttcaagaactaaaagagaaagaaaaaaagaatagtttagtactcacaaaataaaatttaaaaagatagaaaatcttacttgcaaatttcttcatccacaacagaagagattatgaatagtggtctccgatacagagcattcctaagaaaagataagtcttcgttggacacctgcaagagaaaacatttaattgcttcaaaaacttatgtgtgaacaaacatttgccttcttttaaatattcaatcaatacctgcgaaatcccccaaaaataaattaaaataaattgtagaattaaaataaatcgttagaaattgtagaataaggaatgactgaaaaggaagaaccatacctgcgaaaccccaaaaaataaattaaaataaattagagttttaactaagaaaaattagaatgtgagtcaatataaaaaaaattaacaaaactaaatatatgaaaaataacattgttaaattggtagttaacctccccaaattaattctagtttttactgtctattaatgaataataaaattattatggaatgttcatacccattgtggcatagcatacaaagaactcgacatggtaaatttaccacaaagaaaaatatatgaacaattaaaaaaggcctagcacaacaaatttacttaatatagactaattgacatgattggtcatccaaccttcacagctcttttgaccttggcaagggatcaaagaagaaaaatgacatatgacttacgggaggatagatatggcttatcactttcattatcaaaatgtcaacaaattatgcctatcaaaacaataatagcaaattaggacagatgaagaaatgatctacttgctttaaaattgttagattaaaaataaaatgaaataaaatataccaaataatgcaaagaatggagacaaaacataccagcaaaactttaaaatatagttctaacaaataaaacaataagcataatgtaagagtgaaattatcacaagcacacgattcagaggtagtttgtagtatgctgcaactggtcctgtatgcagttaaataaggagagattcaagttagagctagcagatatttaacattcttgcaaagtttgattcaatagaaaattga

SEQ ID NO: 40657 - DNA, 2634 bp, Cannabis sativa
caaatttaaaattttgaaaaatatgttttgagttattttaacaatcttaaaattttgaaattaaagattatttaaatgatacttttttattatgtaattattaaatatctcaattcacaattgttacatgtttgtttgtttgtttattaatttaaatttatttttttaataaacttattatttaattgatttgaatggctatgattaacttgttgatggatcttatgatctaaattaatcatagttagtagtcaataaattaattaaataatttgtaacaggtaatttttcaattttcttttatctttgtcatgaacctagtaacatgatagggctcatccaaatcaatgtttatgtgagcctagatatttgctattgggctgagatgcatatatgagtctatttaacttttgataattaaatggattaagttgttaaaaataaaatgatcaccttaataggcccaattagtattgcgcttattcaattaataaaaaaattatttatttaaaggttaaattcttttcttttgagtcttgtgtgagagttaggaggtcataatagtgggtaccatattctgaactcagtcctctctcacatgaactaccccaattgtgaaggttcatttgtcttatttaaataattatattaggctaattatattagtttagcctaattaaaaattgattagccacataattagttataaaatatatgaaattaatttttcattagattattttaaaattaatttagaaaaatacactttgtttaacgaaataaattctagataattaatttctagtaaactaatttatattttttctgatatttaattaaatagaaaaatatatttaagttgaaaattaattcttaattaattttagaccaacttaaattagaatatttttattggaaattaaatatagaattaataattaagttgatttatttcaagatacttaattagttaattttattttaatacatttaattaaatagaaaattaaatttagttgaaaatttattaatttcaaatcaacttaaattagaataattttgaaaacatattttattttatttcaataattattaattttttattttttgaaaacattttttttttacaaaaatgttagaatttaaaaattaaaaatttgaaaattaaattaaagttaaaaattaatttcttaattaattttagatcaatttaaattaagtaattttcattaatgattaattaaaatatattttaattagaaaattaacacttagtttatgaaataaattctagataattaatttttaagtaaactattttgtattttttatatatttaatttaatagaaaattaatatttaagctgatttaattcaagatagttaaatattggataatttttggtgacatttaattaaatggaaaattatttttatattaaaaattaaattattaattatttttagattaacataaattagaataatttttgaggatttattttattttattttactttaatactaatatcaaaaatgtgttttatttaaaatacattggatttcgaattatgaataatatatttatagaaaattgaattaatttaaaaagaattaattttagaccaacttgaattgagtaatttttataatatttatttgaaatatatatactaagtttggaagataaatttttaatttattttcagattaacttaagtaaatagttcaataaatattaaattaaaatttatatttagttcatctaaatttgtaattttaattaaataaatatataagtattaaaataaatagattgaaatagatatttaaagtaaaaatacaatttcttcaaaaataatgagttttaatttcaagttattcgatctttattgttggtcttacaagattattatttttaaagggatctcgtggcacgtgacatccccctaaagaaatgtcatccgttagacataacattgtaagatctcgaaagataagtatattcatggattcaatttctagtagattcatcccgaaagatgactactttaaacttgatttataagtataaaataatggtagaaactcataaaataagaatgaccttgacactcgcctaaacggaacaacatcgaattcatatatttgatctaataaaaggtttctaaaatagtgttcattttagatgagttgactactatacattcaactgatgatgtctttgactcttgcctaaatgggacactgtatatcacctagttggaaaattttagaaaatatttgaggtatgtttgttttgtatttttccatatcttcattacttgctaatatttacaaatttccaaaaattgtgtatgaatttatattgaacttgcattgttttctgttattcattatatagtatcaattttgaactccattgttgatctaacttagttgattatttttaatgggacctcgttacgcttgacgtccccctaaagaatggtcattcgttagacaatctaatagtattagatcttgacagataaggatttgtgaatataaaatctaaatcatcctaacgatgacaagttagactattgtttacaatattaaaataatggagaactgataaaataagaataactt

SEQ ID NO: 40658 - DNA, 1209 bp, Cannabis sativa
ttttaaaaaaaaataaaattttaacgacttggaccaatcaggaattaacacgtggcaatttacttaatacttaacagttgagtacctaccattaaaagttctaaaattataaattaaatattattatcgccaaaaattaaatttaagtatttatgcctagctaatggaagtactcgtcctatttctggcataattatacaaaaagaattatattttataataatataaattcctcatagcataattaattatcattgagttttaatttattaatatttcaattcatttgtgtgtatggtatcgaatatttatgtttcaaaaattacacgaattcttacgtcagaggtgatgaaaatgtcaactgttgtataaatgaatttttaaaaattctttttttatataaatattttatttataattttaggacgtaaaatttttatttataaaaatatatttttgaaattttaaaattataaaaatacattttaatgaaaaaaaattaaaaaaaataactaaaaaaattaaaaatcaacctcacaacaattataaatcaactacatgataaactgtaaaacaatcaaaaaataatctaatgtcaactataaataagctataaataaattataaaacaaccaaaaaaataatttattatttttacagaataagttttgtcataaaaaaaaaaaaaaaaaaattcatactgaaatatttttgtaattttttttaaaaaattattggtctattataaatttttctaaatgaattaaggatctatatgaaagcatattgaagataagaattagttgtatattgaaggacccctacacaagtaggatcaactttggaatattactactcaagaaccctcctaaccctaatagggtctatgttcattataccaatgtgtgtaaatcaaatcccatataaaaggaaacaaataatatttttcaagtgcactttttttgtggcccgaattatatattcttcacctgtgacctgtttagattttcattttaatggaagaaaaaaagaatttgtaagggtatgctttttgttccaactagaaggaacatgtctacttaacatcgttgtctagtaagagtatgccttttgttccaactagaaggaacatgtctatttaacatcgtcatctttagggtgaggcggttctcaaccaagaaagctatctaacttttttttttttttttt

SEQ ID NO: 40659 - DNA, 1055 bp, Cannabis sativa
tttgagtgctagggtctttgtttgagtgctgacttgggcttccttttgggagctgtactgtcatgtgacactggttttgtccacataagcatatcacgtcatggggataaaaatttggataacatttgcccccaagtccctatgcggacatctgtacaaatagggactttaccagctaatttggcaacgtgactattgttacctttgttgaataaaaagtgatgcgttttttgaagcactttatcttgactatctgatctcattgtagtggagaaataactgctttaagtgcctttatggcgggttggtgaagtaagtgagaaaaagggggcccacatgtactacataagtgagttttggggggaaaccttttttttttcctttcatttttcacttttactttctctcactagaaattttctcttagaaaagctcttccatctctctaggtggtcgaaccatgaagcttcattctccacgggatttttgtgctatttcaacgatccaagcttcccaccttcatcttcatcgaaatattgtactaggtaagctttccatccctgctttttcacttgatttgattgattttgccataaatgcatgactattatttcttattttgaacatgctttgattcttacattagattgtagtccattcgatatttttatccgcatgatagccttaagatagataatgtgtgatttctagacaaaaagatctgaatctgacttttattgtgattcttgggtgtttgagtcacgaagaacacaaagaacatgtttgagttcttaaaaaatcatgtgttttgatccatgcacatgctggctggccaatgaggctttgtttgaagcctggccggtcatgggtggcttttatggggtctggccggccatggggaccgtgtccctaggatggccggccttttcctgaaactagggttcctggttggccactaagctgggacttggggtctggccagccattaggaccttgaaccctagctggccaaggtcaagtctccaagcgggtagccagttttctccctcttttat

SEQ ID NO: 40660 - DNA, 1599 bp, Cannabis sativa
agggcataaaacccaacaagtgcgcgtacgcaccttcaaatatgctttttgcccaatggcttagttagagagtgttatacccaaaattcggctggtacttcagaggaggacatgtgtccacctgggagaatacgaatcaatgaatataatggcaattatattaaaggatattgaaatggaataactcattaaatgcgaagctaacagagtatatttataactcgctgactttaaagtcttaagcgagataaggatatacaaactatattgcctcatgcattgacaagaaaccatttcgcgttagaagacacaatcataagggtgacatctgttgtacaaagtcaggcaccaacctcgctacgtataaagagatgaagacgagacatgttaaaacacttagcgtataatatatattatacaaactaagcataacagttgaacggatccaagcatcgaatagcgaggtatccatcttgctatacgaaggcacactcatggtaccttcactaatcagcttcaaacatctttcaataagattcacaactccgtcgagtcagctctctcagatagaagctgacattcaaattatgttgactgctgaagttcaccttgtcactaagaactgggattgccagatggagtgttatccttcaatagcagaaatgacggtatttacattattaacatcgggaagacatgggaaaagctccagctcgctgccagggttattgtttctatcctagcgaggtgacccagcgagatacactttgtagcgtatctaaatccacgtcagcattgatccggtaaaagtggataaaacatagctatgtgattctcaaataatagccgcatttattttacgtgggatgtagtcaaatcccataattttagggaaatattgttgtgggatattaatctgattgtaattaactgccttcctatgtaactataaataggggcagaatacactaaaaaagggacaaaaaatctttaaggaaaagaacccttgtttgtattagagaaatctaataagatagacttgtggactatgcaaaattttaactgcaaaactacgtaaaaagttttgtgttatttcttcttcttttactactgttatttttgtgcaaattaatcacgaaatcggctttaatatcgttaacaaaaatttgcgttaacagtttggtgctctcattgagagcctacgtgaaaaaagcttaaaaaaaacctaatcaaaagaaaaatctttctccatggctgataatggagaaaatgacgatactcgtcctgaagagactattcaccgtcctagaaaagagccaatgggctcacggaggcctcccaatacacgatctacacggtccactcgttcaagaaggacccaacctaaaggtggccaaaatacacggtccacacgttcaaggaggactcagcgtggaattggccagaacccagaagcaaggaatgaagaacccaatattggtggtgctcaacccatggaatatgaaaatgatggtgcctatgatcccacgagatacatgccagttgtcgatttggaaaatcgccatctcaggcgctgcctggaagaggcaaactgacgaa

SEQ ID NO: 40661 - DNA, 2255 bp, Cannabis sativa
  modified_base (1070)..(1083): a, c, t, g, unknown or other
cgttgtgcaagaagttaaccttgatagcatcatcttcactgaacgttatggtgggttcccctacctgtggtatttttggtttcctttcttcaacggccaggaccacttctttttattcgggcatacctttcccaggctttgcctgaatctctagctatgtgcgggcccctaatgatgacttgcaaatgcccatctaccggtggtggtagtaaatcttggttattgtctgcctgggtggccctctagttttgatcgaccttgacatatttttgcacgtgcggattattctttcttatcaaaaattcaatttcttgcttcaaattgttgcattcattggtggcatggccataatctccatgaaaacagcaaaacttagacttgtccctctttcctttttcatgggagcaggtttcttgtacggagctactgtctgagtggccatgtagatgatctccaaatcgtctgtcaagacagagaaagtagtgaatttggaaggattttctttagggggcctgttcagcttttcctgcgaactttccctttttcgcattgccttgcctgttgttgttagaccttttaccgcccgagcttgaattgcttgggtactgggggtgctgaacggatgttccagcaaagggagcttgtgattgaccaagtttaagcttgacttctgcttgctaaatggcatcttcgagcttgatgaaaccatctacgcaatcgaggaaatcactcatagaatctattggtccatcactcttgatatccttccaaagctctccgagaacttcgatgcctcccagtcttgcgactaattttccttcttcggttaaccgtgccactttcgtcgcctctgtcatgaatctactgatatatgctcagagaggctcccctggcctttgcttcactttgaccaggtcttctaaatgcagtgggagttggcgagaagaggagaattgtgcatggaattctgaggagaaagccttctaggaattgaaccttcccagtgtaatatccgctttcttgggtaattaatttatttttatacttttagtttattttgtttgtcaatnnnnnnnnnnnnnnttttgaatatttatgagtttagtggagtatggaacttttttagtgacaataaaatttattattttattattattattaatattattttattttgatggtatgtataatgctagataaataattaaattattggagataaattaatatttttattattcgtcaatattattataggtatattaataataatataggtaaatatattatagtaaattgtttagtttactattattattactgttactattattattattattattattattattattattagtattaatattattattagtgatattattattagttacgtatgaaatatacggtatgtatatatatttatctttttttttgaaaaattttaagttgttgaggtgggattatattagggttaggactatatataagatatttatatgatttttgagggtttagagggtttagaaacggggtgagaggcaaagacggagagagaggttgacgaacaaaaccaagctgtgaaaaaagtgagattttgggttgttgagtttgatagtttttgggctgccctagattattttattgagttttatttcatccaagaggagttttaaatgcgattagaaggtctgtaatcgcaccttttgacagaaaccattgtttatgttcgaaaatacggttcttgaaacggacctggatttgaacgtgtttaagctgtttcggagatgaaaggaggttgtgtttaagtttatgggaccccaaagatcaattttaacgtgaagaatcgaagctttaaggtctaaaacggaatttaccatttttggactccatttttaacggtggaccgccaaggaagaagataatcgggtttaggctatttcagctatttttcttggttgttcttggttgttttgggatcctggattcattggaaggttcttccaataaaaaatacatgtcaaaagcacccgaagaagagttttgcattcaccgacactagaaccgacgagaactccggcgacactccgttcagaggcttctggaggatcttgttctcaataaagaaacttggggagagcttcgagggagagaaaaggatatacttagcaactgaggtaagaagagtggacatctgtgcacagggtgtatgttgaaacatacaaatgtattatgggtttgtatttaca

SEQ ID NO: 40662 - DNA, 8397 bp, Cannabis sativa
  modified_base (7907)..(7912): a, c, t, g, unknown or other
taagtataacacttaacttccaaaaatattatatcatatctatgatttttttcttctttctaaatgtgaattaattggatatgatttgttttttttttcttgctaattatattagatgttatttttactcaatatgatgtgattgtgttgtattatatgatttcttgatataattgtgttgtattgtatgattctttctacagatttaatcattaattttcatatattaagacaaatataagtgttatttctaaacttttttaaattccaaaattttcttcctggctggatagtattcaaatgggaagtactatcattttctgtactataaacgacatacatttgatttgtttaaaaaaaaaaaaatctaatctaatctatcctaaaaaagaaaaaatgaaaagatagaagaaaatctaaaacaaatttcactccaaaactttaacccatttacacaaagattttaccaaaatcttactttaatagccttgaccagtgttgtcaatgcatacattccataaaaaggtgggtccaggagaactatggtggaccttagtgcttcaaaagttgccacgtgttccatgcgaacgtattcttcggcactgaactgacactcacatattctctctctcatattgaaacattcattatttattcaaaaagttgctcccaaattcctctgcttttttagtattcttcttcttccattgtcggattcaaagagagcagagagagagaaagctttggtgttttttttttttttttgttggaaagacattaggctgttaacatggctgaccagaaagacgagaaattacctgtcttttcttctttgaaagactctccctcagccatgaccaagaaaggagcatacgctgctgtctcttacatggtttctgcaggttctctcaaccatttttctattctgggtttttcttttatacatgcattttgctctacacttgtttagaggatcattatgccatttttctagcatgggtttttctcatattttgttactttaatttgtatcgtttttggtttgttctgttaattggtttttacagttcatatatacgacatgatgctacgattgggaagtcattgttcttatgtttgaaaattatagatatgttagtcactgtgtgttttcatgtgttgtcaaaaatgttagtaattgttttccctttaaaatataacattttgtaatagtaataatttaacaatagtgaattttgtgagattcagaggcctttttgtgcctgctgttagtttgtaaattttggctttgattattgaatatctttcttgataaaaaaaatcaaatagtaatatcttctagtgaaattgggacatctcaattatgtaattatctagttaaaggaacacaccaaaatttactaattactctgaaagattgtatagggtttaagctagagggcaggaagataagaataaaataagtagatgataagaatttttagttgtcacgctttgtttgttatgtgataaaaagtaggagataattattcattatatatagttttatatattgggatttgttatagaagcaaatggcaaagagtggaaagaaaggattttgaggaatgggttttgactgggaaaggcacatcattatatagtacttaaagagataaagtgggggggccatggaagagcaaaaaggtgtttatagtgggtttaagatgtgaatgagagggccacaaataatagagtttttctacaaaactaacaagtagtggagaaggttttcaactttttgattataatgacatgactatagagtacacaaaccgttgtttataacacttcgatgttgggaatgttgagaaacattttgtctttcagctctctagccttcttatatatatatatatataaatagtatatatgtactatatacgtatctgcatgtttgtgtatctataacttggtcaaaattgagtattattgtttttattttttaggtagatgatgatagtacagctcaagtctctaccttacttaaacttgatcatcatctgggtttagccattgctaagtttttttttttttttcattttcagaaaggttggtatcatgtattcaatgtgaatatataacactatattactctatttctctgttttgcagttctcttggtactattcaacaaagctgctctgtcttcatatagattcccatatgcaaatgtcattacattatttcaggtggctcattatcctttagtcttagtactcaggatacaatacagtaggatcaaatttttaaataatattaacctattttacaatattttattacaatgttagcttatcatcacatttctacacctcccctcctttgatttaccctcactttattttggataaaatggcacacccttacaaatatttatatatattctaagagaattatagttaatcatattttctctattacaaaacctagtgttattgcttaattaaactttggagtggtgctacgccaaaaagtcaaaatcaacacgtgagctatggtatttgcttcaaagtaattttcttcaaaagttaatttacatactttaacaaatgtctttgctaaaagttttgtctaagagcctaagaggctttacaatcattataaattttctacatgctaattaaatatttcttagctgaaagtagttttttttttaactttttattactttccatcttctttgttttccttagatgatatcttcattggcattgctttatgcattgaaactctggaagattatttctttcacagtcgaaccacagaacaatactaataaaaacccagcaactctaataccattgaagacattagtgtacactctccctcttgcaatatcatatttgctctatatggtatgtcttttctgtagttgttatttttgtttttgttataagttgtttttggtaacttcaatgatccatttctatttttcgttgcaaaagttggttaccatggaatctgttcgtgttgtaagtgtcccaatgtacaccactctcagaagaactacagtagcttttacaatgattgtggagtactttttgtctgggaataaacattcatattcagttattggcaggtacaatataatttaaactttttctccaatgattgtgttattgattggttcttaaatgatctgtcttcttttgatgccacttttgattggtagtcttgatccttttccacacatcaaatttctgatgattagttttcttgtattactcattttctttctaacacaattcttgatggaataaatccaaggatttcatcagtgtggggataatagtatttggtgcatttatcgccggagctcgtgatctatcattcgatgcttatagctatgcagttgtttttgtagcaaatatctgtacagctgtatatcttgcttcaattgctcgtattggtattgttttcgtctttggagctttcaactttcaagccatttagcttccttgtttcaaacttcttactgctaatgcaccgtgtacattttcaggtaaatcaagtggccttagtacctttggattaatgtggtccaatggtaagataaaaaaaatcttaatcagaaagttctaagatttttcaggtcattagcaaacttggactcattgcgaaatttatctgctggcttcttgtaggaataatatgtggaccaatcctactcttttggacattaatcaatggtgacctcagacaattgttaaactttccctacttatcttcccttggatttcaggtgcttcttcacttcattgatttgtaattatttattttctttcaattactttaagaacactattttagcatgatccctccgaaatttgaatggcgagcggtacatgttttctgttataatagttgtcgacctgtctatatggttttttactcaagagtcaagactattaattgagatttgaaaaaaaaatgtttatgatcatagtcttattctgctcttattggaatagatgtattaattcattcttattgctatcctattgttaaatgtactcaatgctcatcatttcgttcttgttatggaagataagattgtaaaatctttggtttcttgtaaattcttagttttgttatttcttatggacctttcttgttcttaaaacaatcatttagttaattttagaataattagttttttttgccccctctacttatgacactgtatcattctgccccttaatttataagccttgttaataataccctctaaaatatatcagttggaataatatagtccttccgtctagttttggtcaaattgattgttaaattgatgatgtggcattatacatagatggtagttgaaaatttatatgcccttaggaaaaaaaaagaataaatgaacggaagtattaaatgtaagcataagaaattgtacaatagtatagtctcggggggtaaaaaagctaattattcttaattttatcaatacacttattttgccttcctgtttttcaagttccttgaaagttcttcaagaaactagaaatttaacaataaaatccaagcatgaaactaaattggttcgataattttatttcttcacttattatgtttggtccatttttctcaaaaagctgttgcagcaagttggcattttcttaatgtatgtggatggtttattatgtgtgattaaataatattttgcaggttgtgatggttctttcctgtgttttggctttcttaataaactactgtgtattttggaataccacactaaattcagctctcacacagacgatttgcggtaatttgaaggtgtgtgttatctcaaatcccaccttctcctgtactgcaaagataggaaacttcaatattggccttctgattaaatactttgagaaattttgctgaaacttttagtcatttggatagaaaataagcttctatataggacaatctgaaatctatatttggtatcattgtcactaagttgaaagttaatatataatggaaaaattgaatcaatttgataactgttgaaacaccatcttatcaaatatcaaatatgataatgtgataatattgtaagtaagaatatgcaatcttgggaaacatataacaatagatagatgaatccttgtattctgtttactaattttaagaccaattatgcaagtatcttagtacagctactgtctcaatggactacttactaatctgttatgactggttatgttccatccctgaacatgttggttgcaggatctttttactattggactaggctggattatttttggtgggcttccttttgatttggtaaatgaaagttttaatttgttttctttctatgtatccattattgaaaatggtctattatattctgttgttattccccatattgaacaactcacttatttggtctccagttaaatgttgttggacaatctcttggtttcattgggtcttgtttgtatgccttctttaaaatccaaggtaagtaagatggactttgctacatgagagccttccttattacaggtgatcctaaatcatgaatttggctggtcaattcttcctgcatcagctgagaaattttgacttggtgataaaagttttaagtatgattatttatgtcgcgagtaatgtaaacacaacccacaacttctgctatagatgtcttggggttatcttggcttattagctgagtagtaatggattctaaattcataaatggagcatggccttggccttaatctgaagtaatcagttgttaaacattttcatgtaagaaaatcattaataaggggttgcaataatttttttctgtggcttagctcttaaaattgtcttaccttgattttaggcttcttttggtcaacaattatattccttttttcattttgttttcagtaacttttgacaacaccacgacttgcttacatgttttttctagtctaatgagattatgaaagtttgattccactcagataattggctgcaatgggctttgtttctcgaatgaaaaaatctattatcatatgtaggggtatttattggatcatattcaatgtttttatgcctatttagatccgatctaattatatattagatgatagattttactatcctattcgatgcaattatgtaggaaatttagcttggatatataggaattaacctctgtaatttcaggttcaagatcacatttcaacaaaaaaaaatagtaaataataaaaaaaaaaacaaatcaagaacaaaaaaccaacaaaaacatattaaaacagaaagataaacacagataaatctagataacttccaaatacaacaacatacgagaattatactggttatgaccctaagttcaatgtgaacttggtcatactccagtttgaaagcattgccactaatctttattgacaatgagaattagagatattaatctcgagagctacaaggaaataatcataataagttattcatggtgtaatccatcaacactcattaactgactaatctgagccaacataatcgacaatgttgctcaatacaattcccaatcctatctctctctctctcaatttctcaccctaacttctctctctactgtgttgtgtctctcttgttattgctcatactattctcttatgaaaatgagatgagtagttctctttatatagaccaaaggacccaagatacttgctatcatatttgatagttattttagttaatgaacaactaactaactaactgaatcttggttgggggtttaaggaataataccgcaaatttcacctgatttcttcaagacccaacaagctaagcatatctgtccaataaaggtggtagtgctttcatatgtagcttcttacaaataaggttgagtaagtccaagcaatgcttgagcttactaactggtaacaccttagtgccaatatcagtagggttctcttctgacttctctttctccagctcgattacttcttcttctatcttctcccttatccaaaacaaccgaatatcaatgtgttttgtcttctcgtgataaactggattctttcacaaatgaatcgaggattggctgtcagaatatacccttacctttccaactagaagcttcaactactttagaattccttgtagccatattgcttctttgaatgcctttatggtcgccataaattctacctctgtagttgaaagtgctactacggattggagttgtgatttccaacaaatacaatctccattagttgaaacacataagaggtagtagacctcctagtatccttgcttgatgtataatcatcatcaacatatcctttcagtgttactttctctaaaactctcttgtaagtcaatccaatatccaatgtccctctcaaatatctcagcaaccatttgagtgccctccaatagtttatcccaggatttgacatgaacctactcaatatgcttaaagcatgagcaatgtctggtcttgtgctaaccatgacatacatgagacaccccaaagccattgcatatgaaagttcttccatctcttctttcttttctactgccatagggctttcttcattggttaatacaaattgtcgtccaagaggtactgaagtgctccaagaggtattgctcttagaactttgctaggatcttctcaatgtagttattttgctttagatgtatgactccattactcttggatctatgaacttctaaatcaagtatcttctttacttgtcccaattctttcatgtcaaattctaccttgagtttatctttaattcctttgattactgccttgtcttcattattaatatatcatctacatagaatagaaaatacacaactcttgacccttctaagtgcttaaaatacaaacagtgatcaaacttggaccnnnnnnaaccaatctcttgaacatagctgttgaatcttttgttcaattgtcatggtgattgcttaaggcctgtagaaaatagtgaattgaattgtatatgtatttcatagaataatacatatttatatacaaagctagtagacattgtgggggttatgaccgaggtaggtgaaggaataagagactcgtcagaacatgtagcaggtgcagaggatgtgacagaatataccaacaattcatcattgggcagcattagagcaaattttatgttacttgaaagggggaccgggatgaggtataatttacaaggatcatggacatacccagattgagtgtttctatgatgcagattgggcaggctccaaggtagatagacgatccacttcaagatatcttgtatttgttgggggcaatctggtctcttgaaagagtaagaaacaaaatgttgtatctaaacccagtgctgaatcagaatatagagctatggcaca

SEQ ID NO: 40663 - DNA, 3216 bp, Cannabis sativa
taatatgtggcctctacatttttagcctgaagggcataactttgtagcaatacaagcctaagtttgtcatgaagcttgtgtgctcctgatctggtagatgcatctttatttagttgtaacctgaatacgcgtccatgaaacttaagatttcatggccagttgtggcgtctacaagctggtcaattctgtgaagcagaaagtagtcctttggacatgctttgttcagcttggtgaagtcgatgcacactctttactttttgttgggtttgggtaccagcactgggttaaatacccaaaaggaataaaattcctccattatgaaatcatgggctcgtagcctctcgacttcatctttgagtgcttgggcgtgttctctgtacaacaatctcctattttgttgaacaagtcaaatgtttggatcaatgttgagggcatgagccatcacgaaggggtcaattttgaccatatgtctccatgtgaccatgcaacaaaaggtacaggtttgcccttagaaatcttatcattattgatttaatttctaatgctaaaccttacccgatcttcaatctctttgctagagaaatgggatcaacctccacttccttcaactcttctacaagtccaaagctatctgcaagatccccaatgcgaggatctatgtctgcattcccattttgagatcgacttcattgccctttgctgggctcttctttagagctcttggcggcatcttctcttttttggctttggacaaggccaagttgtaatagtgacgggcagattgttcgtctcatctcaaacatcctaccccatgccttgttgggaatttcaggcacatgtagtagattgatgttaccgccttcaggtcgtatagggctggttagcctatcatggcattgaaagttgagagaacgtcgattatgaaaaaatacgccatcagagttatggtagttagattttctccaatagtgaggggtaatctaatatacccgattggtgcgatgccttggccaaagaagccattcatcacttgattatagggtgccaagtaagtgagttagagccccatcttttcatatattgatttgaaaagaatgttggaggaggctccactgtccaccatacatcttgccacagtcatattcccgatttgtgcaatgatgattagggggtcgttgtgcgggaaactaacttaggcagcatctccttctataaaagagattgtgggctctccaagctttggtttcttagatcttatttctttgacttctagaatgtcacttttgggctcgtgatggagtgtttgagcataacattctctagctttgctagtctcgcttgcaatatggggtccgccaatgatgacccctaagtgtcctgccactagtgatggcattggatttccgttctgagcaccttgtgcctgagtatggtcattctacacataacgatgcaggtggggattgttttttcttatgaggaattcaatctccctttttcaagttctgatactcgttggtgtcatggccaaagttgttgtgaaaccgacaaaacttcgacatgtctctcttactcaattcctttttgaagggaaagggctttcttatgggactgttccctgggtggccatgaagatggcctcgggttttcccgtcaagagcagggccgaccagagggtggggcggccggggcgtaggccccaagccccacaatttcggaggcccccaaaaataaaaacatattatatatataaaaaatatacatatataaattttagttcaacaatttataataaatagttatagcacaattgattagaaggacaatgtgttgatattaaggtgataggttcaatccttcactttgtccctttaatcttttttttttaatttaaaggttttttatttttcaaaaaatatatatgttatataatgtacataattagtgattagtttaaaattgtatagataattagggctcatctttttttatttatttaagataagaatataatattttaaaatattttagagcatttccaaaaaaaaaaatatataacgtaatatttatattttttttatattttttactctataaggaggtaataaagttttcttcttgataaaagtaaaaataaaaatacattacctaaaaaaagaataaatattatgttatatataattttgataaggagcaaatattatatttagtacaatgtttttagaaattactccaatatatagtgtacaatagcatttttaagtgcaaactgataaaaaaaaactaccacaacaataataaataaaatatatattccaaaaaataactattgagaatcttataacttaaaaatttaatgacaatattactacttaaataaaaaaaaatatatttattaattattagaagaaattacactacatatctcttttaaattgatgcctttaatttttactccctctttcaaaatctattttgtttacctctttttttaatcattctaccaattttaccttcatcatttcacaatatccttcattcttctctaatcaaaattttgcccaactttcccataaacctacacatttatctacaaagaacacaatctattattttttaaattgtgtcttggttatgtgagagtgtgagaataatttaggtacaatactcataaaaagatgtatatttgaattaaattttattcaaaaataaatttggttaatgtataaaaataaaaggtattcttcttaattttatacaactgttaatatatgataaaaaaaatgacaaatttttttttatatatattttttttacaaaagcgcttaaatatatgacacttcaatagagatgttgttataattaaatattactttaagttagcttatgtgatgatttattatacagagataaaagaattaaaattgatattgtgttaaaatttaaataatgtatattttaaatttttgtaaaaagaaaaggtctcattttaaattccgccctaggcctctcaacacattgagacgaccctggtcaagagggtgaagcgtgtgtacttctcttccttgtccttctagaagtcactcaatgggaggataaccccagtatggtcgtataccgaccttcttctgtaaggcctttaaccttggtggcttcggccatgaacctctagatgtaatccttcaaaggttttccttgtcgttgtttgacttcgac

SEQ ID NO: 40664 - DNA, 3431 bp, Cannabis sativa
ccaagatggtagaagaggaagtagaagaggagcttatgaaagcaagcccttttcttatcaccacacacactttctcatcattctcatactaatacatattaaccctttatatatatatccaacacctaaccctaaggggttttattaggtttattggattaatgagtataattagtggtggactataatttaatgggccaattatagttttagggtgctctcatgtgcctctaatacatttattaattattaaccatcccattatggtagtgagtaaatattagacacatagttaatgattgtgtttatggtattaagcttatgattatattagtccacaataataattctaacacgttatagttttactgtctaaattttgggagcagttttgcctcatgttttgctcgcttactttagcagttcatgatttggcaaatcatgacttttggttagacgatgaattattctggttcaaggagattcctgcacgcggtttgtagatatctacatcgtaaattcatgagttattctaatcactacgtcaaaaaaaattggcacatgctaaaagttgtgtcaaatttgatacaagatatagcatttgtggcaaattttgcacacaataaatgtaattttttaaaaggataattaaaaaaaaaaataaacaaaaacaacaaaaaaagattacaacaatacggtttgtacaaaattttcaatatttttacggcttttatttacaaaaaaaaaaaaaaaaaaacgatcttttgatatatttatgttgtactcctgctattttattgttaattttctattatttgtatattattttttatgttgttttgttattatttttttgttacttttatgtgtttttttgttattttttctatttttatagaataccgcaaatatatatatatataaaaaaaaaaaaaactttgaatgtaaaatgtaaaaaatttacaaaaattagtattttatgtaattatttctttttttagttacaattttgtcattgatcaggaaaagctttaatgtatattttttaattataatattatcactattattttttaaatatttaattgatcgtcattgattttttactttttgtcataatttacaacttaaaatactattatactctaatagcaaaagttgtctaattaaaattgtagcaaatgtaacattttcttgtttttttaactaaatttagcataatatttacatcttgcatcacaagcagtctaaattaagtgtaacttttaatatgtatcaaatttagcatatattgtacactactattaatatagaattcaattttataaacatgaactaaaaagtgcatatcactttattggaaatgctctaaagtgtaaaacataaagttctaagattatctccaatataaaatataaatattgtgataaatttaatacaaaaataagtaatgctatatttactattatgctccaacgtgcaatagcattttatattgtaaattatgataaaaagtaaaatatcattaatgattatcaataaaataaatatttaaaaataatgtaatggtaatattgtaataaaaaaaatattaaagcttatcattaataataaatggcaaaattgtcattaaaaaaattgtatttattctgtactaaatttggcacaatgtatagaatgctataccttatgtcaaatttagcacaacttttaacatgaagcatttctattgatgtaatgctaaatgctaaatagcacctatcaatggcggactctagatttaaagtgaggagggcgtaattttttttaaaccatgggcaaaaattaaaaagaaaaaaaaaagtgttgttagtaggatttaataattcagcttaaccattgcaccaaacctacgattatgtctttaaatatcatcttttattataagtatatgttgtaactaattaaaatacatatatatttttttctgatgttttttaggcccccttgctacaatgtgggtctgcccctgacacctatagtgattaacactcatgtaaagtgtaatattactggtgtaatttaatattatattccacttattttatattaataaaaattatagtttatcgctaactaattataaagcggcaccacctcacagtggtgctaaataccttggtgtcccgtaacaatgctcttttagcatatttaaaatatattataaaatttagagtattgctataaggcactaataatgcctaataagatgatgcattatagttagttagtgatattctataaaaattaaatacattaaattatataaagaccaattcttaattatacgaataacaatattatacattaaaaaatatcaaatactactagtatgttttagtatttcttcaaaatttaacacattattaaagaagtaattttcttaaaaatgctaaaatataacactacatcattgttttagcacttacagatgctccacacatgtataattttatatgaagatcgccttgtcggctaaacatgagacttaaccaaaatcgtatcaaaatattaaatcataaaatatcatatgcgtatatagcatataataaaaaattaggcaggtcttcattacatatatgaagcttatttttaaggtaccgtataataatattaatatatattttttattatacacattgcggacggtcataattaaattatacttttttatttttgcctcttatttatcaaacacgtacgttcacaaattttgaaatgttattctttaagttagatttgagatatcatctaatttaattaagtttcaattttatattccgaatccaaattaaatttgtataataactcaaatttaatagaatctgtaaaactatcgattgcatcaattattttaaattatttatttttttaatatttattaaaaatatattttttttttattttacttaattaacaacaaaataaaataaattttttactttatgtctccaacaataaattaaaaaaataaataaatttaaagaaagaataaaaaaaatattatacctacaataaatatttaattttattttaaattatattttcttaataaataaaaattaaatatacatttgctactaaattttgaaatatatttgcattatatgtattagaattttaattacttgtacttacattgaaatatcttgtgagtgccaactgatctgaccaagaactaatctgtctaaggtagtacttagccattgatgctggtctttttcgagttgcttgcagcagagttcttaaatcgtccattttagctctagagagctccatacaaattttctagggatatgcataaatacttgggggagttacatcccatcacttctgtggttctagattttatcatataaacatagagcgaccccatgagcaactggtcgcac

SEQ ID NO: 40665 - DNA, 1530 bp, Cannabis sativa
gaacatgattaacatggctctcatcagtataaccaaagcaggcaatcaataagaataacaaaagaacatattcctttttattttctagataattcgacatcataacggctgtattttgaataagcccaaaaatcataacatgcataaatatttgttcaaaaatatatttggcaccagtgcccaagaactgtcaagaaaaaatatgcagatgaagtttttaatttttcaaacaatttgcaaatcataaaaatttagaatatgtctaatgttatacaacacatctataaatcaagtctaataatcaagttgagtccctacctctcccaagtcgttaaactttgtccaaaagacgatctcaagctctcaagtcctgagctccaattgtttagttcaatcttagatattactctcacatataccattaaataaaaaaaattatcataatcatattctatattcaaaaccgagtccaacgacatataatatgactatatctaaaatttgaagttccaaagcctcacctaagcggtgcacattaactattggtggctgtaaaaattggtgtaccgaaaacgtcgctgaaaataggggtagtgtatatcaaaatgaccaccttgatgattagatcacacccatgctgaccgtttgtcaaaacaatacacgatgctgccgaaaagttgccgggaaggggcggagctacaaaactgtcactggaaaaactagcgagctgggtcaaatggtttagtgtaggttgttctcctcgacgagctgagttaagtggtgaagacggctcgtcaaacggacaccggaggtgacaggaaaattcgttcaaagtttgaaccaccaaactttgacttgcgatcccgagctaacgacggcgaaaggagcggcgccgcttgggggttgaggtcgctggcaccagggggttcgagtggtctagcgcatggggctggtcggtggtcggaggtgggtcaccggagtctgccgataatggagctttgtggtttctttttgtgttttgaagagagagaaaaagatatatatatatatagagagagagagagaaacgatatataaaaaggggggtctgctttatttttttttgttttgtttcttttttatatatatatatacatatatattattatttattatttattattgttatatataagtatattatttgcaacctcccaaccatcggggtcttacacggatgaagcgtgtatgccaaagaatggataaaggtgaaaaaatagaccttgaagttaatgacaaaggggaatatttttgagatatgtatggagagatgatatcgtggcttggagttagatgtcaacaaacaatcggtatcaattataaagactggagatatgtggatcaatcgttgaaggacagaatttagaaagacgtgcaaataagttaattatacaaaatatacttattatggtgttttgtaaactatttgctaattgtttgctttctacatatagcgtggtttcaatgttcgtgcagattggaaaaaagatt

SEQ ID NO: 40666 - DNA, 1446 bp, Cannabis sativa
tagtttttttcttcttatttatattcttttaaaaaatttacatattaaataaaactaaattatattttaaatactatactaaagaattaaaatcaataattatgtgaaattttattaaaaaagaattatatatgattttaaaaaaattaaaaatcaaaattaatattaaaattaatataaaataacaagaatttttttaaaaatatatataatattaaaagtgattttcaatatttattttaagtttaaattttttaaaaaaatgtacttattattttatagtgtgttaatttaattgggtaatatagatgatacaaaatataatattattactagaatagaaaaaataaatacgggatttttaatggtttttttatttaaaaataaataaataaataatagatttaatattttgatatttatttgtctactttcatttatgacaaaaaaagcctggtcctacaataaattaacggtggagaattattattacataaacgcagttaattaaatttagtacatagcaatctagatttttatatttccaccaaaaaaatctagatttttatattttaggaatattaaggacaaaattattttaataatttgttcaataatcattatgtttctgaacttttcaactggttaaaaataattttaaattattcatagtgttgtaaattggtcattctattataaaataataatgtgtttctttagactattatcatgttaacgcctttaattttatttaatttttttcaagcggtaattgacttttagtttaataattttttaaaaaaagtacttttattttttattttttattttttattttaaattacacacatgacactaagaggaaatagtctaaacagttacgtcatcattatgtttgtcactgtgtattgagatttttggaaactgattaattagagcttaaggaaaatatcaaacgataaataatagacaagtcattttttacgtgattcgggcgttaataatccataatccacgagtctgttgtattgaccttgtcagcgagtgtttaagtattacaagtgtttacagcatgaatattaactctgtattccttttgtttctcttggagaagaagaaagctcataggaatttttaacaaaggttttgtaagtaaatattgttcaccttttacatataaaagataggggtatttataggcacatgtgtgagtgagggcatacccttcacccacttagggtttcgtactcaaacacgttacaatagctgaggttacaacatgacaatctgatcgttggtaggtaaagagcctcatcatcgtctggtgctcggttgctgcaatccaattcgtgggactaaggacacgtgtcgatgtcgcccaaaggtttcaccttgcgaaattggtatctagactagccattagacaaaaaggagctacagagcacg

SEQ ID NO: 40667 - DNA, 1291 bp, Cannabis sativa
  modified_base (896)..(905): a, c, t, g, unknown or other
gcacccaggttgactttgggagcttcaggatcgaagttcaaacttcaataacttgattccaacttactaactttcagtattttgtaccatgaagacatagagcaatcaaatccaagctctgagagctaaaattacacgaacctacaccccgaaagccaacctgggcatctagggtttcactcaatgcccagtttgacattccgatctaaggttttagtttctgggatcgtcttggtgcaaatggatcaaactttgcattgtgacatcaactagacataacaaggacatatttgaggcatcagaatcaaattcgaagcaagttcatttttgagcacctggagcactcgttgtccgagcacccactgcccaagttgacaatttatcaatctgggtgccttccaagtatcagattaacaatttgaattttgcatcatctttgtgttcatctttgtgttcatcacaatctgaattaactgttaaaattagtcttattaaatattcgatataatcttccacaaaggcctgagtattgacttgaattatgtggacaactcttcaatttactataggcttcaaaaataatagaggaagaagaagagtgattcaaatattatggtggctctttttattttctatttttgtctgacaaaggagtctgatcatcaattgaaaataaaagtcatcttatttataggatagcttttagggtttggtttagaatcaaaatagaattgaaaaaataaaatcatggctttatttaatctccttggtcaaatccttaatgggcctttaggattttaattttaccattttatttaaactcatctttcttttcacaaataccatattttaattttaactttataaatgtcaaatctatctatttaataattatnnnnnnnnnncaaataaaatttccatttaattaaaccatacaaaatctcttaattaataaacaaacgctaaatcttatttttttctcaaataagcccttgcttagtgaaaattcacaaacaagacatagtcttatttagaattctaattgattaattcaaactaattaattgagtctacaagacaatattatcccagacaatatggacaccatggggctatgtaaccaagctcctaataagtagatccgaaatttaccaagtaaatttcgtaacttattaattcttcctaactccagtgtagattcaaaattgcacttctgattacgtagaatgctctatatataccaaatatagatacactataaattatccattgttttaatctaaataatcaa

SEQ ID NO: 40668 - DNA, 5532 bp, Cannabis sativa
  modified_base (3888)..(3890): a, c, t, g, unknown or other
  modified_base (4003)..(4007): a, c, t, g, unknown or other
  modified_base (4219)..(4222): a, c, t, g, unknown or other
  modified_base (4690)..(4692): a, c, t, g, unknown or other
cattaaaaaaatattctatatatctaaaattacttcttctaatcctaaataattttattattatttattactttttttcaaatttgacacatgagattaaaaaataattggctacacaaggaaaagaattgacaataattttcaacaaaaacaaattagatgactgaacatttctactctctcatctctctcttaaaaaaagaagaaaatatcttgaaattaccgaaagaaaagacacaaaaataaaaagacgtttactcggccaaataggacaaaacggcgccgacttcaaataatggtttcaaaaaaattcacctccaaaaacatttttattagcgagatacagtacgccacgtcagcaatcaccaaatatatatatttataattaattttatatattaacccccaaagttcccaagcgacaattctttcatttcctttgggtaagctgctaagcgagccctagaaaagctgcttcctttctctctatatcaatgggcgatcatttctctttattctagggttcaacaaatcatatccaatcgaatctcagaagttctagctagattcaatttttcagttctgacagatacatatcggtaaaatctcatccaatttgggtgtccgaatatttttttgtttttcttaaaattcggatcttagtcaaaatcgaaagttcttgtttgtatcttctctttttaggttgagagaatatttctgttgggttcagttggcttggtcatatgatattgtgtgttttttaagttgagaaaatgtttgaagagctgggtctgagctcttttttcatttttagatttttgatgttgctgtttaagttttttgttttggtacacgtgtacgagtttaaattttcaagagatgatctttttgggttgggtaattcatgtttctgatagttgttgttttaattcattgagataagtgaggttttgatttgtatgtgtcttttgattgtcactatttattggatttcaatatgagcttattatttattcatttctggtttaagaagctatctttgtgctcaacttaactcgatttagatggatatatattatatttaaaacaatgatgatcccattcaaactggctttcgtttcaaagctcatgaagattgtttattttttgtctacattctaattggctgtaccgactattgacgtgattttcgcccattggagatgtaattacaaacaaaatgaatattcagtttaggaaagctatggtttgtcattacatgtgttctgcattgaggctattgagaactaggctacgtgagtgtgatgaactaggctacgtgatgtgtctagtcagagaaaagatctccaggctagggaggaaaaaaatacgttgtaaagattgaacctagaaatatctatattttttagactgcttaagaaatgggagaattgtgttcttaacttgttgttaagtggacgagtgcctttttttcttcttcaaggttttattatctgtcggccatctgattgtagtattgaatattatgttagatttaattatttgtactgaatttatcatgtagcctatttttgattttttttttttaaaatccacattaaatgttcaaagaatgtgatgtcaaattatatgtttctcacttcaagatgtcttttcattcagttttaataattgttctgcctgcttgggtggaggcacctgaatcgttagtgaaatagcagaatgccaaaggagagaagagatcgttctgtctcacgtgataggtgccgattttctccatttccttgcagctctagtaatagaaggcgatcgcctaagatttcttctgattctgaagaaaatgttaaagaatgggaagaagccagatgccctgtttgcatggagcatcctcacaatgcagttcttctcatttgttcatctcacgataaagggtgccgcccatacatgtgtgacactagctaccgccattcaaattgtctagaccagtttcgcaagtcatttgcaacagataccccatcaacagtgtcacaacaagaagaaaatcaagtaataacagcagaaacagaactacaagaagaagaaactcaactgtcaaccacagatacagtgcgggaagaagacgaagaagaagaagaagaaactcagcttctgaacactaacttgtctcctgatcagaccttagaatcaacagttactgtggtgcaagaagaaataacagtggaggggtctctcacttgtgagcatcagatcccaccaaagattgtgtgtcctctctgccgtgggcaagtaaaagaatggaccgttgtggattctgctcgtcgtttcatgaatgcaaaatcaagaagttgctcatctgaaacatgtagttttacgggaacttatacagatctcagaaagcatgcaaggctagagcaccctcaagtgcgcccatcagatgcagaccctgagcgacagcgtaattggaggagattggagcgtcaaagagaccttggtgacctgctcagtacacttcaatcatcaatgggagatgaaaggagtagtgatgaaagcatcttacctattgatgatggtggttggctgactgtattcttcttgatcagagttttcagaccaggatcttcatcaaggagcagcagctggtcaggtagctctagaaccagagcgcagttgagtatcagaagaagatcaaccagactatggggtgacaactatgaagaggatactggttcttcttccagagaagaagataataatgaatcttctgatgatggatcaggtccttggacacgccgtgaccgtgtcaggcgacgcacaaccccagacaacctgccatgacagttgaagtagtgtagcatctggttgtattgctaactcatcttcagctttcaaaagtaagctctgttaatctatatagactggcattagtcaatcaataggtttacttgacttaaacggtttcacttgtttgtttcaggcggaaattgagagaattttaaagggtttcgaatatgttctactgagtgtggaacaatgcgtggagttatggatatgtatcaaaagagtgaaaaaaaaattgtaatttcttgaaactttcgatcaatctatgatattttctttggcagctttctcttcacttgcactgcaattactgaacttcctgttttaatgtgtaaaccatttaataaaacgtgctatattcgcgggcaacggtgctttgaaactgtgaattggtgcctcgagttcgacctttgaattggcagtaaagaaactggaattggctctagctattgtcacctctgttggcccgcagtgaagaagtataagaaccacgaaagagatgtgggaaaggaaagcagacttgtttaaccagttgcaccttacaatgttattattagtagtacttcctcgtcttaaaaagttaaaacttcttattttcaaacttttttcatcaagattttggtattttttaaatgattttaaaatgtaaatattttaaacatgactgtattgtagccaatttttcacggacagttcaaaagaattgattttttttttttttttttgtctttttgtcaaaatgtcaaaaaaaaaaaaaaaaaatgattgatttgttgtatcttaatgaattgtaaaaaaattgtattttttattttcttaatcataaaatattcttttaatattttattttttttaacaattattaaaaaaacatttatttttttatttttttatgtttttaagaagaagaatgattcaatagaggaattagttaagtttacttaaaattttagatctatttattgaaagctcggttacataggtctatggtctcgtcactagttgagataatactgtttgcaaattcaattaattgattttaattaatcnnntataattttaaaattagactatgtgtttatttatgaatttttactaagtaacgacttaattgtgaagaaaagagattttggggactacctgttaattaagagactttgtatgnnnnnattaataaataatataaatggcaaatttatttgataattaattataattattaaatgaatagttttgacatttataggattgaatttgaaaaatatggtattattgaaagaaaaataagtggttaaaataagtggcaaaattgtaactagtaaaaggctctttagtggtcactttgtgtaatttttgtccattattttattcttttttaatnnnnataattcaaacctaagccctagttgaaacactataaaaaggaacatgatgtttttatatcatccaacaattgactttcaacctaccaaacctagttttcattctctaacaactagtagatgagagacaccttctatagtgattttgaaccctccttcattgttcttcatcaaattcacccatagtaatagagtgtcatgcccacacatagcaaatcaatatcacacatttagtccacatcttctaaccatttagaactcagacaaatattaatatcaatatgcatatatcatacatatattcttatgataattatcactatgctacttttgtcgacatactttataataatttaagtagataatctaatagtaaataatataaacacttactataccacgagtcgacttatcttcgcagtaaatgtacatatttgaccagtcttcaagacctttaaaaccatggctgnnntgataccaagttgtaacaccctatcccatagggacgccacgtgtgtgattatacaaactagtataatactaataaattaattaataattaaaaaccatgataatattaaaaacttgactaaaataaaatactaataatgttataagggcataaaaaacgtgttctggggatccctgttataaaaggtttacaaaagactatgtacgataacaattcaaaacacaaaatcaaaatacacagcagatacaacccaaaacaactcctggcaactcggcacacaggtcggtggagtcaatatgtacattgctggagaagactgtcacctcatggtcgatctagcttttctttgtcttcacctgcaccacatagcacctgtgagtcacaaggacttaacaagaaaagtaataacaataaccatgtaatttattatttgaatattatcagttatatcagacaatcagaatcaaacgatcacgcattactcataagatgaaatccaaatcactactggcatctgtcacaaatagacatcagtataaagatatttagtaatataaaaccattagatcaataatagaaatcatattcatctaataatataatatatgggacacgattttgtcccgtgatgtactttcacggaatgcattccgtggtacattagatgggtctcaaggtacgttaccattttttaaccctaattacccctagatcaaccccagccctcagatcaaataactctcccatttaacggctgtcgtacatcaaggaatacattctgtgaaagtacatcacaggacaaaattatgtccctactatatatatgttacctcataaagt

SEQ ID NO: 40669 - DNA, 4337 bp, Cannabis sativa
  modified_base (1625)..(1630): a, c, t, g, unknown or other
aaactctaggagtattatttgaattacatgtgaattatgctattttttataatttttgttgggcgacaacagaaaatgcgatggatgtctattttagtcacatggttaagtcaagaatctttttcttagtgggatatatgttggagaaaaatagaataccgagtttgagagagtttagagtttttgaccattttacccctaggcttgaattggctttatttaaggcaccaagggcattttagtcattttgtcaggggagcttaggtggctattttaggaagtggcagctggccacttagttgttttccaaccaaatgaattaagttattcaatttgtgaaataaagaaaataggaaaaaataaaaataaaagaaatttcatttctctctctctctttgttcgaccaacccaaaatagaaggaaccatcatcttttcatcttattttttgggatttcaaccaaggattcaagtaactttgaagctaagggcatccatctagcacgagactttccgctcaggtcggccaactcacttgaattcgaaaaagaggtaagaatagtgtagaacatatgatatatatgcgaatgtatgtatgtgtgaaatatatatatccatgcttgttatgattcatacactaccaacacttgtacggtagcggtacagagtgtattggtaaagtgtacaatgtctgaagagtacatcatggtgttaccaatactagtacgggaaggtacacggtgtatgcggtacaacacttaacagttgtcggggtacgattcataccctacctacactagtacgatggtggtactaagtgcatgtggtatagtagtacatggtcgtatctcagttagaacgttcctagtcatctgttaagccttatcaataggtgtataggcgcctagatacaagtcattattatgttatatgctatatgcttttcttactgagtttgtcgactcacagctctactctcatgtgtaggtaaaggaaaagcgaaagctgaacaggagtgagcttgagatggtggcgcgacctaaagtgttttgtctcgggacatctagggtttccattttgtagtcgttgtgcgacctcacatttatattttgtataatttgtaaaagtttaacaacgagatcccgtcacttgtaaatattttattaaagtttataaagttttatagttaatattaaaagttttaatttgtcacgatttttgagaaaatcctttgactagcaaagattgcactgcaattgaaaaatcactgtagcgtgccttagcattaggacgttacaattttggtatcagagtcgccaggtttgtctaccgaagctccccaagacatgtacaatcatcatcagagaaagctcggctcacggttcagtaagcctgtacttgtttagtgttatatgtgattattaaagcatattaggaagcatattagtttatagttttttatttaaatgtgttgccttaaaatccctaagagcagtattaagtctgtttaatcgctgtctgacctacctggcttatgggttcgcaggctaagcctattaaatggacgcccagagaaatacaaggagtcaaggtaatagggtcgagaccggaggcagtcagggaaatnnnnnnccccagaatccccgtggtcgcggcaaaggccgtggcaggtttcagggtggtcaacatatgaacccacctcaagctcctttgaattgggagtagagatttaccgaaatgcaagatcgtattcgccagcaagatgaagaaattttgagattaaggcagcacggtcctcgtgtactgcctccaccgcaagctcaggccgttgtagttcctacggtgccagcagaacaacctgttgttggcaacagtatggagccattatacgagaagttccgtaagcaagcacctccagtgtttctgggaggctgagcagtggctcacagtgatattatgaattatgaatttcatgagggtagttggaaatgatcaggtgacctgcgctacttttttgttctaggaagacgctctcatgtggtgggaattggtgtccctcacccgaaacatcactgttatgacctgggaagagttctgagattttttcaatgccaattattacaatgaggctgtccacagtgcttagcgaaaagaatttacaaaattggtgcagactgagggtatgtcgtttggccaagctggctttaaatattgtgcctacgaacttcagcaagaaagagaaatacctggcaggtctaaatttaaaaattagacacgacctagtaattactaccagtgaggcaacatcatatgcggatatggttgaaaaaggctctacgagccgagggtgtagttaagtttcttcaggagccccgtgtgactccgagtgttgttgggaccccaactcttcctaatcctgtctatggtagggatggtggtgattctaccactgatcagaaaagaaacgttaccccgacatctagtggttcgggatagaggaagcagttccgtgggaactaaggcagaggtggacgccagagttactcttacccttagttcccatgctgtaagaaacatcattcggatgagtgcaaccggaagacatgcttttagtacgagatggtggggcatttcaagaaagatttccctcagacaaagaaagaagaacagaagccagaggaaatacctgtaattgcttgggtgttttccatcactcaagttgatgctgcaaccagtccttctgtggtacaagtcagcttcttgtcaacaactccttttatactatgttatttgagtcgggagctacacactcatatgtggcaacacgagtaattgatcttttgggtaggccatgtgattttattgaaagagggtttggaaccctattgcctagtgtcacgggctcacctttttaggcagcgaaacacccgtacagcaccttgaattctctaagccaaggtcagccttccaaccatccaagtaataatgggctcatttttgacgcgaccgtgtgcctcgtgcatacttctgtctctcgaacaactctcgtcgagtcatgctcgcaattatccatgggtgcatccgtgcatcgaggatctctagccaagatacccgcattgtccataggttcccaatatgataaggcaaatcccaacaccgacgctcaccttgtcactcgtgaccaaggtagcatgtgtggcaagatgccaacaccaagtcgacgtgccaacgcttttatcatgccccactcgatactgtccaaatagtttccctcgttgcccaaggactcccatacgtccatggacaaatcctcaaggcgccatgcctccacacatgttgtcaggccctcgagacaagccaccaaactagttgcatacactagacctctgtccccttccagcatggtgcatccgtcccatgcgtgcatgcaagctagcccacgaatgactacccgtgtcatctcatgttgagactcgtggctaaggtgcaccacaccatctcttggaggatctaggccatgtcccgtccaagcagcataccgacaagccaagggaaacgtaccagtgaacctccggcagcttgttaaacgcactaccgggtcggccagataatgtccatgagtactccaactcatggagacatatgagtcccctcttgatcctcatatgcccgtcctactagtcccactgactagtagtagctcacttagcaccaaggtgcaaggggtggtggagagcaaatacgagggtacccccttaaagagcattctgagcttttagccttctaccaaaaacatagatgattttggctatgcagacatatggcaagaaccatataccaaatcacctagtttcgccaaaccgattacaccattctatttgtagaccaaaataaatggcgaataccaagtcccgtcccatttcggacaatattgaagatatttacaaaaatgcctctggatacaaactaagcatcagcatgccaccagcatgcactacaacatgagccaccacttggccaacttatgggcatcacttagcttgtaacataccatcttagcacgcatcacttgtggccacttggacttgatcaaagaccctatgccactgtcgctattcagaaccacccatggagtagtgcctccgcactagaatacttcccccaacatgaactcttctgagtccatcacaacatccctccagtcaaccaagtagccaatgcaacactgaccatgaagctaacacatcctctgatagtagcttgctcgcccatcgtccaatgcatactccttttgacaaggactaagtatggtgcacccctcggggtgaggttcgcaaac

SEQ ID NO: 40670 - DNA, 1813 bp, Cannabis sativa
aacttagttgtaaatattttaaatttgggatctcagttatatgtaggttatttactttgaaattttagagtaatccagtaaagttttaattaatcacattttttcaataaacccgttagttagcaacggattggacaattaatttgaaatcacgataacacgcctaatctagtagggttttacaatttggtatcagagccaccaggttgtcttctaaagagcattacgacatgtacaatcatcattagagataagcttgactcgtggtttagtaagcctttattgctttagtagttattttattattatgtttgaagaaaagcctgataggaaacatgttagtagcctgatagctgaataggcacatgctttaatttttggaataagtaataattagtaaattattcttaatcgtaacgtgaccaggctagctcactgttttgtaggctgttctattagaatggatgctaggagaaacacgagaagccagggaaattcggttggatccaatggcggttaggcagttcagtttcccctaaatattcgtggccaaggtagaggcccaataggcagggcatgcagtcaaggaaaagttaacccaccgcatgctgcccgggattgggaaggtaggtttacatcaatgcaagccaaaattaatgaacaagacgaagaaataagaaatttgaggcagtagggtgctcttgcaatggttgctcctgaaatgcaagtggctcttgcccctactgtgcaggaagggctagttgttgttgtgaatcggatggaaccactgtacaaaaggttttgtaagcaggcacctccagtttttctaggaggtccagatgtgatgaaagccaaacaatggctgactattattacacgaattctaaattttatgggagtcactggaaacgacaaagttgcttgtcccaaatccgattccaggaggatgccctggtctggtgggatatggtggctcttactcggtatgctactaccattacctgagaagagtttcaggagttatttaatgtaaagtactacaatgaggtagtccatagtacaaaaagaaaagaagttactcagctgactcagaaggaaaatatgatcgttacagagtatacaatccatgttaataggatggccagattagccttaggaattgtgccaactaacttcagtaagaaagaaaaatatcttgatggactaaaccctaaaatcaaacatgacctaattattacaacggatgataacaccacctatgctgatatggtgggaaaagcactacgatctgagggcacagttgagtgcattcaggagtcctaggggactcagattattggtggggttactgctcttcctacctctagttatggtaggggtcgtagtgactcaaccactgatcagaaaagaaaggcaccatttgcacttgatgtctcgagtcagaacaagaggttttgagggaaccaaggtcgtggcaaccatcagagtggttctgaaacccgatacacttactcgaaatgtcccaactgtaagaagaatcatttaggttggtgtaaagggtaaggatgtttccagtgtggtatgactggacattataagagagactgcctgcaactcaagaaagaagagcaaaagacagaagcaaaacccgcttcagcaagggtgtttactcttactcaggctgatgcagaagctagcccctcatttgttgtaggtcagctctcggtcaacaactcttatttctttgtattgtttgactttgggccactcattcatatgtcgcggccagaatttttgataaattgggtagatc

SEQ ID NO: 40671 - DNA, 2097 bp, Cannabis sativa
tggcgtcagttattatcaaagaacagacgtcatatgtacactatggcgtcggttatatacaaataactgatgctatatgcacatataaccgacgttataggcttaaaaattgacgccaactcaataataattatttttttcagttaaaaacttattataaatcaagaaatttaattcatttaaattatatatttattaatttatattaaatattatttaatttaaatttaaattaagtattcattttttttaaaacctaaattaaatattatttaaattaattttatgattagcaaatataattaattttatgaagcaattagttaaattacaattatatattacacaaatattgtaaaattagtctaagtattaacaagttaataaatctaattacaagttaatctaaaaaaaataagctagggaaaaaattcttaggcctttcagcatcattcgtccaagccttcgtgaatcaccgccatcaatcgttctatttactgtcgttgtaatggtaataattcagttttagattgtatgtttgcttttctccaaactgtaaaaaaaaagtaaaaatttatcttagtttatatattttattatttgtctaataaatacgataattaataattaaaatttacagttctttgatcttgtatataacagttggggtttgcacattcaacgatatcagtcatgtatttcaaaacataaaaaccatattctaggtttttaggttgtcttggacaatttgctagtaaaattcctagccacgatccaagatacgcatttgatgcccctataatctggtatgttgtgtttaaaaattatattgacattttaattcataagttaattaaaaaattgattacataaagagtaattaaattattacctttccaaaattgcaataatttgtaagggaactttgtggccacgtagggcctaattggataatttaccctagcgcaacgatctctagcatccaatgcgcactaaaaaattatattgggatatatgtaagatagtataaaaattatttcaagttataatatagaaataaacaattagcacaaaaaaaattaaatagtgtacccaatattctagggaataaagaacatttggtggctattattcatcgataataaccaaacagctaatcgatttgacgtattctcaaaagactcattcttctcttcatcgttgataccagtcactgcgagaaactctgggtcgtaaaacttgaaaaatcttctcaaatcatttatgatctccgagatgtgcctgcattgaattattaaatattagtgttttataataatttaactagaatttcatatataagattaattagattaaagaaaagtatacatcattccaaatagcattctctggttgtcaatgaagtcacacaacaccacctgctacaaatcttctccagataacatgatctgggtacgaggtgttgggttttgtgccctaaataataaaactcatttcaatataatcagatttactaattattaataaaagatcagaaatcgcttttatgttgcatggttcacatcatttgttacaccctaactaatttaggcatgttaacgtaatttttaatgtattgtacatctcgttgctaatcaacgagattagcgaaaaatatgatgaattaaaatttccttatttaactagtaaaaagtaataatacaatttttataaaatctcgggatcccgtttacaaaatacattacaaaagtttgctattcatatacaaaagttttgtcaccttagcgacagcgactatactatacagcaaaagcaaaaagccctgatgtcccaaagatcatatgctctaaggtctaaccgccatgacatgtacaatcttcacctgctcgctctcacgactcctcagctttagccttgcccttacctacacatggaaatagcactttgagtggacagactcagtaagaaaagcataacataaaatatagatataccccgagttatatctaggcgcccatacacccgatcataaccctatccccgtgtcccacacggtactgagtctagaacgttcataagacaatactatcgaccata

SEQ ID NO: 40672 - DNA, 1947 bp, Cannabis sativa
  modified_base (132)..(136): a, c, t, g, unknown or other
tagtggaaggagccatattatttttctgccaccaatttaaggttttctacaactttatatgtgtttaattcattgttttaggaattcatgtttagggtattaggttatagattataatcaacatacttgttnnnnnatctagattctggtaaaataacttccaacaactgatattatagccaggttaatgattttctttcatgaaatatggatttcaaatgatgcttttaatgatttggatgtgttcatgttggtttatgtgcttaattgatgaatgtttgtgaattacaaatttttgacaaaaaatatttttgtttttgtactggtagtaatttttctagaaagtagatgaaaaattaataaatttaagcttttacataactcattttggatttttatttaattagttatgattttttgaagtttgaatgaaaatatatatacctaaggcaacacatgcacaggctgatagggttgcacctcagtcatgatagagctttagacaaagctcacgatcgaggtttctcggacactccttatctgaacgagacgatgactgagctagctcagtcaagatggctgcatgcagcctcatttcttgcgcaggctccctctttgcgcgtgcggggagtatgcattgtgttgctttgatttgctatttttttttttgaacttttcaaaatcagttttcaatgaaagaaaattcaaattttggtagaatttattgtagaatcttaattttcaaataaaaatctaagtattagattaaaataaattttaattaattttttaattaatttaaattagatttagatattagtcagctttgaatttgaaaaattaatttttccacaaactttccttaatggttattttagaaatttaattatttttatttattttaattataagatcaaatatttacatattttattattaatgttatacctgaaattcagttcacttcagaaagggacacgtgttatacagaggaatatgaaccacatgatataatgaaattatatcatttcatgcgaaaaacagtataactcattaaataaaggattaatataaaatatttataactcgctgactatgtagtcttaagcgagaccaaaatagaggactattaaaacctatattgacgagacacatgcctggcttggagtacaaagatccaaggagataattcatttattttgaaggaatgaatgtggttatccaaagtaacctccgattatgtatagcgagatcatcaccttgctattcataagagacttggcgaggcgaatcatttgctaacacttagcatttttctacataataatagctaaggataacaatttggaaataagcgagatactattgtccaaattagcattgaccatcgaaatgataagaataacgtgcagttaagcagttatatagtattttgatttaaatataaataactgccaacttatattcctataaataggggcaaatcccaccgaaaaagggacggagaattctagagagaaaaatgtatataatcaattctatattgtatatgatattcagaaagtatcttaaataagatagactcgtggagtatgcagatttaattgcaaaactacgtgaaattatttggtgttaacttcactttatttatttcttattatttatgagttatattaattacgtaaaggcttattattggttaacaaaaatttgcgttaacagtttggtgctttctttgagagcctacatgacaaaactcagaaaaatccctccttacaaacaaaaaacctatccatggctgatcacaatcaaaacaatggaagtcatcctgatgaaactacacatctccctaggaaagaaccaatgggttctcaaagaccccatacttctggaacaacacgttcaagaagaaactatggtggaaataatcaaaacccagaaggaagg

SEQ ID NO: 40673 - DNA, 2057 bp, Cannabis sativa
tatctatttctttagtgtccagctaccaacaaaaaaggagccacctagccaagcaataaaaatgactaaaaggccctcactaaagttttaaatggcaaaatagcttaggagtaaaatggtccaaaaccataactccccctaaccccgatatttcaaatgtctaactagatcgctccattattctaaaaatactaaaccatgataaagtgactctataggccatacgccgtattccactgttaccggacataaaaaatatgaaaacgtaaaattcatatataatataaatagcttatctagaattcaaatatatttccatatttatgaaataataattaaaagtctacttttaaaattagaccctaattatctactaattctcacaataaaactaagcggtcactacaattatcctcccgttaaaaggattttgtcctcgaaatgtaacctaaataactctggatattgagccttcatattggactccaattcctaggtggcttcttccaccttgctatttctccagagtaccttgatcaaagctatggtcttgttctggatgactttatcctttctatcaaggatatgcaccggttgttcttcatatgacaaatttggttggagctctagggcttcataactaagggcatgtgtcgggtctgaaacgtatttccttaacatagaaatgtgaaatacgttatgaactgttgatgttgctggaggcaaggctagacggtaaactaccattcccacctttttgagaatctcaaaaggccctgtaaatctagggcataactagcccttcttcccgaaatgtttaatccctttcattggagatactcataggaatacatgatctccaacctaaaattctatatttctgcatttcggatctgcataacttttttgcctagctactatgaaaggcaagccttatggccttgatcttttctattgcctcattggtccgttgtactgtgtctggacctaagtatttcctttctccagtttcatcccagtgaattagagatcttcactttctgccatataacatctcgtagggagccatccctgtagtactctgatagctgttgttgtatgaaaactctatcagtggtaaatacttactcaaagagcctttaaaatccaatacacaggctcacagcatatcttttagtatctgaattttcctctcggactgaccatttgtttggggatggaaagatgtactgaactttagcttggtacccatggctcgttggagactttcctaaaacttttaaatgaacttcgaatctctatctgatataatgaacttgggagccccatgtaaccttactatttccttcacatataagtctgcatacttgatccactgtaaaggttattttcactggtagaaaatgtgcggacttggtaaattgatccacaacaacccatatggaatcagacattcctgtggttctaggtaatccaaccacaaaatccatggtgacatcctcccatttccactcaagatgagtcaaaggctgcaacaaccctgcaggtctttggtatttagccttaatcttttggcaagtcaagcaccgagacacgtattccaccacgtcattcttcatcccacaccaccaataaaaaggttttaagtctagatacattttgatagtgccaggatgtagtgaatagagagtggtatgagctttcttgataatttcttttctccgttccacgctactcggaacacaaactcgagttttataaagtaacaatacattatctgatactgtaaagtccttagcttgactagctagaacctcttctcagactttcactaactctgaatttgttaactgggcagctctaattctgtctagtaaatctgattgcaacgtcagattattaagtttgcccacaacaaactcaatacctgccctgatcatggcatctcccatatgaggtgaaatcttaactaagttagatacttgcccgtgacccttcttgcttagggcatttgccactacattggccttcttgggatgataaaggatttcataatc

SEQ ID NO: 40674 - DNA, 2462 bp, Cannabis sativa
tcaagagcacacaagtttcatgacggacttaggcctatactgctacaaaatcatgccctttgggctgaaaaacgcaggggccacctaccagaggcttgtgaataaaatgttcaaagatctcactagccgcaatatggaggtgtatgtggatgacatgctggttaagtccaaaaaggctagggggcatgtggaagatctagaaaaatgcttcaagatcctctgtaagtacaacatgaaactcaacattctcaagcgttctttcagagtagtctcaggaaaatttcttgtcttcatagtcaacgccagaatcaaaaccagacaagatgcaagccctttatgacataaagtcacccacaaccatcaaggaagtacaaagcttgacaggacgcattgctacactatataagaagatttgtgtctaaatttacggacaaatgcgtacccttctttaataatctcagagggaacaaaaaatttgagtggatagaggagtgtgaaaagcattccaagagctcaaaaaaaatttggctcaaccctgtcttgttgaaacttctggacaatgaatagctaggcatgtacctagttgtcacaaaacatgctgtgagagcagttttaacaagagaagaagacaatatacaacacccaatatactacatcagcaagagactgatcgacgttgaattgaaattcgatacccactcatggagaagctaacctatagcttactcctagcattaaaaaagctgaggacaaacttccaagcacacccgataaaggtgttcacatcttacaaaaacttgaagtatctggccgactactcaagtgggccattgaacttggccaattcgatatcatatatcaaccgagaatggccataaaaggtcaagatcttgcagacttcgtagctaaatatataaacacacctcttgagatcactgaggattcaggagaaaagaaagagccagagaagaagcgagagcaagagcaacaataaaaaccaaaagaatcaacatggaaactacatgttgatggaagctgcactgaccaattgtctggtgtaagcattgcctttataacatttggggaaaacaactgcacagagcaatcaaattcatctttaaagtctctaacaacgaggttgaatatgaagccctgataactatccttaagctggcgcatgaagtacggggtctgatcacctggagacatatacaacgattctcaactagtcgtaaatcaagatctaagtgaatatatagctcgatgtgaaagaatgatggcctatttgagcaagatccaagacttgctaagtcatcttaaaggctatacaataaggcagatccccagagaatagaatgccacagtagatgcacttgtccgtctggcaagcagcaccattgccgacaaggcaagcctggtgccaatacagttctcaaaggaaaggagcattaccatccttaaagaatttaacaaacatggatgacacctgttacatcttatctccaaactggagtcttgccagaaaataagaatgaggcaaaaaagataagaagaaaggctgctaggtatctaatcctagatagagcaatgtacaaacaaagcttctcaatgccgctcttaaggtgtgtcaccaagactgaagctgagtggttgatggtagaagtgcatgaaggcttctgcggcaatcatgtcaaggacaaagcctatcaaaaaagatactttgacaggggtacttttggccaacaatgatcgagaattcgatggactatgttaaaaaaatgtgacaagttctagagattctcgaagatccccatagctccacctaatgagctcacaatgatgcaacctccttggcccttcgcaatgtcggggatagacatgattggtcaactcatgaaaggaaaaagaggggtaaattacgccatatttgttgtagactactttaccaagttggcaaaaattgaacccttggcaacaataaactctaagaaagtcctcgactttattgtcaagaacatcatatgttggttcagactttcacagaagattgtgtcagacaatggaaagcagtttgacaatgacatgttcactgaattttgcaacatacatggcatcatcaaaagcttctctactgtggcccatcctcaagcaaatggacaggttgaagttgttaacaagacccttaaggacactttgaaaaagtaacttgaagaggcaaaaggaaattggtcataattgctcccaaaggtcctttggtcgcacaggactaccgagaagaccaccaccgggcaaactttattcgatttagcttatggctatgaagcgatgttgcctgtagagctggtgccaccgtcacacaagaggacaacctatgactagtatacaaacaatatcctactgacaggatcccttgatgaagtagaagaaaggagagatcaagccaacctaaagttgcaggccta

SEQ ID NO: 40675 - DNA, 2190 bp, Cannabis sativa
aattttataatattttattagttgccgaaaatctcggtcaacagtaagtaaccatacattattatattattaacatcaattatcttctattacttattttattttaatggtgttgtcctgtgcagcaaatttcaaaagcattttgggtgaagtattgtgagtccttatccaatcaagtatttcgtaagcttccatgtggatcaacagaggagacaaagttgaccaaaagtagtgatggaaaggtatgaattaatagaaaaagagtttgaataaatttgcacaacacaattaattaatgctattattctttaagtaaactctgagttaaatatttggtatttgattatcctaatcatttacaggagcataatgttgatattgatgactctaatgaaaattcagactctcggcctaacaagataagaaagactagtccttatgataattctgaaggtatatattcatcatcatcatcataactgaatgcaaatatggctacagaattaatttaattatgcaatttttattttcagctgcaaataagacaaaatcagtatctgaagcaaatactgatcatgacaatcaaggcacagccactaataataataataagaggccttcatctgaagcagccaccaaattctttacaaacaatccttactttcaagtgaaattgagagcacatcaattgcgtggaaatggaaatttggtatgtacaagttgttactctcattcatagacatctctgtatcaaaattgtctttctttgtagataatttactatattgattcttgtttgtgcagtatattccagtggctatcgcaaactcttgatttgagaaaaaggcacaaattgtgagtctttgggttggtgagaaatattggcatgtgaatttaactattaataagcgaccagaatataagttttcttctggatgggctgcatttgcaagagacaactttcttcaaaaaattgatgtttgcttctttgaactgatcaacaagaatcaacctgcagagatcaaagttaccatatttagacaaagtaaaagtagtatggctcaacaacaaactcttgtaattataccaaatcttctacttgtacaatttaccccagctgaaggggttttattttatataattgacccttaatcaatatcaactaaaatggttgcttattaatgttgatgttgttagtgttttgttaatttgtaattaattctcttaagccatgcatgcctatttgatttctaaagttcactttaaaaaatactttagaccaacaagaagattacatcttaacaagtaatgatgatatgagtctatttttattgtactgagatatgtaatgaggaaaatcaaaatcaattttcaatcctacaagcaaaatcaatttcaactccttaaaatatggtcggatttagacttattattatctttagtttaaaattttaattattgcctatttttattttacatctatttatcatgtaagttcaatgtaagtccaatatatatggatcgattgaatatgcctttaaatggacaataaactttatcaattaatttttttttttaccagtcacatattattgttatctttttattagaccatctccaatattaaataagtatcactaaaaattagttgaatttttaagcttaccaaagataacagggtgtttcttaagtgtagttggagataattgcacaacttgtttgtcgaccatgaccatgtatgtaattataatgtaattatgtaattaaaagtaattgagagtatccaattacactctacaaatctcatggccctataagaattgagtgtaattattataatttttttattttaaatattaactattaaaacatattattttcttatataattattaattattttgacaaataaaatattaacaatttatatatcattaacaacacataccacattatattttaaaatataatgtaattaatagacactgtaattattataacttacactaaacatgaatttattcttttaaaacagtttcaggcactaaaaaatatatattttttttttgaataaagtagtaaacttttattaatgatagcaatcattcataacaattgaacgcacttcagcagaacagtcctcaagctgaaatgcacgacctgaaaagaaacaagagctcctggcaagac

SEQ ID NO: 40676 - DNA, 1120 bp, Cannabis sativa
tgcttcttgaaacatggattgccccttccacaaataagccctacagatagattcaatttcttttattactttcttaggcaatagcataacttggcttgaataagcatggattgttaacaaaatagagtttattaacactgctctgccagcaaatgagacatgcctagaactccaagttcttatgcgtgcagtcattttttcagcaagtatgcaacactccttgctagaaatctttttagcacatattggcacacctaggtaagtgaaaggcaattgttgttaggagaatccaaatgcatcaagtactctagtaacatcctgtcttggcatgttgctacaatacatagcagactttgatggattaggaaacaacccctgatgtttgagagaagagcttcaagaccctgaagaagatatatcaatcttttatagtcaccattatagaacaataaaatatcatcagcaaagctgatggtttaaatgaagttgtgcacatctgtcatggaactggaagtctgattcatacccactcttttcagtattcttgtcaagtattccatacccaatacaaaaagtaaaggggatatgggatctccttgccttagccctcttcttgaagcaaaaaatccatgcattgagccattaaacatgatagagaatctaggggtttttatgcagttcataatgagctttacaaactgattgaaaatttgaatgcacttagaacctcttcaatgaactcccactcaactgtatcataggctttctgaaggtctagctttatcatgcagctaggattattggatttcctcccataatgcctaataagatcctgacatatcataatgttgtgcccaatgtatctacctttgatgaatcccccttggttttgagccaccaaatcaggaagaacatgtttaagtctagcatcttagttcccagtagctccttatagtagcaaataaatgcctctgagattttattcatttcattcacccgagtgccatcaagttgttcaattgacaggatacgattttgcctcctcctccccttgatgctaacatggaaaagagctgtattttcatccccatttagcacccatgagagtttagccttctgc

SEQ ID NO: 40677 - DNA, 1553 bp, Cannabis sativa
  modified_base (477)..(513): a, c, t, g, unknown or other
  modified_base (1516)..(1525): a, c, t, g, unknown or other
ttcatagtaattttaacattaaatgcatttgcatgagaagataattatttacctgtaaactgtagcaaaaacatcatcttcaagcatctgcgaaaattgcctctgggcttcaagcatcatagaatcgcggtacaagaatctctgccaaattttctgcacattcgctaggttgaattctacttctgtttgattaaatgcctggagtattgaaacgaccgccaattagtcatcatcttaggctgtcgagacttacaaaatagagcttccaaatcacatgtagagaaagaggaataggtttgcccttagaatatttatcaaattaggaatttcatcttcgcttattcgaacaagaaagctatcatagttgagcactattaacgaagattttttgttaacctaatttgagcctcacagtagtgatttcacacagaaaaaataaaagctatagaaataaaaaatatgaacacagggtttttnnnnnnnnnnnnnnnnnnnnnnnnnnnnnnnnnnnnnagtcaatcttattcagattttttattgcttttctcaggacctctcttgtatgagtttttttgtcccgcttttgatcttttctgctcctatttatagttatatagtgggcaggtaattacaaaagttgattgtgatctttacagtaattatttcctcaaatcatgggatttgattacaaatcacgctaagtaaatacaatttttattaaaattcactcagctgtgaatatcccgcttttattagaccgagatgaacgcatattaaagatatacggtaagccttatcttatgagaatgcctcactggcaatggagccgagttaactttgatgtcgagctggtgctcgtcatatgacttcccgaggttgatattgtcttaattttgaaaactatagtttctggtgtcgagatgatctttctcacgtgcatgccatcttacagagagatagatgcctcgctatccatcaccttgactccccaaactatttatacttagtttgtatatcatgccatatacgctaagtgtttctattgttatcgtatctcttccgtgagacgaggttaatgcctcgtcatgcacacttgcattcacatggtttctcgtcaatacacaagttagcagttagtatatttctgtctcatataagactgttcagccaaccgaattataaacatactttgtaaattgtgtttctaacaagttattccatgccaagtgtacttacgattgcgtgtttgagttctttgttcttctcagctcgacacgtgtcctcttctgatgtgctcaccaaattttaggtataacaagcacattctcatatggcaagaaaatcccatcctaaacaatgttgaattataacagatgaagcatgagtatacacatgccttaaagaacatctcttaacaatgaagtagaagattagatttatcattctcgattcaaattcattttgcttaagcttgaaatgcatcacgtttctaacacacacaaacatatatatatannnnnnnnnnagcaaaaagctacgtgcgaggcacgtat

SEQ ID NO: 40678 - DNA, 1096 bp, Cannabis sativa
tgatttgtgtgaggcatatggggtaccacaatactcctatgatactaaggttgcaccacaacgcatgattgacatggcaacggttcttagatttaaagaacctcatcgacatggtcaacaaccagctccaccaaaccctcctcctgaacgcgaagaagagcgtgttgaagaagtaccacaacatgttggtcaccctcttgacccagccatgtagtacacacatgatcagctgaattatcttattcagcaagacattcacatgcaaacttatatggcgcagaggagtgtctttgacgagaatcaagtgcagcagctgaatacactaatcacaaggatgaatgttggaattgaagagcctaattacttggcgaatctaccccgtttttatccttatgacaagccgcctccaccaaaccgcttctgatggggctcaggtaagtctctctctcctagaatttttttcctcgcattagggacaatgtgtatctttagtttggggggagggatttaaatttttcagtttatgttttgattagtctagtttatgttttgattagtttagtttagtttttgttttagttttatgtgtcgtgtgttaatgactaaaccgaaatatttttagaactgttgttgtttatttgtgcaatggattgaaattttaaccgtgttcttgagtcatgaattctttaaaggatgccttcaaaaaatgaacttttttttttcatatagatgtgaagcattgatttttggatagtatcactttattctacttgggttgttgaatgtttgcttgacatggaatagaacttgtgtgacttactctcttgaagcgaaatccttgatgattgttgcttggaaaatgatttaggcaaaaaatttctttggatcgattgagcctttcaagcttatctgcaaatttttttttgtctttagtttacccaaagttgagctttagcctgtttcaaaattttcaccacttaattgagcctactgcgttgtctttaactactttcattctcaatgtatcttattatgccataagcttttaattaagtttggggaaatgaagtgttttgagtgggcaatattttggaag

SEQ ID NO: 40679 - DNA, 1426 bp, Cannabis sativa
atattgatgatcatttaatattttgttgataacatacagaaaattattattttttattatttaaataaatataatatggtaaataaagaaggtaaaatttagtaaaagttaattaatcataataattagaaacattataatatacaaaaaaataatatttattgtgtccaaaatttaacacaacttttaactgcttgccctaattttttttttttttttttcatctgagcctagctaataacattatagtacaaaattataacttttggtacaaacatttttaaggattacacgacgaagataggggagggtgtcatcgctccttaattttttttaaaaaaattatatgtgaaaaattattaaaaaaataaaaaagttatattcttacatgtgttgtctctcattaaaatttggactagctttgccattagaagtatgcccaatatttttttggtataaaatggaatattagaaaattctatgatgcacgataacgatgcacctcctatctattttgatatttaggagaattttttagtttatttttttatggttgtgtacgttgtaattatttaagacatcttacaaaattttgaaaaattcagaaaagtttaacactctgaaaaataaagttcaaaaagtctattgtggacgtatgaaatagattgttcgaacactgatttttatattgtaaattatttcgaattttttaaaattttgcaaattgtcttaaataactataacatacactaccgtgtaaaaaagttaatttttttttttttctggttacttaaatagatattgatacatcaatacaccttttttaggtgcagtgtagaaattaacacacttaattatttaattttaaatatttaaataattttgctccaactaaaatgtacacacttttcaatttttcaaaaattaaattatttttacataattactataaaactacctaatttttaaaatggaaatatatttttaaattaaaaaaatctcaaacaaatatataattatttttcctaattttaatttatatacataattaaatttctttaatttctttaaataatttaaatttatttcgagattatcttatctaaatttgtctctttcaaatattacatatttaaatttgaatttaggtttcaatttccatattctaaaaaatcccgaaatattttaaaaaagaatataatatttatattaatttagatggtcaaacaaagttaagataaataatcatgatattatgattaaataatcatatttaattataattaaaaatatataataatcataatcataatcatattagaattaggattattatgtttttgctataaaaagacaacataagaaccataattatttacatacgtactttctagccctaataaattaaataattgttaatgatcga

SEQ ID NO: 40680 - DNA, 1177 bp, Cannabis sativa
cgctcttcactttttttataattattatttttggtttctcgtattcaaataattagatttaaaaaaataaaaatataatatttatatttctagctaaaaaatgctgcagtttaaattaattttaagaactttaatataagataaatataattgagtaaacataaaataattgaataaaataattaaaaaagtattaatatggtatagattgtaaacttcaactttaatatgcaaatagtacaataacaattattaactataaagtctaagttttaagttaaatactaaaatatccaaacttttaaatacaaaatagtttaactgataaatgtaatttatgtaatataatatatacacttttattaaagaaataatataaatcgatataattcggtttattcggattaattgagcggtttagaataatttgtaaaccacccaatatattcattgggcagcttggatttttattatattatttcgggttgtatttttcgtcagtttatttagtttggtttgggcggtgtattcgggttgggcagtttgtaaattttgttgaacacccctaggtacaatgcagtcgagaaggattctctgttgagttctctcaaagtgtttcaacctctcacacttttacccaagaatcttcttcatctacataagattcttcttacaaaacctaaaaccaatgtagtatttacaggcttagatcaatatcctaaagtcagtagctgcaagaattgaagttgttaagttagttaagcagtaactaacttaattttcctttgagtgagatctccacgtcagtgtaagtcttagtacatccggaaacgtatgtgagcttccataatcatggaccaaaggcacttgctgaaggagttttcaaataggttagagctaattaaagtcaactatccagaactatcattctaaaatgatcaactagccaattggaacatcatcttggagaaaggctagcttttcctgaatacccttctcggaaggacaagaaagccttccatgactacatttcgcgagtgaacgtcttttcaaaaataactaatggagaccttttcatttagaaaaattataccacaatctatatatattttcaaaaaattcaaaaatatataaaataatgatcaaaataatcaattacatatatatataaaaaaaa

SEQ ID NO: 40681 - DNA, 1923 bp, Cannabis sativa
cctctttctcgaattgttgtagtggcaatctcactctaaccgaattgtttacaataccggtgccaacctcacctcaatcacaatatggaaatatgtttgaaattataagcaaattcattttagaagtatgatgatacagacaaacctagagtgattagcaagcaaacttaaaagaattaaatacaaattttggctcaaagtgtgtgaaaagtgtttgttgaattttagacttgggagctcattaaactcacttgaatatgttaggtatatgatataaatgctcatccaactactatttttgagtaaaattcaagtttatatagtgttggggtgaaatatagccgttagcacgattttcaaaaagaatcctaggaaaaacagcctaccgttttctaaacagactaccgtttctaggaaaaatggccaaattgtagatcgaaaacaaggcaaagacaaatcctgtatttttcggctctaaaacgtgcataactctttactcgattattcgatttcaaaaattctaattttattctcttagttaaatgaaatgtgacttaaaaagttaaatcaaaaaaaaaatttgaaccattaggtgagaaaacttgtcgcacaagttagtgagtgggccaaaatttgaacttaaaaaccctagtgtactatgcaaatcactttaacaagtaaacttataccatttgattgtgggtattcttaatatagatgagcttcctagatttatttgcatgttttgatccaaagttgaattttcttcgagagctgactttcgggttgacttttgactttgagcttttgaagtcctcttttgaataggatcttaaattcttgatcccttgatgaatactttgctcttatcaagtacgaagtagttgatatacttgttgaatccacttcggatcacttttgagaattttagtaaaattaccatttcgttcttggagttaattttgcctttattttaccttttaattatgctacaaaatcaacaaaatattagtaacaaatgataatcaaatatttgttaatcatcaaaataaggagacctaaaagtttgaattaacaatctctccctttttaatgatatcaaatatttgattattttgaaaatgagagataaaaaatattgaagcaatatatattagattagcctccccttaatgtgtgcaagggtaaaagaaaatttaccttttaattttaccttgcatgattttgtaactcccccttcaattttatacttaagtttaaagagtattagatattccaataaaaaaaaaaattgaggctatgccaaaaaaaaaaaaaaataatcatagaatttctctctattttaattcatcaaaagggtggcaaggaattgacaaaataaaacatagcattcatcataccattcatcataaaaaaagaatttaatcacatatcattcaccgcaaaacataccattcatcataaaaaagttaaacacataacatccaaactaagacaaaaaaaaaaaaaaaaaaaacatacttaacacataaaaatcaaaaatgcactaagccttgtcacacatactaaacaagaacaacaaaacaaaaaaaatgagaaaagacaccacaaaaaatgcaagaaaattaatttagtggaggtccgatattgttagaacaactgaatatgactaaggtcttttactctgtatgtattttactgttttattgtttactgtgtacttaggtagttaaaagtctgttatggtctgttacaattgattccttatttttcggttatgatttgttgtaatctgttcaaactcttcatctataaataacagaagtctagccaactgtattcagttgagctttccattcatcttccttcttcttccattttctctccatcattttcttctttgctcaatcttgagtactgagt

SEQ ID NO: 40682 - DNA, 1385 bp, Cannabis sativa
ttaacctaaattttatccatatatagtcatatacatatgttgttagttagcatatatacatcaatattcacgttctgatgattttaatattaaacttattagtgtgtttttttaattagtggttgatcaattcttagaccaacttttagtactagctagccatacttgaaaaacatgtagtactaaggtaaagtacttgaaatgtcgacatgcttggactactcatcattgagcaataattaagaaccattcgtgtaatttaatatttctttttattacatttaaaccaataattgtgttatctgcaatactcaagaatgttcagtgttatagtaaaattaaacttggtgatggtatgtccagtgtacaatacaaattttcatttcaatttttatatgcggaactattagatacatatatcaataatatttcaatccaaaaaaattgaggtgagatttagttggaaataataaaataaataaaattaaaagaaaataatttttattagatttttttgtttagttgcattttaaagtattgaaatatctttttaaaggaatgctctttccactattttaatagagtaagtatttcattttaaaattgaatgaaaaatcattctaatataacatgagaaaaaatttaatgattttttatcaattttattatatattttaaattttattctattctattcattttctattcctattcctatattttcaatattcctcccaaccaaacgtcatgacctgaatattaatcacacaatgatctttcaaaattttctttacatctcaagatttgtatatatcattccagttttaaagtctctaaagcatattatcataaggacaagttttaatgggggtgttattgaattggtatggggttaaggctgaaatgagatggaagagagggttaaaaattcctagttatgctgaccaacaatttttattttatttttattaaaagaaatgtattaattggttactttcttttgggtcctctatagcactttattattttgcttccattgatgatgacctaatattccaccagtagcggtaattagtggggtattttgttttagtgtaaataacttcatgaagataaatatgcaaacgaagcagatccaacttatgtcttatttattagtaagtaatgggaatctatggtaaaatacgtaatcatttctttatatttgtttacttactttgttaaaattaagaaaatgagagcttgattaaataagaaataaaaaaaaaagaaatattttgctcatgaatattttaaggaatgtcattatgcttattaataagtaataaaaaacaataataaagttgtcatatttttcttacatttatttatttactttattatta

SEQ ID NO: 40683 - DNA, 909 bp, Cannabis sativa
gcaatatgtcccataatagaacacctctgcgctgtaatttgatactacaatcatatatgtacagcttcatttaatttagatcaggcgcctttcaaaatgattaaaagtacctaccctattcacgtggagttttgagctcagaacagtcattttattgattcttggtaatgtcaatagtgaaaactgaaaagtgtgtgatatatatagactatagtaattataaagtgcatgtctccgtctgaatgatctgtgaacataaaattatataatattattactcaaatcaagattcacagtcacagatcgatctagctagagcattgtaaatgtaattaaagcttctatctcaagcagttctcgtattattagccaatcaataataagtacaaaatcgaccccatattttttttttcttctccttctaattattggagaacttaatggacgactgatcagggaaatttattttcagtactcaagtctgtaaaagaaaaaagtcgaccgactgatttagtcagtgagttgcatgtgatgagttgtgagttattttttggccatgcaagagttctcgtgttattaataatattcgcttaaacacaaatgatatatatgttttttctctaaaatattaaaatcttaattattgtgactctcactctcggtattggataataacatataatacacagttaatttttaataagcaatatattatatatgaatgctatagttaataaataaaaataactaaacctcctcctaccacccttatatatatagtctatacatatgtagaggctgctagtagatactcaaaagtacatagctgataataataatatgtcttctgatcctcatgatgatcaaaagtactcttctttcaactactccatcgaatctctgtcgggg

SEQ ID NO: 40684 - DNA, 1310 bp, Cannabis sativa
tttttaatttttttttaatttacggtttgagttgctttgatgattgcttcggtggttttcatgtaagttgttatgttgattttagttgcgatttagattgctccattagttgctatgttaattttcgtaaaaatatataaaaaaaataaaactattttaaatttaccttagtcaatttagtcgggttataacatatttttaccaattcaatataaatatcgggttgtaaaatatatttagttgtaacccacctaattcaaaattagaaaaggcttaacccgtccaataatttcgtcggtttggttgggttaaccagtccaaaccaatcttcatttttttggcttaattgcagcaaaaccccccaatatttttattttacttgcatttaactcccaaaactcaaattttgactacaaaacccccaaaactcacattctgttagcatttagtcatttccatctgtttttgagagttaactatcaaagtggttgtccacgtgtacatagagtattgtccacatagacacaatgtatacatgacacactaatattgtcccagataaataaatatttaaaaataaaaaataaactaatttaaaataaaaaatattttatttttcaattttttttctttttctttttttcctattctgcttgttttcttacagactctctatcttctctcctttcacaaactctctctctcttccccctctgtatacttcaacgccagaccggagccgctccacaccagactagaccgtcgagtgccccatcaagctctttatctcgctctatctctctccttcacgaactctccagccacacgacggtgaaataaaaccgtcgtcaaactcctcctctctcttgtgcttcctttctctctttctctctatctctcgcactctctctctctctctctcgcactctctctctctctctctctctctcgatcacggtgaagcaaaggttgcgatggtggtggtttttagatctggggttttgagcgcagatctaatggaggaacttaatctattccactggaggagctcaatctaattgaggagcgtagatctggaatttagacctcttttttttttttgacctgttaagttgtggtgtggggtggtttcatatctgggtttaatttttttttaggtatgatttagatgtgaaagataggttgaggtggcagtggtggtggttttggttgtttaggtacaatatgaagatgatggagaagatgaatgaaataagaaataagaaagaaaaaaatatggaaaaacacaatcagagagagagagagagaga

SEQ ID NO: 40685 - DNA, 3852 bp, Cannabis sativa
acttggctgtctccgagaatgcggttagcgcgaccttagtacgggaagaggaaaaaactcagcatcccgtgtattatgttagaaaacgcatgataggggcgtagacacgatacccggtgatcgaaaaactagttttttttcctcctaatggcctcaagaaagctaagatcctactttcaggctcactcaatcaaagtattaaccaaccatctgctccgacaagtcctacaaaagtcggatgtgtccgagagacttctcgaatggctatggaattaagccaatttgatctacattacataccacacacctccataaaaggacaagtgttagcagacttcataacggagtgccatgaggcggaggctaacgcaagcgtgcctacacctcaaatcccagcatggaaagtctttgtggatggtgcctctaacgaaaattgatccggagcaagggtagcaatgtgatatccccaaatggacttcgactccagggagccctacggttcgaattcatagcttccaacaatgaggccgaatacgaagccttgattgcagggctgagattagcaaaagctgtgggggccagaagagtagaagtcttcagtaattcgcaacttgtaataaaccaagtattaggagaatatcaaacacgtggagaaaaaatggccgcgtacgtagcaatagttcgagaatttctccatcagttcacagactacaaagtggaaagaatccccagagaaaagaacgctcacgcagactgtttggctaagttagcatcaaacagcgaaattgagaaactggggggtgcccgttgaacgcctctcggaaccaagcattaaagccaaaagtattgtggcggcaactgaacaagagcccaactggatgatccccatcatcgaatacataaccaaaggcgagttgccctaggaaagggcactatccagaaggatacagtaccaagcgcaccgttatgtgatgatggacaacatcctctatcaaagaggactcagcatgtcgtacctaagttgtgtatcggaccctgaagctaagaaaattatgctagaggtccaagaggggttctgcggagatcatagaggaggcccaagtgtttgcatattagaccatcgtgttttattgtcatatcaatgcaatattttacatgctatattcttttatttaaatattttaatataggaattttagtttgtgcttatttttaaagtttttcttttcaaccataatacagattctaaaatatattatatggtaaacaagcctatattaaaaggatttttacaaaaatataccaaatttttgacgaaggtttatatttatacttttttacgataaaaattacctttttactacctgagcctttttttattttatactgtaaacactgaaaataaaaaaatcaggtctccatctttcacacccacagactgaaccaccacagcaacacaacaaaaaaaaataaccattaaatccagcgagatgaagcagaaacattaaaaaatttaatacttgggctgtcatggtttttctaatattatttttgggtggttccacttttattttgtatatttaataaatattggtttcaaattacacatattaaaccaaccactgaatatttatttgaggtaaccagaatgaaaaaattattgacagtaatagtcttacctcccattgaaatggtaaaatttggaagacaaaaaaagaggatcgaagctagctagggaaaactataacttaacaaatgcagcaaacgtggggagctgggatacaacaagagaacatataggaaaaaccatcaaaagtaaaaagaagtagaaaaattaaaaaataaaagtagaacaacggaggaaaactaaacatattttggagcatatgatacttaagaaaatacttacatacaaatttaattattttcctaatactattaaaatagagcaatgtaataatatttgggaaaatttgataaagaaattaaagaaaacaacagtaaaacaaccttaaaacaataacaaaataaatcggtaacagaaaatggtaagttggaggaagagggtggacttagaattacgatagagatggagccaacactttgagaccaaagagactgaagaacatgaacttagtgagagtttttgaaagatttttacaagaagctcatcacagagcaagctctccatctctctcccacacacacaatcacactcttatcttttccaattcttcttcctcttctgagaagatttgtgttgtggatggttctccccaacaaatacccattaaacccctcccagattatctaggtgcctccgcaaggagctttggtagttatctcttgtaatccaagaggttaacaaatcttcttctctaatcatgccacgtgtctctagctcaaaaacacgagtaacaacggtggaccgtttttacaaggtagaaccgtggaatatggttgaccattttggggtgtttaaagccattagattttgtgtttaatcaataggggtttgctcggttttgagtttaggtcttataacgagattgatttagatatttaccaatttccattattgtgacacagggccggagatcgtcaagcatcattccactcaggttggcccgcacacctgactttggacttaaggtaagaaaagtcaattacatcgtataacatgtcaaaagtaaaatattgtaattaccgttattaagaaagatttattactctcttttgaaactgctgttatgtttcttacttatcagttgcttcattagtcatcgatagtgacattataaagtataaagactggcttgtcttattagaccaataatttgttatcaacatttgattatactgagaatagttttttaaggttatatgcttaaagtatgttccttgtttttaagaatgttatgttataattgatttttgtcttttccccaatttcttgttgagtcttcgcgactcacgggttctttgtggtgcatgtaagggtaaagagaaagtggaccaaccatgagttagagatttccgagtgaatgtactaataatttgttaagctaacaggatccatcttctataatattttgaacatgtaataataatttgtaacaaaatagtatagtggattttagtaaaaactcttaactaaggggatccctgaatctaataatattttgaaaaatattttaagttatactttaattaattttctaaaagttttattaaattatattttcttcttaaactgttagtttatcattatcaactaaattataaaagcacacatgtggcacccttaagggttagggcattacacaaacgtagaggagcgtgccaatactatagaagatcagatggctgacttgaaagaaaccattgatgttctagagaaaaatatggccagtctctgagaaggggttgataatgccaaggctagagggagtagctttaaagaagaatctggctgctgctcaaaagaaaacttcaaaggttgaagattcttctagtctggcacttgatgagaatactttaggtattgctcagcttgaggatcaagttaaatgtctaagagagcaactaactaagctggaggagaaggctactgctaatattacgttttacgatggcgtatgttttgatgcaatctattgtgcttagtcatctactgaagaaaggatacgggatttatagtactaactaggaggagtcatatatccgctgcgttcccaatgtaagatatcttatacttaatgggttcattttacccctagctttagaaataccttagttttaagtctaagggcattttggtcttttgtttatggatgagtgaggtggctgccc

SEQ ID NO: 40686 - DNA, 1136 bp, Cannabis sativa
agtggtattgtcaactatttattacgacttttcagtcaatcttggtacctgaaaatatacgtaattttttttatagtggtgttcgttatactcacaataacattcttgtaaatttttgaaaattttcgaatagtttacagtgttaaaaatatgtttacaattttttgaagatggatggtaaactaaaatatcaagaactatattttcagtactgtatattttagaatttttctttcaaaaatttataaaaataataataatagtgtaactataacaacaaatactgttatgaaaaaaaaaatgatgtgattttagacttgaagattgactataaaattgtaattggagatcctctcaacttgttccaacctaggatttgtaattagtagacttgtagactttttaaaaaatgagaaaagcaaaaccaaatggaccacttgataggaggagtacttacttactcattactcagtagagaagagaccacacacacatccatgtttttgagggcaagtgggttgagttgggtacccattattgatttgaggctcacataattgtgaacggttctccaatcaatcatttaacaacgaaagataaccattatttttattatttcactaaaacaattttggtttaatttctttgatcccacttttgccaaaccacaaaaacgacatgtcggcaagttttgatatgggtatgggaaaatgatataatccaaaaatagataaataaataagtgacaaatatgtactggttgatgaagacatcaatcaagtggagttgttagttgcatgtaaaggatcccaattgaagaggcccaaatcatataagaagcttcctataattgaagaaatgctatttttagacattagttggtttaaatattttatatgattattattatgaacttaggtggcgtttggttggaggtaatgaaatggatggaatggaaaggaaataatttttattccattcctttattttttgcattttaaagtattggaatagcattccaatggaatgctctttccactattttggtggaatgtctattcaattttttttaaaaaaaggaatgaccattccaatgtaacaagaaaaaaaacttaatgatttttttatcaattttt

SEQ ID NO: 40687 - DNA, 2220 bp, Cannabis sativa
taaaaatacttattattaataaatgcaaaaaatgtaattttttgacttaaatattttagattattttcttatttattaataaatgcacgaaattttgttttcattttacctttttcttaaaatttatttaataataacttttatctatacttattcaattactataataattttacataaataaatataaaaaatattatataaaaaaatatatgtgaatgatattcatttaatttaatctcaaataaaatgacatcaaatttattaattaatatatataattttttatgaatatttattttattttatatttaattaacataaaagagatataatagttactattttattttatttaacttttctacaataatatataagattcctgtactcaaccaaacactataatctaattagatattcccatggatataaccaaacacagtaataagtttacaagtaatcatattctccttcataatattccccttaatcagattattttgaaccccttataccaaacgcccctagagttttaatgaaacacgttttcaaataattaaaataataaaataaaaaataattatttattaaataaattttttataaaaagtaaagtttcacaccacactagctcgcacgaatatgtcagtaaaatgaagcgcacacacgtgtagtgggttcaatgtgtgtttcgtcactcattcgcacaaaattggatatctcttagggctctatctcaagtgccaaagttatattttatatattattgtaaataagagctcatattccatgcaagactttttctatttcacacatactaggacactctcttaatttgtcaaaatttcatcaactttgtaaaaagtttcaacaatccctcacttgaatttttaaaaaataattctatctaacagtatcattcagcaataagattgagcataaacaaaggtatctttcaatttaaacctttgcgtagtgaatatgatttaaattttactagagtgacctgtagtctttgactctatctttaatatcgtaccacacaatagccttttcaagggtgtagtcaaaagctgtgcgttaatgaatgtctatcccagtatagtgaacgctctagaaatttcgcccattcataagaagcagtcccactcacacattcacataggtgagtcaattaggagtactcctgtagctcggtactctactccacttggagtatagaactcattaagagcttctattaactcagccttaaatcgctttaggaattcatgcttctcttatcgaataattatagcataatctcacttttatcacttcataacttattattacctgttaaacttattttttgggatctccagtctataggttgggtttccattacgagtgattaatcaatctaagagtagtagtctcattcctttcgatgtttaaggactttctttctagctaaaccttttgtcaaaggatcagccaagttatcattagtgcatacatgatccactccaataactattgttgagagaatctctctaaaagtgatttgcttacgacgtatttgtcgtctcttaccgttgtaatagcagttctgaacttttgcaatagctgcaatacaatcgcaatggatcaacatagttggaataagtctttcccataaaggaatctcaactagcaagcttctcagccaacctccttcttcactagcaatagctagtgcaattatttcagacttcattgtacattgcgccaaaatagtatgtttcttagacttccatcaaatagccataccaactacgctaagaatatagccattggttgccttggagtctctgataaagtgcttcaattagcattactgtacccttcaaggacagctgtaaacttttgataatgtaatctaaggttcaagattcttttgtggtatttcatgatccttccaatagcatgccaatgctttacactaggtctactagtaaacatgtataataatccacgacataggtaatgtcgggtctagtgcaattagtggcatatcgaagacttctaattatgcttgcatattcaaattgtcttacaccatccttagtgctgttaaataattttacgctgagatcatatggtgtacagacaagtttacagttcaagtaagtatctttctttaagatcttctcaatgtagtgagattgatctaaagaaattcccttttcagaccta

SEQ ID NO: 40688 - DNA, 2150 bp, Cannabis sativa
atgtggctatgtgttgaatgaatgcctgtttggtgaaaggataaaatgtctgattatgagttactatgattttcttataatgtgaagtttatgggtttgtattgacgctaattaaatatgcatgttgaataggtattgaatcacaagtatgttattatattgtgatgtgaatgctttcgttttcattgcttatgtccaggtaacttttcttgctgagtcattgtgactcacaggtgctttgtggtgcaggtaagaaggaaagcagttgtgttcagccatgagtcagaggtctcccagcaatgtacatatcagccgtggtgtcttgggttccgagaagtagtatcatccctattttctgtctttggaatcgtaacctacttttgtaataatgatgctgtaattaattataaagaattttataaataggggatccccgtattatgacagtattttgtatgaaagttttatttttaaatttaattatgggatttttaattaaaccatacttttcttatactaatagattagttagaaataagtttgtaaaagtacacacgtggtgtccctgtgggtcaaggcgttacacctaaatttatctttcagttgcaatttaatacctaagttaaaattttggcggcatagataccttccgttacactttcagacattctgtaggtaccttgctgttatcttgcacactggacaccagctggcatgccacatcatttaaaataatgtgacatcatcttattaaataaccacctaatgttcactattaaaataaaaaaatttaatttaatttaaattttttttacataaaactaatttattaaatttatataatataatctaatattaattattaaaaaacattgtcttcaaaataaaaagaaggtaataactatttataaaaaaaaaaaaaacaaaaagaaaaccctaaaagtgtggaaccagagtcagggagtgagaaagaagtggcggctgcaggttcttctccgaccacgatggcacgacccatcatcttctggcgagaccatcttctccgaccacgggaggagccatcagcgcagggagagagaaagcgttgggcgagatgaccacgacaaccaaccagcagctacggtatgttcgaggttcatcttctctgaccacagccatcgatcgagggagcaggatgagaaaaatagggcgacgggtgtgtaattgcgaaccaccacaagaagtcgcggttcgtacctcaaagacggtgaagaatccaggtcgaatgttcaagtgttgccataaattcaaggtttgaattgttgccccatttttttcttcttttttgttgtccaatttttcggatttcgattttcttaatctatctttgatcaaggacttttatatgagggaaccaaaatttaaactaatacaaaaaacagaaaaaaaaaaaaaacctttccttttgagaaggaaaaaggtttgtgtcagtgtcactatcaagttgatatttataatataaataagaatttcgtgataagtaatgttggtcagatttaatttgcaaaatttgaagaaggattataaatattaaatcgtgacaaagataatatttgattgtgattattattatgatcattgcaataattttttttcttttcttttgcataaagggattaatagaattagatgtaaaattaagatatgaaatggattagtttgttgtggttattgactcgaaaaaggcacgtttgaaagtcagtttacttaaatgactttaatttaatagtatgggatttaaagaaaggccccaaaattttgatgtgagatttttgcagttattgtgttgattattaattaatcttggagatcatatcatgtctagaacaactacttagtggtattattgttatttagctagcttaatctatgttttgattgagtgcatgcattttcatcaattagatatgttgaaacaattggtttgattgagtggttcttgtttataatatgctagtattcattcttaagttatattatgtcttggtgaactattacaggcttatatagtttcaaaaatctatgtgttggagctcttacataagagcaattagcaaggattttgagataagctgaagtagtttcaagactcatatttgagaagggagaac

SEQ ID NO: 40689 - DNA, 1078 bp, Cannabis sativa
tcatcgtgtctgacctgttttgccgaccctatctccaatgggatggcaaacatttaaaaatagtgtagtttttacccaaaaatatttcaactcaactttaaatgtcatctttctatataagacaatctacagtgctccactaaaaatagtgggacacggtgagacactgagacatagcaaatttttttgttgttactttatgtactttttaataattaaattagtttatcaaaaagcaaataattaaataatattattatattaataaaataatataataaaaaaaattgtataatttttagtattataattagaataggaaaaaatataatattaaaatagtacatttttagtgttgatttaacacaaaattttatcattggaatggcttttattgtgatttataacacgttatatttgtgaaaagtttgcttacaaaatccatatgttatttttaatctttggaggttatatttataattttaaagattcaaaatagtttgatgaatgggcatcagtgagaatggtcttatatcattctctcttgtctttctctcttcatttcttttcttcctgagtcagtcccttcttgtctcatccctccctgtgtggttgtttttcctggtttagtcctagttctttcggtttggtggatctctggttctttttctcctctttatcattgtgtttttgttcccctggtgtgttgtgttttttttctttggtcctctccttgttttatctcttttcgtgcttagtgtggagttcactactctgtgtagtgtgttgtggggtctgtggtggggtcttccttgtgtttggtgagtagaggttggtggcatttagtgctacttttcttttgtcttttgctgtcgatcatggcattagttaatgtccccaacagtgagtctcttggtaatggtaagtgcttttcttgtttggaaacatctataaaactgtctccctgtgcctcttctcaacaagccctctcctttctttgtcttgttggaagagttattgcccccatgactgttaatgaagctactatcttagactttgtggacaaaacttggaagtg

SEQ ID NO: 40690 - DNA, 1821 bp, Cannabis sativa
tcaacctaggcgttgggcccagccttaggtcaacttgggcactgggtgcccgaggcctcggggccccggatgctcaaaaatcaacttgctctgattttacttctgatacctcaaatatgcccgtgggatgtctagttgatgtctcaatataagttttgaacattttgcactaagacgggtccagaaactgaaaccctagttgaggatgtcaacctgggtgccagatgaaactcttggtgcctaggttggctttcgggttgcaggtttgtctaattttagctctcaaggcttggactaggttgctccatgtcttcatatatagtacagaatactagaagatagtggatcagattcaagttattgaagtccaaacttccatcttagagatctcgaagtcaacttggacgcagggcaagggtcccttcctaggtcgactgctatgactcgggtctacttaactccgtgacattatccttcatgtcacgtgtcaaacattgatgtccatgttaccaaggaaagtttttgagttaacatttgcccccaagtaaactttacacttgtgtggagttaacttgatgatgtgaatcgagcccatttcacttgaaactaccagttcgagaaatcaattcaggtaataaatattgtaatctgactatatatagaatatcaattaattaattgtgtccaaattcaataatatacaatatttatgtatctcaaaattaatccattaattttattctgaaaatagaaaatattctaataaatcaaagaaaactttctttttgaatcaatcacagacaaccttattatgttagataaaaaaaatcacagacaaccatagacttataataaaatccgctaacaaaaaattaaaatatacaagtcgggacttttatttacatccttataattaatacaaagggaaaaaaaataggaaaatacaaaaaagggaaaaaaattacaaaattactatggaccggcccattcagcatttatacagcccaaaatcaaaaaattacaaaaattccacatgctctataccttaagccacactgaatgaacgaagaagatgaacatacctccatcgatcaaatcaacaacacaaccagaatgaaaaccaaaatgagggtaatgcaaccatcaattctggcgaaatttaattggaaaagaagaactacaataatctaaacagaaaattacgaaaaaaaaacagaaaaattgagaagaaactaaaattaaacatttgatttcggttttaatcgttcaaataactccttctaaaatcgaaaatctagattcatgcaatgtagatctgaattaaacaaatctggagctccctctcgaatccaaaacaaggtatgatatgaaatttttttaaatactaaatctacgttatatacagttgcatcctggttgattcatggtttaaaatgggcaattcaactttttaaaacacaataacaagatataattctaattaaagaacaacatgttacgtataagtttgttgtttattttttggcgttgccttatagttgcattatcgttttataatagtttacaaattatggaggaatttcagttgacgggtaccaacaaatagcatttatacaaggtaagatttatgtaaatagttacaaattagttttataatagttggaaattgatctgattcaaataaaactgatgaaaatgcacaaggatctcaacaatgttaaattgagttaaataccatattttttcaagttgatttacagttgcatcatcatttcataatagttttattcatttcataaaacacttggacaaatggttagt

SEQ ID NO: 40691 - DNA, 1806 bp, Cannabis sativa
ttttctatagttatatatatatttttgtagttatatttatatatttttaataactttctgtagttatatatagactacaaaaatatattttaggatatcatttagactctacaataaactcagcatgtaattatttctcattcattatttttcattatatttaatatgcgcataaaatttgttaaaaagttaatcaatattttgtatcaatgtttttttctaaatcacttacaaatatttatttacagtactaatactatatcacattcaatttagcatgaaaaagattaaaatggtaaaattttaatactagatgtattttttattaaaaaaatttagtaaatctcctaataactttttttatttataagaataaataatatcttagcaaatatttatttagagaacaaaataaaggggaatattattttagatttaataattttgttaaaagttacatatcaaatttttttatttattaaatgataattcagactatttatttttagaatggtataaaataatataatgaacttatttttttgtcaaaatagaacataataataacctaatttagaggtgttctaaccgactaatgctatttttttgtatacatttgagctaaaaattaggattacgtttttttcaaaataataataaaaaaattagtattaggttgattatatttaaaaaataactaacaaaaattttgttcatgatattattctctaccattttaaaaaaagaaggtttacttgtcatttaatacaattgaaagttcaaaaataataaataaaataaaattgaaagtttgatcggtaacttttgtaaaacattaaaatttaaaatgaatatttacccaaataataataataattattattatgtgaatttaaattattttataattatgaaaagaaataattttattttttttaactatcattttttttaattctctttgatttaagtttttcttttgtatccaaattctattttttaaattgttaaattaattaagcaataagtttgaagctgttagagcttaattttaatatcatatattctttcttctgtttttaaattatttaaccacacaattttagtgattacatgataataataattaattttgttagttataaatttttaattttttctttttttttttaaaaaaaaaataattgaaaagaataaatttattaaaagttaaaaaataaaatgaaataaaaaaatggcagcacatcccatgaatgtgctttgcaactagtatatattataagttttatcagtaaacataaacgaaaacaaaaatgaacaaacgaaactctcgttctcctcttttcgacaaaatcttctccctctatatttttcttcgatttttaacccgaaacctagcgatctaagctctgatagtagcaggatagaaaattcttgaagagagaaagcttaaggtatggtttaatttcgttttaagtttaaaaacaattagttttgtataagagttttgtgaattagaatagttatgaaggttctgaccttataggattgttctcgggtagtcataggactaattttgatattttcttgctaaagctgaggtaattttgagttagaaatttagtttggaatataagcttaagtccccgaacttaatggtgtttttcatttaaaggctcaattttaatttttgttacataaagatggtaatatttatggtatatatgtgccttgtgaagtttggagtaatttggataagttttggtagtgttgtagtgtatttatgccacgagatttggtagaaaa

SEQ ID NO: 40692 - DNA, 1572 bp, Cannabis sativa
agccgagcaacagaccgccacttctccacacaatgcatcagaaaaatccaactgatccgtatgaatccggattactctgcctaggttatcctaattatttttcaaagttaatcttggatcaagtaggaaggaaatgtttttccttttagatttgtttgggatattagtactagggaagttttcaaaaaaaaaaattagataaagtattattttttgtgaaatttttatttttttatattttttacaattttctacaaaaacaacacgaaaataatacaaaaactacataaaaataatatcaaaataatatttaaataatatcaaaataacaataaaaaataacatagagataataaaaaatcaacaacaaattaacaatattacaacataaaaatattgtattttctgtaaataaaactataaaaaatcgtataaatatttaaaattctgtacaactatattttgaatttttttttttttttttgttatttttgtgttcataaaatacttgatataatccaattcacacgatctaatccaatttactttacaaagtacgaatatttgtatttgtatgaattaaataagattcctttcaaaaaaaaaaaataggattagaaaatttaatatgtacacttgtactaattaaatgttgattagcatgtaaatgacttaatccaatttaagtatatttatgtatattttagaatatatataagtaactattgccccagtttattctcaatatacgtggctgttgttgtgtgtgacatgtggacagaataggcacgtcactcggagatgagttggaagttagactaaagaagcaacaagtatggttcatgacgttagctcccaaacatgagcaaaagatataccttcccctccgggagtcaagacacaagaaggcgcttccaagccaaaaggtttgagttaaatagtcatttcgcatttaatgcagcatggagaaaatgtctaggaacgcccataagatggtgtgtcagagatcataaacctgatttcgggcgattacacgataatcaaaggaactagtgacggctccatcatgaagaatcacatcaatcaagaaaggatgaaggctaatctcacctaacatctacgctgcctactgtgtaggtagtgcatgccctattttgtatcttttgggaacttgtgcttgcccatagttggctcttaaagacaagtcactcctcttcttattcccaccaatctctataaatacccctgagtaaaattaagaaggggatcgaacgaaaaagaacacacaaaaaatattctctgtaagaaatactctcattaataatagagactcgtggactatggctcattaatacccgaaccacgtaaaagtcacatgcattaattatcccaaaactctcattattatcttatttaattggttgccgaaaatcacgatcaatattttggtgctttcattgagagttgtgggaagcattatctgaaaagcgagaacaaaagatctcgactgcagtgatggaaactcgaaaccacacacgccaacctcatccccccaggatcctcagaacctag

SEQ ID NO: 40693 - DNA, 1517 bp, Cannabis sativa
atctttaaataatgttgagttgtgttttgttaaacgatctgcaaacaagctggctcatgttttggccaggattcttgtttctctctaggtcatgagcttcaattggagaattgttccaataaagtacgttctattgttattaacgattgctagttaataaagttgctaagtttattcaaaaacaaaaaaaatcacttgtccccaatttcctatcccattcttgtccctccaataattaactgccacctttttcttttccacatgatttgcttactcttttctaaacgtttgctctgttagttagctccgtttatttcttgatcttcctactcacaacattttcttcattaattacaatatttcttggtttaaaaaaaatatttacaatatatctccacaaaattcaaaatcatttcaactttccttatttatatcctacactcttaagaaaccatcaatatataataactaatattagacacataattatataattatgcaaaactcacttgtttgagcgacccagattaatatgcaacattcttaaaaaaataaataaaaaataaaataaaactatcaacataattatataagaattaatattaaaaatatcaataatttgtatctaaagttaaatatgtatatatatatatattatagtttggttttattttaaaacatataaggaatgtacataaacgtttgtaaatcgcccaacccgaataattcgctcaaatcaaactgagataacccgacgaaaaatacaaactgaaaaaccaaacaaaaatataacctgctcaatctttatattgggctggttgaaaataataacaactcgtccaatcaacccgaactaacccgaacaactcaattaagagggtttttatatatttatgtatcatataatttatatgactatttaaaaaatataaagttcaaactaatatgttttttttatggtggttgatttaaactttgaattcaatctatatatatttgtctcattattacaattaactaaaatataacaattgaatgtgaaaattaaaaaataaaataaaaagaaaatattaatggtcggtttggacgggttaatctgaccaaaccactaatttcattgggcgggttagtactattttcttttttcttaattggatgggttatacatagatttttgtaactcgatctttacattgggttgaataaaatgtagcataaaccgattaacgtacacccttacatataaatatattttttataagaaaaaatattacaagtgtgtttttttataaaaaaaaaaaaatattaacaaataattttacattatgttttattattttttttttttatcttttaaagtatttcttttgtgatataaataatttcccaagcctctacattagctattttatctctgttgactgaggttttcggcaaccaataaaataataagagattaaagagctgtaagacattaagagaaggatttttatgtggttggggcgttaatgagcctt

SEQ ID NO: 40694 - DNA, 2004 bp, Cannabis sativa
atacagcccaaaacaagtcctgaaaactcaacacgcaggccggtgaggtcaatatgtacattactggagaagactgtcacctcgtggttggtctagcttttctttgtatttacctgcaccacatagcacctgtgagtcacaaggactcaacaagaaaagtaataataataatcatatagtttattagtcaaatgttgtcatttatacacaataagaatcaaaccatcacacattgttcataagatgaaatctaaatcactactgttatctgccatgaataaatatcaatatacaaatatttggtattacaaaaccattataccaataatagaattcatatttatttaatcatatcttacctaatatataaaatgtctatctaacctattttgttgtgtacttaacaaattattatatatttaacagaatattccaaaaaaaaagggttaattttaacagacacctattccatttataaagattattcacacaaccattcacaaacacccaacacccattcgcatctttcgcacaagtatcaggaaaacttttagtatatacatataaaggtgtcaaaaaactaataataagaattaaaaaaataattgcacaaggagaagaaagtagaaagcgaagaagattgaagaaaaatggtgaaaataaaatttgcagccatgaaaatagaaagaaattttaactgctacagagcttttctaatttttttttgaagaaggtgatttaagaatatatataatttatatgtctctgtataatgtatttctcttcttttgttttgttctttttacagagtaaataccaaagattttgcattaccaaaaacatttattttcactaatatacaatagcgttatataaaaaaaaatcatgtcgcctccttcgttttcttccacctggcgatcgcatacaccgattttcaagttacactcggcaattcctcgcctcgacacgccattcctctcttcttcttcttcttcttccccaatacctttgaaatttcaaccaatcgaatcaatcaatcaatcaatcaaaagaatcaaaatcgaatcgcttttgtttttttttttttatttcgattaaccgtttcgatttatgtatggttgattgatgcttttgagcatctttcagagcacgttaaacgacttgctttggctttggatgtactacacttggtttggttgctaaggattttatttttgcgttgagtggaggcaaccgttcatgtgttatacggtttttttctttattgattgaagaggttgttatatttatttagtttttcgttgattgagatttgaggattttggttgatctcgaggttttgatttgattttgcctaattggagcgggtgggtgtattcggtttttgtctgtattgaaagaatcagaagtagttgagatatggttagtggtaatttgtttcactgtagaaagaattcatggcctatatatatatatatttatatttggtgtttgtttattgaattctgtcgtgtttggttgccgaaaaagtctgtgaagtgaaaatagaagaattgtgaactttggtttggtgaaagttaaatggatacgattattgactcgcttaaacagagtcaatgcattaatccctgcacatggagtaacttccatgcttataataatcgaaggaaattaacttttcgtcttgcttgtttgtttgtgaggaaagtcaaacgaattttcttgactgcctgaactcaatttttacttggtttatggctgaatttttacttgatcattctagcaaagtggagattatttggttttctaaattgactaaaacctcattattaaattaaaataatttttaggaaacaactaataatttatatatataaataaatgtaaaacaacttgctatacataataatattatgatataaactaataatcgattgtgataatcatatggatgcccttaacctcaacattcttggcccatcggagaaggatgcagtgcggggt

SEQ ID NO: 40695 - DNA, 1328 bp, Cannabis sativa
  modified_base (613)..(622): a, c, t, g, unknown or other
attaaaatttatattttttgttaaaataacatgaaaattttgagaagttgttaattttgtttgaatagatattttaaggttttctaaccataaattttttttaatttaggatatttgattttatttattttttaaaattgataatatctcaaccataaaattttcctatttttaaattatttattttgttaaatttaatttattaaaattataatattaatataacattagaaatatctcaatttacaaattaagatattatgttacattatcttattagttatttaattaatttaattttttttaaaataaactagatagttgaaaattagttggatatttgaatttaagatattttaggatttgttagattttaatattttctaacaacctaattttaattcaggttaagatattaaaatatttattttaaaatagaaatatcttaacctactttctagataatgttacattgtgtgtttgtttgtttaaattgtttgttcattttttttaacaaacctattatttatttgatttaaattactatgattaacttgttcgcagatcctataatctaattttaatcatagtccaattgtcaatagatcaaatnnnnnnnnnntaacaggtaaattttataatttcttttatctgtgataaacctagtaacatgatagggcccatccaaataagttttcctgtgtgagcctatatgtttacttttcggcttatgcatataggaagtccatttatttctggatattaaatggactaggtgttgaaatttattttaccagggtctagatttactaacatgtatgtttgattaacaccctaaatatgaattctctaaaataatagaattaaacacatataaagtttagaaaaccttatattgatggcagtagaataatatgactcatttcactcagatctctaacccttgttcatttctgtcctagagttacaacaagatcttagcttggatctccttctctccttcggtttggttaaccactgtctttcgcactatgattgagtacttgactagctatgtgtgagcatggtactctatcactaaaggcttgaatatgatgaagaacgacaagaggggcaaaatcactatgaaaggagtctctcatctaatagctatgttccttttattatatgaatttaggatttaattatatgaattaaaaaagaataaaataatggaaaaaatacattatagtggccggccacttatgggcctcactagttacaattttgccactttatttcaactatttatccttctttcaataatatcatattttctaattttaatc

SEQ ID NO: 40696 - DNA, 1125 bp, Cannabis sativa
  modified_base (295)..(298): a, c, t, g, unknown or other
ttgtgctgatgatggtgagtttgaattttgggattggtggcttcatttttttgggatctgatttattatttttccttgtttcatatgattttttttattgtatattttttttttagatgtatttttatttcattttgtgggatttgaaatttatttagatttttgtttgattttgttgtgttttgatttgagaaaatatttcacagtggtggtggtggtttcggtgggtatgtagatgtgagttttttggtgttcatagattgaagaagaagaagaagatgatgatgatgaagannnngaagaagaagaagaagaatgaagaaggttattgggtagaagaagaaagaaaaaaaaaaaaggaaaaaaaaaaaaaaatacgtaaataattttttttttctgattttttaattttttcaaatttttttctcatttttaaatttttaaatattttaatttatttttttggtattaatattaggtggcctaataaaattttaccacgtgtacacttgtgtacacaatggcaggtctatttggcacttaacagtcaaaaactaacggaaggagtgttgacaaaacaattgtggagattaggaagtttagccataattttttcagtacgaaggttaaatcgtgtcaaacttcaaagtccagaaaatttgatcgcagattacccataagaatcacagtcaagcccacatagggaattttagctatgcactccttgaaagccaaggaaatgacttttttttttattatttatttatttaattgtaaggaaaataacagaacattgttatttctatttgacttttatactagctaggcatgtcaaaaagattcatttagttggagtgggctagagcttcgattcgacggatcacttatgatccgaaacattcagatacttattgaatctcggattagatccacatgacctcaaactggaccagacccatcgggcatccaaatctggacccagggccggaccaaaacctgaacccgaactcgggaccaaacccggagccaggaccgaacccagactcggactcgaacccaaacccaggacccgtacccggtcctaaacccggtcccgaacctgaacctaggactgaacccggaccc

SEQ ID NO: 40697 - DNA, 1899 bp, Cannabis sativa
caaggcctcaaagaactgcacaagtaaggtataattgaaaatttaaattcttgtgccttaccattttgtgaagcttgtgttttaggaaaataacataagctgaagttcacacgggcaaggcacacaactaaaaatatacttgaatatgtgcacactaacctttggggaccatacaaggtgcctactcactccggtaagtaatattttctttccatagttgatgattatagtcggtgtgtttggacctacttgttaactactaaggataagtgtctggaacagtttagaaattggaaaacttaggtagaaaactaaacaaatcttagaattaagaaccttaagacggataatggtttggagtttgttaactctgagtttgacaggttatgtcaagaaagtggaatcactagatatagaattgtagtgaagacccaagagcaaaatggtattgctgaaagaatgaattgaaccttattgaacaaaggtagatgtttactgtttagttctggattagaaaaaccattttgggggggaagcttgacctaccctataaataaaagcccgaatagagtgatagacctaaaaacaccttatgaaatgtggtacaacagaaccccaaacctaatgtacttaagaacatttgggtgtacaacatatgttcaccactctattgataagctagaacctagatccatgaagggaacttttctaggttattccataggaactaaggggtatagaatttatatttctaagaagggtagacccaatgttgtgattgccaaaaatgttatttttcatgagttggaatatcctcacttgacattcgggaaaggtagtgtgtctccgtgtgttacaggaaaaataggaaacaaagaaactgcaagtgtggaaatggagtatggaacgaagctcttggaagaaagtttacagacagaagttagtgtggaaccagaagacaatgcgcagacggaagctgttgtggagccaagagataacgaagaccaaatagaggtgtcggaagggttcggacaaaaaagtttggaaggttatcagtgggctcgtaatagaactcgaagagagattcatcctccaacaagatttgcaaaagcaaacgtaatagcatatgcactagcggcagttcaacagacggaaattgaagagcccagaagctatgaagaggaaattttaggtggaaacaagtctaaatggcttcaagccatggatgaggagatggattcacttcagaagaacaagacttgggtagttgtgccaaagccagagaacaagaagattgtggactgcaaatagattcttaaggtgaaagagggaatcaatgagaatgaacctgtgaggttcaaagttaggctaatggctaaaggctttacttaggtggaaggtatagactacactgaaatcttttcacctgtggcaaagtacaagacaataaggttgaagttgtccttggcagctcaaatggagttcaaagttgaacaacttgatgttaagactgcttttctaaatggattcttagaagaagagatctatatgaagcaaccacctgagtttcaggtggaagggaaaggagatgagctagtatgcaagcttaatagatctttatatggcttgaaacagtccccaatacaatggaatgagaaatttgatacgtatatgtatcaaattgggttcaaacgatccgcgtacaatcactgcttatatttcaagatagccaatcatcaatctatctttgtaagaactcggtttatcataaaaatagcaaacatatagatatacggctttacaggatcagagagaagatagaagaagggctgattgatttaaagaaggtcaggatagaagataatcttgctaatgttggaactaaggtcttaaatttaa

SEQ ID NO: 40698 - DNA, 1721 bp, Cannabis sativa
tcaattaaatatgccaaaaatagaattaacacaaagaaaatacattctaagaaagagagaaaatgaaagaagagtaatggaggaggatgtagtatgttgatggtttagtgttaattgcgtttaataggacaaatatataatatgaatgtaagttcattgttaaataaaatttgtaaatacatataaattgataaacatatttcaaaaaagtctttgtttattgaaaataaaaactaaaatatttaaaataaactataaaccaaaatactcaaagatattatttatttttaacttgtcatttcttttataaataacttaaaatgaaactaagtatacgtgcgttgcacaatttttttaattttgttacataatgtttgctttaaattttgcaaaacctatatcttgttcctctaaattttctataagtaaataataaatattattttgttattacttatatatacacaattatattttactaaccaaatataatagtacaaatataactttaatacaataaatcatttgcataatcatacctttagttatagaaatctaaataaaaatgaagaactaaactttaaataaaaataatatttacgtgcctcgacacataccttcaatcttgtataagtttaaaattggaaatcttgaaaatctttataacattggatatgtattggaaactatagaaattaaggacatactttcataaataaaataatgcaaacttgacattaattacattggatatggatatgtattggtggattttaaatttcaaatttggcattacattaaataataatatatatatgggaatttcaaaaattgtttaatatttaaacatccataggaaaagggagaaattaatatggtgaacttttctcgataatataatgagtaagattcttgtaaatattaaatatataatataatgcatatttgacattaattatattgcacatgaagtggtgggttttaaattttaaatttgatattacattaaataataatgtatatgggattttcgaaaattatttaatatttaaaaatgcatagaaaaagggagaaattattatggtgaattttttcgataatataacaaggagtaagattcttgtaaatagtattaatataatataatacatatatgatattaattagaatagatatgcgtggtgaattttgaatttcaaatttgacataatattaaataataaaatatatgaatgaaaattatttaatatttaaacatgcataggaaaatggaaagattaaagatttacttttctcaataattcagcaagaagtaagattcaaatacttgttgtgccctatggttttgccgaaattgtagtgtcataattaattttttttaatatttattattgttatttagtaacattcaatgttttgtttgtcattttcaaataggggccgaaattaatgcaaaatagtaatacattactgattatgaaattatataaaggatggaagaaatagtaccactgccacctccacttctagtatcgcagaagcttctattgatttatggttatttaaattttggtaaagagtaagatgatagagatggtgaacatggcatggagaagaactcttgatgatactcttggagtactactttactataaagatattgttgtattgtatttttatcaatttcttcttgttctcctgatatttataggaaatacaag

SEQ ID NO: 40699 - DNA, 1982 bp, Cannabis sativa
ttctagatttaatagaatttatacattaaatatataatcatgtgaaccatgcaacataaaatgatttttgatcttttattaattagtaaatatgattataaggaaatgaattttatttaggacataaaatctaaactttaccttgtccgaatattccagcttattcttctaatcaattatttacaaatgataaattactttggacgatacttgatatagcatactacttgtttaggtcatgatatattatttacatgtcacttagataaatgccatgtcaccatgtgcccattttagaatgacaaataattatctttaaattaatacacctaataaagatataaatatatgtcttattatagtaattcttaacaagaaaaaaaaggttcaattgtataattatacaaatggtaaacaacagcataagtactaaaaatttttgagtttgtaagcgacataactctaatgattttcttttatagcggtataagtatttattatttgtaaaactgtaatttttctctagtttcgtaaatacactctattttaactttatttaaaaagaatttgaaagtaactgatactacatattttcatctaaacttaagagcactcctaataaataagctaaaatagcccaatcttaaaattataacgaaaaaagtacaattttgagcttccactaagtgagctaaaacttagctattatacatatattttaactcaataaatagtacttagttaaatatagaaattactgagctaaaatatattttattattattatttaattatttttacatatgtgttgattattatatttgttttataaaataagtgaaatatatttaaaatattatatttaagaaaaaataaagaaattaatatatggtgtaatgtaaaagcagggtcggtcccaaaaatttatgtgcctaagacgaattaaatttttggatcctcactctcaaaaatatatataaaaaaaatattaaaatgtgtgttatgggatttaaactcatggcattatataatatattatagggtaaattgcgacacaagtacctaaagttttaagtttataagcggcataaactctatgtttatttttagtgggataagtacccaatgtttataaaactgtaattttcctccaattttgtcagtacagactccgttttgaatttattaaaggaacatttggaagtaactgatactacatgtttatgtctagacccaatgatcaacaatctggaccttatatgtggtatgtttaagaaaataatagagcttctatcgacgaaattagagaaaaattacagttttataaacattaggtacttatgccgctaaaaataaacattgtaattatgccacttataaatttagaattttgggtacttatgccactatttaccctatattatacaacccaactaactaccttatgaatattaattatttataatacatttaatttttcttaaataaaagcctaaagaaattttttattttttattttgggctcccgaaaagtgtgggccctaggaatagacctagcccgcctatgcctaggaccgcccctgtgtaaaagtgtccaataaaattaaaaaaaaaatgaaattttgataagttattttaaagaatagagtaggaaaaataataggagtgtaatgatttaaaatctcaacattatttaagacattaatagagtttctacttactaaattgaagaaatgttacaattttaaaaatattaggtccttaaaaaaaattattaaatttagactgcttacaaattcaaaactttaagtacttatgttgctatttactcttataagaaaaagaaatacaatattatctttttaaaaagttgtgtttaaaaataagtatgttgtataaatatattttaggctaattatgatttttgtcccttgaactttgacatataccaaatcatgtctcctgaatttttaaggtcgtta

SEQ ID NO: 40700 - DNA, 1360 bp, Cannabis sativa
  modified_base (403)..(405): a, c, t, g, unknown or other
attataaacaagggatgaaattcattaagaataataaaccatttaaacccaggattaaaggctgcccagtcagctagttgttcaaaaattgaaaaataatgcaagtttaaagactgcttgggcggtcaccttgcctcaaaagaaggcaattcaacagcgggagtcccaggctctttatacgggtcaactagatctaaaggagccggaggatcaactaggtctgaagatgccggaggatcatcagtctgggcaatgggagcctcaacattgtgctcggtcggagaggtggaagtggttgcctcaggattctcattggtcacccgagcagtgccgtagttgagaaacatgtctttggaagtgtcgaggtattcaaaatttgccttgggattggccttccaaaagnnntaaaaaatctcgagaccagctgtctctaaggcatccactttcttcccgagcttttccacctcgaatttcaagctcttaacctcagcctcacgtttctccttagtcttcttgtccttggccttatcctccaacctgcgaaggagagtctgaaaaccctccctctcgtcttaaacacttgcaatttcataagacaaagaagcattgtctgcctcaagttcctcagttgacggcatctcttatagctccctggtcagcttagcaactctattctcagcagaaagaagtttgttattgacctctccaagtttagtttgcacagtctcaagctggacccgcgcatctttgacgtgctttttggccaagtccacttcccttacattgtgttggaagtggcaaggttcttaaaaacagccgattcagctcaggaataggcatataccatcttcaaaccagtctatgcaaaagaaaaaagcattaaaattcgaactagccaaagagaaataaaaaaaaaagtgttggaaatgacttacttgtgaaagctccttcaaaactcctcccaggaccagctccaaagacaaatcattatcagccccagccaactattcgttcaccccgggagtgaccgggttacatagtggttaagcatgtctttgcctctcttggtctctgtgcacaataccaaaggtggggcagggaccctaacttgctcagattcgcccctgactagctcggatcaagtcttagcctactcaggtccatccgaactccctccccgagaacctttggacttggcgaccttcaaggtggaaggatccacagcatgttactcctcagagagaacaatgacttcttcaactggcgccttctccttcgacggtgtctcaccgcctttagacttcttggctggaggggacaaccccgagctccccctagacatttctgcacgaaaaaaaca

SEQ ID NO: 40701 - DNA, 1311 bp, Cannabis sativa
tctctgcgagtcgcgtcaagtgcaggtcgagccggtctatctgcgacaataaaaaagaacgagttagcttgaagtcacaagataacttgaaaaattgactaagtaaagaagcgcgacgtactaggccgccgattaaagtcagtcctaatccctggaaccttaaacacataaaaccatttggatttccaatctcccatattggaaaccatgccttccaccatgttgatctcagaagtggcctacttgctgaaacaatagaagccgttgtggagacctacattctttatgtcataaaaatagctaaactcttccatcgaaggtgccctgggcacatactccatatacatcgcgtaacagcctaaggctatgcgataactatttggggttaattggaaaggggacatatcatattgcttgagaacagcggagatgaatggatggaaggggactgacacttcacatcggagaatggggatagagactacaacgtcttttgagggtatgatcgcagggttggtaaaaggaaggtgtggtctttgagtaggacgaggacacatggtgctgagacgcaataaatttaatctcgaaaaagtgttcaggtcagatttggtgacccgcgagactaagtcttcgcatgagaacgactcatttaattgcgtgttgtcaaccgaatcagactcgctcccttcggcatctccatcctcgcctgatccacgatcaggaacctcttaatcttcacccatctcctcaactttgacgtcaggagcgtgcctggagtgaataaggtgatcacgggctgacaccatagactcgctgtctcgaatctcgatagttcctagtttagcgagctcctggaccatcctctcgatgtctgcagaggacaacagacccagctctgtgtctccaagtagggacctcctcttctgagattaaagtctagataaagctatcttcctgatcgccatcgaacgtgttgcctcccgagccaagcatttggctgttcgatagatcgctcatctgaaagataaaagatcttttcagcgtggtgaatgtgcgaaaaacaaaataagtcacctcacctgcatataaaaatttacaatctccttagaggaccgatttggattcttgcgaaaaccaatcagcccaccaaggcatgaaatcgtaggtgtgcgaatagaaggacatctcaaaaaacagcttggtgtatcctagtaacctaagcgacatgcgttttcgagcatgaccctgaagtgactgggaaacacccaccgtttcgaggaacctaaccaatcacaacctgcggatgtgtca

SEQ ID NO: 40702 - DNA, 1295 bp, Cannabis sativa
agtgataaatgaaatgtcatcccaacactcaagaggtgtaactaaaattgtattataattattatcattaaaaagatattgatgattattaaaaatcgtatgattattgcttttagaatatcataggttattttttattctttatgattttagaaattgtatttaatagatttttttttattaattattatggtgatatattaatactatttataattctctttattatttttctttccttcaattattaatatgtatacacacttttatatagaatatgtaaagacatatatatgttacggtttttataactgattgtcatatttattattataagatataattgaatattaattataattgtggttattgttaggataatatatagattaagagtataaattacgaaaaattaaaaaattgcaaagaaagaaagataggctgccacttaagagtttatatattgatttgtaaaataatttatattaatgcatactataggtatttaaaaaaaataaaaaaaaaatataaagcactaaaaaaaagtaaaaatagattaaaaaaatatacatagcatgcatatatatgattattttttttcccattaaatatgacaaaaaaagtatttagttttgtaaaaaatgtggtataaaattatattatttgttagagaagtgtcttttgaagaaaaaatactttcaatttataatgtaacattttttttcttcatatattgatatttataatagattagtagttatgtggttataagatattctattattaattattagtaataataatagattagatgtgttattaatgtagatgtattatatatagatttttagtttaaaaaaataattaaaaaaattaaaaaatgaaaaatttaaaaaaattaagaataggtgagaaaactcatatagagtgccacataaacttgttgatgctttcctttatactagatatagatagatggattgtatccaactaaaatatacatatgtgtgtgtatattacatagtgtatataattgtatatgatctacacaatcttttattgagtgaaaaacgtaatttacaactaaattttaacgaaaaataatataaaaatatgatgcttacctcttatacccaaagctaaatgaatgaatatattatcaaatattacataacaattgaatttttttaattttatagaagcatatatagaggtatgtataatagatatgagattagttattaagaaaatatgttataataataataatgataatagtgggagttataacaaat

SEQ ID NO: 40703 - DNA, 1628 bp, Cannabis sativa
atttgaagatgagatggggtttccgagtttggaacccaggggtcgtggccccactctttgggcgtcgtggcccaccccctgttagaggcctgggttgtcaacccaggtgctgcggcccatgaggggagtgtcgcgacccacccctttgtttttgggcagtttcgagcatgtttttgaatgtttataactttttgatccaaactccgttttgggagttccatatatcgttggaatgctcgtttcgagctctatgtaattatctaaaattgaatgccaattttataattatgtgaaaatagatttagggattaaccctattttgtgaatcccaaaaatcgtgactaggactaccgacactaggtcaggagcacccagggatttggaatctccatacttgtgggacatcaggtaagatagtattttgcacttagagttaagcatggcagcgctcgccttttatactatggttatgattaattaagaaccgtgattagggttattgccctaaaatgagtagttatgtggcctagggttattaccctagttattaaagattttgggtgttatacaatgcaaaatatgttggaataaagaattatgcgctcaatccataattagattagactcggtaaattagtaccctaagtttaatagaaatgtggtctagggttattaccctagaatttacacgaaggtaagaaagcaacgatgtgtagtaacattgctaattaagggaaagcaagttagggttattaccctcaataggtgttatttagaacatgctataatatgttatatgagtaattatttagtatgcaagttagggttattactctaggattttatatatttagtatatattgaatgtacgcatatatgtcaagagttatgtttataagacataattgggttagacctgacatttatcatcaggataaaccattgaaaaaacgtaatgtatgaattatatatatatgaatagggttatgcgtgcaagcaaggcataatcaagttacactcggtaaatataaccgagataaaccctactaaggccttattttaaatagacgtgtgagcgtaacacgtgggtctatgctacatagacataaatagacgtgtgagcgcaatacgtgggtatatgccacatagacatatataggcatgtgagtgtaacactcaggtgtatattaaatagacaaatagtgcggtgtcaccattaattatgtgttatatatttattgcgtatatggttatttatactgtctcgctgggcttggctcacgggtgctctactctacaggaaagggtaaatcagtctgtgatcagccatgagtgccagagcttcacgatgcttgtacatgttcgggccatactagactaagcgggttggggtctaccagtgatttattttgtaactctaattttgccgcttaggtcggctcgtaaaatgaacttgtaatattttgtgaaaatatttacgggatcccgaaacatgtattttatgattgtaaagtttaaagttgtaacaagtttaatttttatttagtttcgaataaagttgaaattttcccgcacttacctttcttgtaatcccagtttaggggattagggtttcataatctgttgtc

SEQ ID NO: 40704 - DNA, 2392 bp, Cannabis sativa
  modified_base (998)..(1000): a, c, t, g, unknown or other
atgaactcaatgaagaacaatggcggctaaagttcttcacatctgaggagcttatggctcgttcaaagaaaaatgctctcaatcggcagaaaatgatattcccttcaacacaagggtccgtactatgctgaggacccccttcatgaaaatgtaagttaatatatatactatttattttatgaagtttaatttcattgcaatttgcttacaaattttatttatcagcaaaacatgagtcgcattgagaattggaaagtttgtcacacaaagaagggcacagacgagtttgttaacgagcatgccaaagaaaaatatgtaattttatgtaaactaattacttttgaatatattcaaataattgtaagtttgtttggtttctaacttattcttaaaataggtacggatgaagacaatatatgacagtcaatctagtccttctaagcgtggacaagatgttgagattgagatacttcatgggactcttggagagaggcgtggcaatgagcgaggagtgggacgcaaatcgaaagggcaatcaggaagacggcgctcacaacctgctgtagccactgaacaacctaacttaagccaaaccatatttcatctgcaaagacatctttaggcgatgacacatgtattgacacctaaacaacatgcccatgtggagacagtgatgagtgacgctgctccaacgcaaccaacgcaaccaatacgtccacaactgtctacgcctagagatggatatggttcatcatctcagcaaatgggttttcagcatcaccagtcgcagcaagctccactttcatttaagtgattgttacaacagccgtttcagcagccttagcaactccctgaacaaatagctcatcaattttaacaattttagatgtttcagacattcatgcagatgatgtcacaatcgctgtcgccaaatagcccatcagtaatgatatagatgatgacgtagtcgcctcagacgtctcaagtctcacagtctnnnatgccacaagtgatgccgacgcaacaaatatcacagatgccgcagactttttagatgatgccgacaccacaagggcgacaatatggacaacatacatcacatatgccgacaccacatgggcaacagactgctcagatgatgacaagttcacagatacctccatactatccacaatgtcggatgctcctcaaccgcagattctgagaaatgctaatgatgatgatgatgacgatgcaacaacaaatttcttttagtatttttattttagttatatgaactattactttaatatttatttatggtttatgaatatttactttagcaactattatgtttattgaaggatattgttatatttgacatttgacatttgatataaaaaaaattagtttggtattatgtttcacttttaatttaattattttatatattgtttgattaaaaaaatatataataaaaattgattggtgaaaaaattaatatttaataaaaattatttttttatttataattttttttataaaataaataaatcaatggcgactttttcgtatcaatgacgaaaaagtcgtcattgatagacttacggatttaaaaaaaaaaaatagcttcttcttgccatgccaaaacgacaaagtcgttagtaattgtttttatcaccgacgactttgaatttcgtcaataataatacctattaccgacgaggtattacgaacgattttttactgacgatgtgtcgccattgatattaattactgacgaaatactcaccttcaattgacgaaatttatcctcattaaaaggcatttttcttgtagtcagtggtggtagcggaggaggtagttcttgttcgcaccatggattcaagatttgaagatggtgaagtgagattcacatgttaacatctgataccatattaataatgcagattggagtgaattctttcttttattcaatgtgtaaaaaatgaagcagaatgttcaataaagagtaaatgaacaaacggaaataacaaaggttgcaactaattattaactaataaataactcactaattgtataactaattctgatatatccaatttactcttatgaatatgttaaagctattgataaaaaattaataaaaatgacaaatatcacataaataagtcttacgtagtagcgagaatcttaaaaaacaattaacttgacttatttggtaataatacattcattacaaccaatgccatccggcctattagctcagctggttagagcgtcgtgctaataacgcgaaggtcgcaggttcgagacctgcatgggccagttttattgtttctatttttattattttgttttgagatatttttattattttttatatgcactaacttggttagaagataagctt

SEQ ID NO: 40705 - DNA, 1872 bp, Cannabis sativa
gaaaagtcgccaaaaaagttaccgtccctggaaaagtcattagaaaagtcacgaaaagtagatgtctcagatacaaataaaaatagaaccgattctaacataatgaataaaaataaataacacaaaataaatcaaaccagttataattgaaatataaccggttctgtaacataataaataaaaattaaaatataaaataactcaaacaagttataattaaatagagtcagttctattacaattttataatgaataaaaacaaataacacgaaataactcaaaccggttataactaaaatagaaccagttatataacataataaatacaaacaagttacatgtaataactcaaaccgaatacaattaaaaaaaaaataagaaatcagtttctaaaatactgaaacataaattaaaaacaaaactagttctacaacaaaatacctcataaaactaattataattttttttcttaaaaaaagtgggaatcaagttcaaaaaatattgaggcataaatataaaaagaactggttctataacaaaataaataaacacaaatagtaacacacaatcacttaaatataatataaagaaattggttacatttatcaactagttaaaaatttgagacaaaaaatctagttccgtaaagtaactaagataaaaactcgtacacaaaaccagttaaataaaataactcaaataaaaacactcattcaacatgctccaacccaccaaataattacactcataccatatctactccaaaaatatccaattgccaaactctcaccacattcagtactaagtcagcccaaaactcccaaaaacaatattaaaaattacaatatttttttgtttccttttctttttggaccaaaatagaaaatttacagagactaaacctaaaagaaagataaaaaacaaaaactggaaaagaaaaataataacattaaaaattaaaaagttgttgaatttgcactgtgtaacatatgcatattccttccagtaccaccaacttggtaccttgaccaagcgaatccgctgccggagtcaatcgcagcttcccaatcaccttcttcatctctccttctcatcatctgaaacattctcttagccttctctctagccctctcactccctctctcctcaatttccatcaacacctccacgcaagggcagagccagggggatgtttaagggggccaaaccatatcaaaatttatgtgataaatattcaaatacatttaaattgataattaagattaaaaatattgaatgtctctcttgcatataaaataaagcttaatatgatcacgctagttacaaaactagtggacgttattacttggtttgaaatgagaaagaaaaaaaaattaagatgatatctaattctttataagacagttgtgttgatcttttaactttttaatttttatcttttcattaataaattatgttgtaggttgtggttttgctaactacttatattatatacttattaaaatctaataataaatggaaagtaataaatggtttgcaaaatgaaaaataaaaattgagcactttaatattattagtattgttaaatgtattatattgaccattctaaatgagtacaatatgtatatataaatttatttttcttgttctctgacatttttttttactttttagttttagtttgattggaggggtcatgtcacaaacaagtaataaaaagactcacatatatataaaaaaaaatatcaaaaaaaatatataacatattttggatggggggccagggccactctaggcttttatgtgcctccgcccctgcctccacggctctcgctttcttagccaactctctgaacctcatactttcatggc

SEQ ID NO: 40706 - DNA, 2650 bp, Cannabis sativa
  modified_base (53)..(66): a, c, t, g, unknown or other
ttataatcaatagtaaagaactcgaataatagaattaattttacctttatgtnnnnnnnnnnnnnntttttaaggtcctgactcactctaggccacgtaatatctcgaagtggaatattagttcgcacccatgctccaattcgagtaagttttgtcatcgctccctttccccagtgttgtccgtagttgttgtactcaacctccaacttttttccctcgctaaccatttttgttatatcgtttcgtttgcttctcccgcgagtatttttctgtgttggttgtttaggatcaccactaccttcttccatggatggttgttcatgatcaacacttgatccttctagcacggatggaccatcatcaccatcataatccaaccacgcactccactcatcgtccccacctcgttccatgatataaaagcctacacaaatttaaaattatacaatagaatatacaagaataggcaaattaatagaaatgtaaatatatcaaaaagactaaatatcaatacgtgtttgatatatgaatcatgtgttgatagattcgttcaaccataatccttcaccatcattacgggatgatatgatatcgtccccaacagtaattatgtaaaaaccgaaaacaaaggtctccacgtggacgcctacaatttcaatttttttatagttaccgaagacaaaggtcttcacatttacaagcacttttaacttattaacaaaaaccaaaatataaccaaaattttattatgcgccaatccaaaggcgatgatacaggacttaaaataattttatcttgggatttttaatttatcaaagaaaaaaaaacgaaaaataaaagatatatttgttgtagtgtggattactatttcgattgactgttctttcagagaagggtatcttttttggtcttcttcactgatattttagtggtctaaaaacacctcccttggccaaataatgtttagctcttaaactataaataacttaaagcaaattcttatattatattttcctttgctttcaatgaaagtagggactaatggctataagctgatcaattacataaagactatcaggtggaactttcatatatttaaaatgtcttttgtttgatgttgttgttgtggaaatgaagtgagaagagaaggggctgctgttgcgtctacgaaagtgtagcttggtaagtttcaaatagagaaatgcttccagctgtgttagatgttgcttcaacttatgtattattgttcagcctaatcttcaaggaagaaccactaaacatcgtgatcattccaaacgcatttgatggagaaatgaaatctggattgtgtttgttgatgatgtagggagcgtgaattcttctatgttttggtttaagtgtttaattttgtgtgcaacttaatattagtgcttttgattgtaaattaagtttccttgtcttgattttttatgtgtgtcctcgtattagtgtgtgaaaccctttggagatggcatattgagatgatttttgatggcaagaaactcaatgttgttctgattagaaggtggaaatccacaatatgtaaactaatttggttagtatttttatctgttctggaaaacaaatcgacataattgtaaaaaaaaaaaaaaaacctccaaaaattcaaaatctaaacaatgagtacatgagtacatagacataaaatttaattcaaccacaaaagtaagcaatatatacctcaaagaataataaagtatgtctcatttcatatcaattagttgtcaatcataaattcttacccgattgttgagatgatttattggattgctcattgtacctattaaaagtgataaaaatataattaatcataagaaaaacttacaaaactgtcattttagaataatttaataccttaaaaatgataatagaatttttactagagaaaacaatcaaataagcaataagtactcttcaaattcatgaaaagtttgttgtcatatttgaaacatagttaggaaacaaattgggtggtgtattcggaaacttattaactaacaagctgcgaaaaataaacttgttctctcattcatcacatgctcctccaatctcaaatcacacaatgagaaaaaatggaagatcaatataaattcatcacaagctaaactaatgacaaaagaacagcaaactgatttcgaaggatcacttattcaaagaacttgtttgatatactaccaccacaagaaactcaactattgcaagcacattttttaacaagaatatgttttgtaaaaattgcgaaagaaatgattattacattcagcgctgaacaaagaaacaatactaataaaacataaaagtggagagagcatgtgataccttgaacaatttacgatattgttcagcctggttcctacttttgcgatccaaaagtcgaaaagcagtacaaataacactgcaatagcgaaaaataaaatagcagttggaaattggaaaaaaatgaaagggaaataataagttccctaagtaacatgtaattagtgtagagattacttttcattttagtgtttatatggtagactgaatcatcagtctttgaactttgaagctttttccttgtgtgtaaattgctgcagaccaaaagagaaaaaagagtatgagattgaatata

SEQ ID NO: 40707 - DNA, 1469 bp, Cannabis sativa
  modified_base (977)..(990): a, c, t, g, unknown or other
aagaagcttcaacttcaatctcatctaggtcaagtttagtaaccagttgatcacctactctgatcggttcagtaaaagagagtctagaagaggcagtaggtacctagattgatttaaatttaccccatagatccttggcattggactgaaagtttgatttctcttcttcctctgcccagctaacagttttcggggagccacaagatgttttctcatcttcacattcctctatttcaattgcaatctccaggttctcacaagaatcatggaattcttcattcacgttacaatcagtgacctcttcttggaataaagggagatcctcttcagctccaatacccactgtgatggcactagctggttttcagatgatcctcttcttcttcaccatgggagaagcaggggaacaaccacacacacctatcgtatcagttgttatgttaaactttaatttatagtaaaatattatatatttgggtatccataaaagtcattataccacatatagttttgcataaaaatatttcatgaagtacaattcaatataatactatacaatacaatacggtgtaatacgacataccaaacgaaccctaaaaaattcttttaagttattagaaaaaaaaagccttgagaattcaatgtccttttcttcacccacttcgcacgacttcgatgtcttttgcttcattcactacagtcttgggactagaaggggtggaaacttttcaagtcttatgtatcccaggccttgcttctagcctctgggtgagttttcttttttaacattttttattaggggtgttcatccaatctaatccgtattattttgctcatagtgcatccgatccgcactaagtgtagatttcatattttggatctaatacgatccacacaatagctgaaatccaattcaatccaatccacaaaagtgtggattggatcgattattttgcattggttactttttaatattnnnnnnnnnnnnnnttatgaaaaaaaatatttttttttcacataattagcaacaagataaaataaattattgttatttatgtctccaataataaattaaaataaataaaataataaattcaaaggaagaaaaaaattgtatgtataaaaaaatattcaattttatttttaattgtatgtaaaaaaaattatatataagaatggaatatacatttcatttattaagttttgaatataattgtattatatatattagacttttaaattcctattttctttacattaaaatattaattgtatatataattttttaatttttttataaatatttgtggattggattatatcagttacttttacatgttaatcaacatccaattcgcacgagtgtggattttgaatttttcaatccaatccaatctacacaagtgcaaatatctgcactttacggattggattggatcgtgcagattatattggatcaactattttat

SEQ ID NO: 40708 - DNA, 1520 bp, Cannabis sativa
  modified_base (1097)..(1106): a, c, t, g, unknown or other
ccacctcctcctcaagctgtccctgctcctactccatggaaaccgccgattgctggtggttttaaattaaatgttgatgccgctgttgacgccaacaacaatgtgctgggagttggtgctttaattcgtgattcaaatggtcttgttaaggcctccctttcattgccagctgttgggaatttttcttcccatgaaatggaggtcaaagctattttccatagccttaattggacattacaacacaatctctcagtttcacacattgagacggacgcactcatggtgttaatgcattgaaagctcccttcaattcaattttcgcttttcatgatctgattgttgatgtttcttgtcttttgtcctttttccctaatgtaactatatctcacgtcaagcgtagagctaatatggctgcccatggcttggctaagtttgctttaggggtggatgagacttgttattggttggagactatccctccacctatatactctgttattgtaaatgactctctttaatttataataacaagtattttccctcaaaaaaaaaaaatacattattttttattaatacttttttaaaattattttcttaaattatatagaatccgattctaaatttactatattttttatatcgattaaaaataaattatattttgtaccattttaaaaaaatatatatgacattcttagagcatctccaatcttttttaaagatattaaatatctccacatcattaaatatataatattttattttatttctcttttatattatgtttgatatttttatttctaaaatcactctaatatatagtacctttcaaaaatattataattatgatatatataaatattttttttattaagctattatatatattggatctttaattttttatttataaaaaacatagcatcaatgttattatgtggtatcaatataaattttaagaataatatattggctaattaggatttttttcgctcgaattttaaaatgtaccaaatcatgttctctgaacttttaacatagcatcaatgttaaaaattctccttgaactatcgagattgttagatttaaggactttnnnnnnnnnntagtaaaaaaaattctaacatagacgtaaaattgaatgaaattagacaaaaatccttaaatctaacaatctcaatagtttagggagaatttttaacgaccaaaaaagttcagggcatgatttggtacatgtcaacgttagagacaaaaaatcttaattagcctaatattttttatctccaatgatataatttttttatattttgccacgtaagagcatctccaatagtagcatcatttaaggatgctaaaaatttacacataatctaaaaatataatattttattttctctcttttccacatcatttttactccaatgtatagcacagtgttcattggatcacatccaatgattttaggcccatccagatccgatctaatcatatattggatgttagatcttaccatccgatcc

SEQ ID NO: 40709 - DNA, 1389 bp, Cannabis sativa
tatgatacagtggaatgggagtttatagaggagatgctcattggacttcagtttccttccctcttcattcaaactgtaatgaattgtgttagatcccccagattttccatcatgtttaatggttcgactcatgggttctttgaagcaaaaaggggattgagacagggagatcctatgtctcctttgttgtttgtgcttggcatggaatacttatctcgaaaattgcaggaagttggagacaaaaatgacttcatctttcatgaaaggtgttcagaattgaagatcaatcatttggcttttgcagatgatgttatgctcttttgcaatggagactttaaaagtattttctatatgcttcaggggctgaaattgttttcattaacatctggtcttcaaccgaatccccaaaaatcagcaatatactgcagcaatatgccacaagaggaggttagtagagttcttttagcttctggtttctcacagaaagaaatgccttttacttatttaggcgttcctatttgtgctaaaagaatttctggaaatgaatgcattgctttcgctgaaaaatgacagcacgaataagaacttggagctctaggaatctgtcctttgcagcccgagtagttttaattaattctgtgctcttggctattcatgcttattggtgccaagtgtttatcttgcgtaaaaaagtgatcagacatttggaatctatttgcaaagcttttcgttggaaaggtcaagcttgtgcaacaggtccgggtctaatcgcttgggagtctctttgccaacctaaagctactggaggtcttgggttcaggaaaatcagagaatggaatcaagcggccatggggaaatacatatgggcagtagcacaaaaacaggacagtctttggctaaaatggatcagcagtgtctatttaaaagatcaagagtggtggagttacaaggcccctgcccagggaagctagtattggaggagtcttgtgaacttgaaggatctttttaaggagttggctgggccagggacaggtactcagctgcagcattatcaggttaaaacaggatactctttgctctgtccagttcagaccaaattgtattggtctcagcaggtctggggtcgattaaataccccaaaacattgtttcatttcttggttggcaattcagggaaggcttagaacaaaggataggctaaggagaatggggatgaacattgaggaacaatgtgagttatgctcaacacagaatgaaaatgcaggccatttattttttgcttgcagtgtatctgctgcatgcctacaagagataaagaattggttgtcatggcatgttgcagctgataacatctcgactctaaccaggtggattgggagatcaaaaatga

SEQ ID NO: 40710 - DNA, 1475 bp, Cannabis sativa
agatcctggtaaaataacttccaacagaagtatttaataaagataaaataaaaagcaaagttagtaattatttaaaaacaagtaaaaggggaaattggggcataatttcctgcctaaaatatttaccataatcactagaatacgaggtagaaggactataatatccactaaaatctctacatctcgtgattctgaatatgtcataggggttaagtggttctaaatcccaactcacatctatatggcctgccctatctagcatggtcccatactgctcgactatcccgtagaacgagttagtacagctaatttggacatggaacctggggcaccaactatcaaacctatgtgttatgcgatctacgaggaggggattccaagtataagagttatagcgaccatctcgaaatgaaactagagtgttacgctcggccctaagcactgtgggtgactaaccacgttgattacctcgggatgctccttctttggcttcccgagggatagtgttctggaggtattgtgcctgagccacgcgatcctgagcttcctcgttggccgggacaggaacctgctactaagaagaatacttgggatatttataatcgcaagtaaactcattgtcagtaaggagacccacagacctcaagttgacctcgctcaagaggaactcagacgacctaagaccgtatgggagacctagcaggagcctacttcgctcggccattttggggtaggggcgggtctttttcgagacagctgttgaaaacaaaagcaaaattacagtcagcaaaaccagaataaaagagatggactaatttaaccaagtcttatgcaaataattacttacgtattatgcgaaaagtggttgtgccaattggggagagaccggtcgtccagaagaattcatctttaaagggagttttatttggcaaatccacaatgatcttacgatcacctgtgtgagtcccaagatagtaaaaaaccctactgcattcttcctcgctggaacaacgttgacagagtaaagatactctatttccaagggagtggggcactcccatttcaagattttgtacataaccttcaaacttgcgaggattctgtatgaaatggggcaagcccgagatggtttaggaagtccttgaaatagtctcacaggggggtaattgctccagccctgatgtgttcgaggcttcaagcgcctatcccagtcgagccacttgtactggtctcgccacttgtcccctcagatgcttcgcgagtaagtcgcactggttggtaacaactgaactcaccaacaaccaccgatctaacctggcagtctcgcttatattcaataccataagttctcagggtattgcctacatagtctccgatggctcgcacctttgactctattagctcagcctcgaaggtgacgttagggtcctggggagtctttgatttacgtagcttggaagacataatttcaaagt

SEQ ID NO: 40711 - DNA, 1665 bp, Cannabis sativa
tttctctaccattaaaggaggatcgtacgttaaatatacgaaaggatttaatatgaaatctatttatatacatagtaaaatattattttgtagtcaaaataatatatttgcttttataaactacttaagtaaattatattataaaatttatttttaatttatatttagcggtaaattgatgaaattttaccagttttgatataaaatttaaataattaataaatatatatacaattaaaaaattattaaaattatgatactggatattcataaatcagtaataaaatataatataaatgttaaaatatattaacgggaggggactagaatttcttttaagcattatatgggtctgccagtgtttatattttttttattaataatatatatgaataaatcatattttaactattttcgtaaaaaaattaaatattatatgaacttaaaaattaaaataaataaataaatatattaatatattattttatcaaagtactaaaattaaaaaaaaaaattatttgaatttaacacaaaaaataaattaaagtaagtaaaataataattaaaaaaaattaatataagagtggagacttaatgttgttaataaaataaaaatttggtgatcaatttattaaaaaaaaaattggggattaaacttgccaaaacgtatataatttgggaactaatttatcaaaataataaaatttaggaaataacttgccaaaatttatatagtataaggacatgcggcgaaaataagcttaattaataatgcaccacttttatttgtgggatccccttgattataatgaattaattaaaaaaaaaaagtgagaccaacctagtaatagcacaatcatatactcacaaaatgtgtagcgccctacttgcttaggcacgctacagtaatttttaattactgtgcacacctctactaatcaaaggatttttagcatgtcacacctcgactataaaataaaggtacaagtcgttctgagaccgaactctccagatctaaccatcttgatatgtacaatcatcctcaagccctagactcattagtgctcagctttcgccttccttttacctacacatgtaaacaataactttgagtcgacagactcagtaagaaaagcacaaaatatataacataataccgacttgtatctaggcactcatacacctacttacaaggcttcagatgcattaagaacgttcttaatggaagtaagacttatataccacgtgcactaagtactcgtcacgtagtagtgttggtaggaatgaaccgcatcttgagtaccactgagtgttgtaccacatgcactctgtactcgtcttatactaatatgggtaacactatgttatacccttttaacatcatatattgtaccaatgtactccataccgcaatcgtactagtgttagtagtatacaaatctcataatacaacatgcatataatacacacatatacgtatacacattttatactattcttacctcgtttttcaattcaaatgtactggtcgactttaatagaaatttacccgctaaatgaaggacctatgtcacaatcacgcaaaatgggtaaacaacttgctaaacctttttggaacctaaacttaaaactaaaagtttttctatcgataaataacatggaaat

SEQ ID NO: 40712 - DNA, 2275 bp, Cannabis sativa
ggttggcaatgctaatcctcctactgactggcagcagatgttccaagaaatgcgaggtatcatacttcgtcaagaagaagagttccgttgattaaagcaaccggcactggcttcccctgttgaacaagtgttaccaccgacacctgtgctagtggtgggtaatcaagggtttttaatgtcgcgtagagattctgtatttcagcggtttgtgaagctgcaacctctaacttttctaggaggtactaacataattaaggccgagcagtggatgagtaccattaaccgtatccttgataatatgggggtgacgggaacagagagagtaaattgtgcagccttcatgttgcaagatcatgctcgcgtctggtgggatattgtggatcaaactcgagacgttagtacaatgacttgggaagaatttaaaagtctgtttgaagagaagttttataatattgccttgaggacttcacatatggaagatgttgtgaagcttacttagagggaaatgtcagtggtcgaatacactctgcagtttgatcggctgtcttagttttctggtgatctggtgcccacagatttcaccaggaaaaagaaatatgtgagaggactgaacgccacgattagtcgggacttgaaaattaccacttcacatgacactttgaacaagaaagtggtagaactagccttaattgcagaggaggttgaggaacatgtagcaaaagagcaaattgcaaaggatgccatcacagcatcgaaccctcctactagtggtaatgtcagtaaggggaccaacagtggcaaccctgatcacaaacggaaggctgaggcttttcgagaattaggggtaatagaaagttttagggaaatagaggtggtcgtcacggccacgggtcttcattgtgatgctatctcgagtgtcttaaatgcaagaagcaccatcagggtgaatgtcaggccaaggtatgtttccagtgtggcatggtgggccactttatcagagattattcttaggccaagaaagaggaacctaagaagaatgctactcaaaacttggggcgactttttattatgactcagactgacgctgaagctagtccgtcagtggtgacaagtcggttgtttattaataattaatcttatactatgctgtttgattcgggagctactcactcttatgtgtcgagtagagttattgaaagtttccataaaccatgtgatatttatgcttcggggtttggtaccctgttactcttgggagaccttatagtatccactaggtggattcagtcattgtccttatggattgatgattgtgaattaatcaccaatctaatagaattgcaactgtctgaatttgacataatcctgggaatgtattttctatgtaaaaatggggcaacaattgactcaaagcggaagatggtggggtttgagcccgatagtgcgaaccgagcagtgtttgtgggtaaagtttaggggcacgcataccaagaataacattgttgaaagctaaggacttgatgagcagaagttgtctgcgattcatagtcactgcagtggatatcagtaaacttgtgacatctggacctgagaatacaagattggtgtgcgagttttttgacgtctttctagaagatttaccgggattggcacctaccgaggaaattgaatttgttattgagttggttctggaagcggacccagtatcaaaagcactatattgaatggctccagtagaattgaaagaattgaagatacagctgcaagaattactgaatttgggattcataagacggagctactcacctttgagtgctccggtattgtttgtgaagaagaaagatgggtctccccaaatgtgtattgattaccgggagttgaataagcttaccattaagaacaagtatcatttacctcgaattgatgatctgtttgatcaactaaaggggaagacggtcttctctaagatcgatctttgctcaggatatcatcatctgagattttgggagaaagatatcctgaaaattgcgttccgtactcggcatgaaaattatgaattccttgtgatgtcttttggactcaccaatgtcccggtggcattcatggatcttattaatcgagtgttcaaggattacccaaatagatgtgtgatcgtgtttatcgatgagctgcatctcaaatccgttttgcaacgattatgagatcataagctgtatgctaaattcaaaaagtgtgaattatggttatctcgtgtctctttcttggggcacatagt

SEQ ID NO: 40713 - DNA, 2879 bp, Cannabis sativa
cccagccgttttttgagatactcctctattcgcacacctgcgattttgtgccttggtgggctgattggtttttcgcgagaattcgaatcagccttctaagaggatttaaaagattttatgcgggtgaggtcacttatattgttttcgcacgttcatcacactgaaaatatcttctatctttcagatgagcgatttatcggacagtcagatgtttggctctggaggcgatgacggtgatcaggaccaggaggacagctttatcccaacctcgatttcagaagaggagaccccagttgctggaaatgcagagataggtccgttgtcctccgtagacatcgaaaggatggttcaggagcttgctaaaccaagaactatcgagattttagacagcgagtctacggtgtcagctcgcgaacaccttgttcattcccggcatgctcccgacactgaagtcgaggagatggacgagggctggaatgctctagatcgcgagtcggatgaggaagacgacgctgagggaagtgggaccgattcagtggataatacacaattggacaagcccttctcgtgcgaagacatggtctcgcgagtcaccaaatctgatctcaccacctttacgagattaaacttgttgccactcgcctccttgcgtcctcgtcctacccagagagcgcacctttcttttactaaccctgcgatcatacccatagaggatgtggttgtctcaatacccatacttcgttgcggagtatcaatccctttccatcaattcatctccgctattctccagcggtatgacgtgtccccttttcaattaaccccaaatagctatcgcatagctttaggtttttatgcgatgtatatggagtatgcgcatagggagccttctatattatctccagcggtatgacgtgggtctccacaatggcttctactatttcagcaagtgggctacttctgaaatcaacggggtggaaggcatggtttccaatattggggattggaaatctaaatggttttacgtgtttaaagtcccagggattaggactgactttaatcgtcgacctagtacgtcgaatatttctttacttagttaattttcatgttaccttgtgattttgagctaacccacttttccttattttcgcagatagagcagctcgacctgcactagacgcaacacgtagagagactgctgaaattctcagaagcctccctgttcaagatcgtgactggtgactactgtgcacgaccttaaagctacgggaacataagctaattccagagaacgcgagccttcaaagggagccagtgtacaagaagccgtctcagaagcaaaaagagtggatagacaaacgtctttccaagcagacttctcggccgacatcaggtaacatatcgcatgtatggactaatgcatttaaatttattgttattttaacttatcttttcttgtccttgcagaaatgactttcctgaagtcggcaccagttctcaaccgcaagccaaaaaccggaacaacgacgacatctcctatcgttccccagaagagaaaaagcgatgtcgtggttactcctgccgcagattcctccaagaagctagctaagcctacgcaggacaaggggaagaaagttgtgatcgatccagctgttcgagctcgcgatttcctagttttgcaggaaaaggttgtgggcgaggagttcatgtccaaggtagagagaactccttctgaggaactaatgcctcgctctatggagtttgcttcgcagtccatgaccatgctcttgaaggcctttactgctggctccaaggaagtcgaaatgttaaagaggcagaatgcccagctttaggagagcgtcaagaagctaaaacaggaagcggctaacaaggacaaagagcacgaggagtttcataagcaagtcaaacttgatgccaggaactctaaggcgaacatcgaggagatgtcccgcgacttagagtcgacaaggaaaatggaaagaagcagtatgaccaggcggtttctgactacatctacacaactcttcccaagattctagacttcgacttctcgatccttggggcggaggcggctaagatggatgaggattttcgagccatgtcacccacgccgactcaaggaggtggaggaaatcttttccccgaggatgctgatgctgctgacagtggagaagtcatggacgaagctgccagcaaagtcgtagatgaatccactcctccaactgcccctaatgctcccaatgcttagcgttctactttaatatcacttttgtcaaactttttttttaaagcggtataagggtactcgcaatttgtacttggaaaaatttttcttttctttcttttgtacgaacaacacatatcccttcggggatatttatttatgttattctatatgtttttcgcagtacatggggtacttattgtatttcaacattttaactgcatttgcttttccaattacagcttggtgtaaaaaatgctaaggcaacattttttgagagctctagaaattcataactcttattatgagaaattgatagtacacaatacgccaatcaatagtacatagtaggtcatataccccctatacttagagcatttatacaaataaattgactaagtatatacacagagcgagtacaaatgatacaatgcgagtactattgataataaaattttaagctttcgccattccaggctcttcgaattacagttccatcgagttctggaagtcggtatgttgcgttactaattttctctacgatgagatatggtccttcccaattgtctctgaaaaccccatgtgttgggtttttcgtgtttggcattacttttcgaagaaccaaatctcctactcg

SEQ ID NO: 40714 - DNA, 1090 bp, Cannabis sativa
ccataacaattacagtgataacactaataaatataagtagttgcgggacgagatagagtttctcattagacaaaaacatgttgctattcagtggtatgtatgatctaaagctctagttgggggcaatggacctctctagcatgtgctagttgttggcaggctagagattatgattggaggcccttgcctagctagaaattcaaggaaggccttaaaatcatatgcaagatccttgtgacatgaaccaagatctaaagtactgtaggttgcagaaattcctccaaagtctcaacgctacgtgtgggaccctatcacatttggagaattagactcctatatgtcagctaccctcacaatgatcacttggttgttgaggtgcaaatagcaaatatgatgttggcaagggtgatggtcgacaacagagcatcctcgaacatcatattctagcaagccttaatcataataggtttgaccttagaagacctggaaccatgcgaattatgtatggtttcatcggagcagacattgctccatgtggcaaaatcaaactgccacccactgtcggtactgcatcgtggccaggttcatagtggtggatgtgaagtcatcgtgcaatgtgatgcttagaaggccaaccctatatgaccttcgagccatctcgtcaatctaccaattttccctcaagttcccaatgggtgctggtattaattgtctccttgactgtaacaccctattttcttaggaaccacccaagccttagactcacatgtgctcagcctttgcattttctttacctacacatgtaaataatatctgtgagtcaacagactcagtgagaaaagcatataacatataaaatattatcgccttgtatttaggcacccatacacctatttacaaggcttaacagatgtacaacctctgtaccacatggactagatattcatcctgtaataatgtgggtaggggagaccattagaccaagtgaagtgatttccaatgcacgccaagtcaaacccacttgagacgctacaaaagtcttgcaagtctctgcaatctgtcagataaccaccatatttatcatcttgac

SEQ ID NO: 40715 - DNA, 1542 bp, Cannabis sativa
cctgtacttaggtcttccttgcaccattggaagaaataagaatgcggtattcgatttcgtgaaggacaaagtgtgtaagcgtatgcttagttgggaaggacggttcttatcaaaggcaggtaaagaacttcttcttaaaacagtggctcaagctattccgaatcatgcaatgtctgtttttctgttgcctatgaagacttgtaaagccattgaaagtgttatgagcaagtactggtggcaatcacaaaagcaaagccgtggggtgtcttggttgagctggaataagttatgcaatcataagaatagtgggggtcttggttttaaagatcttagacagtataatattgcattattgggaaagcaatcatggaggttgttggtgcatgaatctgcattagtaacaagggtattcaaagcaaggtatttccctaaaagttctttcttggctgcccctttgggaaacaacccaagctatgtgtggagaagcttgtttgaaacaaaaaatctaatgttggcaggggtaagaaagagtattgctagtggcttgcaaactcctattcttgatgtcccgtggctgcctcatgaagattgtccttttgttcaatcggatcaccctgcacttgcaaaccagttggtgtcttctttaatgtgtatcaatgataaacaatgggatatggacatcattaaggacctgtttaatgagagagatcaaagattaattttgagtattccattgcctttaactgtacacgaagactgctggtcttggagtaaagaaaaaactggtttttactctgttaaaagtgcatacagatggctaagaaaccagtcaattcctgctggtgtggattcgggtttatggaaaaatttctggaagctgaaggtgcaaccgaaggtccttcacttcgggtggagagctatgtctggtatacttgctactaaagttgaactcaactctaaacatgtctatgttaacaacttatgtagcttctgcaacacggccgaagagtctataatgcatgttttagtggaggttgtaactttgctaagtcttgcttgggttcgatcttctctcaacatcatttctttctctcagcattatttttattcttggttccaagatttaatgagtagtaactcaggtgaacaacttgaggaagctcttatggtcgcttgggccatttggaatgcaagaaacaatttgctatggaatcaaaaatctactacagcagctgaggtaattctttctgcaagaactcatctttaccaatggcagtgtgctcaacaatctaaattggagcctcctttgtctcatttcgagatagggaaggaggcagagcactggacgaaaccggaaaggaatatggtaaagattaatgtggatggggctatctttgaggcaatgcattcttttggctttggtttcattgctcgagactgtcatggagagatcattgaagctggttcttttaataagaatgggacatcttctcctgagcttgttgaattgattggcaacaaagaggctctcagttggatcaa

SEQ ID NO: 40716 - DNA, 1274 bp, Cannabis sativa
tatattaaaccatacacatgaaaaattcatgcaaacataaatcacttcaaacttcttagattgataactaattagattgtaatgggttttatttagggcacaaaacccaacattatacgtgtagcgtacaaacgtgaaaacaaaccaggtattttttctaatatgcacttttttcttaaaataatagatgtaatgcaaagataatcaaaattatttttatatgttgtctcaatatgatatccattacgacatatatctttgaaacttaatagattcctttttgatttggtggataataaggcatcatctataataatttttattcctctaaagatcaatataatggctcttccgcagccttcaattaaacttgtgaagcctgatattgtattaatatttgccttcattcttggtaaatttgaaaaatatttagcatttttaagtactatataagtggttgcgctatccaccaaacatatatcatcaccattatttgtagaatcatgtacaaaatgataaatgtctattacttcattaacaaacaacaaagaaaaatataataacttcaaatataaatacttgaacaataaaagttcattacataaatatcttaaataaaataaacaccttaaagtaaataaataataaaaataaaaaaaatataacaaaaagtgactaattgtgaacattctcatctccattattgatattcatgttgccattaataggatttttattaagaaaatgtacaacattcaagagcgtaatatccaagggctctttaaaaaaaacttcttaataggcaaaatttgcttctattttctcctttcctttcacaaatgcttgataaaggtcaacaaggtattttttcatatgataggtacgtgccaagtgttcttttattccacatctgaaacataagttttcagaaattttataattattattttgagtaccttttcctttgttcttagtagttgtgtttttcattagagaatacaaatttttattctggccattacgatgccaaacattgcttcaactacgaccgcgatcgtgaccacaattttgattatgatcacaaccacgtctattactttgattgtgatcacaaccacgactatgattatgattataaaaaattatagtattcacttcatggaatggggcaaacacagttgggcgagattcataatttttttatatcaaaagttcattattctatttagctactagaagacatgataagaattttaaatatttttaaaaaaatt

SEQ ID NO: 40717 - DNA, 2010 bp, Cannabis sativa
  modified_base (985)..(985): a, c, t, g, unknown or other
tctcaaaattactacacaatcgccaccttcaattcacctaggattccagacattactcataaattgtcccacctttgctaatgctagatcacttctcagtggtccattaactactcatgtcttatattccacttaggaatactaacaaatttaactcatattgtaatttttctaatctttctaccctgtcagatgaactaccactaaataacatacaaacagagtccatttacatattttgatgtccccattgagagtacaatgtttaatagcaatataaataaaaatagcaattgtaatatggtccataaattctaacatgagtcagtcaaaggaccgatatccgggaccccttgaatcataattagcacttgggcaggacctgtacacttttcttctttaacatcaatctttcttaactgtgggcaggttcttttcaaatgaccctctaccccacaataacaagattttgctctacattagccccaaatggcgcctttttgcatcttgaacactccagataaggtcgtcatttcttattctcaccttgactgctattctggtcacgttggaatctttttgttctatcccatgattggtggttcatttagtttcaccttctgatctgatcgtgaattggttccacgagtttcaccacatccagtggtacaataagaagtgtcagtggtacaagaatagacacaagacgagcttgttgttctctcaaatcttgggtctattttcccttgttgtctaatcttattctgtatagtagaatttatatgtttccagtattacggcaataaagcattctcttccttactgccccaagcccaaataacttgctaatcagactattcaattgcccttactgcataacttatcacacatttagtccacatcttctaactatttagaactcagacggatatcaatatcaatatgcatataccatacacatattcttatcataattatcactatnctactttttccaacatactttataatagtctaggtaatctaatagcaaataatataagcatttactatgccatgagtggacctgtcatcgcaacaaatgtacacatttgaccagtcttcaagacctttaaaactatggctgcttttgataccaagttgtaatgccttatcccatagggatgtcacgtgtgtgattttataagcgtgtttcggggagcattgttaaaagaagcacaaaagaactatatacgatgatgcctctgaaacataaaaccaaaatacatagtagatacacccaaaaaaactcttggcaacccggcacgttagccggcaaggtcaatatgtacattgctggagaagatgtcacctcatggctgatctagcttttctttgcctttacctacaccacatagaacctgtgagtcacaaggactcaaaaagaaaagtaataataataataatcatatagtttattattcaaatactatcatttaaacacaatcagaatcaacccataatgcattgttcataagatgaaatctaaatcactactggcatctgccacgaataaacatcagtatacaaatatttggtaatacaaaaccattataccaatattagaattcatattcatttaatcatataaattatatatattacctcataaactaaccatcttcattacatcacgttgtctaattaggcaagtcgatgccttaatttgataatcttgtattgcattgcctaattaggcaagccgataccatagtctagcacccatatatcgcataactgcatcacctaatcaggtgagctcgtgtcaaaaacctgcacccatatatcatataattgcatcacccaattaggtgagcccgtgccacaaccaggcactaatatatcgcattaccaaatcggacgaccccgtaccgatgctcggtacataattgcatcacctaatcaggtgatcttgtgccacaatctggcaccaatatatcgcatcgtcttattagatgagcccgtacctac

SEQ ID NO: 40718 - DNA, 1968 bp, Cannabis sativa
  modified_base (1382)..(1385): a, c, t, g, unknown or other
caccctgaactctgccacagccacagccacgaccacggggattctagggaatttgatttccctgccgccttcggtctcaaccatattaccctgactacttagatttcgccgggcgtccatttaataagacttagcctgcgaacccataagccaggcaggtccataagccaggcaggttaggcagccaggcaggttaggcagcgatcacaaaacttcagcgatcacaaaacttaataccactcttatagattttaaggcaacacacttaaaacaagtaatcataatctaatatgcctcctaacatgctttgaaattcaaacaaatactaaacaagtacgtgcttattgaaccgtgaaccaggctttctctaaagaatattgtacgtcttagcaagcttcggtagacaaacctggcgactgaccgagttggtaatttagattagtaaaggcaattaacactaatttctattatttttataattatttataaatgtaattaattatgggtcccattattagaaatgggcattagagttataatttctcaattctagagattttattaaactctaggtgtattatttgagttatatatgaattatgttatttttgtaatttttgttctgtgacaacggaaaatgcgatggatgactagtttgatcacataagtaagtctagaaccttatttcttattaggatgtatattggagaaaataaaataccggtattgtgcggggttatgatttttgaccattttacccttagggttggaatgggtgaaaagttaagcattaggggtattttagtaaatttccaaatgaagggataggtggctacctaggttcatgacacctagtaaatattatttcagctaagattaaatcatttaatcttttatcacttaaggaaaataaggaaaataggaggaaaagccaaaaaagtgaagaacactttttctttccttctctctctcttcaaacccagctagtaccagagtgaattgttgccggattcttcattttagcaaggaattcaaggagaaatcaagttgagtaacccctagatcatttgttgtagttttttcaagctttgatattggtttacatatgtgattttgagttttaaaggctgttagggttagaagtgcttaggcttcagtttttatgttcaatttaagtcaattgaaggttttggtagctggttttattgcttggtgttggatttatgcaagtttaaacttagaaacccaaactttgatctttaatggcataaattgattcagtgattttttctgtgaattactggttaaaatatattgtgtatatcctaataaggtactctgaaaggtttggttgcatttggtggagttttgagcaaaatatnnnntttttgggtgaactggtataaatcggctagccggttttaccagtacctgtaaaaccggttagccagtttttgcagggttccccaaatgttctattttctcaattctcatccattttagtgccatagttgggtgtttccctatttcctaagttagtgtaatccctagagagtataacagaacctagagttgtgggtttgggtttttcggattagggttttgatcatgtgatttactcggttttattatgtgattaggatatccatttcgcacaagactttccattcaggtcggccagcacacttgaatttggaaagaaggtaagaactgtatataatgtgtgatatgaatatctgaatgtatgtatatgtttagtgtatatgcatgcttatatgttgtgattcatacactaccaacactcgtacggttgtggtacagggtgcattggtaaagtatatgatatatgaaagtacaccgtggtgttaccagcacttgtacgagaaggtacaaggtgtctgtggtgcaacacttaacaatactcaaggtgcggtccataccctaactacactagtacgaaggtatact

SEQ ID NO: 40719 - DNA, 1276 bp, Cannabis sativa
tagggaaacttacaaaaatactgccttttttccaaatttttacaataattttgggacacgacaatactttcttttttattgtccaagcctatttttttttccttcatactgttctaggcccaatatgtttacttttatactgtgaacagtaacaaggcacaaaatggcgcctccttcctggttgggaacggaaaaatcaacaccggaatcgtagaaaaaccaggaggcaagagactatctaaggaaatccccaaaacacccaggttgaataatttggagatacaagggatgtcccaatggacaatcaaaccaatcctaataacacaaggaatgaagaacatggacgagatgttccacaaacttcccatggatttgctaaccaagggaatcattaaactgatgtgttagaagcatctcacaggaatgaagagatgaggcagcctcgactagggaatcagggaatcccacacactaatgagagaaaccctggaaattaaccaagaacaagtgggcttcctctgagacatcctcaacgtccttgtcgagtagatagagaagatgtatacacatacttaagtagaggacgtgtatctaatatattccagagatgaaggctggtatgagatgaagcaagtttaagctcgggacattcaaggtcttgagggcatagtcggtcgagtaggcaaacatgaaggaagtagatctcgacgttattatgcagaccaagaaagcatgagcaattcaagtatcaatccgagagttactcagagacaaaatctgtgagtaactatgagcgaaggcaacttgacctttgcgagcacctaaatcgaagacatcctgacctttgcgagcatttaaaccaaaatgcacatgatttgccccatcaacttaatcaaaatacaaatcagcaacaagtggaccccatccaactacgaataattaaactagaggataatttcagaaaacatcaagatggagaacatggtaaattgccaggctacgactcagatgaagaagtcgagccattccatctagatatcttaaatttagagtttcctcagggatttaagagcccacatgtctcgcagtacgatgggaccacaaaccatgtctctcatttaaacaactttaacattatcatgtgagccagcaatgtctcgaataatttgcgttgcattttattcccagcatccttaacaagagctacgagcagctagttcaataaatttacccataattccataacaacctgggaacaattgtccagggatttcaa

SEQ ID NO: 40720 - DNA, 1068 bp, Cannabis sativa
cgggtcagacccgattaaacttctaaggtaactagggaggggcgggtcggggcagactggccccgtttgccattcctaacagcgtcttcatctaatttaaaagagtggtgaaatgggttatggtcattgaaagtacctccgagagttaaaatattcctttggtgcatgttttattgtgttattccagtggctatacaactcattaaatgtaagatacatgttgattctttatgccagagatgtggagaagttgaggaaacctcaaagcacgccttggtcttctgtgattcttttattcctttgttgattcaattggggatttggcatttgttgctaaggttacagtcagggcctttgctgaacttttagtggcactttttgttgagttatcgcgggaagaattctctttgatggtgatggtgtggtggtggatttggttcaatagaaattcagtgctatttggtaaaaaaactgtcgcgattggagatcttagatgagttggctacaactgcgttggttgagttttgtggggctagttctagttttggttttattgggttctgttctggtgttagttctggtgtggagggaggttatgttgttgggggttttggtttggttggtgtagtagttggtgtagttggggaacctaccagtgcgaggtgtcatggtgctggtgaggttgggtttggctctggttttgctggtgcaggaggaagtggtgcggtgagcaggtttagggtgggttcgatgcagcgtgggtggcttcctccttcttgggggcctttctctctctcaacagatgccatgattacttcaagacgtggatttgcagggtttaatggtgtgattcggaatggtgcaggggttgtttgggcagcctaggcaatttggggggatcggtaattatagtgttgtggttgtagatcttttggctctctgtatgggccttcgttgggtgtccgggttggagtataaggtttcaaaagctgaaatagattctttatgtgcctgtaattgggtgaactccccaagttctaatattgctttcagacctgttattgatga

SEQ ID NO: 40721 - DNA, 2006 bp, Cannabis sativa
gtaaatggaggattctggcgtggttcatttacgcctttaacaaagtttagatatactcatgacaaggatcgtcttgtattagagcgcgaaaggttacatgcttttactaagactgttgcttatgacatgtctcgtttgattgatccacacatttccgttaattaagctttgtataacaattatttcaggttatacaatgagcgggaaggtttgaaattcgggcgaaatccatactggagctttccattgacttttcctataacaggttttaattgcgagtttgttaatttgtatgtattgtttataccgttcatcatttgaaaattattctcgagtgaactaatggtgtgtttatgtgtttcatcgtcgtgcaggggtgaactacaaagattcaccggttgttactttaatggatgttcttacatatccagaggtatcaaattttgttattctattcgattactcgtatgtatacttcttctcgtaacgtaccatctttctgttctgaatttattctcattaaccatccaaataaatctaattctaggatattctaaggttatcaacataattctaggacatttaaggataatatggtttcatacgtcgaacataggtaactgatcgaaggttttatcttcgactaaactaaaaatttgttaaggttatcaaattttcttatcaatgttagtcattttcttttgttcaagtgaaactccattggctctgtcaaatgcatttttgttgtatcaaattatcaatcttagctaatttatgcttgtttaatttcataaccggcaggttacagctaggttcttatgtgttgtacgggtcgtagcaatgtatccatggcaggctaaagatttctcctttaatggagtttacagagttcgcctgaccttagaagatgcaactgcccgaattcatgcttatttgtatggaaaagatggtgtaagttcttgtttctatttatttgattcaatatattatggttttgttgtgcttgtgtctaaaatcccaatagtcatacctattgttttgtcgggccaggccggggcaaagacccagatagcaacacggaaattttgggtcacggtcctgacctgcaaaaaacctattttgccactcctgactgaaccattaccgttgtcgcatttcttatttttgttggaaaaataaaacttagcaaaatgattttgatttttctaattactatcttcaattgattgtattgtattatttttaacttatgacagactaagctttttggcgatcaacccaccatcgatgtactgacaaggaagcgaaatgcattgctcggagtggcgacaaatgatgatggaaaggaagtggaagatggtagtgctagaaatccaccatggttgcaatgttgcctgaaatcttattatttggataaatctgataaatggggaagtcgacattatcgattatatggcactagattagtggttgattaggattaggattaggattaggattaggattagccttgtatgttggtttgaaagaaattatttagtataatattattttttagtgacaattggtttaaaatagtcatgtacaaaatcaaccattaggcatagttagtttggtttgaatttatattgtagaatcctatcaatgatttttgctacttcatagaagatatgttgagcatttgtaattttgtatggggtatcatgatacctaacattactttatgttacttattttattctaaaaggtgtttggtggcaaaattttgttatgttttaaatttaaagtgttagtttaatattattgttaaatattaattggataattattgtgtatacgtgatagtatattttcaaagtcaatattgcattaatttaattatatatgattagtatctcaaatttataaagaaaaacaaataaatgggagttttattccacataacttttgaagaaataagaattcaaagtcaactttgtgagacatatttaaaagaaaaataattt

SEQ ID NO: 40722 - DNA, 1389 bp, Cannabis sativa
atattaaaacaacagtaaaataacactacaaaacagtaatttgttgttgatttagtaattttttctcttttccagattttatggttttttcttagtatttctatgattccggtgttgatttgtccgtccccaaccacgaaggataggtgccgtttatgttttgttactatttacagtattaaagtaaatatattgggtctgggtagtataaaagaaataaaaatgggcttggacagtaaaaatgtaaagtttaccgtgtcccagtatttttgaaaacatttggtaaaaaaacagtatttttgtaagtttcccatttattatttatattgtcttcttgccacattaaaaaaattaataatttattttattttttttaagaattagaagcaaattacttaaaaattatggtatatttatattaattctgttatcttttttatttgaaagttatgtttatttttttttttttagttttttatgagttgttgtgggcttttttttttttgaaaatgaaatagaaacttcattgaaatttagcattcagagtacaaaaggtcctaaagatcaggtggtaaattctgaacatgaagactgcaaccagaaaaaaattgagagtgcctagccacatagtgggcaactcaattagctaattgtttaataaaattcaaggaaacatgtggaagatgagaaagtgaaagtttacaatcgttaacaaccaacccaaaaacggaggacatacgatgagaggtacaaattgcctaaacggtgagcatactgtcagtttcaatctccactttatcccaacctttagttttgatccaactaagggcttccttaacacctattgcttcgacaacttcagcagcgaatgagcctctgttacatactgcaatagcatccaataagaggcctgaggagtctcaggcaataatgccaaagtcgtaggagccttctccttcaaagagagcggcatcaacattaatcttgattgtattagatctgggtttagtccattgctcaaccttagagccattggttccaagagccaatgacaataagttttgtttatcttgagctttgcgccattgatcaagagtaactaatgctgataaagaaagttgttgaggagaaattctttttttattccaaaccagattgttgtgtgctttccaaattgcccaacataacataatgattcgacactttgtttccatatcagaaatatttcaaaacttatagagaaatggcccttgtagactatttattattttttgccacataacaaaaattaatgatttattttatttttttaagaattagaagcaaattacttaaaaattatggtatatctatattaattttgttaattttttttatttgaaagttatg

SEQ ID NO: 40723 - DNA, 2755 bp, Cannabis sativa
  modified_base (26)..(42): a, c, t, g, unknown or other
agggtgtttaaataacatacttgtgnnnnnnnnnnnnnnnnnggtaaaataaatttccaacaattgctagcagaatcccttgacaaaagggaaaaaagaatagaccaagctagcttaaagcaacatgattgcgcacaaggagttaccaggcccgtcagtataaacagattgaggaaagaaattcttcgtaggagaattactccctgaagaatattcccgtaacaagcatgttcggataaaactgaaatggtttgcaccatgttacgagataatagtaaaggttcatacaagtctggtgagtacgacaagaacttgaagttagaacttttacccaaacattgaaatagggaacatctcggtaagtactctcactagctaacttatcaattaagttcttttaatatttcatttgcaggaacccataaaaaggctagtgcccacaaccttcttggtgtggtctcccatcgttcttcaacagtggcctctccttcgctaagccaagcaggggtagccattgtgtgatttgaaaagtagacactaagttgtaagcttttgttacacgttagaccgactgtgtctaaaccacttactctcaagattaacttcttagagttactctttcagtgccacatgcgtactattgataacaccccaaggaagaacccaagcaaagtctgtgaaacttggtgaatagcaagtgaccaagagacttgcctgcatggtcacatgaggggtgcccataccgtacaacgcatcaaactgtcacaaagaacttatgtagcgaaattttcaggattaaaataagctactaaaccagcctctaaatcgtgtaggaatactttggcttgacaaagtaaatctagacccttacctatcaaggcaataagaagatagccaggacgattagatgtccgtcatagatggctttaaggctaaataatagtagtgttcataaacagagaacctataggccaaagcaagaacatgaaagccttaaggtcagatatgagatttgtttgaatgcatgaggccaaggccctgctagaactgtatagctagaaaaaaacttggacagagctcctataagggccacataccaggctaaagctagcgtagagttccttataggatccaagccatgttgagtcttaagttgaacatttcactataaaagactcaccactaagcttcaatatagaagagtagttgtttctaataagaaggaaaccacatatgaggctaaggttgtatatacctacagagccaaattcttgctgaagtcacaagaggacagaaaactagctacacacttggaaccaaagtccatgccagccaaggttcacaagccttgaaagggttagccagggtcccatgactctggctagggtcaccaaacgaaggcatgaatgggaaagctttatagggtaaaaccttaaagctggccaactcccatgataaagctttagggctggctaggtctcaagcaagccctcctaggtcggcgaaggtaagttttgaatcctaatgtgtatttttctttcaaaactatatgtgcctcgtattctttatgagtcaaagagtaaagaatcatagggaaggcaaaatttgaatcttttctatcaaaaagtcacacattacacatttcaaaactatcatgaggatcaatataacaaagggattacaaactaacatgagtcaaaaagtttccaaaagcttaaaaagcttgaaacatgttaatggtaagtacaaagaagagatacccaagaagggaagatgagacgtatatagaaagaaaagattaaatatccaaaagcaggccatgtaaaaagccaacacttggctagaaaaggctacacaacagagactactacaaataagacaagagctagaaagtccctatctgacctgatgtctgcatagggacttagggggcaaatgttattacaatttttgtccttatgagatggcatgcttacgtagatagaaccagtgccacgtggcagtataacttgctagaaggaaggccaagtcaacacttgagcaaacgaagacttcaacactcaaatggggattaagcaacagaccaactccctctcaggagctggccagccacccctagccggctagccttgggagagcaccctggctggcaaccctagccggccaccctagcaatcacaggggcctagccggcaaaggagtgcactgtaaggctttgctggacaactctacacgtggacaacaaatatgggctgggaattgggccttaaaagcccaacaaaatggctgaataatattcagatcggagggcacattagtatttagtaattatctaacaacctatgaaatatctaaatttaaacttataatctagggtttaggcctcctaagtttgtagtagtctagaaacctaagttgcctctaagtcacttagcctcaaaatagctctaagtctgaaacccatattctctcttctctcaatctctctttggtacacgcctaatagggctctctttctctcttctcacttcatctgtcacacacctacctaaggttgtctaacaccctaggatgtccaccaccctaggttgtccaacaccctaggctgtccaacacttaagatctacctactgattcatactttgtaatcaatcctaaggttgctatagcagatcccacctatagtgatctagatagtatttcccttagtataaatacaatctaaaggggagtaagtcattacctgctatcacaa

SEQ ID NO: 40724 - DNA, 2006 bp, Cannabis sativa
aaacatatttacaaacataatattcaaaaaaacatattgaatgtttacaaaaacataatattcaagtcattaaattattaaatgtaataaaataaactattaatacttactaactaaataggtcattaatgacatgtatcattaatacttactaattaaatatttaaaataagcaaaatcacatgaaattattacactaacttaatagtttatttataataatataaatatattgtttaaattatataatttatgttagtaattggtagtatgtttcttatagcaatattttaaaaattataaatattataatatatttattaaaaaaataaataattctacagaataagtatactaaatataaatacttaagtgagatagagctctgatcgatagggttctttaactccgactaacggaagccatggcagattgaggacgacccaggaagggagctattttgggagggagtaacaaggacagattgaattcaacaataagaaggagcgggagtgcattggaaataggggtaaaaaacgtgaacctacctttttagatctggttatcaagatcaaatcattggtaaaggtattggaggtttgggagctggatgtttcagaattagaggaagagtaagcagatcatgagcaagagctacctagaaccattgaagaagttgttgaagtcttgtctttgagggcatctatggcctacttgtagaaggaatagaaagagcgagagattagaatcttctctatttgcacaatggaaggggagagggtggaagatcaaaagctggtcaatgaagctttcttaaattactataacaattaattggggactgcaatgtttgacagacaaccaattaatcagagaattgtgaatcaggggtcgttccttttaagccaaagacagtgttttctattataggattttacactagctgaagttaaagaggtagtttttagcatccctggttgtaaatcactggggcctgatggtttttgtagatactttttttttaagattattgagatttggttgaagaagatgttactagggcagtgctttcttttctttatttgggtaaattgttgaaagaattgaattccacgaccttaactcttattcctaaaatgaagtatccaaaacatgtcaacaattttcaaccaatagcttgtgtaatttcacaaataaggtggcaacaaaaataatctgtatgagattaagagaggtgctaccagagaatattgttgctcaaaattagagtggattcattcaaggaatatttatagcctataatataatgatttgccaagatttagttaaacattatggtaggaaaaatgcaagactaaattgtacgattgagttggatctgaggaaggcatatgattctctagaatgggacttcgaggaagaaatactggctgccttgaattttccttcaaaattcgttcaactaatcatggtatgcgtttgaactcctaaatttatcttgctttttaatgaaactacattctttgaagctaagaggggacttagccaaggagaccctatgtcccccttaatttttgttttatgcatggaatatctatctcaaattctagctaaggtgaggaggaaaatatattttaagttccatgataaatattcaaaaatgaaacttaatcatttatgttttgcggatgatgtattactattttgtcatggagaccttaaatctatttactatcttttgcaaggtcttaaactattttcaaattcatctggtttattttcaaatgatttgaaattggctttgtattgttgtggaatgaaagaacaggaggtgtaacgaattgtgggtgcttccgggtttgtaagaagtgatcttccttttagatacttgggaatcctgatttgtgcaagaagattatcggcagtagaatgtaaaacagttgcgaaaaattgttggaattatattttaccaggatcttagatgtactcacaagtatgttgtttaa

SEQ ID NO: 40725 - DNA, 2488 bp, Cannabis sativa
attagtctgatgcttttcaaatagtcgttaatctaattaatcatttaccaaaacctattcttaaaggaaagtcactttttgaagtgttgtaagttataactatatgaatatatttataatatgttgtataatatatttcaaaggaagaaatgtggctaacatggctttttcagttttggacttggtaatatattgaaagtgtgttgtattccaatttattagcatctagatccattttcttttcaaaaattaagagcaatgtttattgtgaacgttagtgctctgtgtataaatatagtacttaaggaaacatagcaatatatacaacatatatcacacacaacatatacaaaatatatatattacatattatttatacatataattgttcttggttgggttattatatttttgttatttttgttttcctggttctctcattgtaatcagaagacctgttgaatcctgggagattacttagtaaatccttaaggacagtgtcttgtttgcacgcatcagatgttatcattttattattgctattgatacttttctaacaatcttaaggatttatggatcccaatgctactactgctactgctgttgataataccttaggttctcttcccattggtggtactctctctgtcaccacaaccattaatggagataatcttctagtattggagcaatcaatcattctgttctttcttcatctactgctgctgttccattcaccaagccattccctgacttctctaaatagaaaggtttgatggtcagtttgtcaaaagatggcaagaaagagtcttatcactccgtggtataaatgttgttgcttgggcgctttctgaaaagaaaacaaaacaccaacgctgatgcttggactcatgccaataaggtatgtcgacacaattttgagtactctttctaatgatttgtttgatgtatactgctcttacaaggaagcgaaggagatatgaaactctatgattgtaaagtacactgttgaagatgctggaaaataaaagttcgtggttggcgatcttgatcgttggaggatggaggataacaaagacatcaaggttcagattaatgagtatcacaaactaaataaagatcttaaggcagagagcatcatcctaccagaaatttttttgactaaaccattagttgaaaggcttcctgaatcgtggaaagaataagagtcacctaaagcataagcataagcagatgtcccttgcagatctgattactcacatcattattgaagatactaactacaaggaactccaagctaccaaagcgagagaaatggcagcaaaggcgaattcggtataaactcaaaataaaaataaaaggtatgccaacaaatcatgtcaccactacctaaagctaatgtcaccactacctttaagaaaaagggagttgttttgtctgtggaaagtcaggtcatcatgcaccttagtgtagaaaaagagtgagaaatgataattttcctaaaccaaatgcaaatttggtagaaggagatgatattattgttgcagtcttttctgaagcttatcttgtagccaatgtgaaagaatgggtggtagactctggtaataccagacatatttgtgctaacaaagatgtattttcctctaggggatggaaaagaacatgtgtatcttggtggttctcgaactgctcaagttcttggtaaaggaaaagttattcttaaactcacatttggcaagactttggctctaaatgatgtacttaaacaaaagtctgattccttagctgcttttatacagtttaaaaaccttgttgaaattcaatttgagaggaaaattaaacagttaagaactgattgggtggtgagtttcaattattcactcaattagtcaatgaacatagcaaaaccttgttgaaaattaattcgagaggaaaattaagcagttaagaactgattggggtagtgagttccaatcattcactcaattagtcaatgaacatggcatcttcttttaccactcttgtcctcatacctctgaacaaaatggtagggcagagcgtaactcaggcatatagtggagactggactcactctccttgctgaagccactatgccattaaaatattggtctgatgcttttcaaatagccgtttatctaattaatcatttaccaaaacctatttttaaaggaaagtcaacttttgaagtgttgtaagttataactatatgaatatatgtataatatatgtcaaaagaagaaacgtggctaatgtggctttttcagttttggacttggtaatatatttgaagtgtgctgtattcctatttattagcatctatatccactttcttctcaaaaattaagagcaacgttcattttgaacattagtactctgtgtatatagtacttaagggaacatagcaatatatacaacatatatcacacacaacaaatacaacatatatatatattacatattatttata

SEQ ID NO: 40726 - DNA, 1580 bp, Cannabis sativa
agccgccgcaccaccctcctcggccccactccgaagccacttagcaccaacgaggtagtttttcttcttcagatccgcccgtagcgccgcaccatacggtttgaccaattgatccataggttgatcaaagcgtttaggacaaaatctatccgcatgcccaataattccacaaacaaagcaaaaggtaggaagatgttcatatttgaaattcgcccaaatccaatccccattctccttgcaaagcttcatcctcctctttaatggcttttcgatatccaccgtagtacgaacacgcaagtattctctccaccattaaaattcttaggtccgatttaacatacgtacctatgtaagctcccgcactccgaaccaccttttccaacatgtatccagatttcaagtcatgaatctgaacccagaaatcaagcttgtgaagcgccacttccttagggtcttctcccttattcagacgatgaaaaacaagagggcttcgattgaacgtccaagggctaccatctataacggtttggacatccaactcatggaaaaactgaaaaagataacgattcgtacccaactccttgataaaaacacccttggctgccaaagtgaagccattaagtggcgcattgcatcaaagtccaccggtcgacccgtcagaaacttccccaccaaacaccaccgatcgtcaaaagtcgtctcatcaccctcatcatctcccccaatcagaacacccgcttcctcatcctccaaactaatctgagcgtactgctcattcaaatcgaaatccacgtgactgctcgatgccatgatgaccaaaagacaagatcttgaagacaaccttaaaaaactttagagaactttaccaacatgtcaatagacaagactttaccaacgtgactgctctttctttctttattaacgtggtttttatttgttatagaaaaaattagaaaaagaaattaaggattttaatataactgtaattatatttgttagcttaagttaattaaataagttcaacggtaattattcgcttaatttatagtcacatcaattcaataaattgtgtaaaaaattgagtaaaatacaaggacaaatttataattattttcgagaaccatttttttttataaaaagaaactaattggttgttacgttttttattaaggttatttaagatatttgttcacgaattatgatttatgtattattgtgagtttgaattttttaacttttgaaaaaagtccccgaactattcacgtaaattaattattctatcaagtttatcacaggcaagaatgatggcatagctgtttagacaagctttgggtagaaggttttaatgaaaagaagtgttattgccaactttttattacaattttttagtaaacttttatactttaaaatattttttttgttggtgtttttataattataatattatctttataattttttaaaaaattttaaataacttacaacgtcgaaaatatatttgaaatattttaaacactaaattagaatattaaaaattttattttcagtactatatattttttagaattttaaaaaattta

SEQ ID NO: 40727 - DNA, 1553 bp, Cannabis sativa
aaggtgtaggaaaagactactgtggacgccaaggctttcgaatcgcttgtcaaaacaacaaaccgattttccaaaccgattgaggtccttaaatcataaagcacatcttctacaaaaacaattccctaaagatagccgatttggatgtagttgacattataaactcgttcttaccaagtttggagaaatctttggttccttgtgcctcgaattctactcattcaactctagttgctttggtgccaaacaacgacaatttggggaatactattaatggttcgaagcaatattgtgagaaataaattgctgtgccaattaacctgagtggaaataattataataatcaaagtattaaaagggtgaattatattagacttttgaaggatggatttactttgttgtggtacgagacaaattctcatttatgtgaagagtgtgagagtagcggcgggcgatgtgggactcagaatggtggccttgtttgtttctgtcctaatggaactcaatcctcaacatgtgttgttcaacctaaaggaatagaagctcaaggtactaacaaaactactagtaagtttcataatttcattttaaaatttgtgttttcttttttctagcatttgctattagcactcaaggttccaagtagaagtagtgagtatatttaatatgtgtgatttgttattaaatttaatataggatatatttttttatttatttattagtaataaaggaaattatattctatatgattttttaagatttatttacaaaaatatgacatttttaggtttgggcattttttatggcatattttagtttttaaagtattttatggtattttttatgtcatatatgtgtaaatttaatttttaaagtccatatttgatgttttgatagattatttcaaagaaaaaaaaatcttaaaactatttcttctcctccattcaagtatcctacatgtctcatccgtcaacaatccacttatcaacctccgttcaccagagacacatctggcgaccggcgacccacacattcggtgatcgatggctcaaacgtacccttaatatgagatttccaccaccaaaacgtaccctgaaacgtacacatttgtaggtacctggttaaataaattatcacgtggtaattcctgattggtccaagtcattaaatttttattattcaaaaaaaaaaaaaagttcaaatataccaataaaaaaatgactcgggaatataatgactttacatttaatggttaggtacctacaaagttctagaaatataacttaagtattattactaagggtgttcgcggtgcgggtggtgcggtttttttttcattttttcaaatcaatctgcacatacggtttttctaatttcccaaactatacccgtaccgtgaaactaaaaactcacagaaaccgcactgcaaaaaatagtgcgatgtggtgcagtttctgcggtttctacggtttggactatcactaaataattaaactatcacaaatacaacaaaccttgagcaaaacttgtcaaaataccataaagcttgaaaa

SEQ ID NO: 40728 - DNA, 1913 bp, Cannabis sativa
gagaggtaagatattgggatctagggggcttaggcaaggtgatcccctctcgccgtttctatttactctggtggcggatgtacttggaagaatgatggacaaagcaactgagtttgggaatctatctggcttcctgattggaaaggagaagatccaagttagccacctacaatttgcagatgacacagtactctttgtaaatgatgacacgtcactgaataacatggctttggtgatcaccgctttctgtgcgatatcaggtttgagagtttaatatgagtaagagccaactcttaagtatctgcatggatgagaatgtgatttcgagatgcgctgcttctattagctgtgagataggaaagtggccaatgaaataccttggaatgccgttagggggatcctcgaatagaattgaattttggagaccaatcatggagaaatgtgctaagaggatggatggatggaaatgttctttcttgtctaggggggggggagagattgacattaattcaatcggttccttctttgcttccattatactacctatctatatctaaagcaccaaaggcggtactccaaacacttgagaagatgatgagagactttttatgggaaggtggatatatctcaggaggggaacatttggttgcttgggaggaagtgtgtagaccaagagaggaagggggcctgggaattggacgcctagacatgcgaaataagagtctgttgatgaaatggctatggagattccttctggaaacagacacgttttggcatagagttataaaaagtcgatacggaatgtcagacaacttctgggaatatttggtgaatatttgagtttggtttcatttcaattagggaatggggagaaaattcgattttgggaagatgtgtggattggacagaattctctgttgacctcctacccgaatttagtcattttggctagatctaagaataagtgcatcaaagacatggcaataattgaggaaggtggtttcagggtgtctaattgggactttaatttcagaaggaatctgttagacagggaagtcccaagtttaatggagctggtgcagcgattggaacatgtgaacatagcccattcctcgattgatagtaggggctggaaaccagagtacggaggctctttctcctgcaaatctgcctttctttggtttacctctagtcacggatcaacggacttcaaatggaccaaaactctatggaaatgtagcgctccggtaaaagtaaaagtttttggatggttagtggctctaaggaaagtaaatgtgcacgaggtaattcaaaagagaaggccttacatggacttatctccgggatggtgtatttgttgcaagtccagtaatgaaacgaccgagcatctgttcctccattgcaaatacactcaaaaaacttggtcattactttataaagaacttagtctggactgggttatgccttgtttggtgacacagaccctaatcagtaaaccggtgggaagtaaaagaaaagttaagctttggagaactacaacgttagcactgttatgggcggtgtggaatgagagaaataacagaattttcgaaaggcaagagagatcagcaaaatttgtctgggagaggataaaattttggacagccacatggatttttaaaaccaaacattttgaggctttttcttttcttgacttaagccgggatcggagtgttttgttgtaaaacccgggttttctctcttttgttttcattgtgataatttattgtattcttacaattatgtaccatggttttcctccaccacaagtgaggctttaatattatagggggagaccagccatatggcctccttctcttttttcaaaaataataaccacccaaaagcaatcaagttggaacctgaagtagagt

SEQ ID NO: 40729 - DNA, 2875 bp, Cannabis sativa
  modified_base (519)..(527): a, c, t, g, unknown or other
  modified_base (1617)..(1633): a, c, t, g, unknown or other
  modified_base (2322)..(2328): a, c, t, g, unknown or other
atgggctccagaatatctaccaattcgcagtctagaagtactacccgttccaggagggctcaacctgagggtagccccagtgctcggaccacacatccccgaagaacttaaaccaacgttggtcctagtacgtgaacaacccgctcgaggagaactcaccgtgggaatggtcagaatcccaggacgagggatgaagagctcaactgtggaggtgcccaatctgtgggagaaagaacttatgaaatggaaagttgctgcctgagacatcgtctggaagagggccaacatcgaaacactgagttagaacgtgaggcagcctcagccagggtggcgcaggggacaaacgctcaaaatcaacctgaatttagagtgagaagaccatgaggccaacctcgtggctcacaaaccagaagacagggaaaggcccaggaagaacaacccggggaaaatgagaaaccccctaagaatcaggatgaacagcgagaaaggagacaatcagaaactgatgaacgagaaatnnnnnnnnnaaatgaggaggatcttggaacttaaccgggataacggagatcacttgccaggaatcaccaacgttcttcccaaacctatagagcgaggactcgtacgtaccctaatgggggaaatacgacaaaccgctctcaggaggaaagaacaaagcgtgaagaagcaagtgtgacttcgaggtgatctagaacccatagccgatcaactcaaagaggagaaagtactcagcgagctaatgatcgggaaagtatgggaaccagtaaatccacgagccacttaaagacaaagtctatgagtaggacgcagtctatgagtaagacgagatctgccatcaattactcctaactagatctgcaagagcacttgaatcggaaataacctgaccttcgccaatagcttggtccaaagcaagaggatccaatccaattgcggataaacgagctagagaacaagttcaggagatatcaagtgggggaattagggaaatcatctggatatgactctgacgaggagcttgagccgtatcacccatatattatgaataccccttttccttcaggattcaaaaaccctcatgtctcgtcctatgacggaaccacagatctggtctcgcatttgaataactttaacacgataatgcgagcgagtaacgtgacgaacaatttatgttgtatttttccccacctcgcttgttggagcagtgagtagctggtttaacaagtttactcatcattcaataacttcctaggagcagttgtccagggataggtgacccgaagtggcctcgctaaccaatataaagcagcagcctggaaaaacacttaaggcttacttaattcgttctagcatggctgttgctaggattagaaatttggatgacagcaagcaacttacagcccttcaggcggggatctccactaatccattaaccgtggggggcgggttgtgtgatgatttacaaggacatccggtaagaaacatcactgacttcaacgagagggctcaggtgtttgttcaaaaggaaaaagcccgaaaggaaatgaacttttgaagacaagctcaggaggtaaacccagcaatgtttcaacaggaacnnnnnnnnnnnnnnnnnataactcgggggcttctggtctgaaaagaaaggatagaattaaggaaccgtcgaaggatagaaagaaacaaaagaagcatgacaaatacgtgccagtgtatactatttacaccgagcttaatgaaactcgagaaaatatttacctcgcacatgaggagaaggtagccttcggtaaacctgagcctatgaggaattcgaggaggaaaatagatcctaacaaatattgtaaattccataaagatattgggcatacgaccggcaaattttgccaattaaaagatgagatagaaagtctcatcgctcgaggccatctcaaacaatatgtgaaaagacagggccagggatacaaccagcccagtcagcctaataacccaaacaagcgggggttacaacctattcctgtggaaggagaagacatcttggttatttcgggagggtcgcatatcgcaggggaaagcaataacgctcagaaaagatatgtgaaggagataaagaaggagcagtcagtctttgccccagaaccttccaagaaggtgaaaaccaagcaaccccccattacattcacagaggaagacgagaagaatgtgagatatcctcacgtcgatccgctggtcataaccattcaactcgccaataagaggatcaagagagtgttagtagacagtgggagctcggtaaatatcatttannnnnnnactctaaagaaaatggggctcgaaaaaaaggccaaattaagaccttgtatggtgaagctttgcgggttcatcgaacacagcatcgctagccttggcataatcgagctcacattaactttaggcgaggcacctttaactgctactgttatggaagacttcttggttgtcaacctgccctcagctttcaacatattgttgggtcgttcagcactgatcgtactatgggcagtcagttcgatcaagcacctatctttaaaattccaaacaccagatggcatgggagtggtgtgtggtgaccaggtgttggctcccaattgctatcgcatagagttgcagcatagaaaggtcggtcatcagttaatggcaatcttggcaggagaaaaaaatgagatgaaagatgaagattttaatcctcgagttcaagatgaaagaaacctgctacaaccaattgaagaattggaagaggttattttttgacacaggaaatcccacaaaatgtgtatacattgggaagaacctagacgagcagctcaaatagcaattaata

SEQ ID NO: 40730 - DNA, 2258 bp, Cannabis sativa
taaaaccaaatgctcccaatactcaagctcaaaaaatattgattttttcttccacggtccctgaggttcatttgtgacacccttacctccttttcttttcttcgattttgactttcgctttccaagattgaattgaattttattcaatttttctaccaattgtcttccgcttaaaggtgggggaggcatttcaaattcttgcttaccgtcaaatgcctttttccaggtccgaaatacatgttcgggtggcaaaaactttcggtgtcccatataacaaatttttctcgaatgtgttaaatagcgagagcatgttttctcttcacagataggacatgcattatgacctttcatactgtagcgagaaagattcccgaaagcaggaaaatcattgattgtccacaataacatggccctaagattgaatgcttcattcctataggcatcatatgcattaacaccgtcataccacaatttacttaaatcatcaataagaggagctaagtatacatcaatatcattgccaggttgtgaagggcctgatatcatcaatgtcaacatagtgaactttctcttcataacaagccacggcggcaaattatatatcacaagcaagattggccaacaactatacttattgctaaggaaagtgtgtggattgataccgtctgcagagagaccaagacggatattcctaggctcattggcaaaatcaggccatctagcatcaattgttttccaagcgggagagtcagctggatgtctcatcataccatctttcactctatcactggcatgccaagtcaaatttttagcatggtcggcatttcgaaaaaaccgaaccaaacgaggtatgggtggtaagtaccacaatacttttgcaggaacacccttctttacctcattagaattctttttcttttgccacctggactcaccgcatgttggacatgatacaacatccacaaatctctttcgatataggatgcaatcgttaggacatgcatgtatcttttcatattgcaagcctaacgaacacaatgtcttttttgcctcatagaaagacaaaggcacctcattaccttcgggtaataattctcctaagaaagctagtaactctgtcaaactcttatcactccacccgtgttttgctttcaaattgtatagcctaataagcgtcgataatttagtaaacctagtacaattagggtaaatcggcttttcagcatcttctaacatagtttgaaatgtttcaggacgaacttgagattcaaactctgcttcgttaatcatctctgcgatgtgatcatcttcatactccacattattaacaatcttatcctttctagagggtccctcgcccgatcttctaattttttctccgtggtgataccaaaccttataactcctgtctataccgttcttaaacaaatgttctcttatttgggcaattttcatacgctccatgttaccacatttgagacatgggcaatgaaccaaatcaggattatccgcattctttgcagaaaactccaaaaagaagtcaacaccttccctatattttaccgttaacctattcgcactcatccaatctctatccatttcgaaacttctaacaaaacaacaaaacaacaatttaattaacctaattaatacaataaaataattctatatcaacttaacctaattaatttaataaaatactaatcctactgaaatttctaccgaaatttcgacagcataacatctataattcggacgttcccgaaaattttaaacatgcaactaatctattaaaacatccacaataatacaaacaaacaaaactataattaacagtacaaatattaccacccatccgaccgcagtcatgcaattccagaacttacttcactatggatgaatatctaggatattcaaactcttctaggatttataaaatataaaaaaaataaattttgagtagcttaccaattccaagctagcgttcaagcaatttttacgaaagatactaccacaattgaaaagctgcattgtgaataaaagtactcttaattcaaccaactagtgttaatatcaataattataaaacttatatcgtatgtatgacaaaaagtggtaaccttgtacttaatcaatacccagaaaacaaacaatttggctttacatatagcattttacgaacaaacttaaaaaatagaagtttcaaaaaagaaaaaaatggtgtatatgcaaagataaacagtatatacaactgctca

SEQ ID NO: 40731 - DNA, 981 bp, Cannabis sativa
aaagaatcatagaagcacaactgccagaacacttcagaatgccatatatggagttgtatgaaggaagaacgaaccctaggcaccgtttatccaaatacactagaatgatgcaaatggatgcaagtggaaaaggcaagtgaggatgaaaaatggctttgtttctcttcaactctgaccaagaccgtggaagactgatggaaaagattatctcccagatctattcataattggaaggatttacagataatgttcgaaaaaaaattataacagcaaaggatttcaacttggaggttagttttttaacaaacatcaagcaacagccaaacgaaagccttaagaagtatatttagcttatgatggatgttgctataaagacaaaggttactgatgatatgaagatggtggctctaacatcaggaataaccactagatatttactacagggataacttcaacgaaaaagagcagattctttatctaactttttatacagagcccagggattcatcaatttagaagacacttatgcttaagcttatggtgtacttccatcaccagccaccaacattacagcaactcaaaatctgtagttttttgcacccattattcatcctttgaatagtatgttcacaactccagtagtatatgaataaggtgcttctggaaaactagctacacaaactagttttttcaactttggagtggcacaaactgaaaacagtgttgctctcagataaataaactaaaagtggaagttctaaattcgaacgtgaggcattcctggaggaagagagtgtccaaagctccaagtcaaaataaatcttcaaagaaagggaaaactcaagaatccagatactctgagtatactagcttggtcgatactcgggagaatgtgtacaaagctatttgtaatatggtccactacagaaagcctctgccaatgtacaagggtggaagacacaaaagggacccgaataaaag

SEQ ID NO: 40732 - DNA, 1397 bp, Cannabis sativa
tacaatagtttttatgatattgcatgtgtttcatatccacaatccaacacaaagctctttaaaaaatgattataacatggttagttttattaatatatttatttagttgttataatgttagtttatagaattctaatagttgtttctccacataatattttaaggtacaattgattgttaatcagtgacaaaagaaacactgacaaattttttcatgacaatgccaattcaaattttctacttctagttgcattttagttgtatattagttaaataatagttgtgctactacaatactattattttaaaaaatagggctccaaattggcaatacatgaatcatacaatgaaaactcgattgtggtaagttttgttcgtgttacataggggtattattaattgttttaaggtttaatattagttgcctcacaataaatataactgttgcattacagtttcatgaaagttatctcatagttgacttacaatgcttaaaatttcaaactgttaggaaaaagatgcaattttgtttctcatattttgcaatggacagtttgattaaggaacaaattatgtaaattacgaagctactagccaataaacttcaatagattgcaaatattaagaactagtacacaaggtaaatcgggtgctcaaatgcaaccaagaaaatacccaactgcaactaaaataccaagtgaaggaaggatactaatcgctaaagataaatgacgatccaagtctattcttctacatacaactaaaattaaaagaaccttacttcacaaggtattcattgtgtgcgaacatggtcagcaatgtaaagactcgcttttgaccgagtcaaatgtatatatataacaaataataattaaataataatatatatatgtatgtgtaaaaaaaaaatttaatatatacaataacagaccctacgtccccctctctctctctctacctatctctctttctctttctctctcttcaaagcttcaaaggaaaccaacaaacctccataaccaccacactccagcgacccacctccagccaccgcccgacctcacgcgccggacaaatcagaagcccaagtgctagcgacctcacccctcaagcggcgctgcttctcaaagtttggcagttcaaactttgaacggattttccggtcacctccggcgtccgtttgacgaatcgtcttcaccactaaactcagctcgtcaaggagaacaacctacagtaaaccatttttcccggtttgttactttttccgatgacatttttgtagcttcgcccttttctggcgagttttcggtgacatcgtgtaccgttttgacaaacggttggcatgggtgtgatctactcatcgaggtggtcgctttgatatacactactcctatttt

SEQ ID NO: 40733 - DNA, 1700 bp, Cannabis sativa
aaaaaatttgagaaaccagtttctaattcggttaataagttttaaaggaccagtgaaatcggctaaccggtttacaccaggtaacctaaaataatttaaaaccttgtccaattcttatccaaaccataccaaaccttctagaacacccataataacctcaaacaacataatccaagcaatggaattcagaaatacatccagaatcaaaatatgccatggatgaaccaagcttgagttttcaaacttaaacttgtgcatccaccacaacaaacccctgaaccagtaattagaactcaaatctaactcaaattaaacttagaaattaaactacaattcattcaaaccctaacaacaactataatacaaaattacatgccaaaacaaactaaaacttaagaaattcacaaaataagagtttctagggtatacctcaacttaaatcacccttaattcttgctgaatcctcagaaaaaaatgaagttacgggttggattccctctggtttgtgtgagtcgagaaaacggagagagaaagaggtgaagtgtttctttttttttttttctaatttaatttttgttttattctctttatttttcttagttaataaaaagggataattcaaaaccctaagtaataatggccagacaccattcaagggataagccaccacatctcactaataacaatgaccaaaatgcccttttatcccaaaagttaaactataacaagcctaggggtaaaatggtcaaaagccataaccccactcaaacccggtgctctatttatctcaaatatttatcccactaagaaaaaggttctagacatatcaatgtgactctaagggccatccatggcatttttcatcgtcgccgagcaaaaatcataaaatttatataattcatatatggcatatataatgcattctgaattcaaataaatctccataaaatgataaatcataattaatatattacaatttcatgatttaaatcctaattatatgctaattccaaatcaaagctaagcggtctttacaaaagggcaagttggtatttttgcccttttatctttagtgaattaatagaaattgctattcctttgattaattagttgctcaagtttgtatagtttatcttttattaaaattagaaaaaaaacaaggtaagttaaaaattaaaaataaattagattaacatcacaactctctctctctctcttcaaaccctctttctctcggcccctcctagaaccagcaaagaatcaagttttgattcaccatttctaggtgttgttgtaagattttagttacggatgtcaagatttaatccaagctaaacttcctcctctttgttcttttgaattttaagctttgaggttaggttcttacacaaggtttaattaggttgttctagggtacgtttatatgagtttagtttgattaaccgaggttgttggaggtggtttggttggcttttgttagctgtagcaagtgttgagctagtaactcaaactttgctcaacaatggtggatttcgattcatattgtttttggtgtgtttgattgttgaaatatgttctttatggttcatttagatgttctagaaagttttgtagtgattggggatgatttgagtaggtttcttgtgggctttaagtttgagaatttttgaggaatttctgcccagacaaccagaattctg

SEQ ID NO: 40734 - DNA, 1813 bp, Cannabis sativa
gggcacaaaacccaacaatagtttattttaaaaaaaataattacaacatcactaagtaaatttaatttaaaattgataatttaattagttaacactacaattgtaacacaaattcatttaaataacttggtaattttaaaatgtcacaaatttacttattacttaataattattataaactttattaatttaaaaattgataaattaaaaaaaaatggatttctctctctagctttctctcagctctttgagctgctgctatggcaaagacgagggcgacgaagcagggcaagccaaggtcaccagcgaagaagaagaaaaaatgtggtcctgattcctcagcagatgcgaagaaggccaagactatggatgaggtgttaggaattgaacctatcatcttttcggatgcagaagagggtgaaatcgaagatcaggatacagaacatgaagcgggagttcgaatggaacaggaggattcatggagggagagtattcgactggaagtcgcacaactgatggaggcaaaacaattcagggaggcgcaacatctatctgcaactgctgttgcgagaggtacgactgttataccccctgttctgagatctggtagtataattcgaaacctagaaccaagtttctctggttcatcctcaaagcagaaaattaagattacccgtgaggatatacaggaagaggttgatttttggactccttctattgtgtgttatgtgcttggggctaatcccccaatgtctatattagatggttttgttagaagagtctgaaaggataaaattgacaaggtgggaatgatctcatatggggttttcttggtacgattcaacacaattgcagaccgagatcatgtcttatctgggggatacatattcttcaacaatcgtcctgtgataatgaaggcatgggctctaaacaagaactttaaaaaagaagacattcagtcagtgcctatttgggttcagttgcagggtttggaattgaaatgctagggtgaacaagtcctgttcaggattataagtcagataggaacacctattatgttggattctttcactaaagctaaggagaagttgaattacccgagaatacttatagaagtctccttgcaacaagaattccctgaacaaatagaatttgaagatgagcatggtgatgatatctcagtctatgtaaactatgaatggaagcctacaacttgtgctcattgcaaaggagtaggtcactctactattgactgtacgaagaaaggggggagcaaagctgaatgggtagttaaaaaaccagttgtggagtctcgggaaaagacaataagtgatgaggatgggtttttactaccaaaaaaagtgtggaaagagaagactactgagcaccaagttgcttctgctgtggcagtggcaaactcctttggtagtctacaacaagttactgaaaatcagcaagagaatgctgatgggaatttagaaggtgaaagtgatactctgctggttcatgaaggcatagagaccattggggacacaagaggagggggagatcctcctcttcccaatggataaaatcgttagttggaatgttcgaggagtcaacaaccaacaaaagcaacaaatggtgaagcaatttattaatacacaaaaggttgggttggttggtctcctcgaaactagagttaaggccttaaaacttggggctttatactcgaatgtttttaacggatggtgcttcacttcaaataacccttggcatcctggagggagaattgtagttggttggaaaccaactagttataatgttaatattc

SEQ ID NO: 40735 - DNA, 1145 bp, Cannabis sativa
tctaattttaaaaacaaaaaacaaaaatgtgttctgtaaaatatattttcattttcattggttgattttatttaagtcggatccgaggcttggtccgagatcgacactgggggcgggtccaagtctggggctaggtccagattcagttttcaaggtctaagttggagtcgaaatccataatattgattaaaaaaaaattaaaattttgaaagtgattttttttttttaaatttaaattctcaattaaaaaaatttaaaattaaaaacagttttataaaacatgattttagaaaatatttttacttttctaattttaaaaacaaaaaaaaaatattaaaatagtgttaccaaacacaccttaagtttattgtttaattttaaagtgttattaattaagttttaggaaaaaaaattgaataagagtaaagagataaaaaaaaaaaataagtatagtattatattaataaaaaatactagaaatcttaaaaaaaaaaaaggatgatattatattgtagcaaataagtatggtttagatattttttgaaaaatcatatgcttaaaaaaaatcttctaactataaaattgtttccaaataataatttatagttatttttttttatgaatgaattgtaatttataattatttattatttaaaaaaaatgctacaccattaataattatttaatttttttttaaaaaaaaaactacaaagatatctaccaacctaataatataataagttcattcactttaattcagccaattagaaaataaaatcaaaattaggatgaaagagaacaagtttgccctattgacattcatatttttcttttatttaaaaattttaaaatttttatctatcttatcttattattaatatatatgtatacatttctgttgttgtatcattcttaatatttctgaaggaaaatccataaacgtagatttatggtaaaaaaaaaaaaattgatacttattgattattaacattattttttttttcagttgttatgaattttgttactattattaaatttactttcggaatataaaaaaaaataattacttatattattaaaaaatattaaaaaagaattaaaaattgatattagtatattaaaaaaaaaagataacatttctctaa

SEQ ID NO: 40736 - DNA, 1509 bp, Cannabis sativa
ctgggcagtacagaagaaattactgctaggcatagtgcccaaactcataatggtcagccgtccaatccccggtcacaggtctaacctgtggggcaagcggtagatggccagatcttacatggctgctatttgggtggagttatacctaataacttcatccagactaaaaattttgccctctcactggccaaaccagtcaaacaacagaccacctagtacctcagtattcaacaagttaggtgcagccaatgacctcatggctgacctgaataaaagaagaggtctggatgaatagtatgttcaacctgttgctcaaccatgtatccgcattcaggacccagctccaagagatcctaatgtgacacaggtcggtcatgaaactgaaccagttcatccatctgtgcaagcacagttgaatcaactgaaaaatatggtccaaggtctggccggccaaaaaatcactgatctcgagctggaccgagcacccggatcacccttcaccctagagattgacgtccttgaatcaccccaaaagttcaaaatgccgacctggaagatgtatacagggaaagaagatcccttatcatatctgaagtattttgagatatagatagatctgtaaggagtacggggtgtgcggtgtagggtatccctgctacactagcagaaaccgcccagcagtggcacttcaagctaccaccagggagatttaattcgtggaaagccttttcctcagaattccacgcacagttctcctcttcctgtaactcccctcgcatctagaagacttggtcaaggtaaaacaagtaccaggagaacctttcagggactacattaacagatttatgacagaggctagcaaggtcatggggttgactgaggagggaggttggctaccatactggggggcatcgagccactcgaggaactgtggaaggacatcaaaagatgtggccccctggggtctatggcagaatttctggaccgagcagatggatttattaagctcaaaaaggcagttcgacgagtggacaccgtcagacataagaagggccagccacatatctccttggcaggaggatagaatactcaacaccctaacagctcaactccgagcgaaaaaaggtccaataacaatggcaggcaaggcaatgagaaaaagggaaagttcacgggtcttactgaacatacccctagagagaatgcctccaagttcactgccttctccgtactaattgatgacctagagacagtatacataacaactcagttatggtctcatacaaaaaacctgctcccatgaagaaggacgtaagtaaaagagatacgtctaagttcttccattttcacgcagactgcgatcacgacacgaatgagtgcaacaatctaaagcgagaaattgaattcttaattagaaagaataacccacacttgcaaaaatacatcaagaccgatcagaatcaacgggccgcccaaacaggaaataatctgttaggttttgtgccctaa

SEQ ID NO: 40737 - DNA, 1920 bp, Cannabis sativa
  modified_base (1292)..(1298): a, c, t, g, unknown or other
aaaaaaaaaaaaaagtgagatcaattctaaaaatattgaggcataaatctaaacagaaccggttctataacaaaacaaataaaataaataaaagaagatttaaaatttagataatacacataataactcataaattaattataatattaggttatttttagtattaaatttagattaattttagtatatttttaatttagtttaaattgtgtttggagtattttcacgctttttattttgtatttttgcaaatttaaaatagaagaagattagaaaatatcaaatgaattagatgaaaaaaagataaaaaaatctcacaaaaagatgatacataaaatagagaaaattgtgcaagaaaataaagctgaaactttactatcacttgattggattttggaaaaagtcaaaacataaaagttctagatctctcttttatctttctagaacatcttgaatcgtctgattccaaacaatatcaagagagttatggccaaaatactatcagtcgatgcagcagaaaaatcaccgtcgaaacgaaaccatatggtgaaactccaacacgggccgcggcccagcccttgtggggccgcgacccgccccctaaactgcccaaaaatcgtctttttctctcacgtgggtttaggtgatttcctaattcgaataggcatttaacatgtacgtttttatatctttttagtcactaaaagcctatataaagggtgaactggagttgatttgaggcaaacaatttagaggaaaaaaggagtacgaatttcagcaataggagtcaatactgaggcattttgcagagggtttacaacattattttattctttatcttcactttcttaaagttaatatgtgtgattttgcttccatgaacatgggtagctaaacacttgattagggttagatggatatcgtttgatatatctttatggtattaatatgatttattttcccccagtttctatgtattctatttcattcgtgcttaattacttttaattgtctaatcactaattaattgtctataattttgatgcgagatctgagaagtgagtgtcaattatgctatagtgaaatagaactgaatttcatattatgtcataatcaatagaaacaatagtagtcgaaatcgtagtttttattaactgttaatttccttattagtttaattgcttacttttattttctagttttaatcctttcttaatgtttattcaaccaaataaaagtaaaaatttaattttaacttaactacaattctcgtgggatcgacctcactcttnnnnnnnttactacttgtcacgatacgtgcacttgcatgtgcaaaatatcacaacagcaaaacattattattttacaaatatgaaatttccacttttttataaaaaaaattgtataaaaaaactcatataaatgtagtaaaaaaaaaaaccgacaaccttagagtttgtttggtacgttgtattaggtcgtattgtattatattaagttgaattatttatcatatttttaaataatactatgttaaattttaatttatattaaaatattatatatttaggtattcataaaagtcaatatcacatatagttttacataaaaatatttagtgaaatacaatttaatataatacaatacaatacggtataatacgacatactaaacgaactcttatgatattatttatttatgttattcaaaattaaactcttataatttttctattatttttataagatttgtgagttatactcttattatttcaaataaaagtaagtgaacagtaatggggatggggttgggagattacttttcctctttgatgaataatgcagcactgcagtgttagatgcatttgatctcttaggcatgaagaacagcaagcagtgaaagaagaagaaacagatcaaa

SEQ ID NO: 40738 - DNA, 1558 bp, Cannabis sativa
tttcgctgcaaccaatgtaaggttgcttgaactttatatgtgtttaaattctattgttttagaaattcatatttaggatgttaaataacatacatagtaataaatttagatcttggaaaaacgattcccaacaagaatacactagaataatatttggaaagggtagatagtgagttactcaaagagctcgtagctcattgactcacatacttgtgagacgttgaaaggataaagacaacactttcagcttggttcacatcgcaattgtcagatagtaataagtttcttgctcatacctcactcaacatattagtagaatagtgcgagacgtactacaacaatacacttagacattgttccataataatatttaagaaaagtattgaccgaattactagaaccatgaagcatagttagcttaatcgcctatagataaggacaaatagcaattataggggttacttacaattatcccatgtgatataaatatgaaacgtgggggatgtccacgtttcatgaacagttacagatagatcaagggaataactgtcatcctaaattcctataaatagggacaaaatctaagaaacaagggacactcattttttgggaaaaaagagagaatattgtatcttttttattattctgtaaacactcgattatattctgtatacactttatcatccagaataagatggactcgtggactatgaacatttaacttcaaaaccatgtaaaaactttcttatcatttattgctcttattactattgttattattattatttaattaatactagagattatttattatagaatagacttatttattagttaatgaaaatctacgtttacaacttccggacaagtggtgaatttttagaaatcaaatgtgttttggcaagtgtgtgggtgaagatacgagggtggccttggctgactttatggggtgaaaattatggaacaccatgggaaatatttggggttattgtcactagttgggaaaaataaaaaacaagtgtttgatgttgttaaaaattgagtttggaacaagctaaggggctggaagtgttctttgttttcaaccgttgggaaagaagtattgatcaagctaattattcaagctatcccaaattacatgataagttgatttcgtcttcctaaagataccattaacaatctccatagattggcagcaggattttggcggggatcatctttgcagaagaaaaaaaactcattggtgtaaatggctatatctttgcaaatcgaaagaagatggggggttaggattccgtaacttggagttgttcaatcaagttttattggcaaaacaaacatggcagtatattcgtaattccaatgcactttacaacaaggttttgaaggcaagctactttcctaatggtgatatcattggggtaaaatgtggttctcatgcttcatttgtttggagaagtttggtgtggggtaaaaaattcattgtaaaggtgtatcgatagagaattgagaatggaaatagtattcacatcattgaagatccttggctagcaagacc

SEQ ID NO: 40739 - DNA, 4161 bp, Cannabis sativa
  modified_base (163)..(164): a, c, t, g, unknown or other
  modified_base (1201)..(1201): a, c, t, g, unknown or other
cccaattaggtcaatcccccatataggaaatgggtagagcgaggtcatcattctaagttctgtaggcaatacatgaggtatatgtgaaaacctctgacacttatcacatttctcaacaaattcgtgtgtatccttattgattgttggccagtaatatccttgnntaatgatctttttagacagacttttctaacccgcatgattcccacagaagccttaatgaatttcttcaatgatttcgtttacttctgcggggagaacacaccgaagtaggggcattgagtaccctcttctatatagtttgccttatatcattgtgtaacgaggcacttaatacaatagttttcgtgcctcgtttttgtcatttagaagtttcccgtcgagtaaataattgacaataggagtccatccatgtaggagagtcatctatcatcttaacgtcttcagttttacatatacttggctcgctcaaaatctctaccggaactaaatttaattcatccaggtaattttacgtggcaagttttgctaaggcatcgacgttggagttttgttccctcgaaatttgttcgatttgaaagtaatctaatctttccaacttctttcgaactttctctaaatacttcaccatttttaagcatttggcctagtattccccgaggacctagttcacgatcagctgcgaatcactatgacaaatgagatttttgactttcaacgcctctgctatctttaagcgagcgatcaaggcttcatactcagcctcgttattagatgcgtgaaattggaacctcagagcatagtgaaacttaaagccttttggcgataataatatcacccctgcacccgaaccctatttgttggatgcgccatccacatataatttccaggtttccgcgtctcactgattaagtggaatttcttctggagttataccttctatcaagaagtcagctaaagcttggcccttgatggatgttcaaggatggtatgttatgtcgaactaccccagttcaatcgaccattttatcaatcttccagaagcatctggttttgataaaacttgtctcaagggctgattggttaacacttttatggggtgagcctggaagtatggtcatagtttatgagatgcatggagcataatgggagtttttctagagtaggatatctagatttttcccctagtaaccttttactnacatagtaaataggttgttggtgcttgctctcttctcgcactatagttgcactaatcgcatcttctgagatggctaaatatagaaataacgtctctccaattattggttttgccaaaactagaggcattgctagatgcctttttatgttctgaaaggcctcttcgtactcttttatcaactcaaactttttgttgcgtcgcaatatgttgaaaaatggcacacacttatcagttgactttgaaatgaatctgttaagtgcaaccatcctttctttcagggcttgtactaccttaggctttgttagtgatggcatgtctattaatgccttgatttttttaggattttcctcattacccctcgcattaactatgaatcccaaaaactttctcgaggaaactccaaaggaacatttttcgggtttatcttcatgttatacttcttcaatatcttaaagcatttcgcaaggtctgaggtatgatccttactttttatcgatattacaaacatatcattgacgtaaacctccatgttttgccttatttagtttgttaacatttcgtttaccaattggtgatacgttaccccagcattcttcagtctgaacggcatgactttataacaatagagtcccatgtttgttacgaagcttgtatgttcttgatctgggacatgcatttttatctagttaattatatctagaatatgcgtccataaatgacatacgcttatgcccaacaattgcatccactaactggtcgatcctgggaagtgggaaacagtcttttggacacgccttattcagatcagagaagtcaatacaagttctccaagtttccttaggttcgagatgagaacaggattggctatccacgagggataaaacacctcgcatataaagtcgttgactaacaacttgtcaactttctgttttagtgccccttgcctctcgaaatccaagggcctccctttctgtcttttcgctcggtagtttggatcaacatttaagtgatggcagataatattagggtcgattcctatcatatacccatggctccaggcgaattgatcctggttcgccttcaaaaagcttattagctgctatttgagctgctcgtctaggttcttccaaatgtatacatattttgtgggacctgggttgagaataacctcttcaaattcctcgattggtttcaataggtttttctcgtcttgaactcgagggtcaaaatcttcgtctttcttctcgctttcttctgtcaagatcgtcatcaattgacgaccgactttcctatgctacagctcaatgtgatagcaatcgcgagccagcatttggtctccccgcaccactcccacgacatctagtgtttggaatttcaaagataggtgcttgatcaaactgcctggccctagttcgatcagtgctggacgaccaaacaatatgttgtaagctgagggtaggtcaacaactaagaagtcttgcgtaacaggagcagataaatgtgcctcgcctaaggttaattcaagctcgattatgccaaggctagcaatgctatatctggtgcatccagaaaggttcatcatacaaggccttaatttggcctttttcgagccacattttccgtagagtctccttataaaggatatttaccgagctcccattgtctattaatactttcttgatccttttattggggagttgaatggttatcaccaatggatatatgtgaggatatctcacgtttttctcatcttcctccgtgaatgtaatgggaggttcctcggttttcaccttcttggaaggttctggggcaagggccaactgctcgttctttatctctttcacacatcatttctgagcgttattgctttccccttcgatatgtgaccctcctgaaataattaagatgtcctctccttacacaggaataggttataacccgtggttgttttggtaattagatagactgggctggttgtatccctggccctatcttttaacactgtttaaaatggccttgagcgatgagtctttctatctcatctttcaattggcgacattcatcagtcgtatgcccaatatccttatggaatttacaatatttgttaggatctctttttctcctcgaattcgtcataggcttgggcttcccgaacgccaccttttgctcatgtgtgaggtaaatattctcccaagtttcattaagctcggtataaatagtatacagtggcacgtatttctcattcttcttttgtttctttctatccttaattccatcctttctcttcaaaccagaagcccccgagttatcaattctcgtggaaacaatacctgttaaaacattggtgggtttgcttcccgagcttgtttttaacagattcattttcttttgggcttcttccttccaaacaaacacctgagccctttcgctgaactcagtgatgcttctcaccggatgtccttgtaagtcatcccacaactcgccccctgcggttaatggataagtagagatcccccctgaagggttgtaagttgcgtgctgtcatccaaatttctaaccctagccgcagccgtgctaaaacgacttaagtatgtcttaagtgtatcactgggttgttgctttatattggttagtgaggccgcttcgggtcgcatatccctagcagcctgaaattgtttcttgaaatccctggatagctgctcccaggaagttattgaatgatgagtaaacttgttaaaccaactactcgctgctccaacaagcgaggtggggaataaaatacagcgtaaattgtttgtcacattactcgctcgcattattgtgttaaagttattcaaatgcgagactagattagtggttccgtcatattatgagacatgcgggtttttgaatcccgaaggaaaaggggtactcattatgtctggatgatacgactcaagctcctcatcagagtcgtatcc

SEQ ID NO: 40740 - DNA, 1336 bp, Cannabis sativa
atatatatatatcccttagataattatagctggatagtgtctcacttgaaattaaaaaacttacccgtgtttatatatatgaatgatagttgtataatttaatatatatatttctttgcaaattgcaatagtatagtgttgatcgatataaacttggtgcgtgtgttattatatagaacgcgcctcggttttaatttatagtgggtatttagtgtatccttaagaacaataataattcttaaagttaattatacatacatatagtttttaagtttgttatagtgctaattttccgcttaataatttgagagtaatcttttaaaattgacaagtgaatctaatttttgaggaaaagatgatctgttaattaatgactctcgaagagttaacctctcttgatatgacctcgtgaaatgatgcgaccttgataaggtctagtcgcatactgcaccttgcacagtgtaaaaatataagataattaagcaggattgagaggattttatataagtcacgcatatatatatatatcgaaatatatgtgatgagtaagtagtttttctcctacgattagtaaagattgtttctttacataaagatttgtccgaataacaaatcgtgttcaatgactcgacagagactcgcatgtcccatgttgtcaacacacaagatgtccatcaatgcggttcaaggtgaacacagatatccaagcgataggcccattagccgtttagcgaatatagaatgcacctaaagcctgcgaacttgtgcgagaatatgaacatgcaactagctctcgataagtcgcatacattgctagacttaatacaagaacgaattaaactgttatttattattattttacgtttattctgatttaatactatcatttattgtaaaaatggtttaaaatagattagtcatgtacaactgaaaggacacttgctttctatataaaggagtgatccaaatcaaataaactaagcataaattatttgcaacagtagactaaagcagaccaaaatctaactgaaccaccatatttttcttgtgtcattatttgtttttggtagctcattgttaaatcttcgctattctaaatgagtgttcacactatttttattcagattattacaatacttgcataaattttggtgttgtccaaattcgttggacaagttcatttttaaaagtttcccctcaccattttttggtcaattaatattatctaaaatttagcttcaagtagaaaaagtcgattgaaatttaagttgtgttgtatgttttgataaaattttaattaaaatgtggcgttaactaattgaaaaattaaatatta

SEQ ID NO: 40741 - DNA, 1922 bp, Cannabis sativa
ttgttatggaagatttatctttccaataaattgcaatatttccattcaaaaaaaaaaaaaaaaaaacttaattccttaaataagaattagatggtttgtctaatattgaggttaatgttctggtttttgtagaaagctttggaacttaaaacttcctctaaaggtgaaaatttttctttagtgtacttcaacttcaagtcttcctaccaatgtcctactattgtcagaaagagggtaaattttggtagggtatataagggttgtattgtattaaataacaaataatactatctttggataaaatattatattgtattaattattacgactataaattttaacacaatgtgagtcggatatgggatccgagtccatggggtcggatatggggttcgggatttaggtctcagtccaggtccaagttcaagtcccggtttgggtctagggtccagggtctgggtccgagattcgagtccaagtccggggtctaggttcaggttcgagtccaagccatggtcggggttgggatcgagtttattgtgaagaaattataattttacataacctattagtacaaatcaataccaaacatagtattctattaaataatattaatataatacaatacattacaatctaacacaatactatacaatgttgtttactgagttttttggaaaactaatattaaatagaaaagttaaagaaaatataactcagagtttttacgtggttggggcgtcaacgagccttactccataagtaaatattattaagtattttgcttgaaaaacttaaaggaaaggattaccataagtatgagcactctattctttgcctgagcaagtgagccaagattttccaaccatttgcatgaaggtttcaatgagtatttatagtgttgtaaaagtcaaactagttaccattttctctctaatagggagtttacaaataatatattgactttggacttatattgtgaaattaaatcaaaaaatattaattttcacactaattcaatttctcactaatgttgagaccaaacttatcaaaattaaatactaatttagacactaaatatgtctaaatgatgcatcaattattagacaccaaacatgtctaaatatcacatttaactttagacattaaacatgtccaaattacactttattttaagacactaagtatgtctcaaatatactcattcttagttttagacaccaagcatgcttaaactaatcatattggagtatcatccccacactttcagatttcattatcaagataatattttgtatcttgatttaaaatatctagaagaccactttgcctctatactctttttaatttctttcttgaaattatttttacaaaattttgacactaaaatttctcatatgcacaaccaaaattgatttagaaattttaatttaaaatcaaataaattaatcaacaatatctcagcacattttgattcaatttgtggctcaccctatatttctaccataaagtgaaaatttaaatttactttaaaataaaacatctacattttattttaatctcaacatataatctttcaagataatctcttaaaatagcacttttgtggattattctctttctcttaattaaaatgattctttgatcactttaaaaatatcaaactcacatcactactcacagaataatggaattatttccatccattatcttaagattatctccctattgagattagtccaaaattataataaatttaacaaaattttcatcaattttttatacaccaaattaattttttaagactcaaaattgcttctttaattttgtcatctttttttacatttttaaatctaccatgattcacttactttgagtccaaaattgttctttcactatatggctcattttataagtttgga

SEQ ID NO: 40742 - DNA, 1220 bp, Cannabis sativa
tacattatagttcattgaaccattttttgtctacttctttagtcttcttgggtgtaaacagagcaattcgtgttttgatattccattttgtctcctcagtaattcagtttgaggttaacgattccccttgccaagtaatgttgttcctcagtttccagacattgtaaaccagtccagcaattgcagcagtgtataccttctttcgaaacttcgaaatctttgcccttgcaatccacctaagtaaggtagaaagattcaaagaaaccacattccatgacagccactgtttgatgtcctgcaaccatttcacagccacagtacattcgaaaaataggtgttgcacagtttcagtttcttcattacaaagacagcacaactcactcatttgtaatccatgcttgagcaatctgtcttttgttttcaatctatttaacatggctaaccacaagataacactatgtttgggaatattcaatctattccatacctcattacaccatttctgtctagttcaaggaggagaaaatagcatatagcctgctgcaattgtatattgcctctgctggaactttgctgtatcacatttcagtttcagctgatctttgatggctaccagctttttccaataccagctagcatggatagaggctgtgtagttccaccaatcttgatctttgagatatacactgtgtatccatctttgccagaggctttcccgcttgttggagatggcccaaatgtacttagagatagccactttattccactcttctatctttataattcccaaacctcctgcttttttaggttgacatatgttttcctaggccacagccccaggaccatggaacttgcttgacctttccacagaaaagccctacacacggcttctatagctcttacaacttttttttggcaaaaccatcatctgactccaatatgcctgaattgctattagtactgagttaatgagagtagtccgacctgcaaaggagagatttcttgaactccaactcttaattctagcagtcattttttcaaccaaaagttcacactccttacctgaaatcttcccagagcaaataggtatccccagataagtaaatagcaagacttgtctagagaaacccgatgctttaatcaatttcttcacacttccttcctccatgttactgcaataaattacagttttgctagcattcgggtgaagaccagaagtg

SEQ ID NO: 40743 - DNA, 2415 bp, Cannabis sativa
tttgaagctccttggtctcctcggggttgctcctataagctggtcggtttggaattgatgcacccggaatgaatcaatttgatgttcaatccctcggattggaggtaagccatatggtacctcttcgggcaggacatcttcaaactcctgcaaaagagaaacaatattgctcggcaagctaccgacgagatcattagtacataaaagagcctccttgtacatgagtacaataaggggctggtgtgaaaataatactctcttgatctcacttttttttgcaatgtaattgaatttttcctctcttgctctcactatggctgaaatcttctctctttctttttcactctgatcaatatttttctctctttcttttttttttaaactctttgttttcaatttcagccttccttccttattctttctttttttcatttgatctttgtaattttagttggtcctccatgacctgttttggagttaatggcacaagagtaataggttgctttttaagagtgaaagagtacctatttgtgaatccatcatgtgtaaccctcagatcatactgccatggtcttcccaacaataaatggcatgcatgcataggaaccacatcacaaagcaccttatcctcatatttgccaatggataatgccaccaacacttgccttgtcaccttgatttccccacaatcattcagccactgaagccggtaaggatgaggatgttttaaggtggttaaggctagtttctccaccaaataagtgctggctacatttgtacaactccctccatcgataatgacattgcaaactttgttattgacaaagcaccgcgtatgaaacaagttctccctttggttaatttcctcctccttgacctgctgcatattgagaatgcgccttgctactaataaatctccaaccacagcattttgctcatcatcggcatattctaaatgtggcatgtcatcatcatctacttcttcctcatcctccgactcaagctctccttgggcgtttatcatcatcacccttttgtttacacactggctggctatgtgtccccgcccctgacatttaaaacacttaatatcacgtgttttagaagtagaagtctcggtgttacctaaagtagtggcaggcgttggtttgacattctttgagggttcaaattttggcttattttgcagctgctcatccctccttggagctgccttccatgggctggtggtagccataggttgtcccctcctagccattcccttccgtttgagttgttcctccacctttatggcttgatgcaccatatctgtcaactcaacataatgttgcaactcgactatatccgcaatctcacgatttaaaccgtgcaaaaacctagccatggtggcttctcggtcctcttctacgttagcccggatcatagctacctccatctccttgtaatactcatccacgctcttggagccttgaattagcctctgcaacttttgatacaatcccctataatagtggctgagtacaaaacgcttcctcataagcattttcatctcctcctaagtgtccacaggtggctctctattcctcctcctattaatcagtaattgatcccaccaaacaatggcataatcggtgaattcaattgcagccaacttaacctgctttatctccgagtagttgtgacaatcaaacaccatctccattttagtttcccactccaaataagcttcaggatcatttttaccttgaaaagatgggattttaatttttatgtttcctaaatcattatccctcctaggtctacccatcctagcttctctatttccatacccacgttcaaacctgccccggttcatatatggctcatcaaactcctccgactccacctcttcctcaacattccgccacggaccacgtccattattgtggatgtcttgtggctgtctcctacgagttcccgcttctaccctgtccaacctctcttgaataggttctaattcagccctcaacatacgcctcatctcccctaacaatgcttgcatttggaggttcggagttgggggttgtcgaaattcttcggttaagtgttcttcttgattattgcacatgtttagactctgcaaaacaaggttagaatcctcacaagcactccctcacgtgtttcactcaagaattgatacacttgctctcgtgttttcactctaaatggcttttaccctcttatggtctcacacactcttgcctttttccactcttttgtgttttctttagttcttaatcgaacttcaagaaacaaattccaaaataatccagcagcacaaaaacaatatgagaaaacaaccaaaactaatcaaaaggtctaacttgaataaggtgagaaaatgaaatgaagaaattttcttattaaaatcgtata

SEQ ID NO: 40744 - DNA, 3233 bp, Cannabis sativa
  modified_base (2944)..(2945): a, c, t, g, unknown or other
atttagggcataaagcccaacaccgggaccttccaccgcctgcctcgggatgaggagacacccaaccgtaactacggagggtttggagcttggagccagactcatctgatgtctggggctatgctccctcttcagaattattttgttaatttcttagtttttgttggcctcgcgccgtatcaattgattccgcaagcatacagcctgctttcaggcttatttatcttgttcgttgcccggagctggggttcgcccagtccggctgagattttatacttttacgaacttgtttctgtccccaagaagggggacaaatttaaggatagtttttatggacttcggtcccatcctttgaatgagggcccggtcccttataactattagaagcatgtgaaggagtagcgtcaccgcttcttcttttccttcggcttccaggccatggaccgcccagagcttcttacggagtgggttaggatccctccctatctgtggaccgcacctactcaagtgttcctccagcgggccaatactttctccacttatgacaagaaggccctcaacgttggggacttggtcacggcggagagctatcggaaggccaagctgatatccgagaattagtcggtggatgactttaacctttccaaggtcatctgtccgaatgtaaggactccagccgccgaaagggcgttccgagtggacataatcactttggcagaggagcggtaccagaagtacgtcttcaggagggaacaggacttggcttacatcaaggccctggctgcagccgggaggacccttcgtctggaagctggcacggatcggaggccctccaggcctaagcctttggtcccggtacccaacacttgtgctccaaatgccagtacttcaggttctggtaagtctcctttagtaattcaccatgtcccctctgtccgagagtacacccaatgtaggcccataggatttgatgagcgcctttgtaagtttaggatgccttccactcggtggggggatcatgctaaagagttctatttttcccacttaggccatttcttgggtcgatcccggatgagctccgaaactcctacacccattcccctggctcatttagcccacttgtcttccagctggtttctcccctcagacagctttctcggggatgacgaagctagcactgtagttcaagactttgctagggatgaattagagagtcggggtaggattagctttatcgctttgttgttgggcgcatgccttcttatcgttattctgacactttgtttatttctttattgcagcagccaagccaatggaagatctcctggcgaccctcgccgaggcctatagcccggacgcttctctgcctccagcctcatcccaactggtgaccccaggaggtcctcgtccagcgcccccataggcacaatagtcttgatagacgaggaaggggaagtcgaggaggatgagggcgagcttgcggctgctctcgagcgcaagcggaagggtaagatggttgaggccgagttttccaagaggactcggaggggggacactccggctgttggcactgattcagggatcccttctgaatcagaggagtacaccgtgccgcatggaattgttctcaccccagtctccgcagacgaagagaggcaaatgctctgcatcaccaaacataactatgccttggacgagttcagccggggacacgccgaggtggaagccttgaagaagaccctgcgggaggagcaatagaacaccttacatgaggacgccttcaggaatccctgggacctgaacatggatcccttgacagactggttcaaccgcttcgtcggtcctactctctcccccttcgcttctgagatggccagccaatttgtctcccatctgactcaattcccagccaagagatacgcggcttgtgcctcaatgaactctatttaccaggtacaggacatcagtgctgccttggctgcggtgagtttttgcgattcattcctttcttttcgcttatattttgtcttaaggcatctgatttcattcttgttttcctttttcagatcaccgcagagaccggccgcctctccaagaccctgattgatcacggattcgtcatgtccgaatttgggggcatggacgaggccgtgaagactttgcgggacttatcagctgagaggagggcattctaggaggaggcccaacagagggaggctcaggcggaggcgaagcactgggaggagctgaaggcagagggcgaggctaccaccaaggctaagcgcgagttgcgggaaaccagggaggctatggatgagatggccgcaaggttaaaatccttggaggagctgcaccaggctgacttgccgtcgatggccaacctgaccgtggaagggaaggagcttagggactttaaggaccaagccttgaataaggccaaaagggatgagctcctgactcccgtcatctgcaagcactacgtcaaacgttttgacgatggcgtttacatggcctggcagtccatcattcagaacatcaagcttgacttttatcccaagcccgaggaaatcctcgttgtcttccgggagaagaagaaaaggcttaacgctttgtttgaagaactccgtggccctcgtcttcctccccgcattgattaggccgaccaattcaaccagttcaccattaaaactatttttgtttttctttatatttacagtctcttttcctttgtttttagacaatttaattattatcttctaaggggagacaattttttatggcccgtccccaggcccttaatatttttttaggacctgcttttgggtcaggacatctcttatatttacatttaaatatatatatttcgcttaggtatatattctgcttgattttgcttttacttttggcttgttttacatttgtccgtgtggtatgccttagtacnnccctgagtggcatgaaaacattgttttgaaggcactcagctttattcataaatttagaggttgcatacacttttcggtacaaattctcttaacaaagcgtaagtttacatttcttaactattggtaatacttccggagatgatcagcgttccaggcccttggcaccatggttccatccattgtttttagcttgtaggtcccgaggccaatctcatccttgatttcatatgctccttcacaatttggcccaagtacccccactccgggttcctgagtggctgggaagac

SEQ ID NO: 40745 - DNA, 2935 bp, Cannabis sativa
tatgtgatattggtgttagtctttttgttttctgaaaaattgagatattttttgtttatttgttataaataataaaaaagaaagaaattaaaagaaaatatctatctcataagatatattttttttatagctttttccatatattatagattaccttttccaaatgagttatatttctttttcaaataataatattaagcttgaatttaaaaaattaaaattaaatgataaaatatcaagtgtattttttaaacgacctagctatacaattatatgaataattattatatttatttatttggaaattcaaaattaaaattgaacattattaatcattcctaattctattacaagtcacttttatttttttatataaataatagtaaatcatacctcatattcacattgtaattaaatttatagagagaattaataataaaatgacgaggttcttcatgccacatgagttgctaaataatagaagaagaagcactatgatccataggctttcattgtcaccgccgccgcctctacagccggagactcaaccttcttcgctactactgccgccagagaccttatctttgtcagcgtttttgccacatcagttgatagtgccacgtaaaaaaagtactcaaaaagtacttaaaagtttgaaatattataaatcagaaaacaaagattatggtagtaatgaagtgtgtagtgtgtgcttggaggaatttttagaaaaagaagaagttgctaatacaccttgcttccactcatttcatcacaattgtattaacaaatggttatcactcaaaaaatcatcatgcccatattgtaggagacaattgttttaattatttataaatttattagttactttttaataacaagatgttatttatgggttaaatatttaaatatgaacatatttattattattacaaaaatataaaattcattaaattttaagtaatatttatataatatatttttatgcaaaaaatatattttgtttaaattttattttattttttaaagtaaaaaaaaagcatttgtggtacaactataaatatatatttattattaaagaagttacaaattaattaaactttaaataaatatgtatatgaaattaatatgatatatttttatgctgaatatattttatttaaatttaattttgtctttgtttgatttttttaattaaatttttattaacaacaatcagagtaaaagatgaaaaattcttaatccaagttaatagaccatctaccctaattcattgctagttcatgagcatggatatgatgtaggaatgctttaatcttaaattagaaagtaaactagcaaaaatatctaataaaaaacctagctcattacaaaagaaaaagcgtttagaaaaaacaagaaccaaaactaaacaattgtactccacaaaataaagataaaaatgtgtgagaccaatccaaaactaccaataatgctaataattttgcttgaatgactttaatgtaacaactttaatgaattactgcaatctagaactatcaacaatttcattgtatccacttgaatgattttgaattaaaaaacatacaataccaaaacatgaaaaaaaaaaaaaaagaatatgctgatacgtgaacaccgtcagttaaaagaaaattataattaattcaagggaaatttattattattattaggaaaatcactctatatactatttttttttaatatttttttctttctatttttacaattttttttttgtttttttgtttttgtttttgtttttttatttttaagatttaagttgttccgttagttgcgatctgggctgctgtatgggctgcgatgtggattgcagtttgaattgggttgtgatttaggttgttccgttagttccgccgtaagttgcactgttctgtaaaaataaaaaaaaatactttgaaatgtatgaatgaaaaacctcttattattaattggaaattttacaaaaatattttttttttgttatttttactgccacaatctttttttttaatatttttattgtaccaagtttttaaaaatactgtgtaaaagtttcaaaattacaaaactacttaaaataaaaaataaaaaaaactcagaacaacttaacaaacaacataaaaatagctataaaacaacaaaaagataactacaaatcaatcataaaaaaaaaaaaaaaataacaaaacatacctaattgcaatgtgcaaaataatatcaactcctcaatatgtttttgtattaatttttttacttagttttgacaacttgatttatctttttgtactactacattattttctctatgaatttgttattacaacttcataatttaatcgattttattttttgagttattaaaatgataatttattttttaaaacttaaataaataattaagaaaataaaatctcataattttaaaatagaatatataatataatggataataataacttcaacatgaagagaatagttgcaatcttcaaggccttcgaattgctcgtggtgctcctatggtctctcatttattcttcgcaaatgacagccttgtcatttgtcaagcaaataaaaaatcagccatggcaatcaagcgctctttgaactactactgccgtgcatcaggccaatgcctgaatgcagagaagtcggtcctctcattctctcctaatacattaccagccattcaatccaacttgcagaaaattttacaaatggccattcagccttgtcatgaaagatacttgggtctaccttcttattcagccagaaggttttacttggtgaaatcaaggaaaagctatagaatctcctctcagcttggcaagaacaattattttccattggtggcaaggaagtgttactcaaggcagttgctcaatctataccaacctatgccatgagttgtttt

SEQ ID NO: 40746 - DNA, 2270 bp, Cannabis sativa
tgtccgggccatatcagaccaagcaggttaagggtctactagtgttgaatttttgaaactctattttgccgcttaggccgggtaactgaaagaggcttgtaataaaggcacaatatatgataagcaacataaatcctttcaaattgtaaaggtaaaaattaaagaaaatagatgttttccaatacaatggagatatgcaaagcaatgtggtgatgcaagcacacacagatgattcatggctttggcatagaaggttcggtcactttaactttcacgggctaaagatccttaagcagaagaatatgatgcgagacctcctaacaattaaggagatcaacacagtttgcgaaggatgcatgctcaggaaacaacatcgacaacctttcccatccgacaaaacttggagagccaaaaatccactggagctagtccatactgacgtctgcggggcaatgcgcactccatcaaatgaccaaaataggtacttcattctcttcattgatgactttactagaatgacatgggtttatttaagtcaacaaaatttgcaagtcttcgatattttcaaaaaattcaaattccgtgtcgaaaacaaagcggtcactacatcaagacaattagaagtgatagaggcaaagaatacacttctaatgaattcaacaatttttgtgaagacgaagggatggagcaccaactcactatcagatacgcaccagaacaaaacaacgtatctaaaaggaaaaacatgactgttatggaggcagcaagagccatgctactagagaaaggtctccagaaacgattttgggcagaggcggtaagcaccgcagtctacttgctcaaccgatgtccaataaaagtcgtgcaaaataagacgcagatcgaagcttggagcagacgtaagccatcagcaaagcatctcaaagtcttcggctacatatgctaaggtcacattccaaaaagagaaaagaggcaagcttgatgagaagactaagaaaggaatcttcttaggctgtagtactcaatcaaaagattatcgagtctatagcttagaaacaaacaagctaataattagccgagacataaaatttgacgaagatgttgcatacaactgagagacacaagaggttgaaagaatggaactcaatattcctctaccgccaagaccagaaattgatcaaaataaagttcttactcaaccaacaacataagaaccagtaaaagctattgagtccctgccagactcaccagtaaggcgaataagaccactatcagaaatctacgagacatgcaacttagtacttatggagccagagagtttttaatcaactcaacaacaagaagtatggagacaagccatgaatgaagagataaagatgattgaaaagaatgagacttgggagcttgtagatcgtccataagacaaagatactataggaggcaagtgggtctacaagacaaggctgaagcagatggctctatccaaaagtacaaaggaaggttagttgtgaaaggatactcccaacaatatggagttgactacagcaaaatatttgctcctgttgcacgcctcgatactattagggttttaatagctctagctgcacagaagaaatggaagatttttcaactcgatgtgaagtcggcattcctaaatggttatcttgaagaagaaatatacatggaacaaactcaagggttcgtggtacaaggacaggaagataaagttttcatgttgaaaaaagccttgtatggcttaaagcaagctccgcgagccaggtacagtagaatcgataactacttcactcaataaggatttaggaggagcaagagtgagccaactctttacatcaagactcaaggtacaagtgacactcttattgtctctttatacattgatgatctcatctacacaagaaataatgagggtatgataaagaaatttaaagaagacataatgaaaagttttaagatggccgacttgggcttaatgcactacttccttgggatcgaaataactcaaaaacaagataggatcttcatctcacaaaagaggtataccaagaaactattgaagaaatttaaaatggagggatgcaagattgtatcaactccattagacaacaacaaagctctcaagaaggaagatggctcaccgaaagctgatgaatcaaaattttgacatctaattggcagcctactatatctaactgctacaagaccagacataatgtatgcagttagtctcctatcaagattcatgcatgatc

SEQ ID NO: 40747 - DNA, 2026 bp, Cannabis sativa
tgttgccattgtttttggttccacaaacatcatttcgtgcccccaaaatctggtataccaaagcagccaacatagttaacatcatgcttttccttgttgctgaaatcccttttagcttgctgatatgttgcagcagtttctgcaactctgttgctttcgtcctccattgcagcctcctcttccattctgcaagacatctgctgctatattaacactgaaaaaataggtgatgtaccgattcattacccttctcacagagcaaacaagttagatccacttttgtatcatacttgcttattctgtctttagtcttcaatctatcccacaagactagccataagatgaacttgtgtttgggaatgacaagtctatcccacacatgtttgcaccaatctttcttctctggcttgctaaacaacaatagatgggtttttgatatgctgaatttctgcataacaaaggcagccctatcaatcttagccttcacctaattcttgactccaaccaattttttccaaaaccagctgcaatcggcagggacttcatagtcccacaagcacctatctttcaagtatacattatgtatcaatttgacaaacaaacaatctttcttgctagctatgtcccaatacatatctagtcatagctgttgtattccatttctgaatatctctaagtccaagtccaccagcactcttggggagacacacatgctcccaagccactaaaccaggacccatcgacatttgagttcccttccataagtaagatctacatattgcctcaatatccttgagcaacttcttgggtagtatcataatctgagcccagtatgtatgtatagctatgagtacagcattaatcaaagttactcttcccatataggacaaatttctagaactccaccctctgattttactaacgatcttctctaacaagatctgacattcagaaatagaaattttctttgagcaaataggtattctgaggtacctgaatggtagggagcttcttttgaattgtgaggcttcaaggattcttccaacttcagcctctgccatgcttgaacaatagatcaccgtcttcttctcattcggcattaaacacgaagttgaagagaagagtttcatccctcttaacatcaacatgattgagataaaatctccatgactaaacaccaatagatcgtcagcaaagcacatgtgattcagtttcaatgatgagcatctttcatgaaatttaaagccaggcatttcaccaatctttcaaagaattcgagataagtattccatccctaatacaaagaggaggggagacatataggatctccttgccttcaccctctttttgcattaaaaaatccacacatagagccattaaaaaggagagagaattttggggtctttatacagatcattacaagctcaatgaactgaatcggaagcaagcatttcttctaggaaaccccattcaatagtgtcataggccttcctcaaatctattttaatcatgcaacttggcttacaatttttcctcccatatagcctcaccatatcctgacacaccagaatattatgggcaatataccttccatggacaaagcacccttgatttttagcaataagatctggcaacaccttcctcaatctattgcagataatcttggtagctgtcttgtagagcacgttgcaataagagatttggtctgaaatctggccaacaattctttggacaagcaattttgggaattagagtaatggtggtggtgttaatctctttcgagatcttcccagtagtgagaaaggaaaagatagcttctgtaatttcagttcccactatgtcccagttctcctgataaaaggcacttccaaatccgtcttgtcccggagccttgataccaggaattgaaaagaatgcatctttcacttcttgattcgtatagtctggccgtaaaatagctttatgcatatccgtgatcttggggcctagattaaccaaagattgcatgacactccttctattctgc

SEQ ID NO: 40748 - DNA, 1211 bp, Cannabis sativa
tgttatttgattcctcaatctccacttcatctgtttgcttcaggattttaatacatgaaagaaataacattcaacttttggaacaatgaataaaaaaaaactcttttgggtagcacgaacaaattttataaaaaaataagctacattttagcaataaattaccaatttaaatggatatgctcttgtataggattacgttattctaatcaattatttatttatttattaattagaaaaattaaaatatttttaaaaacattttcagtaaattcatttccttttttgttttcttaatttaaaatattgggctcctctctcgtctttttttccgatttctttttctctcactttgattttttatagtaaggttttacactctctcttcaatttcaaatatgagaattaagaattgagataacaaattggttcttacagagaaattttttctgggtaagattttatttttaaaaatatttggatatgtatgggtgtattatgatgatctcttttgttagaaggccattgaaattgtttttagtattatggcctcttttgttaaattttttataattttaacggatttaaattttctttgatgggttgtgtttgatttttcttaatttagggttctcaactaagtttgagggattcaattatgtgttggcacaattacatattaatatgatgttttataccatttctttgtgtaacgaatattatttcttaataacaaattttgattttcttgatagagaaaattttttgtttaagaatacatttggatgaagtaaattatgttttaattgagattttataattagatagagttacattagaaaaaaaaaataattaaaacactaaaaaatataaatgtaacaataataataataataataaataatcataaatactacatcataataaaattatttttaagtaaatataatatttatgtatgcattacaatttacaataaaattattaattgtatacctatatattttataaaaatataattatttttatatagagatataattattttatactttttttataaaaatataattattttaaaaattatttttatttataactttcttaaatttacctaaatttaaatttgattttttatgataaattgaaaattattttgaatagagtattctaatatatgttctataatattctataagacagaagttttgtat

SEQ ID NO: 40749 - DNA, 2157 bp, Cannabis sativa
gacaacacaaggcgggccagcttgctccctccaagtacctgatcggctaggactagacctgggaggatcttgtgcacagttttacacatggactgcgagttgggctacgaactggtccttaacagcctaataaagtagctgaaaaatatctatgtttaagagaattttagtcttttgtatttaagaaatataatatgtaaatatttacttattttattggtaaattagggtttaagctctcctatataaagagctttaatacaactctagtaaacctaagttctaagtgataagtctcattcaagtcgtcaagctctaattctgataatactctctttctctctctaccattcacatgcccactatagcatctctcaaaacttgaaatttgccttcttttgattcctactttgtaaccttcagagagttatatcagatctcacatatagtgatctgaatagtattatctcttggtatcaatacaactaaaaggggagtaggtcattacctaccaactaagggggctaaacctctataaaagtctttgtgttccttactttcaagttctaattgtgtaacacgtggcaaacatcagattcatacgatcccgctatcggttggccactttttgaggtcaacactctttaacaccacttgtccgggggccagaggcgagggaatcgacctcctccataatagtatctaatgtagttttcttgcttgtattcttttgggtattcaccatggtcgaagtgatgcaacaactaccaaacttttcttagctctcaatgaaagcactaaaatatttactgagattttcggaaattaattaattagagcttaagaaaaatataaaaaataaattatagacaaataattttttacgtgggtcgggcgttgacaatccctagtccgcgactgttgtattggccttactagccaatgttaagtgttacaaatgtttatagaatgaatatgaactctgtattgctctcgttcctcttgaagaagaagaagcttataggagttttggtagaggttctgcaagtaagaataattcaccctttgtatataaaaaatgagggtatttataggcatacatgtgggtaagggcataccttttacccacctagggtttcatactctagaccctgcaagggttggtactacaacaggacgatctggccattagttggtaagaagcttctccatcgtgtggcgtacagttgtagtgaaggattttatgcaaaccaggacacgtgtctctcaaaggtttctcctttgcaaaactctctaaacaggccgttgggcaaaaggcatgtccagaggtgcgtacgcgcactaccatggcctgacatgggggacaagacctgatcttgtgtcagaaaaatgtgtaaccgtctataggtcgatttccatatgaagctgacctggccattcgccttgaggtagcagttaagatccaggatcggtccgtggatgtcttcactcgtaagctacttactctaattgtgctctaggacttcttggagctggggatgattatggctctattgtgttctggagatgcttcttgtgttgtggatggctctccccatcagctatccattaaactcctcccggattaccaagatgcctctacgaggaactttgggagttatctctgctaatccaaaaagttagtaaatctttttctctaatcatgccacgtgcatcaaccttgaaaacatggataacaagcactttactacatatataaagtttagaagatagtgagacttagttaactaactgtcatagcctatatatagaccttaacatactaagctcaaaactaagacagtacctagacaagacctaaaccctaaactaagacagtatctagatgaatctaagtctagactagtctaaactgtcttttgtataagcaatccaagtatttagagtgaattgagagttgtaagcagaatacatgtgtatttgatcatgtgattcttattgtgaggtttgattgtaattggtgtttaacatcatagtattcaagagtgtgttgtaatttcaaattgtattagtgttgattcaactcaataagagttcattcatttttataagtctcgagctaagggtttgtttttctttttcaagtctcataacagt

SEQ ID NO: 40750 - DNA, 1217 bp, Cannabis sativa
gtgtttctaggtactaaaactaaaaaacctttaccaaagcaaaattaatacctttctttacacgccatgtgtgatatttggcacaatttttgttcacatgtacaagttggctacaaaagaaacaattcttataatcatgtgttgtttcttttgaactggacccttagcagcttcattctcaaatttctttttcttgcccttatccttaggggtagtggctaagtgagcacttttagttttgttatttttaatctttatttctcttgcacacaatgaaaaatgggctcattaagagtcaatttctccttttaacacttgtaactaattttaaattggttaaactgtggaggaagcgttaacaaaatcatgagcataagcacatcatcagaaaactcaatcttaagtgtccttaatcttgagacaacatgatgcatttacataatatactaagaagtgttctcatttcaatcttattatttttagcaaaatgttcctcaatttgttaaaggaaattcttgaccatagtaaccctttcggattctgtgccccaaaaggcttctggaatgttgcatttcataatcattagactcgtaagatttgaacgatcccacctctcaaattttgtttaatcatctcgagttgagttctttccttagtgagaggtgcatgttgtccatcccttagtgcatggtctaaatccatacattctaaaactataaataagttctttttcaatccttaaaattagttccattaagcataggaagagaattattattagtatatattgaagtaaatagaagacgaactaactgaacatagaataaataaaataagctcagatttgttaacaccgaatttcattaaccaataaatgggccctcgcccccagactcagactcgaacttaggtatttgagagaaaatataaaaaagaatatattagacaaaaaaaaatatttttgaaaataaaaaaaatattttaatattttctaatttttagtgttttttttaaactgttttcagaaaatcatttttaaaaaatttggccaaccatcccctattttttagttttagaaatgtaaaatagggtttaagaaagagaagaataaattctcattaatcaagaatggaatcagttacagacaatatgagtgcacatgaaatagtagtttatgttgtttggttggactttagacaatttccctttttattttt

SEQ ID NO: 40751 - DNA, 1541 bp, Cannabis sativa
cttctcccttgggtatggttcgtttcattccccatatcgagatttgtgcgagctccttccctatgagcttgggaaggacattgacgattcctcacctatgacccatgtaccccaggttgtgtcccaagattttccttgtttctgcgaggaatctctagttccctagttcttagttgatcatttggcatcttgccttcaaggtatccccttgtttccccaagttttctttcttgagcgttctgagggttcctttgggctatctcctgtcccctggttcgcaagtctcgaggttcgcctcgcgattctctctctctaagatcaggttgattttgggtgctattcccttgtgccgccttggttgcagctacctcatgctctaactcaccattacgccagtttgcctcctccaatcgacgcctgagatggcagttttctagttcgacgattggtatgtactttgttggatcataggcgccatcctcatcaactagattaggaggagacctgccattgtttgttctaggccttttaggcccggttcccaaattctgggttttccttgaacttgtggtccgttcaaatgataagtcgaaagatctctggggactcattggctcttttctaggacgatgagtggtttcttttgaggattattttctttgttgtcaaccataaagaggattattattttttttatgtaaggagggttttttctgagctttttcacgaaggctctcaatgagagcaccaaactgttaacgcagatttttgttaaccagatatgagcctaaccggtgataaaattgcacagaaaaataaaaacagtaaagaaaaaagtatgaacacaaaggttttttatgtggttttgcaattaaaattctacatagtccacgagtcaatctaattagatttttgatatagttctaggagagcagttaattacaaagttgaataatatttttcaaccatcatcccctgaagatgggggattcgattacatcccacgtaaaacaaatgcggttaatatttgaatatcacacagctgtgattagtccgcttttaccgagttaatgtaaatgtgtattaaatatgctgcaactcatattgttcttggacgtcttgtcgggaacatagcaacaataactttggaagcgagctagagcttttcccacatctttccgagattgataatgttcatctcgtcgcttctgcgctgaagaaataacgctccatctgacaatcacagttctttgtgacgaggtgaacttcaacagtcaacattattttaatgtcaacttctatatgatggaactggctcgacggagctgtgaatctcaatgaaagatgtctagagttgattagtaaaggtactgcgagcatgccttcctatgacgagatggatacctcgctattagttgtatgtgcttatacgactatcttaccgtgtattatacattaagtggctcattagtcgttatatttcgtcaataatgcgtaatgaggttaatgcctcgtcttgtacacttgaagttacatggttt

SEQ ID NO: 40752 - DNA, 1604 bp, Cannabis sativa
tcctctaaagcctcatagtcattgttggtgattgcttcttgttgcggcctaatgacagactttgcaccttttctcttaggagtcacccattgctcatttctggtgtgtatagtagcattttccacgacccctgtaccctcagaagtgattccccgttccactttactatacccaccaagtttagcaacattactggcatgtatttcactcttttcagattccgtagcaccactcactttctcagttgaaatccccttactttcaacatcatgttcaacagcagttagcttatccccttgctgttttttcttccacacaataggcttccctttgttacagtttgaaattgagtgtccaagcatatcgcaggccgtacacttggttggaagctactcatttacataagcaatagttctcggaggttcttccttaatctcaacatccaccaacaccctagcatacttgatcatagaccgctcaagagtgaccttgtcagccatactcggctttcctatagtgctaacaagcgcactcaaattcttcttcccccaatattgaagccccaagccatttaacctcacccacacagggatcgatttgaccattcgggttgtgtccatatcctccgaccaaggccttagaatcacaggtttcctatcgaattgaattactccggtttcaagaataatgttcctagtaacctcatccttgaaactaacaagagtgaaccctgagtgcattctcactatcctttccactcccaaattcccccatattctcttgataaatccttcaaacactctaaaaggaggattttcccctaaaacgatacatataaccgaagatctccagtatgatgcttctaacttagcttcatccaaatctaaatttgcaaccacatgatccccaattttagatggttcagtaaaagtaagttgggaggaaggggttttcacctgattcagattgaatttactccaagtaaattgtgcagatgcctgaaagtccatcgcctctacatcgtccgcccaagttgtcgatttaggagtcgactttaccccttctgcaactacttccttctccggttccagttcatcacacgagtctaagaaaaatctccgtagcttcatcttggatggagggcagctcagggctcgctctcgtgccattgatgctggcagcactaggcttcgaggcacctttcctcttcttcaccatgggaagagcagcacagcatcacacgcctttttatatttggtaaagatattgaatactcgaataacttttaaaaaattgttatattggttttgctctaaaaaaatgtgacaacccagactaaaccaatttgtgaacaccactatcaaatttagtatgctacggatattgcaatacatcaataacactttggtacataatatgaccattcaaaggttctatatttgtttttgacgttggtttccctaaaattgttgaagttgggaaatgtttgatgttcgacatatccaatttctgcagtaagtcagtaacatatgtagtttgtgtcaagtacaaactagtaatgtcttgacagacctcaatatcaaggaaaaatgtagggttgtggt

SEQ ID NO: 40753 - DNA, 2299 bp, Cannabis sativa
aaagtgtaactgtataattagtaactctttactggcagaaaatgagctgactttgtgaaacggtctactatgacccatacagaattatacattctcgtggttctaaataaaccagccacgaagtccattacaatatcctcccacttccatttaggaagggctaatggttgcaataaccctgtcggtctctgatgttcagctttgatttgctagcaggttaaacagttagatacgtactctaccacatctcttttcatcccataccaccaaaaataaggttttcgattctgatacattttggtggttcccagatgcaacgaataaggtgtattgtgggcttcatcaaagatttccttcttaagctcaccatttccaggaacataaactcgagctttatatagtaacattatgttattcaagattgaaaagtccttaggtcaaccggccaatacctcatctcgaattttgactagctcaggatcttccaactgcacccttcagattctttctaacaaatctgattgaagtgtcaggttgtgtaactttccaactacaaactcaatttcagccttaaccatttctgaagctagttgaggagctatcatcacggtgttgaaaactttcctaagacttcttctacttaaagcatttgccacaacattagctttcccggggtgatacagaatctcacaattgtaatctttaaccaatttcagccaccgtctttgcctcatttttaaatccttttgagtgaagaagtacttgaggctcttatgatcagtataaaactcgtatttttcaccataaaggtagtgtcgccatatttttagagcaaacactacagcggtaaactctaaattatgcgttcgacagtgttgctcataatccttcaattgacgggaggcatatgctataactctgtcagcttgcatcacatcacatcccagaccatgtctggatgcatcacagtaaacaacaaatttttcccgatctgatggcaaagctagaactggtgctgttataaatcgatgtttcaactcctgaaaacttgcctcatacttatctgaccatacgaaccgttgattcttcttagttaactcggttaatagcgtagaaatcttagagaatccttcgacaaaacgtcgataataccctgctaaaccgagaaaacttcttacttccgtcacagattttggcctcggccaatttttcactaattcaatctttcctgagtcaaccatgattccatcttttccgataatatgccctagaaaagacacctctgacaaccagaattcacactttttgaattttgcatacaacttatgatccctgagtcgatgtaacaccaattggagatgttgttcatactcatcttcagtctgagagtacacaaggatgtcgtcgataaacactatcacacagttatcgagtaaatccttaaatactctgttcatgagatccataaaatctgctcgaacatttgtcaatccgaatgacattaccaaaaactcatagtacccatatcttgttcgaaacgcagtctttggtatatctttcgaattttgagctgatgataaccgaatcgtaggtcaatctttgaaaacacagtctttccctgaagctgatcaaacaaatcatcaattctaggcaacagatacttgttcttaatgtcaacttgtttaatttccgatagtcaatacacattttgagggaaccatccttctttttcacaaatcgaaccgaagctccccaaggcaatatactgggccaaataaaccctaaatcaagcatcccttaaagttgtattttagctccttgagttctgctggagccattctatatggtgctttcaaaataggttctacttcaggtgccaactcaatcataaaatctatttcccgttgtggcggtattccagggaactcctcgagaaattcttttacaaccctgactacctcaggcccaaatgtttcaagtttgctgaagtcaattacaactgctaaaaatcctacacatccactgtgtagtaaatctctagccctcaagattgaaataatcgagattcgagacccctgaataaatctaacatagacgaatggatctttgcccttcagctaaaaagtttccattttctacttacaatcaatgctggtcgaatacttggacatgaaatccatcccaagtattgttgggctttgtacctaaataaaactctatttcaatgtaatctttgtcattcaattatcaataaagatacaaaaatattttcatcacttatttagtatgtcatttggtt

SEQ ID NO: 40754 - DNA, 1843 bp, Cannabis sativa
tcatcctcctcgaaaccaaccacttctcacatatattgcatgcattcgctccaaaacccttacaagattcatcctcctccaccgttgttctgctcgtcttcatcctcatcaaaattttctttcaaaagctttagattacgtttcacttgacgatgcttgaaactttcttcgctttgcaagctttggatttattttgaaaacacgcacagatcaatatccacaaaccaaatcatgactaatagaaatttaaaaaacaaataagacaatgttgtgcttacctttatgctaccatgagagagcaaaggaaagggacagagtgagagagagtagaggagagggacaaccggcaagggtcatggtcgcaggagccaaaaaatgaaatgaaatttacaaataactttgaaaaatgagatatgatttttttttgggggttatatcttaaaaggagggaaatgaaatttaaagtaggaaaagtaaaaatttgaaacttaagatgcggaaaatgacatttcagatccaaaacgcgtaaaattgaagcatgagaattgcctacggtttaaaaccgtcggccattcccttttaaggcgcgtttaaaattgtcgcctataccttctgacagtttaaagtcgtcgggaacatcctatttttcctgacagttttaaacactgatcacttaattttttttagtaacggttccccaaaaaaagtgttttaaaaccgtcggcgataatcatttttgtagtagtgcgtctttggtttttaaagactttttctaacttttttatttaatatctgacatatttaattttcatgttttagcatttagatgctgcatttcatttgatgaggaggcgacaacatttttacccagaggtgcacccaaatagatgtgtcatcatgcctcacattttcccatcaggtgttattggtcagtggcaagctgcgggtgatgaccactctaactttcagtgtgatgatggcatattggatttgattcgacgggatgatgcccaatacttggacaattagaagaataaggatagtatatatatatagccctcttctttgatagtgaaaatcattggctgactttagaagcagaccttgatcattggatgttgagcatatttgactcgagccttggattgatttccctagatgaattgaagagtcacttgacattgtgagaacaattattcccaactttgattctacaatccagcctattcgagaatcatgaaatgattgtcatgcctcaactgaccgtctcagagagccaggttagaattatagttcaaaagtcatcgacgggaggattgtatgacagaagaatcaaggtaacttaattacaactgattttttattatttaacttgaatttgatttgcatacttttatttaattactttttattgtctcatgcaccgatgattacgggatgtatgtactagagtacatcgagcataaaatgctggatcttctgtttgatagtgggaacaatgagaatatgaagcaatttagagagcggtgatgtttagatttgttttaccaaaatttagcatgaacaaatatattttttttcttatatatttttatctatctacatatatgtatttattaagataacaatgtaactagtttttttttattggtatgattaggttctttaattagttcacaataattttaggccttcaagctatgccacaaattataataattatccaaaatcaaatacttcaaattttaaggtttaagaaagtccaacatgaattcaataacaatacatacactacaagaaaatgtatgagcttttgtttgtcggtataagggcttcgccggta

SEQ ID NO: 40755 - DNA, 1193 bp, Cannabis sativa
taaattaaatgggggttttgagttacaattaaatagcttaaaaagaaaataaataaggaatgacaattacgattttaaaagcagttaagaattattctccacctccaacaatcaatcaagaacaacaatgataaatattatattttaccgtagaatttaactattaaccccgcacataatcatttctcccagttttcctattacagttaattaccaagcctatataaaccccgcaaacccttcatacaagggggacgaaactctctaagatttactctaagctttcttcttcactaagaaaacctttgagagaaaactccataacaagaattaggattcttcaagattgtgaagctcacttgtaatacattcaaagccttaaaggcaaatactcatggattaggattcattaacactcaaaccacgtaaaaatcttcatctcatttacttaatcatttatagaatttattaaagctcttatttatccagttttcaaaaatctctataaacacttatggttgctttaaaaaaattgaatataggtaactaaatagttttcgaaatagatttataaatgacttaagagtatgtttaatgatagtgaattgctaaagagcattaataatacttaatatcatgaggtgacatatttaaaattaattaagttcaatatattttgataagaaaacttaccgtcaaatctccatatattttaattttatcactgatccttcttatattttctttgtgtgtcaaaactatcttaaatttatttctgtttgcaaatttaaaattttagttaaacttcactcttaaactcaaactaggactgccactatatacacgtatgtaccgtaatgtgtatctattgttatttttctaaattttaattattgcattattttatttacttttatccaacaattattattcatcaaataaaaccaaaaaaattaattaattgataattaataacaattctcgagaaaaatgatactttattattattatattacttgtttcgattgcattacgtatacttgtgtatcaaaatttatcgaacaactattgtctcagcaatcatttgcgagagagagagagagagggtttcatcgatctgggtttgattttattttgtaatatcttttgtaattatttttattgattttaattttgtaaacaatttttataaa

SEQ ID NO: 40756 - DNA, 1516 bp, Cannabis sativa
cttcgaacaacttacaccaaaactcaaattgttgttgcaggtggagaaaagtttaatttgagcaggttgtaccgaagcatgctgcaccaggatgtgtactcggttgctggtgcaatatggtgcaaaataaatgtgccaaaacatgctttccaactatagcaagctgctcaatccaaacttcttacaagagatatattgtgctgattgaacatacctatcccaaacaaaaattgtgtggtttgtgacattgaaactgagagccaccaccacatattttttagctgcatcttttcccaacaggtgctgtccttgctttttaaatggctggggtttgatggttggtcaatgaactttgatagctggactatttgattgggcaatacaagaccgaacattttggacagagtgacaatgcttatgttggcagccgcggtttaccacttatggagtaaccgaaacacttacttgttttctttttattctaactctatcgattgtacagtgaacaaagttaaaagtgatgtgaaatataagctcttgttgattaaagataggaaaggttctagagtggagaagaacttacttcaaagattgatatgtaattagtaggctttgtggttgttgcttctcctttgagaagtttagtttgtttgatttggcgaattgattaattttccttcttcttgataaaaaaaaacataataataaaatttagttatatatttttttattattcattattagtatattgtaacaaatataaataattatattaaatcattagatatatatcaatatttgatatatcatatcacttaaaattaatataccgtaataataaaattatataccacaaaaaaaattatagcaatactaagttaatcctcaaaaaatatatatcaagctaataacattatagatacaactattgaaatatatatatatatatatacataccaaaaaatttatacataatcattatatataataaaataaaaattaaatatcatcttaaataaatgatatactatacacaacaaaaagcataaatcatacagtaaaacatgtatacctacaataaaaaataaaataaaatattataatattgttaaaaaatattgtatatactatattaacaaaattatatacagccataaaataattataacatacttacaaaattatatattatctgtatatataatagaaaaaaaaataaacatgtatagtctaaaataaaatgatatactatacaataaaacttatatacaatataacaaaaaaaacatatatcttacaatagaaatatatataataacaacaaataaaaataaaaatacatagcatgctaataaaaaaatatatgttatgtcaacaaaataaggggtccggccctgagttgaaatgggtcataggcaaaaaaaatttgggcacttactaaaaagataaatgatatttttaaaaattattaaaaatatatgtataatttttaaaaagtttttatttggacccctac

SEQ ID NO: 40757 - DNA, 2186 bp, Cannabis sativa
  modified_base (203)..(221): a, c, t, g, unknown or other
  modified_base (1775)..(1785): a, c, t, g, unknown or other
attcccattcccatttccattccatagcccattcaaatttctatacccattcccattcccattctcattcctattcacattcccactcccattcccattccgtggcccattctgattcccattcccattccaattcccactcccattcccattcccattagcattgccattcccattccccgacccattcccattcccattcnnnnnnnnnnnnnnnnnnncattccctggcccattcccattcgtattcccattcccattcataatcacattcccattcccattcctatttgcattcacattctcattcccattctgtggcccattcccattcgtattcccattcccattcccattcccattcccattctcatttccattccccaagcccattcccattcccattgggattcccattcccattcctcgacccatttccattctcgttccctttcccattccccggcccattcccattcttattcctattctcaatccccattcccattcctcgacccatgcccattcccattccaatttctattcctattcccattcccattccccagcccattcccataacgattccccaaaccccaaaaccccaaatgacaaaactgcaaaaccctaaacccgaaaccctaaaacccaaatccaaaaccccaacccctaaaccgtaaaaccttaaaaccccatacatcaaaccctaaaccccaaaccctaatcccaaaaacagcaaacctaaaaatcctgaacacaaaaacaccataccccaaatcccaaaccccaaacgctaacccaaaaaccggaaaccctataacccaaacaccaaacccaagacttaaaacctcctaccccaaatacttggtccaagatcctaaactctagaccctagtcataaaaccccgaaccctaaacctcaaaccccaaaaccccaaaagccagagactctaaacagcaaaacccaaactgttaatcccaaaccccaaaaccttaaatcccaaacccaaaaacccaaagtcccaaactcaaaaccccaaacccaaacacctaatgtaaaaaagcttaatgccaaaccccaaacctaaaaacccaaaacgacaaaccccaaattctaaaccctaaaccctcgacccttgaacccaaaaccccaaattgtaaacccccaaaccccaataaaaaagttatagacaatggtcttggcttcgtccctatgagatttcactattttttaagatgtgtagggtgagattttgacagaacactaacgactgtaagagtaaggaaaaaatttgttgaaatttatcctaaataaaagaatatttcaatttttgaaaaaggagtcattttaacaaaatttaacttcaaaccaatcttcatattcacgtgttagtagtacgaattcattgtgattagtgggaaaaaatatttcaagacgggtctgagccacatttcacaagggggtacaactattagaaatgtaaaattttaactatttcaattagaatgattattactgcttgaaaactactttttctcttaatataactaacagaaaagtgatgcacaatggtcttggctttgcgtatgtgaaatttcatgatttttttagatgtgtagggtgatattttaagagaacactaatgagtgcaagagtaagagaaaactttaaaaagaaggatatattaattttttttaattaggtagatattttaaccaaatttaatgcaaatccaatttttatattcatgacttagtagtacgaattcattgtnnnnnnnnnnnaaaaatattccgagatgggtccaggccacatttcacaaacgagtaccattatcaaaaatgtgagattttcactattttgattaaaatgattgttagttcatgaaaactactttactctcaatgtgtcccattaaaagtgatgcacaacggttttggcttcatccttgtgaaatttcatgatttttcgagatgtgtagggtgagattttcacagaactttaacgagtgtaagagtaacgaaaaaacttgttaaaatttaccctgaaatgaagaatattttaaatttttaaatgagggggccattttaacaaaatttaaagctaatgcaattttcaaattcacctcttagaagtaagaattcattgtggctagtggagaaaaatatttcgagatggggtctgg

SEQ ID NO: 40758 - DNA, 1485 bp, Cannabis sativa
cttctagaataatttctccaccccagagtaaccaccgtctctgatattaagttctgagttggtgtagatataaggattataaataaacccctatcatctaacatataggtcacgtttagatattctttcttgattatctcccaatgttccttgttttattccatctttgatggctcccactcagcagtaggtatctggtttaatgcatacacgagtgtgcgtataacctcttactattggtacttagggacatcttattgtgccattttatcttaatttggaaacagtaagttccttctagactaagtcatcaacatagtattctagtattatccttaatgtaaaatacttgcttgagattaagtaatcactagagataccataaaatatttcataaggattaggaattgtgcttgagtctttcgaatagacattgcaaaattttctttcttatcctcataattctgataagttattactatccatatgaatggttagattaattttcctttgttcaattttaaagtttcttttgttgaacatatcatagcaggttgtcactagtatcatccatataataatgtgatggaaaatcctcccactaagataaggtattgtgattccatgtccaggggcttcagtggtatcaatttactattgtaacatatatattagaacagatacatgatcaagaataatttctactagtttgctagttcatttattatattatatctatgtctaattaaaatatgtgtgccatagagattttatggtgttttaaatataatctagagttcaatgtaaaagttgtttgaactacatatattaataacttcttccacccctatgtgctacagagattctgtgttgttttggatataatctagaaatcattgtaaaagatcttttaattgtatatatccataacttcttccacccctatcagatcacaagatcttttaatatttaaaatcttaataattgtttaagaatagacaatcattcataaacattaattttaaaatctaagtatttatgcggtattatctcgttacagagattaatataccatagattttgtataaataataaaaataaaaacacataaaagtatgataaacatataaatataattcggcagtggcatacaagttatagaatataaagatcaatttcataaaagaaactcataataaaattcttttaaagagaaaaaattatattaatactctcaaaaatataacaatgaattgtgtgcaataatataaaatagggaataaaattcccaaattaataattaaaactaaattttttgataaataaaataattaattcaaaaattaaagaaaagacgagcttcatctttaagttggacaatctccacacttctgtctaactatctatcttaactcgctaggataacaatccaagtctaagcagatggagctgaaataagaagactttagtaaactcctgggatct

SEQ ID NO: 40759 - DNA, 2671 bp, Cannabis sativa
aggctcttgagcagccaagtgagaatgcgaacaaggtagccaaagaaaagtttaagcgttggcagaatgctaacaacaaagctcgatactttatgatgtctatcatggttgacaccttgaagacaaggtttgctaatactctaacggtgacaagtatcatgaaccagttaaccgaactattcgggatggcgttagatcaagctcgatttgaggcaaccaagaattttatcgatgcacgaatgaaaccctatcagaacatgcgtgatcacctgctccaaatggcaagttacttctaggaagctaagaatcatcgagctaatatagatcaagaaactcaagtgagtttgatcttaaatagtttgacttcaccttttttgcccgccacctcaaattatatcatgaacaagttgacttttgacttccatgagttaatcagcaaccttcaaacatttgaaaattttattagaggtccacagaaagaagaaaataaagctcgtagttctggtactgctaatggtacggccaaggctgaggcaaacactgcctccacttcgaaacctagcaagaagaagaggtggaaaaatagcaagaagactcttcaagctattaacagaactaataataataaaaaggttgttgattcaaaggcaaagcaaaaagaaaagtgcttctactgcaacaaaaaaggccactagaaacgccagtgtcatatgtttttggtaaagaaacaaggtaattctgtctttgctataaactcatgtgtttgagagaattattatcctctttggttattaattcttgatctactaaccatgtttattttcttcttatttcagctccagctgcttgaacttggattgctatcctagcgagttgagtgagatggtaggacagaagggtggagattgtcccagtcgaagatgaagctcatctcttctttatttttaaattcattgttttagtttatgaacaatttagtttcaattatttgtttgggattttgttccctatttcatatttgtgcaggcaattcattatgacatttttgagatgattaataaaattttctctttaggtttccatcatgaattacttttatgaaattgagctttgtatttactttaacttgtatgccaataacaattatgtttatatgtttatcttgtttttatgtgttcgcgttttattattgatgcaaaatctatggtatattattctctggaaggagataataccacataaacacttagaatttaaattctatgtttatgaataattgttatttattaagaaattattaagattttgtttaataaaaacataggggtggaagaagttaagaaacaacgtatgcagtttaaagatcttttatatcttttgaactctagactatattcataacttcacatgatctctataacacttaggggttgaaaaagttattgatatatgtagttcaaattctttaactttgaactctagactatgctcaatacaccacaatatctttatagcacacatattttgaatagatatggatataatataatgaacaaattagcaaattaatagagcttattcttgatcgtgtaattgttccaattaacatgttattgtagtaatagaaattgataccaacgaagttcttggacatagtatcacagtaccttatctgagtgagagaattttaaaactctaggcccattattatttcgaagataccagtgatagccgactatgttatgatcatgataagaactttagaataaaactaagcaagttaatctaaccattcatatggataaaaatgacttatcagaataatgaggataagataagaaattttgttaagtatattcgaatgacttaggcaaaataccaaatccttatgaaatattttatggtatctaatatgattacttaatctaaagcaagtattttacattaaagtttacactagaatgctatgtggatgacttagtctagaaggaacttatagtttcagactaagataatatgtcacaataagaggtccctaagaaccaatagtaagaggttaagtgtacacttgtgtacgaatttaaccagactcctactgttgagtgagagccatctaagatgtaatcaaacaaggaacattaggagacaatctagaaagaattttgaaagtgacctatatgttagatgataagggtgtatgtgagaatctttttatctacaccaactcagaatattagagatggtggttactcttggggtggaggaagtattctagaaggatgtaaaaacccatctataataatttagttccattagtgaagctaaataacttagttgttttcgaaagaactagaaaagttattcaaactgaagaaagttcttaacttgttttatctctattccattttggatagaattagagatatatcttctctttattgaaatgcacttaataatactaaagatttcagtatccctaaaggagtaatgcatataggacatgatgttgcataatgttttatgagtagaaaggaagtaatggtgaagaaagcagtgacttaacacaatcttataattcctgtaatttgggtttagtcaaatacactacacttgatctagatatcaagataatagattgattaaaatgcacttcttattttatgttagtgca

SEQ ID NO: 40760 - DNA, 2891 bp, Cannabis sativa
  modified_base (1145)..(1152): a, c, t, g, unknown or other
tcacatcagtgtaaatccagtacattgatgaatcatgggacattatcttttgaagcatataatcacaattaccttccactgtcttgacgtcagtgtaattgtgaataactgtatgttctgcacttcatagaaattatatacattaaaccgtaaacataaaaactacatgtaaacataaatgatctctaatcttctattgataacaaattagattatattgaaatagattttaattagggtataaaatctcaacaaactcccacttgcatgaacataaaacaagtagtgcattttaatcaatctattgtcttaatgtccagatcaagtgtagtgtatctgactaaacccaaactacaagaactgtatggctgtggtaagcaactactttctccaccaatacctccttttgtgttcataaaatattatgcagcatcatattctatatgtattactcatctagggatactgaattctttactgctcattaagtccatatgaataaacagaagacatatctctaattctatccgtaatggaatagagataagtacagttaagaactttctttagttgaataactttccagtacttttcgaaaacaataaagttatttagcttcagttgtggaacttaaattattatagatgggtttttatactcttctagaataattcctccacccacatagtcaccaccatatcgaacaggttatgagttggtgtagataaaaggattctaatatacacccctatcatatagcatataggtcacttaaataaatctttcatgattgtctcctaatgttccttgttcgatttcatcttagatggctcccactcaacagtaggagtctggttaaattcgtacacaactgtacaattaacctcttactattggttcttaaggacctcttgttgtgacatattatcttaatctgaaactataagttccgtctagactaagtcatcaacataacattctagtattaacattaatgtaaaatactttcttaagattaagtaatcatattagagataccataaaaaatttccatgaggattaggtattttgcctaagtcattcgactggacttaaaaaaatttcctatcttatcctcattgttttgataagttatttctatccannnnnnnngttagatttactttctcagttttattctaaagttcctatcacgatcacaacatagcaagcaatcactagtgtcatccaaataatgatgggctaaaattttaaaattctctcactaagataaggtactgtgatactatttctaagaacttcattggtatcaatttctattactacagtaacatgttaattgggacacttataatatcaagaataagctctaatggtttgctagttcgtttattatattatattcatgtctattcaaaatatatgtgccatagagatactgtggtgtattgaatatagtctagacttcaaagttaaaagtgtttgaattacatatatcaataacttcttccacctctaagtgtcatagagatcctttggagttatgaatatagcttagagttcaaaagatataaaaaatctttgaactgcatatgttacttcttaacatcctccacccctatcagattaaaagatcttttaattaaacaaacttttaataattacttaagaaataacaattattcataaatatttaatttaaattctaattatttatgtggtattatctctttgtagagtagcataccatagatcatcaataataaaacacaaaaacacatacaaacatgataaaacatataaatacaataggtattagcatagaagttaaagtaaatatgaagctcaaatatgtcataaaagtaattcataatgaaaaattcttaaagagtaatttttttaatactctaaacaaatgtcatcaagaattgtctgcagaaatatgaaataaggaataaatctcaaattaataattgaaactaaattgttcataaactaaaacaattaatacaaaaataaagaagatgcaagcttcatcttcacttggacaatcttcacccttctgtccaaccatccgactcaactcgctaggatagcaatcaaagtttaagcagctggagttgaagtaagaagaaaataaacatgattagtagatctagaattaataacccaaggggatagtaattctctataacacatggaattataacaaagatagaaatatcttgtttctttgccaaaaacttaggacactggggtttccagtggccattttcgttgcaatagaagcactttcccttttgctttgcctttgaatcaacaacatttttaatcttattagctatgttaacagctttaagaggcttcttgctatttttccacttcttcttcttcttcttgcagggtttcgaagtagaggcaatgtttgcctcagccttggccgtaccattagcagtgccgaaactaggagctttgtttcctcctttctgtggacctccaatcaaattctcaaatgtctgaaggctgttgattaattcgtggaagtcaaaagtcaacttgttcatgacataatttgaggtgaaaggcagaaaagctagagtcaaactattcaagatcaaactcacttgagtttgctgatctataatagctctatgattattagcttcttggaaaaaactagctatctagagcaggtgatcacccacgttttgatgaggcttaatctgtgcattgataaaattcttgatcgcctcaaatcaagcttgatctgatgctatcctaaacagttcagtcatctggttcatgatttctgtagccgtgagagtattttcaaaccttgtcttcaaggtgtcaaccatgctagacatcataaagtatcgagctttgttgtt

SEQ ID NO: 40761 - DNA, 1384 bp, Cannabis sativa
aacaaaacagagggtccaattggtaacttttacaaaatacagggtccaaaatagtatttaccctaaagatattcaaatattaaaaactgccaaaattcatcgaacaaaaatcgagaaaatcgataaataaccatcaaacgaaaattgaacaaacaacaatcgaacctaatcgagcactaatagagctaattggaaacaaaaataataatttatttaccaagcaaccatctaaccaacattgaacaacattcgagaaaatgaagaaactattaatgaggtgtgtcgtacgccgtatcaaatttactatatttttttccgatacttttaattatttcagcataaaagtaagtacgagtcaaactcacgaggactatgtttatttaattatgcaaaaattaatgacaagagttagaaaaagttgttttgagattgagattaaaatagcagaaataaaaataaaataaacaaattaaaattgagtttatgataatagaaactagttaaaggttattcgtcaccctcaacaatcattcctaatttttttattaataaatgtaatttcggtttccaatcaaactattaatcccgcaatttgtcacaaacacttagaattctagactattaggtgaatagtaaccctaagatgacggtagattaaagtaaaacataatttagcggccgtctaaacaagattaaatcaataatcataacactgaacatagaagaatagaagcaatttgatataatagaaactagaaattagcattcaataatgaaactgagaattcatatttcgagttttgaaataacccttaactaaaagaaaactactcagaactagacattataaccaaaatcataatatttagtaaaagtacatggagaagaaaagaactagaatgaagaacacttcgaagtcgatcttcgtctcttccttcctctctctctgagtttctctctctaatttgtagctttagaaggattaaattcgtagcctaaaaggttctatttatagtgcttgaaaagatagatgaattcccttaaaattaggatttcttgaaaaaatgataaatcagcgctatagcgcaggaattgggcactatagcgcccattagatatttcccaaagaacccatgtgctgaaattatcttcttcttttttttgtgtttttttttttcaaatcggtgctatagcacccaagacaatttctattatgtacctgattagtattttggtcataacttcttcaatataactcaaaactagacgattcaagatattctagaaaacctaagaacgagatctaaaattttcatgttgagcatcaagtccagttctgcttctaaggttgctaaaatttgcaattaagttctatcttgtaaaa

SEQ ID NO: 40762 - DNA, 1311 bp, Cannabis sativa
  modified_base (1195)..(1200): a, c, t, g, unknown or other
gcacgtaacatctatctagtatgagtataggcatatatgccaaataaacttatgagcaaggaatttcatcatattcaaatatttgacaagtgcatataaagttatatatccaggtttactatacaaggcatgttacagttatgtactttgtatacaactagatttgatgtctcaactgaaaaaaatagactaattagtttgttattttatagacacacattgtgtttgaaacaaaaaatgaattgctgtttccaatatacacgaaaatagactaatgggtttctaggcgtatatcattatgtttgattatagtttactctgtattgaaaaaaataaaatattgttctcccaacaaaagataaataataggtttattaacatatataattgcaggctatatgaaatgaaataaattgttgttctaatatacaaaagaaaaataaaatttgttttaatatgcaaaaataaactaatatatgcttcttacataataaaatgatcacattaaaaagtagaatataatggtgtaactcatctcaaataccggtgtagtcaaaattattttttaaaactctagaagaaaaaaaaataaaaataatggatacactttatacaaaaagaactaaagaccaacaaaaaatatttaagctgagatgaattaagaaagaaaagaaatttactctcgtgttgtaataacttgaaagtgaaactcaatactttaatctacgttatatatagtaatatgtttttgaaattacgttatattttttaaagtgtgataactaacagtatttttgtaaattagatcataatttagtgtgcagatgtaattttcccataaattaagtgtgaaaaaaaaaattaaaatgttacttttaattttagtatttttctcaataacgatagaaaaaaaaatatgtacttctcatatgataaaatagtcttattaaaaaaaataggtaatgataatataaattttttaatttaaataattactagtgtgaataaaaaactttttaaattttatttttttttttttaaaaaaaaaagtagagagaaagtttttataatattaaaaatataattaatatttgtgtgtttcatatttaataaataaataaataaaaaaaaaagctagaaaacaaaaacaaaacaattagcccatttatattagggtttattttataaatatggnnnnnntgtaagtggtttagaaatatatggagaaataaagaaattttataaaaactggaaaaatgaataaaaaatttaaaatatggaaataactaattagtatatataatctctctc

SEQ ID NO: 40763 - DNA, 1227 bp, Cannabis sativa
atattcctgttaattaagtgcagcacaacaaaaactgtatagacattttatatattaggtaagatatagggtgattctcccttaaattatacatttagttacacttaactccacaaacacttaaatttgggattgtaaaaccctcttaacctcagttttattttgcccattacacctccatctaaaaacctcattaaagtgtcatagtggtgtacacgtggtaaatctttaacaattcacgtaatattaattatttaaaaggatattgacggtaatactacttaaattatatatttagttacacttaagcccacaaactggttttttggtgataaaaccctccaagcttaggttctgttttggtctttattatttcgtccatataaagttgttaaataccaaagtagactattgatatgtacaaaaatgtacacaaaagcatattctccttatttttgtgggttgtcaaggcctaattcattgcttaacttactgtctacggatgaaggttgcacaccaaaggtctgccaagtgcaggctggctggccacacagtgcttggaaattggccagcctatgctggccatagggctggccaagggtggccagcagcccctttagagcggtcggttcatcatttcgtcatccctcctaagttctcggatccctcgttggttgaagtattaagtagatggcttggcctccttgttggcgagctttactctcacgcaacattgatattggccacgtggacatgccacctcaagtgggtaaaaatcgagataatatttgccccctaagtccctatgcagacgtctgtacggatagggactttccaacttagttgggactgatgtagccttaaccgggtagatcttgtagtacatttagcctttgaaatattttctcttacttgtctgatcacattcattggcagcacattaataacattacacttttgcatgtttaatgttgcatgttgcatggaaagtgagagaaggtatcatagaagctatataagctcatggaaggaactcacttctcatttcccacatttcattctctctcttcaaaaggaaaacttggaaagctcttcacttcctcttgaggccaatgcccccttgtcttccatctcttgggattttcgcgccattttgatgatttaagctttccatcgtcttcctcaacggtctctatgctggaatatcttttaccaggacctagattt

SEQ ID NO: 40764 - DNA, 1291 bp, Cannabis sativa
ttatccatcatcacataccgatgttcctgatactttagccttctggatagggccctttcttgaggcaactcaccttttgttatgtatctgatgatagggtccatgcaacatgattcttgctcgattgcagcccccgtatctttgattctgatgctcagctccgcgaggtgttcaacaggtactacccccagtctccctatctcactgcccgatgccaacttggccaaacagtctgcgtgagtgttcttatctctgagaattctttccactttgtactatgtgaactcatgcaggaattctcagacaatagccatgtacgcgaccattttctctctgcatggttggtattctcttgagacttgattgacaaccagttgcgaatcgctgaagacttctactcttgcggcccctacagcttttgccaactttaatcctgcgattagggttcatattcgacttcgttattagaagctgggaatgcaaaatgtagggctacctggagccgaagtccatctggcgatatcattgctatcccagcaccgaatccgttttcgtttgatgctccatcaacgaataccttccatgccgcggttcgcggtaatggcacacttgaagtagctttcgcttcattacactctgttatgaagtctgctagggcgccattccttttatggagatgcacggtacatagtgtatgtcaaactggctcaattccatggcccatttgaggagtcttcttgacgctttcggcttctgtaagacttgtcgaagtgggtggttcgtgagtaccttaatggggtgagcctgaaagtagggtctcaacttttttgaagccatcaggaggcaaaaaactaacttctcgatcagaggatatcgtatctcagcccctatcacgcgcttgctaacgtaatacactggatgttggactttgtcctcttcccggacgagggctgcggtgacagcgttctcggagatagccaagtatagtaacaagtcttctccgtggactggctttgatagaattagcgatttagccatgtgttcttttagtttccttaatgccttctcgcattcttcagtccattcaaatttctgacatttctttaaaatgttgaaaaaaaggatgcacttattagttgatcgggaaatgaatcggcttaaggcaggaacctttctagtcaagctttgcacatctttgtgcttcttgggggaaggcatgttcaataaagcttgaattttttcggggtttgcctctattcccctttgtctgacgatgaatcccaaaaatttc

SEQ ID NO: 40765 - DNA, 2174 bp, Cannabis sativa
ttgcctttcgtgaaaggtcttaatgctgcctttcgtaaaaggtcttaatcccatttgtttccgagttgattttttatgatctatccttctttcattatttaaaggagaaagtacggcgatagctatagtgaagtttggagtttctagctcataattattatacatagaattttttgaggtacctcgcattccagcttcttgtcatctcggctccatccatggaggacagtctgtatgctcctttccccgtcgagcctaccacaccgtacggtccttcccaattggtggatagcttccccgctcgagcttcttcggtattctggaacactttcttagaactagttctcccgggaggaagttcctaggtctaacttttttattgtattgccttgctaccgcggaacagtagttttgcatcctggataaagtgcattcccttctttcttcgacatcgtctgctgcttgtagcctgaggaaagtgttgtcttcgttgcttagttcagttcgcaaagtaggcacttgcatttccattgggataactgcttccatcccgtataccagtgagaacgaggtttcaccggtgctggtgcgtggcgtggttcggttggctcataataccttaggcagttcttgggcccatcttcctttagcgtttttgagtcacttcttaatattatttatgatgactttatttgatgactctgcttgcccattgctttgcgtatagcatggtgttgagaatacgagtttaattttccattgttcacagaaattcctgaacttgtggctgatgaattgggaaccattatccgccacgatctcctgaggtagtccgaacctacatattatgttttttcagactaacccctctacttctctatcttttatttgagcgaatgagtcggattcgattcacgtgagggccagcatgaattttttctgggaagcactgttggcaggggacctactatatccatcccctatttcatgaatggccacgggctttggacggtggttcgctccattagggggctaggatggatgaggcatgtctctggcatttttcgcatttccgtgagtgattcgctgaatcttcttagaacgtcgggcaatagtacccctaccattgtactctctgggcggtcactcgtcccccggaatggcttccgcattctccttactggacctctattaagaccagctttccttcctgctttgttatgcattttaagtacgacctgtggtaggatcttctatatagctggttttggagtatagcataccttgaggccctcattacaatttttctcgcctgtttggggtccgacggtaatttgtcgtcctttaagtattcaacgattggctgcctctagtcttcggatgtttctgtcggaatttcggcgcacctaacttcttcttctgttgaaatgctagcttttggaataaagttgaatggtattgttcttgtgacgtggagggggaagaggatcctaggccggctagggggtcggtgtgcatatttgcttctcggggaatctgactaatctagaaatagtcgagagttgaaatgaacctttttacctcggtcaggtaactggccatttttagctctttggccttaaaatcccctttaacctgctgaactattagctgagagtctgactggaccaccaccctttcggctcccatctctttaaccagttttatcccatggatcaaggcctcatattcggcgtcgttgttggcggctcggaaaccctattttatggattgttccatcatttctccatcgggcgatagtagtactatccccactccgctcgccctgacattcgaggacccgtctacctttagcagccagtccctcccggtggattccttctcgcactggataggttctgaagttatctcgactacgaaatccgccaacgcttgtcccttaatagcagtctgaggtaggtattgtatgtcaaattcactcaactccaccgcccattcattagtctcccagatatctcgggtttgtgcaagacccgtttcagtggaaacgatgtcataaccgagatcgtatgacactagaagtacggccggagttttcttactgatattactaaggcccacgctaatttctcgataattgggtatctgccctctgctcctcagaaggttttact

SEQ ID NO: 40766 - DNA, 1523 bp, Cannabis sativa
attcttttactttcattatttttctcatactttttttaacactctttatctctcttacaaagaaattaagagcactcttcttatatttttctatcttttatataatgaataaaagtagtatatttttttttggatgttatgtagtttattcaaagttaatttttgaatgatttgtatattttaacaagattaatgtcttattatttttttgttaatttataacttctttttgtcattttatagttatttttatgttgttgtttaagtgtttttttgttgttctattgtttttatgtttttctttcggtatagatgttgtttagtttatgtacatttttaatcatgtatattttttagtttattctaaaaatatttttgttgtatagttgtgtatttgtttttctatttttatgttatttttagttatttttaagttgtttccataattttttttttgttgaacaattatttttttaatagttttttctattcatgtgtaatttttatggtgtatatttttaatctattcctaataatttttttttgttgtatgtttgttactttgtagatgtagatacatatatttcgtttatttttttgacacatttttttaaaatacaatgataagaattttcatttttttaattaacacaatgtgtagtagtagatattgacatattaattctattacccattatattatatcccattttaaaataataagattttattatttttattattaatgtatctatttatttaacttttaaaaaataaattatcattttaactatcactaactcaaaaagaaaaagagaaaaaaaaaaaagttgaaagaataaagttgtaacaataaattccattaaaataaataatgtaatagtacaaaaagataaatcaagttatcataactaagtaaaaaaaaattcgtaattccaaaaatatattgagaaattgatattgttttgcttattgtaattatgtcaatgttttgttatttttctgttgctttgtaattattttttgttattttatagttgtttttattttgtttgttaagttgttttatgtttttttagctgtcttaataatttttttttaagtttactgaaacacattacttttgtaattttgaaactttaacacagtatttttgtaaacttggtatagtaaaaatgtaaaaatttctgtgtcccaatatttttgtaaattttcccttattttatagtatttttgtaagttttctaaatttaaaagtaacttatactatacgtttctgttagaatttgaatcttacatatgttgggtacttaatataaattgtacttattggaagtacacagaaaagaaaagaaaagaaaagaaaaggaaaatttaacattttacccttaaaaaacacacaaggtttataattgtactaccatattataaattttttaactattcttttaattctttttcattccgaaatacccttcttctaaactaaaaaaaaactctcattcctctctctctctctctct

SEQ ID NO: 40767 - DNA, 1146 bp, Cannabis sativa
gggcatgtggggaatagaaaaaaaagtagatggcacgtggaaaatgtggggagaagtaggtgacaattttttaatgggcccttacacccgacggtttaaaaccgtcggactacacttagcccgatggttttaaaccgtcgggtataaggctctcctaaaaatttgcattttattaaaaaacattgcctattttgtttactacgattttaaaccgtcgggaatactaaatttttcctgacggttttaaatagttacttaatttttttagtgatgtccccgaaaaaaaatatttttagtaccgtcgtgaattctgatatttgtagtcgtgcatcgaacagatcttccaaatgaaagattaatgggcatctgaatatctatctctgtatcatagtaattaattaaggttttatttttaggatcatgtctaggattcgtatctggtgaataaggaagtaacttatcgaagaccctttaaatgatcatctaggatacattcggaagagtattcgaagaggcgtcccagaaaccttatccaggatgacatggcggccctttaacactaaatctcaccgaattaagggattgtcccctgtgtcaaaccctaagagtgcgcacacccccaaaaagaaacctcccttttgtctaacggccaccattctgacattatagtacacaaagagagcgcacgcatgccatttaaatgtcgtgtgatccccacgcgtgcagatcaccttcgccccacgggctaggctttagtcttatggacccaaacccattgttatttaagtgtatttactccattagtgggtcaagtttaatgcaaactctagcaggtcacgagtatactcatacccgtatatgattcttaagccatttcaagaatacttgtgtaatgcattcaactattcaaggctatttaatccaatacattcaaacactatagcaaaatatctattatcatttttctaatcttaaatttaaataaataaaatgataaaacaaattaaaaaaaaaaatatcatggttatctttattttaaaatatctaagtttaaatttaaatcttatcatttttattaaaatatctaataagataattttgaatgtcatatttaaaatttgaaaagtaatttcaaactttaatatt

SEQ ID NO: 40768 - DNA, 1314 bp, Cannabis sativa
  modified_base (554)..(575): a, c, t, g, unknown or other
gagatataatgacaatggagatacttagcgtataatgtacggtacacaaactaagtataacaaatgggtgaaccaaagcgagagatagcgagacgtccacctcgccgtaggagggcatgcatgcgaaaaagatcatctcgtcaccagaaattgcaattgtcagaattaaagtaaaagtattatcaaccttggaaagacatacgaagagatccatctcgccatcaagatcaactcgactctattcccagtgagggattccaatacgttaaggcttaccatatatctttaatacacattcattttggcccaataaaagcgggatactcacagctgtgtgaaattcaaataaaagccgtatttacttaacatgatatgtaatcagatcccatgatttgaggggataatcgttgtatagattacagtcaactttataattaactgcctactatgtgatcataaatagtggcaggtaagatcaaaaaggaggacaaaaaaattatatgaaaaaaggccctgagaaaactatcaaatatctaataagattgactcgtggnnnnnnnnnnnnnnnnnnnnnnaaaccacgtaaaaaatcctgtgtgcttatacttttatttttacagcttttattttttctgtgtgagattgtcactattaggctcaaatttggttaacgaaaatctacgttaacattttggtgctttcattgagagccttcgtgaaaaaagcttagaaaaaagcctcctaacataaaagtaatgaatgacaacaaagcagataattctcacgaaggaatcaatcatcgtcctggaaaagagccactgagtcctcaaggatctattgattcatcacctgaacaggctgctagctccgggaaaagccagtattggggtctcatgctcgaaggacctaggataaacaacggtccgtcttttcctaatcaggttgatgaggatggcgcctacgacccaaccaggtacatacctattgttaagttagaaaaccgccatcttaggcgccgattgaggaagcaaattggtgtaacgctgaactagagcgtgaaatagctgcagtcaaggcagcataggagaatagtttccaaaatcaacctgaccttagagaaagagatccacgaggcaaacctcgcaactcgcaaaccaaggggcaggagacaacccaaagatattcctagaactttcaggggaggcaacctcaggaaactgagggaagtctggggacacaacctgggacttgtggaacgtcagtcgtagatcgccagtgctcccaactttcttaacttgttcttcaccatatttt

SEQ ID NO: 40769 - DNA, 2229 bp, Cannabis sativa
atagtaaattgataatcaagagagtgtaatatatatattctaataatatcagaataaagtgtccaataccatatgtgttggacagtagaaacaacactacaacgaatcaaattattgggctgaataaatttaacaactccttacttactatatcgttctgaaaatacaatctattagaattctatatacacatttaccttaatcttgcaacataaaacacaaaggatatagagcttaaaattttcagaagcaacgaattcgaactctaaacacatacaatcaaaaaaaaaaaaaactattctatatctcatacaaaaacctaatcatgtaattacacacaaaacttattagtatataatgaatgctaacataaataagacaactttctgaaagaaaaaaatatacatgtgcatcatgattcatttgattaatatttcatggcttaacaaagttaaaaaggttatgtatactttccaactgtctcaatagaaaaaatcactgattcaaaatgatgagtaggaattcaagcatgaatgaaaattaatgagatagcagttcatttattcgatcatgtttaactatgttttcaagagcaaaaaaggattagaagcaaaaccatttaacaagccagtatattatccttaatttggccaattgaaatatctaatgaaggagacttgttgacgaactatgcaaagcaagtataataagcatgtgtacttatataaatatatattaatgtattataaaagtactctccttctctcccataacttagcataaggttagtattctaatattagattatgatttttcgcaaaaagattcaacatgatgatagagcaatgagaataatgctctctttctcattatcttttacaatttacagtcctctcattacttgacaagagtaataaagagttaatattctaataataataataataattcatatgtcgagcaaggggcacataaaatagggtgagagtagagtgctgctagtacttcattacacacgtaaacaaagcatatccataaatataacttgagagcctattcttcaattaattaccaatttccttgaacaaccaaactcagagaggccaaaaagaacaccaaaaagtctccaaaagttccatttcatagtattgcactttaaataaaaaggcaccttttaaaaaaataattatgcaatgtaaacctagttgaatatttccttaaataaaactaaaaatagtgtctcaataaacagaggtcactgtatatctcaccaatggctatagagcaacactatgtgggagtccatcacccattgccacataataaaatgcgatattaaggggatcccacaacataaattgagcactggtagcgctaatatattcctctcagcaatttggaagtggatgtaaaaactccaattaatttaataaaccatggttagaaaatatcgaaaaaagaaaaagatttttggttccgatttctggtagaatacacatataaaccaacacaacagattattcaatatcataatgaaacgtagggatttagaaattcaggctaagtttaccgtcaaagagagtagttgaacttttgagttcttatgttgtaaccttctcttgagatcttttacattatcttttgcctgcctgcacattcaaattgatagttttatagtttatcaagtaacacaatagacattcatacaaacacatataagtacatacataatcatatatatacacatatatttatgaaaaaggtaagcagctaaaaataaattgaaaaaaatcgtcttttttttttctcttccaattttaatttaaatacagtagaatttaagcaataacatgttgggtgaaaagagtgactagcagaatttaagagaaacccaccataaatctcttattaaaagcagtatattactattctcaaatgggtttcttaagccatgtttacacttttcacaacctaaaaaaattagtgaaagaaataaatgtttttcttaaaatttttgtgactattcttaaatttctatcaaacccacaatttggatatggaaaaagactaaaactttgcataagactcaaaaaagaaaccattaaaaaaaattaataaatcgatcacaaaaataaaattatgaagagatatatcatacgccaaaagaagaaacaaaaatcaaaggcaaacccacaacataatatttatgtattataaaagtactctcct

SEQ ID NO: 40770 - DNA, 2032 bp, Cannabis sativa
aggtaactagtatgattaaaatttcacctcagctagcaaatgacatggtcagatcaggaattgagttaattgtaggaaaacttcataattttacattgtaatctgatctgttggaacgaattaaagctcctcagttaaatgatctggaattagtgaagatttgagaagaggtttttattggtcaagctaaacattttacggtgtcagataatgggattctgttgtacacgactggggtttgtgttccaggtagtgcggaactagaaatgagattcttgaggaagctcataccactccatattaactgcattttggcactaccaagatgtaccaagatctaagaccccactattggtggtgccgaatgaagaaagatgtggtggaatttgtattccggtgcttaacttgtccacaaatcaaggctgaacatccaaaaccggctgacttattgcagccactgacacttctggagtggaagtgggaggttgtcactataaactttttgattgaattacctagaaccacgagaatgtacgattcaatttgggttgtagtagatcgatttacgaagtctacacattttctaccggtaaaaacaacctttacagtggatcagtatgtagagttatacatgaaagatatagtgaggttacatggtaatctaaagtctattatatcggatagagatccgaagttcaccttaaaattctgacagaatcttcaataagctatgggtaccaaactgaaatttagtacaactttccatcctcagattgatggacagttcaaaaggaaaattcagatactggaggatgtgttgcgaacttgtgtgatggatttcaaaggctcttggagcaagtacctgccactgatagaatttttcgtataacattagctatcagagtactatagggatggccctctacgggatgttgtatggcaggaagtgcagatctcctattcattgggatgaaatagattaaatgaaaatacctaggtccggaatcagtgcaatggactaatgaagccgtagagaagattaaagccagaatgcttgcctctcagagtaggcaaaagatttatgcagatccaaagtgcagaaatgtagaatcttaggtaggggatcatttgtttctacgggtgtctccgatggaggggatcagacatttcaaaagaaaaaaaaaagggcaagttatgccctaggtttacatggtctttcaagattctcaagaaggtcagacttgtagcatatcgtttggccttacctctagcgcttttagtagatcacaacgtgtttcaagttcttatattatggaaatacgtttcagatcctacttatgtgctaagttataagaaccttgaactacagtaagatttattgtacaaagaacaactagttcagatctttcatagataagataatgtctttcggaataagaccgtagctttaatcaaggtaatctagagaaatagtaaggtggaggaacccacctgagagttagagtccaacaagaggacttagtatccagagttgtttagattagattttgagaacgaaatccttttaacgggtggataattgtaaagaccgcttaattttaatatgggtattagcaaataattagggtttaattatgaaactagaatattaattatgatttgtcattttatggagattaattagattcagggtgtaacgccctaatctataggaacgtcatgtgtgtgattttataaactagtttaatactagtagaataattaattattaaaaattgtgataatttaaaaacttgactaaaataaaatactaaaaatggacattataacgacataaaaagtgtgttccgggaattcctgttataaaacgttttgctaaagaaatatatacgacaactatttaaacataagataaaaatacacaaataaaaagccagtccagaacaactcctgacaactcggcacgcaggccagtgaggtcaatatgtacattgctagagaagactgtcacctcatggttgatctagctttt

SEQ ID NO: 40771 - DNA, 1231 bp, Cannabis sativa
tttctttattgctttgctcaagtaatttctcaaaaccttaggtagagatagtattcgacaaacttttttttttaacgagagaacatttttattcaaagaaccagccaatacaaacagctgagacaaaactcaacacaacaacacaaacgctgctgcaacaaacagcagcaaccccaacaagaacaactaccaattattaataatactaagtaaatacatgttttttttttacaaactttataaggacccttgctcttaactctaatttgcacaactttcttgacatcttcacttaatctacaagcagtcgtacacatcgaagatgcattagtttctgttcttccaaatcaaatacaaggcagcagttacaacagcattcaagactcggctttggaaatcatgaggcatagtcttgaaccttaagagtaacccagcaatagagttgggccattgaatacaaccaagccatttacttatgtcctcaaaaacctatttagcattaacacaagtaaaaagcacatggtcatgagtttcaaactcaagtaaaaacctgtttagtattcgacaaacttgaatatactattttgtctaccttttctttgtgattttggattaaagtaggctccatttgatgctcaaagatttccccacccttctcaaattcttcattgtttttccaagtactttcttcatcatcttgccacacatttttcatattacttggaagtacaccttggggactattatgcaactcccaagataactcctcaacttgcttctctagattctttaaggatgtggcattgctatgaattaaggtatcatttttagccatatattcatttatcttatccatgtatgtgttcactttctccatgaatgcactcatcattgatatttgatctcttaataaatcattttcccatggtccttgagtgtcattatcaaaagtttgctccatgtgggtataggttttctcccaaacttggtgagttgttgaagaattccagcaacactcatcataccccgccatgtcctctaacatccaatagacttcatcaatagatagttggtagaaattggtggtaccatctcctccttatacccattctcttatgcttggatacaatccatttaggaagacttcaagtacacactctttagacaaaccatggttaagaaaccgtattagaaaatccttatatctctacaatgctttatgtaaagactc

SEQ ID NO: 40772 - DNA, 1875 bp, Cannabis sativa
  modified_base (1827)..(1850): a, c, t, g, unknown or other
cctgaagttaatggaaatgataagcgtctaaggttatttttgtttatgcttgtgaagaagccagatgaatttactcccttgtttgtgactttggtgaagaagaatgtttatgtcgatcctagtcccacaacaagtactaataaggatactcatagcaaggttgggaattttattcgagaaacaaatttataggttttggcgactgatgtgttacctgaattaaacactatgatgtcgacaactgacattgtaacacaaatgccatttcatgataattttggtgatggtccagaccttaaatggtatcttgaaagagataatgatgtaagagatgaccaagatacagaggtccctgctgatgtagctttgaacctgatgccactaacgtaccaaatacctaggcaaccaacatagagaaaaaggccccgttgagaagatcaccaaatacctggtactaatagtagttgtctagatggaaccagtaatgctagaggaaccacaaatgttagaggtcctagtgatgctagagggacgactgacggtaaaggtcctagtgatgctagagggaccaatgatactggatgtagcaatctattttcttctttgacaagttatggtaaattcaaggagaaaatttttataagagaagacattgaggataatagtcattatacatatatgggtgggatactaggtggggagtaacatctaggaaagtttttcagagataaagttcatttgaagatggttgttggcttgtatgcaatgaagaaatggtttaattacttcgttaggaagtttggtactgttgtttggtacattacatgtaaggatcagattgtgggtggagattaagagcgaagaagagcgtactttttaacatgtttgagatgactatatttcaaaatttatatacatgctcccttgatgttcaaggaaaagataatcgtcaagcttcacctttgataattgcccacctaattaaggataaattcacaactgatggctcagatcatttggcctctgatataaggaaagatatgcacaaggattttgggatctaaatgagatatgaaaagcttgaaggtgcagagagaaggccctacacctagttcgggtacacctgaagcttcatactcgaaattacctagttacttgcacatgctaaagttggaaaatccaggtaccatcacagattttgtgatagaggatggtcgcttcaagtattgtctcttctcgttgggtccttgtatgcgtggatttaggttttgctgacatgttgtatgtgttgatgggtttttcttgaagactaggtatggtgggtaaatgttgtgtgtagtggcactgaattcaggcaaccacgtttttccaatagctttcacgatagttgacagcaaaaaccataactcttggacctattttatgagaaacttgaaagaagctgttggtgatattaagaacttagcctttgtgtctgatagacatcaaatcattgttcatgctttgaagtcgtgttccttgatgcacaccacgatgttaccaccacattactatgaatgtcaaccataagttcaagactgacatattcacaaatttatttacacatgtgcctacacatattaaaaaaaagtttcatagagaatttgagaagattcgggcaatgaatgttgcagttgcattatatcttgaggaaatgggatttgagaaatgggttcagtcatactttttagggatacgttacaatgtaatgacgagtaactgggttgagagattcaacagcactgttgggttttataccctaaatcaaactcatttcaatataatcannnnnnnnnnnnnnnnnnnnnnnnaaataacatttaatgttgcatgatt

SEQ ID NO: 40773 - DNA, 2095 bp, Cannabis sativa
  modified_base (1992)..(1996): a, c, t, g, unknown or other
gaaggctcctgaagtaagtatctaccgttgatagagttttcatacaacaacagttattagagtgccatagggatggctctcaatgagatgttataaggtaggaagtgcagatctccaattcactgggataaaactggagaaaggaaatacttaggtccataatctttgcaacataccaatgaggctatagaaaagatcaaggccagagtgcttgcctctcaaagtaggaagaagagttatgcaaactcgaagcgtagaaatgtagaattctaggtaggagaccatgtattcctacgagtgtctccaatgaaggggatcaaacgtttcgggaaaaagggaaagttttatcctaggtttacagggcctttcaaaattttcgagaaggttggactggtagcatatcgtctagccttacctccaacactttcagcagttcacagcatatttcatgtctctatgttacggaaatacgtctcagatcccactcatgtgctgagttatgaaaacttagaacttaagacggacttttcatactaagagcaaactagttcagattttagacaggaaggataaagtcctttggaataaggccatagtttggtcaaggtgctcggaagaaatagtaaggtggaggaagccacctaggagttggagtttgacatgagggctccatatccagagttgttcaggttagatttcgaggacaaaatccttttaacgagggaataattgtaaagaccgcttaattttagcatgagaattagcagataataagggtttaatttggaatcagacttttagttatgatttatgaatttttagagatacatttgaattctaggtgtgtatttatattaaatatgaatttatgctttttcatatttttatgtctgataaccgtgaaacatgacgtttggccaatataattatattttcttatgatttagtattttagtaatagcggttaagctacatagacatcgagaatgtcgagattattcatggtattaggtctgaccaaaatacgcctaggtgactttatgctttttggtgtatgcagggaaaaaatggtcttttgccattttgctattattatcctttagtgaaatatgatggaattagttaattctaattattttgagttagggattatgctagaaaatactaggtattattcctctttattcaaaatagaaaaaaaatcaagaaaatcactttctctctccctttgaccctctctctcgaaccctcaagaaaaaccattagattttcgaagtttttcaactcaatttaggatcctctagtaggtctttagtgatttaatctaaggtaaaactctttagcctctctagttttgattttttaagcttcaagttagttttgtgcatgatatttgggaattagggttctgagtggttgagggtgtttgattttgtattctgaagttaaattgaatttattatgttgatttgagctaggtttgtgggctattatggtgtttgagcaaggtttgagtttaagaactcaagcttttctctgagcaaggtttgagttaaattgaatttatttatgtttttggtttttgggttgtttgttatgatttattgcttggtttcggtttattatgatataaataggtgttctggagcttattggaagatttgtggtagttttgattccaaaatggggagttttgtttttctgtagttaaaaacggcaggccgttttccgtttttcctattgcagaacctagagaaatagtctatcgtttttcaaaaacaccctttagtttttcaagcaggttccctatttcgatgttttctcatgtctccgcgatgcttaggactttatcttgcttgagatcaatagggaaacctttagttttgagtttaaagtttccagaaagtggtttagcgtaccacttatcaattttacaaaatttgtgatttagggtcctgtaaaccgttgagcagcagttccactcaggttgannnnnacacctgaatttggaatcaaggtaagattagtataattatattcgtatgtgattacatgtataatattcatatgtgattacattgaaatagtggtagca

SEQ ID NO: 40774 - DNA, 1398 bp, Cannabis sativa
tttctatacaacttgtgtatgaatttatttgaaccaagtaatttatttctgtttattgatgtttgtagtatcaaaatgttgtttaacaatcctcacctcaatgtcaattagtatatgcctttgcaaatgaactccaaagtgcgaagatgactcatggtcagagtatcacttcacacttgctcatgatgaacttgaaattccaaaaagcaactatactgggaattgtcttatcaagagagcaaaaagttcaatttgttctcaacagcttatcaccaaagtttaactaatttattgtaacttttatggttaacaattggaactcatccgacatagacaagctggaggctaaattgcatgcttatgaaaggacattgtcacttgcaaggaggtccgtctctagtaatgtagataatggcaaaaagaaagctgaagttattgagaatgattcctttgacagtcctactacctcacgctcagttaagaagaatagagaaagtaatttcacttccttagattatctttcacaatagattgagccaacaattagaacaatacaagaacatttaagcagacatattattcaatgttctcattatgaacagaagggacattttaaatcaaaatgtcccagacttttcaacactaagaacaatggtaatgctttagtttttgaaacatgtgattttggagaatgaaaaatccattttgattggttattctggatctactaaccatgtctattgttcattgcggctgcttgataattgggattctttaaaatccaaaacgttgaaacttaaagttggtaaaggcataatggtgtcagttagagctagaggaaaaagcaaaactcaagtttcaaaatagaactttaactttagaaaatgttttatttattccaaatttcagtagaaacttgatttttgtttcatgtttattgttgcaacaatataaactaaattttttgagctttaattctattatttctcgtattgatattcaaatttatgttgctactatagaacaagggctttatgttcttagacaagatgaaacatttgcgcttaataatgaactgtttgagatagctaaacctagaaaccacaaaatgcaaaagattgataatgaaggcgaaacatatctatggcacttacgtcttggtcatattgactatgatagacttcacaggttaaccaaaggtggtccattgaaaaatgtcaccttagggtaataacatgtttgtgaatctttcttagaaggaaaaatgacaaaatgttctttctctgcaaagggagagcgtgccaaagaaccactaggggtagtgcattcagaactttgtggaccactgaatgtcaaagctagaggtgattatgagtaatttgtcactttcattgacga

SEQ ID NO: 40775 - DNA, 1825 bp, Cannabis sativa
tagtgtaaatgtggttattatttggaaatcatatagctgtgatttccccgcttttactgggtcaaaacgatcgtgtatttaaacacgtctttaattgttgtacctggggatgtctcgacggaagtttggttccagtgatcataatagcaagcttgggccattttcccttccgaggtcgacgatgcacgtcttgctgcttcattgtgatgatcgcagttcttatttacaaagagttattcgaggctcgtttggatgttagtttcttacttatcaggattgtaagtctcactgagaaaatgtctgaagttaactgggtgaagttacaggaagtcttcccatagtgagataggcacctcgcttactaggtgtcgagccaacccgactgtcagacttagtttgtacattgtacactaagggctttcgtagtcgatatgtgtcactttcgtcttcctagatataacgtatttaagcctcattatttgcattcagcgacatatggtttctcgataatatactaagcaacactttgtatattttttcctcgcctaagattttacagtcagcaggttgcgaatatactctgatacttacgtaattaatgagttattccataaaaagcgagttattccataaaaagcaattgttattccataaaaagcaattgtattgatccatattccttttattttgacacgtgtcccccactgagatggtagctgaatttcgggtataacaattgcgccttaaaaggttattttttcaagaaaaagtaattttaataattatagagggtattttcgtcataatccctttttggaaagatgcgtcctttgattctagttgttgtacaatttcaagggtaattatgaattgtctcttcatattctgccctactcccactcgttagatttcccgatctttggccttcttgtcaactggactttgtgtataaaagagcagcttaagcttgccatatttcacaaacttctgcctcttttggtgagatccatctggagaatggattgtctctttctttctaaaatgtcccatctgagttcagaggttcacccccgcaccccaaaattcataacaccaggacgcaccaaccatttttcttctccatttgttcccgaggacttcaaacttcaattagaacaagaaatgatggattccaaggttaaggagcttccgaccaatccaaaccaagggaacctcgtcgatcgttataggtgatcctcacaggtgattcttgaggataagtattatcccttgtgaatggtggtttgagtcagatcatacatattattttttgttgctccattgacccttctcttttttttttatgtctctgcatgaatagacatagatcttatgagcgatcttagaggtcctccttaggctgacaaggaatcccagaggaaagttggcgaggtttcggatgaatccgggacggaagttggcgtggtttctatcagagaatccaaccaacccaagacccaaacctgcaccaaaagacctttgtgccaacttctctctggtttcgagtaatttgttgtggctggcaataaggtctcggctgcaggaaatgggatcttctgatgcggggaatgaggtctatgcagaggttgagaccttctacatgtagacggtctttctcaagccacgtgtagtcggtctttctccaagttatgtgtagacggtctttctctgagctatatgaagaaggtctttctcgagtttatcgaccctccccttaaattctttgtttaggaagatgacttaatcatttgccgatagtggcatttttgtaaagacaagttcataa

SEQ ID NO: 40776 - DNA, 2506 bp, Cannabis sativa
tcgtgatgacgccgatcaaactcttccaaggctattcgagcaccaccggagcctgtcactcgaccgcagtgacaggagaaagcaagatcgaaggcgttcagagcgaggttacttacacgctttgcaagggtgtgaagtcactgatgactacaatcgatgtcaaacaatcgcttgacatcaatgtcaaattgggatcaattaatgagaagctgaagtttctaatgaagttgaataccactgagacaactttggcaatcgttgtgcatgctcgaaaagtggaaggaagggaggctcagacaagcgctagactggcatcagatattgttgttccgataagtgacataagagacttctttttccatcatggtgacgcatatgtttcctccatcacaactggaggggaatatattgcagtgttgtcatttcacacagaaaccgaaagtgagagatacaatttggagttggagctgaagggcaatggattattcacattcggctcggtcaattttggtttgcaagcgaaagtgaatcgagttgttgagagttttaaaacaaagatttcattcaaccaaatgattttgggacatgaaaatagttatgagttgcccaaatttgaagagataattgagtttgcgcgcaagtttccgagcatgaaactctcagcacccaagattcttgcatttgaaacgaccgggtatgaacatgttgttggtgttgacaacagttttaaccccatcgcctcaaatcgaaataaattagtgggcatgggatttagagatcctggcttggcggggaaattctccaaagtatgccaactaatcgaccaaatcgaggaaatacaatctatctacgatttttatggtggatacaatgaccctaagcttaatgaggtcgcggtcctagcaaaacaagatttggtgacacttcagggaatattccacacttttcatagcaatccaaccaaagaattcgtcataccgccgctgccatccctttccatgggcacaccaaagatccaatacaagattgattactcacaagagtttggtacacaagacaaaaccgaatcaaagtctacatttgacttgtttacgagtgttgatgagtacatcaagaataagacgagaattgttggaattcagttgcgaaccctttcacgtctgagcaatatcaccgtagatttcgtgtctagcatgggaagacgcacagagatttatggcatagaggaaggggcttgtagtaggctggcgttggaagatcaagattttatcaagaaaattgtagtcaaatccaatcgcgatgttgatggcttaggtatctatctcgatctcaatagtaatagatggctttacgctaagggcgatgatgatagtgataacggaacagagcacacttttgagctttgcgatggtaagttcgtgttgggattcagggggtttcattcatccaaaaaatttgacatgatccaggtcatccatgcggcgttccagccggccaaatggcgaaatggttctactgacgtcgtgaatacatgaaaagcgcatcgaccatcttctgtctgtattggccatccaagtgtgtcatttaattatgtttgagtgttggttctgatgtaataattatggtcatattatcagttggttgtgtgggagcaagtacacaagtcatgcatataggcatgcatataataattagtttacgtcaatcatgatgtattgcctaaataaacttaagagacataatagaataagtcaagttgtgacaactataaatggaaaaaagaatgaaatgctacagattctatatattgtcaaataaaatgaaatgttggtacaaatattaagatatgctttttaccaactattagaaaatattgtttcactcattattaataatggttttgagattaattaaatactatgattctcgaagaatctattgatacatgatatatttgtactaacagattagtatacagatacttgcatattgtaaagatgaaatcatcaccttaatctaatttagttaatttattacatttttaatttttttttttttaaaaaagaaaaggcttttcaatatattaacctaccatcagggttagaaataaagtgatttgattaattagctaggcaaatataaatatatatataagacaagtggagtcatcttgaagatttatcttttgatggttaagtaacttttcacatataatgagttgaaagagagaaaaagcagcagcaacaaaatatcatgaaataaaaattgtaatcattaagatatttatctgagatgagagtttcagtttcgattaatgaagttaggctgctggcaaagcaaactacacaaatagtaaaaaaagggtttcaagaacgacattttatcattcctaaaagacccctttggcattctaacaagattatgccaagcttcttttattgaatcactccaagaaatttatgtaataaaacatttgaaaaaccgtgtttttgcaaatgtcagttgt

SEQ ID NO: 40777 - DNA, 1464 bp, Cannabis sativa
tctattgataaatttaaagctagattggttgcaaaaggttttactcaaaaagaaaatgttgattattttgacacttttgctcctgttgctagaattgcttcaattcgagttttaattgctttagcttctatccataaacttttgattcatcaaatggatgttaaaactgctttcttgaatggtgatttagaagaagaaatttatatggtacaacctgaaggatgtgttgtttatggtgaagagaataaagtgtgcaaattgttaaaatctctttatggcctaaaacaagctcctaaacaatggtatgagaagttggatcatgtgttaatatgtgatggattttcttctttagaggttgataaatgcatatatactaaagttgttgataacgagtgtgtaataattagcctttatgtggatgatatgcttatttttggtactaatattgacattatactttaataccaaagctttccttgcttctaaaatttgatatgaaagatatgggtgaagcaagtgtgatattgggtgtcaaaatcataaggaagggtgatagtataatgctatcacaagaacattacgttgagaaacttcttaagaagtttggacattttgatgtcacacctgtgagtaccccttatgatgctaatactcaattaaagaaaaacttgggagagcctattgctcaatctgaatatgcacaaattattgggagtttgatgcatttaatgaatttctctcgacctgacatagcttatgcagtatgcagattgagtagatatacacacaatcccaatcgtgatcattgggctgcaatagtcagactgatgaaatatttgagaggaaccatgaattatggtatcctgtatagtggatttcccgctgtattagaaggctacagtgatgctaactggatctcagattcagatgagataaaatccactagtggttacatattcactctaggtggaggtgcagtttcttggaaatcaaccaagcaaactattattgcaaaatccaccatggagtctgaatttgtagctctagagtcagctggaaatgaggctgagtggttgagaaacttcttagccaatattccattgggtataaaaccaacaccttctgtgtctttgcattgtgattgccaagcagctattgctattgcaaagaataaaaccttcaatggtaagaatagacatattcgtctaagacatgaagtgatcaagcagctgctaaaagatggatctatatccattgattatgtgaagtcagaagtgaatttggccgatcctctgactaaaccattgggtagaaaattaattaatgaaacatcgaggggaatgggacttaagcctatttaagatattagcagtgatagtaacccaaccttttctattggagatcccatgaataaggttcatatgggtaacaacaagttgcttgctaatactgctagcactaatt

SEQ ID NO: 40778 - DNA, 1641 bp, Cannabis sativa
taataacagtcataaccaactataattagctctccaaaatagtttatagctctcgcaaaactagacagaaaccaaaatacaactttgcatgctcaacttaacttgatgcttaaaattcaaaaagaaaagatagagcagcttaccttgagctgaatcttctaaacctatgaaatccctagctagaaatctttagttttagtctcaaattgaagaaatttttttggttcccctgattttttttgggccaaaggtagaagaagagaagagaagatatgaccttttgttcaattaatctgttggtaaatgggataaactctaatcttaatttgtcttattcaatcacaatatcagcaagaagtaactaaggaattactagaattccactaaaaacataattcaacattttaagacaaaaggataatattatctttacttagctatgaagtaatagaggtaaaatggtccaaaattataaatccaaataattttggtattgcaaatgtctagttatcttgccccgttaattttaagatactcaactatatataagtgactctaatgatcaaattatcacattccactattaccgggcataaacataaaaaacataaaatttcatatatagcatatatagtacacctagaattcaattgagaaattatttttttaaaacctgacactaagccataatttttcactaagaaacacataatcataaattagtcattaaatctctaattatctgctaattcttatgatttaaactatgcgatcattacattgtctatctatgatattgttggaactgattctaatatgtcaggttgatgcttctatggagcattcttttggaggtgtagttgtgattcagaaaaatgtttctagtttgggcgatgctttggtgtgcctgaattcctgctctgattttggtgtccttgaaagtgagttgaatgctatctccttaggcattcaacttccatcgacatcagggtctctaaagtgtccatcaaattgaattttcctactgttgtgaaggccttttgttctaggtcctttccatttggttggtatacttaccatttattttttaaggtagcgtttgacaatacttttttaataaattttctatttttaaatttgaaaaagtgaaaatattttttaaaaatatgttctatacaaatgtttttactttttaattttttaattataagaatcaaaattttaaaaataaaaacaagtcactttcaatatttttttaaacatttttttttcttaatcaatattttagacgacctgatccggatccaaatcctctccacgaacctcgcgttgaacccaacctctgacccgaatttgatcccagacttagacccgacttaaataaaataaaaaaataaaaatgaaaataaactttacagaacagactttcattttctatttttaaaattgaaaaacagaagcggttacataacgcattttgatttttcaaaaacaaattttttaaaaacaaaaagcttatttggctgtgttttcaatttttcagtttttaaaattgtgtttttagaagtaggaatagaaaacagttttttgtcattttaaaaatttaatggtgtttgacacaaatttttaaaaactattttt

SEQ ID NO: 40779 - DNA, 1581 bp, Cannabis sativa
agtagggctatgcaattagctatttcagtcaaaaacaagattggattctggatggttactattccctaaacctcactctttcaaattcgattatgtacaatgcttggtatagaaacaacaatattgttatttcttggatcctaaattcagtctctaaggaaatttcttctagtctcttgtgatgaatcggctgctgcaatttggactgaccttaaggttagattccaccagaaaaatgggccacacatatacaatctaaggaaaaacctgatgaacctaaggcaagagaaccaaaccgtgagcatgtatttcactaggctcaaaacgatttgggaacagttagctaattacaggccaaactgtgtatgcaatggttgttcatgtggaggagttaagaaactccaagaacaccaccatatggaatacataatgtcttttttaatgggtttatcagattctttctcacaggttcgaagtaacatcctcatcatggaccccctacctgaagttaacagggtatttcacttagtaacacaagaagagaatcaaaaagggaattttaattccactactgatcacaattcgaacatggcattcgcaatacaaggagacaaaggcaacagcagcaagaataacactcaaggaaacaagcctaatccccccaaaagaaaccgacccttctgcactcattgtaacattcttggacatactatcgagaagtgttacaaaatccatggatatcctcctggttttcataagaatgataaaggaaaagaggcatcggctaatcaagttcttgctactggagactctgcaaatgggaatgaaggacaagccatattaccacaattaacagcagctcaataccagcaattattgaatctcttggctggacaacaatcaaataactctaattctgaagttggcaacatcacaggtaacccaggtatagtgctctctagcatgtccaatctcaatcttaatggttcttggatactcgattctggggctactcggcatatatgctatgataaaaaccaatttcaaagtatatgctatgttggtccaactagattaatcctacctaataatgaagagcttactgttagtcatagtggcactattgccctttccaataatctggttttgagtaatgttctttatgttccaaactttaggtataacataatatctgtgagttgtcttactaatgacagcaaccttgatataaatttctctcctaaccattttgttattcaggatcttgccaacaagaagaagattggcagaggtagatccaacaatgggctatacattttggattctaaacctcatgcatttcctattcttgctgtcaaagctgatgtctggcactcaaggcttggacacccctcaaataaatgtttgaaactcttaaatagtactataaactgtaatacttcaaacttgcataaagacactccttgttatatttgccctttagctaaacaaaggaaattacctttcaaaaacaacatcacctttgctgataatatttttgatttgattcattgtgacatatggggtccctatcatgttcaa

SEQ ID NO: 40780 - DNA, 1476 bp, Cannabis sativa
gttctttctgattgtccatcagtctgagggtgaaaagatgtactaaacttcagctttgtacccatagctctctgaagacttacccaaaattttgatgtatgctttagatctctgtctgaaacaataaatttagatgctccatggagacgaactatctcctttacatacaatttagcgtattgatccactacacaggtaatctttattggcagaaaatgagctgactttgtgaattgtttcactatgacccataccaaatcatacattcccattgttcaaggcaaacaaaccacaaaatctattgcaatgtcctcccacttccactcaggaagagctaatggttgcaataaccttgctggcctctgatgttctactttgatttgctggcaggttaacacgtactctaccacatctcttttcatcccataccaccaaaagtagggctttagatcctaatatattttggtggttcctgggaatgcagtgaataaggtgcgggtgtgggcttcattgaggatttcatgtttgagctcatcgatattaggaacacaaacctgagctttatacaataacattttgttatttgagattgaaaagtctttaagccgagcagccattacctcatctcgaatcttgattagctcaagatcttccaactgcgcccttttgattctttctggcaaatcaaattgaagtgtcaagttatgcaactttccaactacaaactcaattttagctttaaccatttctgatgccagttgaggagctatcattacagtggtaaaaatctgcccgaaacctcttgtactcagtgcatctgccacaacatttctttcccggggtgatacaaaatctcaaaatcatatctttaaccgattccagccactgcctctacttcatatttaaatctttctcggtgaaaaagtacttgatactcttatgattagtgtaaatctcgcatttttcaccataaaggtaatgtcaccatatttttagagcaaatactacagcagcaagctctaaatcgtgcggtgggtagcgctgctcataatctttcagttgacgggaggcataggctatgactttgtcagcttgcatttgaacacatccctgaccctgtctggatgcatcacaataaacaataaacttttctcgatccgatgcaaaagctaacaccgctactgttatcaatggctatttcaactcctagaaacttgcttcacacttgtctcaccatattaatcactgatttttgttagttaactcgattagtggcatagagatcttaaagaatcctttgaaaaaatgtcgatagtaccctgctaaactaagaaaacttcacacttctgtcacagacattggcctcagccaattcttcactgattcaatctttcccgagtcaaccataaatccatctttttcgataatatgacctagagaagatacctcagacaacaagaattcacactttttgaa

SEQ ID NO: 40781 - DNA, 3326 bp, Cannabis sativa
  modified_base (54)..(60): a, c, t, g, unknown or other
  modified_base (2939)..(2940): a, c, t, g, unknown or other
agatagcttatagggtttttgtgtttaatgcctgttacatgtttaatttatcannnnnnnagaaaatttgcatgtaattgagatttatatatctgagaaggttataaattaccttggtaaacctactattgcatagaaattggtaataggaagataatcatattaaaccataatcaatagatgtaattgaaatcgaaagccgtaactttattcattgttgattcttttattaatttaactgcttcttactttcattgtttttcttatttttctgatttaaattttctcttaaaattttatttagccaaataaaagtaaaaatttaattttaacgaacttaactacaatcctcgtgggatcgacctcactctttgcgagtctataacttgataacgatacgtatacttgcgtgttgcaaattatcacaacaagtttttggtgttgttgccagattgttagttaatattgttaaaaattaaattttgttctaatttgattttttttcttttcaattttagtactaactctgttggtttcaaattcttattttattttcaggttcaattttagtacaaataaagcaatacagattaaacaaaataacattaacaatacaaagtttattcacccatccgaccgcagtacatgtattcgcagaatctacttcactatggttgaatatttaaattcaaactcaactaatgtgcatattattacactcaaccgcagtacaatatatcacagaacttacttcactacggatgaatatttaagatattcaaactctactaagcatgcattgataattaattataattataaaaagttagtaaatgtatatacctatagcaagttaaaattcgatcaacaccaaattatgccgaacctcaaaaattagctcacaacctacaatataatgaaatacaacaaaattaaaattttaattatttaattacttactagttataaaaaaaaagtaacaagttactagttactaaattatatagattaatttttgaaaataaatcacatatacatatataatcaattatatctcacactaatacaattttaaaaactttatttctaaactaattaaatccatcctatcttattctcattcacaataaatatatatacatacatatatattacttagaatatatttaatacaattataaaatttacataaataatatataaacacaatatatacacacattacatatatatatataaacaatatatattatacatacacaatatattatattaacacatatatataaacacatattcaataaaatataaaatatatacacatatatatactttatatcaagttaataaatatttaccttataagcgcaattcggcgaccaattgcgacaaaaatccgaccaccatgcacacacaacaacataatgttaacaaaatataaaaatcccaaaaaaatttataaaacgaaaataaagcaatgtacattaataaaatgaatagaaatcatatttctataccttaatggacgttgagattcaatgtttcctccaccaaaattggtggccggagttataacaccaccttttttttaatggattctgttatagtgatagagggggaaaaaactaaatttttttacagtatagttttagcaggtattgaaaatagaagatcttaaaagaaaaatgaggtaaaatagtgtagaaatgagagagatatagtgatttttagtggtggatggcgagggtttcgtgggttttgaaggttttgctatggtggctgtttatcgtgagaggaagaagacgaagtgtggaagatgaaatctgatagcgtgtatatatatcatctatgccgtcagttatttcctaataactgacgacataggtttattaatatatgctgaaaaagtttcaacctccaaccgacggcatatgtattatcaatttctatacctacagtttttatcaaaaaatgcctctaaatgaatgtcaattttgaactaagcaggtattatcacgccctttagcttttctttttataaattgggttgaaaaaataacctttagtagtagtgtaatttgttggtgtaacttataaagtaattaaaattaattttgtagcttaaattatgatggaagagagtagtggttcaattgatgtaaagaagaatgtagtaagaaaaaataaagatacgacgaattgttttatggttgtctgttgtggaaagtaacttttgttgaattttgagaattcaagcacatatattatatgataaactttattgattatttgctatgtgcaaaataaaattgaccaaggctacggattcaaggacttgttgaagatgaaaggtcgactacttttaaattatttgataccaaaaaaatagatcgattgttggtggcgatattcaatgtgcaattgttgttggagatgaacattgcttttgataaaatagctgatttgttgtcgaacataaacattatatatatttgctaaaatatttcaatggataattatttattttgctattcatttgttactaaaatatttgtatatgtgaatattaaataataaatacttttatgtagtattgagtgttgttgattagtaaatattatctaaattatctaattaattttagttttagttttaattttaatcaatattaacatataataaaaaaataaaaataaaatagcaatagaggcagttcggtccgccgctattaataatatcagcttaatcatgtgtttgacaccagtattagcagcgggagtggttagtttgctgctaatactcatttttagagatcaagtattaccaacaaattattattggcagacttggtcgctattaatttttaccggcggattgtgagattattagcagcagaatcctctaatattataatataagatttatatatatatatatanntatatatatatatataaagatgtagtaattaagcaaaggaaatacaaacttaattaataaagaagtacgtacacataaatacacatacacacaactaccaaggtagtgatggaggtgtgtaaatgtattaacaggaaattaattaattcatcaaaccctagcttaattaatttcctcttattttattttgacacacacaaggcaaacatatatattatatactagtactaatgtatattattagatagattagtactagaataggtgaccttctaagaagtcgtcgtaattattcagaagcgggcaaagcgttggggggagtacaatgtccgttgacactcacaaatcctgatgaagaacgacattggtttgggtagcaacatgga

SEQ ID NO: 40782 - DNA, 1510 bp, Cannabis sativa
  modified_base (61)..(63): a, c, t, g, unknown or other
aaaacattaaaattgacctctttaatcatattaggccataatcaatagacacaattgaaannnaagccctaactttaatcattgttaatttctcttttggattacttgctttttaatttcactatctctttagtgttcttaaatttgattttctcttaattttgaattcacaaaatagaagtaaggattttatttttaaggtatttaactacaatccttgtaggatcaacctcactcctagtgagtttattacttgttacgatacgtacacttgcgtgtgcaaattaccacaacattcttgtgtgaggctttgtcgagctaggtggtgttgtttgggataccaaggactatatgggttgcttgggcggttggagctgtgggtgattttgcagttcctttggctaagctactttctgtccggcttaggttggagttggccatttgatttgggttttaactgttgcgggttgattgtgatttaacagtggttgtcaactggattaataaccgtagtggtagtgttgtctatcaatcaattattttttagattggtaatttattagctgctggtggtggtagttcttgtaatgttattttggggtatgcaaatggcgttactcatacactagctacttctgttacgagtggtgttagggacaatatttggacaaaagcttgtccttattttttgtattcatctataacagttgatttggttctttgaataaaggttgttgattttcttaaaagaaaaattttttaaccttgcttacaccgtacaactatactttcattttaatataattatgtattaacttatattctattaagtttagtgtatttcgctttagcctcatttaaattgactaaatcataaggatattgtggtataaatacttaatattttttgtttcattcacttatatacaatattttttttcaacgaataaaatacttgaagttacatgttcgtatcactactagtccgttaaatcctatccaaacagaagttatttgtggcataaatcctattcaatctaaggcgacgtttggtaatactgttatttttttaatttttttatatcacaaaagtgaaagtgaaattttgttttttgaaaaacaaaatgtatagctactttcttctcttaattttaaaaacaaaaagacataagtgtgctatatatatttatttaagtgacgaataagataattgggtgagagaaagtgggtcgggttagcactagggtttagggtcgggttagaatggagaaaggaagtccacatcagatatcaaattaaatgatggaacataaaagatagtattttctacgcgacattaaattccaaagacagggttggaaccctcttcacgggaagctagtagtaaaaaaaccagttttcccagaattcatgggtagatttcacagtgctagtcggacaaagcggtatcctgtatcttttttcaaaacgatagaaataaattttgcacatattcttctacatggggttt

SEQ ID NO: 40783 - DNA, 1566 bp, Cannabis sativa
acaaaactaagcaaataagaacactggaacttatagatattcgaccttgtggttatggcaatagcctactcccattttacttgtattacttcaaagactaattaagatcacaaggagttggccaagtgagtttcttaataatcctaaggaaaagcttacaattatttagacagtatagtgactctcaagaacatatgattttcggattcctaaaccatggaatggctccactatttataagaaaaaaaaatacatcaattaagttttccaaaaatataggaataaattgggaaactaaactagtttcctataatttctgtcaatgtgttaatcccacaaacatagggatttgattgaattataaaataaggatatatttatggaaaatatctttaaagatcttgttcaatcgcattatcctgctcggagtaattataaaaatagggacgaacctgcaccggcaaaggaatttcaccccctttatctctcctctaatctgcaaatagatctctctcagcgatgggttagccttctggaatggtttctaaggcctccacaagttgagatgttgacatggaggtcccagtttggtcctgtcctgcgaaaaacctttcggcagttggaataagttcccccttgacagacatggtcgcgcttacgagggggtcttcgttcaaatccatggaagagaaagcaaattctctaaaacgacgaatggatgcgaagatgggctctctctttcacacacactatcttgctatacgacacaagtacagttctagcactaacctaagcaagaacctttcttgccctaaatgtgaaatgccaagaaactcatacaggggttagtgaacttacttgtcgaattggaagaaatagctggtgtacccagaaagttcgcctgaaagctccgaagccagtcgatgcaacagtcacagtcaacttgaaaatcaaatgtccctcttgaggaagaacttcgctggttcagctgaaggggagcaacatctagaaagagttctgtgcgaatgacgagtaagcgcttgattagatcctctaatgcttcttgcatgcaaatgatggcagaaaaagggaaaaaaagtttcagagaaaatgtgaagttttgagtaaaaagaataaaaaatgacaccgccacagacagtttttattctaaaaaggagagaggactatgagagatcaacaattcgaaatgggtacagttaatccaacggctaaggagatgaagggtcccatgtgattgacctgggccccacaaaaatgtcaaggttcctttctacaagtcactcaattgctagtgatactccacctttcttgctaaacacgccttgccacacacgaaaaggaggaagagccaaatcttgacaagtcgcgtggttaccacataggaggaagcaaatgtcacaaatgccctcggtagattacaacgcatctgagggtgtgtccatgatctaaacttgcatcacgtatcaacggtcaatgtaagagacaattgtaagcttccgtgatccggaggatcgcgaaagccttgggggtaaatgttatccaagt

SEQ ID NO: 40784 - DNA, 3765 bp, Cannabis sativa
  modified_base (2532)..(2535): a, c, t, g, unknown or other
tttgagccccattttccgtagattttctttataaaggatatttatcgaggtcccattgtctattaacaccctcttgatccttttattagcgagttgaatggtatcaccagacgtgaggatacctcatgtttttctcttcttcctccgtgaatacaatgggaggctcctcaatttttgccttcttggaaggttccagggcaaatgtcgactgctcattctttatccctttcacatatcgtttctgggcgttattgtttacccctgcgatatgtggccctctcgaaataaccaggatgtcctctccttcaacaggaagaggttttaaccctggttgttatggttattgggcagactgggctggttgtatccatggccttgtcttttcacgtactatttaaaatggcctcaagcaatgagactttctatctcatctttcaattggcaaaattcgtcggtcgtatgcccaatatccttatggaatttacaatacttgttaggatctcttttgctccttcaattcctcacaagcttgggcttgtcgaaggcaaccttttgctcatgtgagaggtaaatgttctcccgagtttcattaagctcagtaaaaatagtatacactcgcacgtacttatcatgcttcttctgtttctttttatccttcgacgactccttggtaccgacctttctctttgaaccacaagcccccgagttatcaattattgtggaaacagtacttattgaaacattgctgggtttgcaacctgaccttgttttcaacaaattcatttcttttcgggcttcttccttctgaacgaatacttgagccctttcattgaactcagtgtgcttcttactggacgaccttgtaagtcctcccacaactcaccccctgctatccacggattagtagagatccccgcctgaagggctctaagttgtgtgctgtcatccaaatttctaaccttagctgcagccgtgctaaaacgacttaagtacgccttaagtgtctcaccgggctgctgctttatattggttagcgaggtcgctccgggtcgtctatccctagtagcctggaactgtttcttgaaatccctagatagctgctcctagaaggttattgaatgatgagtaaacttgttaagccaactactcgctgctccaacaaagcaaggtgggaaataaaatacttcataaattgttcatcacgttactcgctcgcattattgtgttaaagttattcaaatgcgagagcggatcagtggttgcgtcatatgacgagacatgcgggtttttgaatatcgaaggagaaggggtattcattatatctggatgatacgtctcaagttcctcgccagagccgtatccagattgtctacctaattcccccacttgatatctcctgaacttatcctccagctcgtttattcgcaattggatgggatcctcttgctttggaccaagctattggcgaaggttgggtttcttccgattcaagtgctctcgtagatccggttgggagtaattgctgacggaccatgtcttactcacagattgcatcctactcatagactttgtctttcagtggctcgctgatttaccagttcccatactttcttgatcattaggtcgttgagtactttctcctcttcgagttgattgactgtgggtttttgactacctcgaggtcacatttgcttcttcatgctctgttctttccccctgagagcgatttgtcatatttcccctattagggtctgtaggagtccttgctctatgggtttgggaagaacgctggtgatttcttgcaagtgacctctgttctcccagttgagtcgcaagatcctcctcattggcatgagggatttctcgttcatcagtttctggttgtctcccatctggctgttcatcctaattttttgggggtatctcgttttccctgggttgttcttcctgggcgttttcctgtctcctggttcatgagccacaaggtctgcctcctggtctcctcactccagattcaagttgattttgagcattcgtcccctgtgctgccctggccgaggctgcatcacgctctaactcagcgtttcgacactgtgcctcttcgagacggtgtctcaggcggcggtttctgtttcataaaataccttctcccatagtcttggtacctccaagattgagcttttcatccctcgtcccggggttctagccactcccacgttgagttcacctcgagcgtgttgtccgcgtacgaggaccaacgtcgggttgggctcttcaggaacgtgtggttcgtgtactagggccaccctcaggttgagtcctcctggaatgggtggtccgtctggaccgcgagttggtagacctttggagcccatgcccagaacaatgattggtttcctcatgtggggtgttaacattttctagattttcagccatgaaggaggtgttttttcttcaaaagaagggagggttttttctgagctttttcacagaggctctcaatgaaagtaccaaactgttaacgcagatttnnnntaaccaaatttgagcctcacagtattgttttgacacagaaaaaaaaaagctgtaaaaaataaaagcatgaacacagggttttttacgtgattttgcagttaaagttctgcatagtctacgagttaatcttattcagatttctgatttttttctagggcctctcctgtatgagttttttcgtccattttttgatcttatttgacactatttataattacatagtgggcagttaattgcaaagttgactgtaatatgtttacaacaatcatccctaaaatcatgggatttgattacatatcacatagtgtaaatgcggttgagattggaaaatcatttagctgtgatttgtccacttttactggttcaaaatgatcttattttaaacacatccttatttattgtatctggagttgtctcgccagaagcttggttccaatgatctgaaaagcgagctggggccatttttccttccgaggtcaacggtgcatgtcttgtgtcgattgcggttcttatttacaaagagttctttgaagcttatttgaatgttagcttcttgacttgccagggttgtgagcctcactagcgttgacgggatgaagttataagaagtcttcccatagcgagacagacacctcaattatttggtctcgagctaatcgactgttcccttagtttgcacactaagggctttcgcaattgatatatatcgatttcgtcttcctatgtgtactgtccttgatgcctcgctatccgctttcagcgacatatggtttctcgctaatataataagtgccagtttgtatgttgattccttgcctaagaccttacagtcagcaggtttcaaatatactttgatgcttacgtaattaattagttattccataaaaagcaatcacatcgattcatatcccctttatcttgatacgtgtcttccattgagatggcagccaaatttcgggtataacaatggacataacttataattaattatataagtataataattttaccccatacagattttataatatttttataattaattaggataataagttgaattctcttaatttaccccacagggagttatgaggatttaatttaatattgttatcacaaaatttaattaagataggtttcattcctctattttcctaaattaaatatttcattaaatctatcatatagttcatataattttattatatttaaaatttagcccacaggtaa

SEQ ID NO: 40785 - DNA, 1058 bp, Cannabis sativa
gggaaagttaagccctaggttcatagggccatttgagatactcgagaaggttgggcaggtagcatatcaactagtcgtgccactagcattatcagctgtgcataatgtacttcatattttaatgttgaggaaacatgttttagaaccaactcatcatgtcttgagttacgaagccgtaaaggtaagctttatcactcttttagtttgagttttgggagttgtggttaggtttgaacatgcataattggaatttaggttcagtttgagttaaattttgttttagttcaatttttgggttatagttaagttgattgaggtcattttcagctagttttgctggtttggtaagaagttgagcaagtttgagtttgaaaactcaagcttggctcaataatggtggtttgagtttctatgcttgtttgcttctattattgcttggaaatagtttattggtgttattataggtattctgcaaagtttggttgaatttgggagaaatttgaatgagatttgaagtttttagggttttttctaaagagtcggttaaccgtttctccaagcatggccctaagaaccggcctgccatttggaaattcaaattactggtttggcaagtttctagagccttagttttgatgttttcttgatatttagagtattgccattctatttatcgatagaaaaacttttagtttgagtttagggccaggagaaggttttagtaagctctttacccgtttatgtgatcgtgagatagggtctccattcaacgcgtgattttccattcagatcaactggcacacttgaattcgaaaaaggtaagactagcatagaatatgtttatatgtatgtgtatgtatgtaagttgcatgttctgttgtatgatttgtatgctactaacactagtatagtagtgggactgagtgcattagtatagcataccatgttcaaagggtaagatctggtgttgccaacattagtatggttaagtatgtagtgcatgtggtacaacactcagtagtactcggggtacggttcagccgtaccaacactagtac

SEQ ID NO: 40786 - DNA, 1297 bp, Cannabis sativa
aattgggcatagaacttcaaattgtaggaaaaaaggaggagaagaaagaagcaaggaaacaagtttggatgcctaagaaacgagcaattaatgtagagaagcagctcgatgatgatggttttcagaaggtcagtaaaggaaaaaaggtattgccaaggaaggaagcagaagggacagcaacaaagaataagtttgagtctcttaatgatgattttgagattgtagcaggaattgagattgattgtggcatagcagaacagggaaatgagccaaacacaggaggggagggagatccctcttcctcaaatggataggttcttatgctagaatgtgagagggattaacagccagcataaacacaatgaaatcaagcaattgatgtattcgaagcaagctgggtttgttagtctcttagaaacaaaggttcagaataagaatatgggaactttatatacaagcctcttccaaggttggtgtttttcaaataataatccttggttagacaaaggaagaatagttatagcttggcaaccaaatatctactctatagattttaaatattgctctagcgaaataatgcattgttatgtgcaatcatagaaacaaacagggaagttctttgtgtcactgatttatgctttcaatgatgagaaaaagagagaagaattatgggcagatctagaggaattggcgaagaaactaagtgaaccatggattctaatgggggacttcaatgagataatgaatggagatgaaagaatagtaagaagggctcagtgcaatccatctcagagacttcaagattgtatcgggaactgtaatatggctgatttgaagtattcagggtctttctacacatggaacaataagcaaaagcctgaagagaggattttttccaaaattgatagagaaatggtcaattcacattggatcaatgcttttccttgttctgaagctattttcttacctgaattaagcttcgaccatattcctatcttggtgactatttatgaagataggttctgtgggaggaagccatttaggtatttcaacatgtggaaacaagctattgagtatgataacttggtaaccaaggcctggcaagaagatatcaaagggacgaaaatgtattgtatagtgcagaaactaagaagagtgaagatggtgctgaaacacataaaccaaaccggtttacagacatacaaaagacaatgcttactacacgagaagctttggctgagttgcaagttaaattgaataaggagccacagaatgtggaatttatgaaccaagagca

SEQ ID NO: 40787 - DNA, 1447 bp, Cannabis sativa
  modified_base (987)..(987): a, c, t, g, unknown or other
ttgcccctctgcggaccttttcctttcgagaaatcatagcggacttttcgcggatcctgtgccttattttttctcccagggatcgaagtagggtttttctcagggttctcctcagaaaggtactgtatagggcttggttccctggtcttaggcctctgagtgcttggcgaggattcttcttgtatttcctttggtcctgcggggatggccttgggatgtatatgtattccagccgtttctatagttttttgcatgacgaccattatctcttgcatcctcttattttgttctttttgggcagccaattcggcttcatgatcagccgccttttgccttaagaccagcagtttagtatagctaccttcatcgtaagtgtcgtacccttcgaacttttcttcatattcctcatctttcgcctcatctcgttcctcagagcccacatttactcgtgaggccacttcctcgccttttgggttctgagtatcctgaggaggacgaggttgacgtgcgttgtttcgagtttccaccattgtcgttctgattctttgactgttgtcttcttaacgatgcttccgacagctctcaatgaaaagcaccaaaatattgaccgaggttttcggcaaccaattaaatgagttaatgacgagagctttagaataattaatacaggtggttttaacatggttcgggcattaataagtcgtagtccacgagtctcttgtattaatgagagttcttgtacagagaatgttcttggtgagttctctctctctctctctctctcttatttttttgaccgatccctcttcccattgttcaggggtatttatagagttttgtaaggatcactaaaaaaggatcacttgtcttcgagtgccagcaatgtatgtgcacaagttcccaagagatgtaaaataaggtatacataacctatgccgtaggtgtcatagggattaggtgagagtaatctttatccttccttgattnatgtgattcttcataatggagccgtcactagcccctttgattatcgtgtaatcgccgtaaatgaggcttacactatctgtcatgtcctcttatgggcgttccaagacgtttttcccatgttgcattaaaaagtgactgttggaacaagttctacttctcccggagatgctttgttgtatttctagctcccgcagaggagagacatgtcttatgtgcctcttcggggactcactccctgaagtgtacttgctcgtctatatatgacttagctaatttttgtgtgagttgtccttgtgatccacgcgtcatacgcaaccgcggccacgtattttggaaaaaatctaatgcaacaatttcctagttaataaatataccacataataatacaatatttgaacacacataattaattagatgaactataatttaattaataactcacatataattaattttattt

SEQ ID NO: 40788 - DNA, 1098 bp, Cannabis sativa
cttggcccacaggttggacttgtgatcggggattggacggcagaccattatgagtttgggcggtatgcccagtagtaatttcttctgtactgcccagtgggataccagacgcggtggcgggttgctggtaagcaacttgataggctctccgcctagtgaaatgtttccatctccctgtccctccactcaatgaactggcgtcgctgctcatcgaatggaaggtttatagcagtacggagatcctcctgttcatggtggaaggcattattatggctttgcatgagtccaagggcatctcggaggttttggatcttagtgtcatcccccactgtcctctgagcattggtggtggacgagattccaatgctgggagttgtttggtcggctgaagaactgatattccgagtctcttgcacacctggtgtgatcccaaccagaggagaaatcacaccatggcccacagtatgtggttgtatgttaggctgctcgggattggtcccttgtggcacccttgtgttcctagggtgttgcacagcagggttcgtcatcattggatcactctgatcaaccaagcctctatgggtttgcaccaccattttatgcgcctgttaagacttaagacaaagaacaaacttgggtttttgctctcaatgaaagcacaaaaatattaacctcgcctttaattaacgaaaatgagtcaattatgaagcaattagaaatgtaataaaaatagagtaaaaaccaataagcaataaagaacactagatttgaaggttcgacctctttagtacggtaatagcctactccccttagattgtattaacttgagaacaaagaacacagtgttttctctctcaaatcttacaatgaaatctctgagtatttctcttagatctctctctaaagtaattatttcaatcccttttctagtgaagctagatcactatttgtagggccttaatgtatgagggaaggttttattttttcttacaatgtccataataggaaggaacattcattacataaatagaatacatgaaatggaggattgagatagcctgccgtatccctctaattcaatctcatgattgtagggat

SEQ ID NO: 40789 - DNA, 2816 bp, Cannabis sativa
  modified_base (66)..(70): a, c, t, g, unknown or other
  modified_base (739)..(743): a, c, t, g, unknown or other
  modified_base (1728)..(1730): a, c, t, g, unknown or other
ccgcaacaacccagacataatatcgatgtatatttggaaccattgattgacgatttaatagaattnnnnnagaatggtgttcatgcctatgatggttttaaaaaacaatttttttaatctgaaagtagtgttattgtggacagttagcaattttttagcgtatacaataatttatcaggcttaagcacaaaaatgtacgaaagttgtccgagttgttgcactaacacatgggcccatcgcttagcaaatggacacaagatgtgttatatatgggtcatagacggtacttgcctacaaatcatcttgatagatggaagaagaaagcatttgatggtactgaagagggagatatggctcctttgccactatcaggggaacaaattctccaggaagtagaactagtaaattttaagtatggaaagacgcaacaaactaagaaaataaatggttgttttcaaagaaagttaatcttttttcgtcttccatattgaaagaaatatgaaggtacttaaaagttatgtgcgtaaccactatcggtcgatggagctacatatctgaagaggctgtggaattttattcagtgtacatgctcggagttgaagcaattggaattagcaaattaagaactaacctagatgagggttatagaggattaaggggaaaggaacaatggtgagagtgtccaagcttgaactagatcaagctcaattagtcgtgatgaacaataatgcagaagttnnnnnatatataacgtaagttataggtagctctttctttgattaatatttaattagtcactatgaataataacttgattaaccttacatgttttgcagtgaccatatgtagatattacaatcaatggttccaagaaatcataaaaataaacaaaaatgggttgcagacgagcatcgtcaaacttttattgggtggttaaggaataccattctagcaaagttgaacgaaccaaatcatggagtatccgatgagttgagtcgtattgcccttggacaaacttttgcggtagcaaagcatgaagcgtacattataagaggtaaatattttcatacaaagtcaaaagatgatgttcgagaggttcaaaatagtgacatatgtatcgttgcagaaaccatgacttattataaggttattgaataaatatgggagctcaattattttgcattctgaatttcactttttaaatgttcttgggttgacaacgatgttggaataaaaactgacgagcttagttttactttggttgatttaagtaagagaggaagcaagaatgatccattcatcatggctagccaagcagtataagttttttacattttttatctggctaatgataaatgggttgtgtttatcgacaccatagaggaggctcttagagaatgaagaggacgaggataatgttgatttatgttatgatgacttcattattgggcaaccaattcatgaacaagttgtagaaattgatcataaccttaaggaagacgatgctgaatacattagaaataatatcaatgagggagtatgggtcaattattattcaggcaaagataaacaaaaaaagaaaagaaaatgtgcctaattggtaacttacttgtgatagcttacatgttataatgtttgtttatgtagttaatatttgttataacttacctgtgatacttttttttatgtacgtagttactctattatagctaactttatattttgttnnnttaatggtgtagatatggctaactcaggttcaggcttagattcaaacccagtagcagagtgtcctacctaaacgaggttaaatttgagatgaatgaagtgtccaagatgatggacaaaggaaatagacttcctctcctagtcaatgataaatgagtattatggcagaaactataccaagctaatatcgactttgggagttagatgccatatgatgatagggctgtcctatgaaaattggaaacaggtcaatcctgaacgtaaaaataagagttggaaagatatacaagtaagcaattatttatgagaattttgatccgtgtttgattaattcaaatgttaaatctaatcatgtttggttttccttaaaactagatgggttttatagttcgagatgatttcaaacataattgcatgatcattgttgggaagttaatgaatgacttcaagaacatgacaaaagacatcattatgcccgctttagaagacaatgatttacaacggttagcatacgtccctgaaaaacatcctgaaattgacaaaaaggattggttgaaatttgttcaaactcgactaactcctaaatttcaagtaataattatatttgtactaagataaactttcaaataaaagtactggtagctaacagtttttttggcattgtaggaattgagtaaggtgcaaagggaacgttcagcaaaaatcgaatccagaaatcgaagtggtcagagtagaatgatgaacgtaagggaagatgtggtaagtaattaataatttctaacaatgtgcatcaaaatataatagtactcaatttagttttacaaaataatatagaaaaaggacattgaggttcaagatcccccacgtcaccatgtttggatcaaatctcagaccaagagaacgaaacttgtcactgattatgacaagaaaattgtcgaaaagatagtaagtatatattaatcgttgattaataataatgagttaaacagtggaaaaataggaatttttgtgtgcataatagtagttgtttaactatattgaagattgtaaatgagattaaagaattagttaaatacaggttgtatagt

SEQ ID NO: 40790 - DNA, 2011 bp, Cannabis sativa
  modified_base (971)..(973): a, c, t, g, unknown or other
  modified_base (1958)..(1975): a, c, t, g, unknown or other
atgtaaaggtattcacaacaatcttgtccatcaactatacccatagaggatcaaagtagtttcgtcatatcaatcatgactaaacctatcaatggtcacatatacaaatatagtcaaatgacatagatcaatcatggatgtatagcatggaaattacatgcaatatgaactgcctatttacaactggtcctccttaaactaaagtgaggttagacttaaacataacaaaacaaagtaaatgaactgaaaactttatttctgattagaaaataaccaaatacataaatgtcttaaacaaacataaagcaaacaaaatataaactccctctaaatcatgatatcctcaagcaataatgcacacatatgagcagttgttgggattttatgccttaaataaaacacatttcaatataatcaaatttactttattaataaaagatcaaaaattattttatgttgcatggttcacatgattactttcatgattatatatttaatatataaattctattaaatcttgaacatatagttattcatgattatgctgttatctacacagtggaaaataatcatgattatatgattcaaagtatttattccaatgatttatcagtgcactgaatttattttgatgtgataatcagcgataaaatttacttacacaatggtatgttgaatgtgttttccaggacattagtaaaatatactagtatcggatgcattgggtatacatcagactggaccgatattgataatgaaaaatatatcataaacttactgttatatctttctaagccaatatcacttagttgatcttaggtcaatagatctttatcctgagatggttaggttccggcttaaatatattatttatattctttgacttgttcgttaaagctgaccaattggatcagcaatatacttacatcttgggaatatgatagtgtaattgagtgggagcgctaatcatnnntatggaatctatagcttttataaccattagaagtgaaacaatgatttccttcgagcttggcttaatgcgataaataatagactgctcatttcagtaattatattagtttactgaaataatatttacaagtagctaagtattttaaggataaaatacattgaagagtagaacggtaatttgtccatactcgatgtagatcatctataaaggatctttgattatttggattgaagtaatggataattcatagcgtatctatatttggtataaagagcattctatgtaatcatgagtgtaattcttaatctatagtggagtcaggatgaattaataagttaagaaatttacttagtaaattttgaatttatttattggaagcttggttacataggccatggtacctgcactaactgggataatattattttgtagtctcagttaattgatatatttaatcaattaggattctaaataaagactatctgttatttgtaaattttaccaaggaatggtagaattgagaagaaaagagaattcaaggtttatttattaattaagagacattgaaaggttaataaatatatttaaatagtaattttatttgataattatttataattgttaaatagatagaattagtatttaaataactaaagcagaaaaataacattactgaagaaagacaagtttgtttcattaaagaagcaaaataatggcaaaagtctaaatcatgggctttcttatagggtttggccatgagagtccattttaagccattgtatctttttaacgctaaacctaatgaatccctataaatataattgttgtccccgcttctagccaacgaccataagtcaagataaagcaattaaataaagtaaataatagaaagcaaaaacaataagtatacgtgccttcagggctggccctgagttgaaatgggttataggtcattttttttccttactataaagataaatagtannnnnnnnnnnnnnnnnnaaaatatgtatattttttaaaagacaatttttttat

SEQ ID NO: 40791 - DNA, 1554 bp, Cannabis sativa
tataattaatctgtttaattaatgatatgataaatttaatagttaattacaaaagtacttttacatatatggacaagtaagagagattaaccatgtgttagataatgatagttttttaagaaagagatcatcagtgctgtatatatataagagaatattatatatcatgatatcttgattaaataaatcatcactgggatagcctttttttattattttgatactgacctgataaaaagaaaggagggattaattaaacatttatgcctaataatatgcttaattggaacagtcatatatatatgaagactgaagttcttcaggtagtctaattattagtcccactattacctacttccatttgataatttgagaaattcaaattgataagacaaaaggtcattttatatcaccacaaaccacagcaaaagccctgattgaaactaataaaattcaacaacggacaccattatagatattattggattataaaagcagtattattgatattatatcaagctaaggttaattagtagtaagagagagagcccataatattaatgcttttagactctccctttccacttttaaaagagcatatattaaaaaaaaaagaaaagctttgcccatgcaccattcttttccttttccttttctttgtcatatggttgagcttgagtttaattaaatatatatatataaaaatggacaagggagataagagtgtcacataactctacgtggccatactcctgtctattgccaacttttcttttgggcttattcacatggtccacaaatcagtagtgaaatcacttgtggggggcactgtgtgatgttctcttttaattgtctcgatatactgattcagctttcatacaaacaaagttttcccattctcttattatattatttttttatatatataataattaaaaaaaaagaatagctatcaatatatatagatatgtttaatctttacttatatcatcgtaaaaaggaaaaaaactaccgaatccaacttttattgtttcccatttttgcttagctataaatgtgaagtaacaacacacatgtatatacaactttagccctaaattttcaacaatgttgattttgcctctaaaatatacggtttgtaaagaattctctctgaacttatttagttattttgttaggttccgtcttattattctgtttaaatgatgacgtgtctttgtaaattagaaactttaccccctaaactttgataacggtcaaatcgtacccctcaaaataaacatgagaaagatttttaacactttttttagtaaatcttaaaaaattaatttagatcctaagaaaaaattattttgaatgattaaaaaaattaaaaaataaattaaaattttaaaactaattaagcgatttaaaaatttatttattttttattaaagttcggtctgaaataggtactgaagtttgcctagcagtcaagagtttctttagtacgggagctatacctgttcagttcaatgagactatgattctcttggtgcctaaggtggaaattcc

SEQ ID NO: 40792 - DNA, 1875 bp, Cannabis sativa
cgactgagttgccatgtaaacgctttctatgtcttcagttaagatagtgaatgcagtgtactttgcttgattctcccagggagcttgttcgcattttcctgcgaactttcacttcttcccattcccttgcctgttgttgttgttagaacgtttaccacttgagtttgaattatttgggtaatgggggagatggccggacgttccagtagaagcagctttcaacttgccaggcttttgctcaccttctgctcgttgaatggcttcttcgagcatgatgaagccttcagcaccgcacggtcaagaaaatcactcattgagtctactggcccttttttccttatatccttccaaagttcaccgaggactttaatgctccccagtatcgcggacaactttccatcttcagttacccatgatactttggtcgcctccgtcatgaatatgctgatgtatgctcggagaggtttgcctggtctttgcttgactttgaccacgtctcccagatgtaacggaagttggcaagaggaggagaattgtgcatggaattccaaagagaaggctttccatgagttgaactttccaggggccaacttgaaataccactgttgggcggcttcagaaagggtagcaggaaaaattctacaacacacatcccctcgtatcccctgcaaatccatttgcatctcgaaatacttgaggtgggagagaggatcttcttttcctgtgcatagtttccatgttggcatttttaaacttgtggggcaacgccagaagattgatctcgggagagaaaggaattctgcgtgcttggtccagctcgagatcattgtttctctgtctagccatgccttggaacatgtttttcagttcgtctacctgtgcctgtatggtcgggcttacctgctcgacattctcgttgatttgaatcacatcagtatctttctgagcgggaatttaagcacgggctccgggctttacgattgtcgtgacaatctgatcgtctactcctctccttctgttcagatcactccttaggtcatgaatcgttcccaacctatcgaatacagaagcgcctggctgtcttagcgattgatttgcttggttgactggtggagtggcaccgttaatctggttggaactatcagctatgacttctcctgatcaattactagagaaggtctgcctgcctaccactaggcccacaagtggaactcgtgaccgaagatttggcgcctgaccatttgcagtctgggaagtattcatcgctggatcttcatccgtctcaccgaggaggatgacactcggaggttgctgacctacactttggtaggcttttcgtattatcacagtagcttaccaactacgattttcaatctctatatgatgagcccttaacgcttccatcactctgtctctccactcggaaaacatatgtctttgttccttgaacgcaagatttaccgtagtgcggagttcttcctgatcatgatgtagggtattggcatgaccctgcacgagtccaagggcaacacagaggttttgtaactcaatatcatctccaatggtcgtttgagtgttggtagcaggcggaacggctgtgttatgaatgccctggttcggtgctgaactgtaattctcagtctcttgcacaccaggcgcaatttcatctacggagttgttacatcgtgacccacgtttgcaggctattcaggattaacagctggcaaaacccttgtgtttcctgggttcttcaatgcagaatccaccgtctgtggattcgctagatcaaccaagcccctacgagtctgcaccaccatcgtacttgtggttagattttgaatgaagagcgagtcttaattctgctctcaatgaaag

SEQ ID NO: 40793 - DNA, 1633 bp, Cannabis sativa
aaaaaaaaaaaaaaaactagtttgaaacataaactcaaccgtgaatcatcattcaaattccataaaactaattacaaactgataatattacaataattttagtttatttacaagtatttcatatagacaatccaacacaaggctctcataaaaaaacaaatctaatatggtcaatttttcatattttaatattggttgacttcacgttggtttacagtgttcttatagttgtttcttcatgtgatattcttaacgtacaagtcattgttcatcagtttaataaaactttgtttgtccaatcacattgttcatacatagttgcacctatgttgtttatcagttgtctaatagttgtgctactaaaatattattatgttataaattagggttcaaaattggcaatacatgactcatatagaggaaactttattgtggtaagtttgtttttattacgaagtggaggttgctattagttattttttggttgtcaaatagatgtctggcgacatatgtattatataaatagctgatgttgtgtctatatcttcaatgctttgctgagttctaattgcataatagttttctcatagttggctgaccatatttaaatttttcaaaattttaggaaacagaagcagttctatttctcatacagttcaataggcagtttgatcaaagaatggattatgtaaattacaaagttagtggtaaattcatctcaagggattgcaaatatgaagaacttgtacacaagttaaaacaagtgctagaatccaaccaagacaacactcaaccgcaactgaaatatcaagtgaaagaaggttaccaatcgttaagaataaagggcgatccaagcttattcttctacatataactaaaattggaagaacttgaatttataaggtattcattgtgtgtgaacatgctcaataacacaacaacaaccaataacacctcattctttacaatgagcaactcattagttacacaagtacatactgttggaaatatctttactaggatcttaatgtactaatcatgtatgttggattataactaatctgacaccctaatatggaaaacctaaaataataatataaacacctaagggattatagaataccttacattgagtgtagcgaaatattatgtcttattccgttcagatctctaacccttgattcttgtttgtagcagagtatactcaagatttgaacctaaatattctcctcattcgattgtgttcatcatagtcttctacaaaggcttgagtaccaacgtgaatagtgtgggcggatactcaaacatctttgaacaatatttgagagagtttttcttagtgaatttcaaaaatcaagagaagaagaagatgtgacattagccttttcaattcttctttgtatagacatttatttagggttgggtttagatgagattgacttaaataaagacttgggctaaatttaatcctcaagaccgaattctctaatgggctttagagttggatttttcttactttatttcaactaatgaaactaaattgtctttttttaattttaccacttatctcatctaattatttaaatattaattttattttaataattataaataattatcaaataaaatacaa

SEQ ID NO: 40794 - DNA, 2137 bp, Cannabis sativa
  modified_base (1033)..(1040): a, c, t, g, unknown or other
tgctattcttcaaggtggatacatatttttcaataaacaaccagtcataatgaaagcttgggatccaaatgtggatttcaagaaggaggatgtgagtagagtaccaatttgggttacattggatgatttagaattaaagtattggggtgagaagtcccttttagaaatttttgggcagattggagacccgataatggtggatgcggtgacaaaggaacgggataaacttagctacctagagtgctcattgaggtgtcgatacaccaggaatttccaagtaccatttattttgagaatgagcatggagtgaatgtaccaattgcagtttctttcgagtggaaaccagtgctttgtaagaattgtaaaggaatgggccatgagacaagtaattgcaggaagaaagagaagtttcagcaacaatgggtgattaagaatgatgcaaggaaaccagttgagagtactgttagtgagcaggggaaaaaggatgaattccaaacagttactaaaggttgtaaagttaagggtaaagagccaccgaaacagacagtaatcaccaattcgtttaatgctcttaagcaagaagaataagggtatgagaacatggtagctgatagaggcaagtcagatggtttacaagagcgtaatacaagagaggggggagaaccctctcttgccaatggatagaatcatttgttggaacgtccgggggattaacaaccagcaaaagcaaatgagtgtgaagcaatttattgcaatccagaaggctggtttagttggtctcatcgagacgagggttaagcctccaaaacttggagacttataccaaagaatgtttttagggtggtgttttacaacaaattcagcttagcacaaaggagggagaataatcattgcttggaatccgcttcttttcaatactagtatcatcaaatgtactagtcaattgatacatcttcatattgaaacggtaaataaaaggtataagttttttactacttttgtttatggtttcaatgatgaaaatgggaggaannnnnnnnggaatgatttgcgtagtattgctagtccggatccgtggatagtatttggtgatttcaacgatattctctttaaagaagaaagaattggggataaagctaagataggaaactccacggctttcattgattgtgtgagtgattgccaactgacagatataaagagtagtggttgcttttttacttggaacaacaaacaacaatctaaagatagaatctattctaagattgatagagttatggctaatcaatcttggatggatatgttttagagggctgaagcagtgtttctcgcagaaggggcatttgatcatactcctgcagtattgaacacttacacggatttcccaagtggcaaaaaaccattcaaatactttcgcatgtggacttcttatccgagttataatgtggaagtaaagaagatcagggatcaaaaaataacaggcacgaatatgtaccaggtagtatcaaaacttaaagctctgaaggttttctttagaaatttgaacaaggaacactactcggacatccatatagcagagaaaaaagcaaggatggatcttgaaaatgcacaaaccttgttacaccaaaacccgatgaatgagcagctgcaataccaggaaaaagaagtaagagatcgatttatctaggtacacaaagattactgttcgtttttacaacagaaatctaggctgcattggctcaaagatggtgatgagaattcagcccttttccattcgagcatcagagaaagaagacagcataataacattctctctatcgaggatgtgaatggattcagacatgaagagccagagaacattacaaaagctttcttagatttctatcaagaattattgggatctaagatggtgaatagagtgactgtgaatataagtttagtcaaaaaaggagcttgtgttactgaatatcatagccagatcctgactgttgcatacacattggaggagctgaaagaagctgtctttggcatactagcagtaaaggccccagggctagatgggtacaacagctcgttttatcaggataattgggacttagtcaaacaagatgtctttgaagcagtaacctcgtttctc

SEQ ID NO: 40795 - DNA, 1906 bp, Cannabis sativa
aatttggataagttgttctttcatttggtatcagagctaacacaatagtttgtgcttatttgagggagtggtctagaagatcttttctcttcctaaaccacatgaggacactttacacacacttatggacaaggtcttgtgttgtttggtttgtcattggagtttggtgtgcttatataattcaaaaattttgttgctcatgttttgcatttttttttttgtgctcagtggcttcattctcgttattgtccagttgttgactttcatatttttactaaaagctcttgagtatctctaagagtctatttcttatctctgttgacaagtttgggctgttggtctatattgctggcatatttgtagttgttagttcattatgctcacaataccaaaggtctatgttttatttcagtttttctgccaaaacgtgtggtgaaaattagtctatttggtcgtgtatatctgatttagcaatgttaaatttttttaataaatatcattttttccttttcatggtcaaactttgtcaaaggtatactctacttacggcctaagaaaagtgaataggctctttcactttactctcaagaaaccctaatcattgtagtcctcaaatctctctatctataatggagaatatttctcccatggtggtgtcccctaaaggcattctcattccaccatcaatacctcctgtcgaacctgcagtcaaacctgcagtcgtgactagtatggccaatccatgtcgtgccattatcccttaccagttggagtttgatgattctacttgctttccaagtccattgttgtcttcgtctcctccattgtctccactcactcaaaagcctcacacatttcaaggtaagagctctcccctttctaaaatggcttcttcttcatcgtcacacactcagtctatttcaaagagagtcactcgttcctcttcgagtttaaagtctcctgtgtcccttgcctagccttcgtcgttgcctaaatcgaaccccataggaccacctcgtcctccatctaaggtttttataccttcccaaaaccaagaaagggttcagccaaaaagaaaatcatcgcgtgataccacttatcaaccacctgtcaaaaagtccaagacaaagtctattcctgtccccactacaaactcttctccaacacagtgtccaaaggctccaaaaagacaaaacctccaaaagcccctatctcaaatgtcaacccatcctctgttcaatgctttgttgatgcctccaaagcatttgtgtaccaacgatggtttagtagtcgtgagctatggttcgaataaatagtgattttagatgactatcctgacgtgcatgaatttttaaaaattaggaaatgggctcacgctgtctctaagttgtctgcacctcatcccattttagttcgtgaattctatgccaatctagatagaactgttattgctgagggtcatccatgttgtgtgagtgcatttgtcaggggtactcgtattccttttggtcaatctactatttcaggcattttgaaggttgagttgatcaaaaatccaacatatggaaaacagttcaatccagatcaaactatgatgggtagagtgctaacttgcagggatgactatctatgagaaaagcaagaaattttagctactcatctaactccattctatagggttcttcatcgggttgctttgtacaattggtttcctaattcccatttgtcctcagtcacacttaggaatgtcaatggggcaggtcggatctgatccgacctgatccagatcatatacggatctgccccgccccaccccgtatgatcagatactcggatcggatgtgatccgacccgccttatacggatcggatctgatccgacccaaccttttttttttaaaaaaaaa

SEQ ID NO: 40796 - DNA, 3600 bp, Cannabis sativa
aaggctgcaatggagaatggagtgctgactgtcactgttcccaaggaggaagtcaagaagcctgatgtcaaacctattgagatctctggttgatattgtgattaaatgaaaattatggctttggagaaatgtgtcgtgtgtttgattttatgttttgaaaatattgtattatgaaatagtgactaaatttgtaattgattcacctgtttgtcttacgtttatagtttctgacttgttttatgatcacttataatttgaagtttgcgagtcttgaaagttttcagtcattttaagatagaatcacgataaaggtttatgaatatccaaagttgattgaaatggataccgagacttgaatttttttaaggagttgttattatacatttatctagttttgctctatcacaatgctattaaaatgggccgaataactgattatttgaagttaaaatacatataatcaataacaaatcaaagctcttcttgaaaataattgtattacttacattttctgtatagagaaagtaatcatgtagttatcttttagctaattacgctttgactaacaaagaaatgaaaaaaaaacatataatcatcgtacaatcttgtctagaaagttggaaggttatatctctattaagagcatgtaccaggatacacactatattacactgtcatcaaattagggttaaaaaatatttttacccccatcacaacactaaaaattacactaaaataatatatttattattatattaattttttaataaaataaaaaaattaatcatattaattaataaaaattactacaattattatattcaactaataatttaaataaacttattttttctaatcaaaaaattaacttttattaaatcaaatcagctaccaagatagttttcaaatcaacagggacataattctcacgggaaacacaactaagaatagaaccaaaagaacgagctaaacaattagattaaacttactgattagattaaagataataatacaataaaatagataaaactcgataaattaaaatattatattataataacataaatattatattactaaaaaacaaacattacattcatgacgaaagaaattatataaaaataatttatggtattcacatttaaatttacacaaaaaaatattataaaatgtttttataatgcatccctctaaataaaaaagtcagatgacaataagtttgaattttatttttggcgtattaaatttttctaaatttttcaaaattttacaggaggtcttaaataaatataatgtacacgaccataaaaagactaaataagtctcaaatgctaaaacaagtataagtatatcagtgcggcacttttaaagaagtacactatttttcagcgtgctaattttttttttttaattttattaaaattttacaagatgtcttaaataactataatatacatgactatataaaaaatagactaaaaagtctgtcgggtgccaaaataaataagagtagattcgtacattacttttaaaaatatgcatggtaaaattgtccaaaaactatttcttaatttaataagtacaataatataaatatatataatataataaaattatatataaaaaagatatgcagtgactacaatgcacgacatatatgttgtacattgtagacaaaactttaaaatgttgcataaaatgcagtctcgttggatcaaatatgcatgacatatataatatatactgtctccttagtgttgctctaagtatacaaaattaaaatggaaaagttcaatctgatggaaataaattttgattctatattacgaatggaaaattattgcctaaagaattatatattttatttgaattaaggaattataatgaatttggatatttatgatctgtggccacaattgttggagaaatttagacaaacacttattataaatcatgaaaacagagaaaagagagaaaaaagaagaagaaaacagaattctcattgatcattcaacaaaaaatgagtgagctttatccagctcaagctcaataaatgaggagtacaagtgagttagttacacacagttagaaccaagaaaactaactgatataactaactaaacaaacgaaactacccataaccaaaactaactgccaaacagtgacagtttaactaaacttgcagctcaacaatatttgctagagttaatactccccctcaagatgcagagctaatgctaattaaacccatcttgtctttgaggccattgaaatgagtagggaaaaggggctttgtaaatatgtctgcaagtaggtccttaaaggcaacatggctggtcttgatcactccttcttgcaccttgtctaactaaatgacagtcgatctctatatgttttgtcctttcatgaaagatagggttggctgctatgtgttgagcagccttattgtcacaaaatagccaagcagggcccttatgttccacattcaattctttaagaataaacagtaaccaaactagctcgtatgttatgttggacatagctcgattgaagctgaggatcgagatacaacatgttgcttcttacttttccagtatatcaagaattgagaagagttgagaagcctaaagaaagcttgataaagaagatgattgtgaaggcaaatgagggaaaatctgctgatctaaaatcagcagggaagcaggttgtggaagatgttaccacaactcataatgtcactgatgagatgcctgagatgcagtagcttaattctcaaaaagttactaccaaaagttcagcaggcactccaaactcaagtgatttggtagtcacctaagacaagagtttctaaaggatctggttccttcaaaaggttaatgagtctcaagggcaagtgcttcaaaattctttcaaaattttgaaaggggagcagggagaggaattaggagatgagggtccattacttgcttattgttgatgaatttttgcaacatttgtagttggaatgtgaggggtttgaataaaagggagaagctagaatcggttgttgatatttggaggcttaataaagtaggagttggtgctcttttagagaccaaggttaaaggggaaaaattatagaggatgatgactagtagtttcactagttgggagtctatagtagtcatgatactgaggggcgtatattggttctttggagagagaactctgtccaggtggaagttttagaggaatccaagcaacatgtgcattgtcatattaaaataatagggcagaaaaaaatattattatgatatttttcactatggagccaacactttagatagtacaagtgatctttggtctgccttatccatgatcaatgtaactaaggcgtggattattcttggtgacttcaatgctgtgtttcactatgatgataggcaaggggaatcctattagtgcggctgaacttgctgattctacaagttgggttgctcaagcttcggttgggccaatgaaacaaactggttcttcatttacttggactaataagcaagatgcctaaatattctcttgtattgatcatgtttttcacaatgagacttgggttgatgattt

SEQ ID NO: 40797 - DNA, 1086 bp, Cannabis sativa
aaactaagcggtctttacatactacctcttatgtattttaaatagttggaaatcacagctccaatctgtggtatcactttcaactacagaagcaaaattcatggcgaccatagaggcattcaaagaagaaatatggctataagaaattctaaaggagttgaagcttttatgcaagggtatattctgacagccaatcttctattcacttgtgcaagaatccattttataacgagaagacaaaacacaatgatattcgattgttttttataagggagaatatagaagaagaagtaataaagctggagaaagtgaagtcaaaagagaaccctgttgatattggcactaagatgttatctgttagtaagttcaagcgctgcttggacttactaaaccatagttgctaagtagctacacatgaaagcactaccacctctattggacaaatatgcttagcttgttggggcttgaagaaataaggtgtaatttgtagtattattccttaaaccaccaaccaagattcgattagttaactaattattcatcaactaacttagctgtcaagtatgacaacaagtattttggatcttttggcctatataaagaggactactcctctcatttcaaaagagagaaataataagaagacacaacacagtaaagggagaagttagagtgagaaagtgagagagatatctgagagagagagttgggattagaaaattgtattgagcatcattgtcgattatgttggctcgggtaagtgagttaatgagtgtcgagagattataccatgtatgacttactgtgattattttcttgtagctcgtgagattgatatctctaattctcattatcacaatgaaaatattggggtggggcagtgtgcttttcaaactagagtatgaccaagttcgcattaaacttaggattgaaaccagtataattctcgtgcatttttgtgtttggaaggtatacagatttatctgtatttatctttttagtttaatatgtatactgatttttttggttcttgatttgtttgttttgatttaacgtttgtttgtttaagtgtaatcttgaagttaa

SEQ ID NO: 40798 - DNA, 2244 bp, Cannabis sativa
  modified_base (1522)..(1529): a, c, t, g, unknown or other
  modified_base (2040)..(2044): a, c, t, g, unknown or other
  modified_base (2099)..(2118): a, c, t, g, unknown or other
taatttctcaatttcggagattttcttaaactctaggggtattatttgacttatatgtgaattatgcaatttttgtaatttttgctcggcgacgacggaaaatacgattgatgactagtttgatcacatgggtaagtttaggaccttatttcttagtgtcatttatattggagaaaataaaatatcggggttgagcggggttatggaatttgaccattttacccctagtattagaattgcttaagttgtaattaaggggcattttagccattttgcaaaggtgtgatttggtggctgccctaggtagtgacacatggcctattatttattcagcaaggattaattaagttatttttaattctcatcttagaaaataagggaaattggaagaaaaagtcaaaacttgagaactctctctctttctctttcggctgaagcaaaccagggggatttcatcttcaatttggtgttttctgaatataaagcaaagtctttgtgaatccaaagcaaaggtaaaaccctaaaacctttatttttctgtttttgaagctttaggttagtttaagtatgtgattttgataagtgggagctgttagggttagaaatgcttagggttcgaattctaagtttgatttgagttaattttagcctctagtagctgatttggttgtgttgtgatgaatttatgcaaatttgagctttgagctcaaagctttgatctctaatggcatgttgagtttcattgagtttttctgtgaattactggttgaaaaacattgtgtataccctaattaggtactctggaaggtttggttgcatttgatggaggattgagcaagaaatagaaattttggggtgaactggtgtaaacgtgctagccggttttggcagcgtccccgaatgctccattttctcaattctcgtccatttcagtgctgtagttggtgtttccctatatcctgagttagtgtaatccctagagaatataatagaacctagagtggtgggttcgggtttcccggattagggttttcgatcatgtgatttacccagtttcattatgtgattagggcatccatttcgcacaagactttccgttcaggttggccagcacactttaatctggaaggaaggtaagaactgtatataatgtgtaatatgaatatctgaatgtaagtatatgtttagtgtatgtgcattcttatatgttgtgattcatatactaccaacacttgtacggttgagttacggagagcattggtaaagtgtatgatgtctgaaagaacatcgtggtgttacaagcacttgtatggaaaggtacaaggtgtttgtggaacaacacttaacaatactcaaggtgcggtcaataccctacctacactagtacaaaggtatactcagtgcatgtggtacatggtacatggtcatatccttagtagaacgttcttactcatctgttgagccttgtaaataggtgtatgggcgcctagatacaaatcgatattatatgatatgttatatnnnnnnnntactgagtctgttgactcacaattctgcttccatgtgtaggtaaaggaaaggcgaaagctgagcaggagtgagcctgagctaggatgagattgtacatgtcgtggcagcgtgacctggagtgttctgtctcgggacatctgggtatattattttgtagtcactgtgcgacttggatattgtattttggcaattttttgtataaaagttaagaatcgggatctcggtgtttgtaaattaatatgtaaattataaagtttaatatttattataaaagttttaatttgacacatttttcaagataaatctttgattagcaaaaaaagcactgtagcgtgccttagcgttagggtgttacaatagccttccttttatactaatttccactagggttagagttgaattatttggaataaaaattgacaacaagggagtaaaataacaatctagtggccgaccacatagtaggccctacactagtttggtttttgttatttttctcaactattttannnnnttttcacaaataccactttttgcattttcaaccctataaatgcaaaaactatttnnnnnnnnnnnnnnnnnnnnatcaaataaaattatcatttataatatttattatttagactccataaactctcttaattaataaatagccctaaatactatttcttcaccatcaagccatattttagtgaaaaattcataaactag

SEQ ID NO: 40799 - DNA, 1129 bp, Cannabis sativa
taaataaactgaaaaaaaaaataatccttatggcttttggcgtcagttcctaggggtatatatggcgtcggttattttctaggaatcgatgccaaatatgcccctatggggtcggttcttagctaataaccgacgacataaggtaccatatcggttcttttcaatactacagtcgcccttattaacgttgatagtgaatttcgctaaaaccgacactgacaggccttaaaaactctcaaaaaagtgtttttgtagtaatgtatatttataatagtaacacatcaaaataatttcatggaaaaaaaaaaaacacacatcaaaatgatagtgaagacatctaatagccatactatagccatactaataaacatctaatagacatctaatagctgttgaatgaaaaaattgggaagttgaaaaaaactttgaatgatttgtcttcacggcaagagctgggcacttgggctgatgttaaaagagtggaaaagcaattgaatggggcattagaaaaggatgaacagtattggcgtcaaagaagtagagctttgtggttgaaatggggggatacaaatacaaaatattttcaccataaggcttctaggaggaggaaaaaaaatgagattaaaggcttgtttgatagtttgggggtttggcaaagttatacaaatattgttgtgaagctggttgaggattatttttcctctcttttccaggctacttcggctagtgatgatcatattaatgaagtgttggttgatgtgcaaccgaaggttactaatgagatgaatggaattttgcttgctgaatttgaggaggcggacattgttagagcagttaaagaaatgaatccgactaaggctcctggggttgatgggttaccggcattgttctatcagaagttctggaatactctcaaggacgaggtcattgcggtttgtcttcgctgccttaatgaaggtgcggattttagttgcttaaatgataccatcattgctttgatacccaaagttgagaaggccgaacgggttgaggaattccaaccaattagtctctgcaatgttatctacaagattatctccaaatgtctagctaatcgattgcgaagcacgttggatggggtgatctcgga

SEQ ID NO: 40800 - DNA, 1679 bp, Cannabis sativa
gtaaaataatttccaacagtaggcctaccagcaaaagatagcaaggcacttcaacaaacatgtcaagagcagaaattttttcatagaagacatggtgctttgaatagtgttcctaaacactaaagactctgcagcaggagtgtttaggcctaactggaaaggcccttatcaagttacagaaataactagtaaggaatcctacaagctgggaaggtacaacgataacatggagctcgttctcctatcaagataccggaatagagagccccttcgcaaatactaccaataactagcttatagaagtctactccaaagtagcagttctatctactcaacattaaagtactaaaaatgctagcacccacgacccttcttgggcgtggtctcccactgttcttcaacagtggtctcggctttagtaggtgagtacgagtagccacttgacatctagaagctaaatttgtgcaatataggcttctatattcaatttatgtagttgcacaacagcaatgaccaattattgaatacttgccatatttacattctatttattgtgtttatgaaccagttgatcacatattaacttttcaaagttattctattagttccaaatgcgtactatggtaccctcacaagacagtacccatgcaaagtctgtgaaacatggtgaatagcaagtgaccaagactcttgtctgcaaggtcacttggggggcacccatacggtacaacacatcaaactagcataaagaacttatgtagagaaattttagcacttagtattaaatactaaacttgcctctaagtcgtgcaagtatacatcggcttggcaaagtaaatccagacccatacttgtcaagaccataataagatagcaatgattaaagactacctggtcagtcaaacaatccatgatgaaaaagcaacatgatcaaacaccagtagtgttcaaaaacagagggcttatgtccaaagatacgaacatgaagatcctagggctaaaaaataaagtaatgttctaaaaaggcctcaggccacataggacatgaaataatgttctaaaaaggctttaagccacataggacataaagttttaaaaaggcaatataggccacacggaacgcaatgtgactaatgttcctaagctaaaatgccataggccttaaaaaagccacagactatgcagaacatgaaaacatagtctatataatacaaacatgatgttgaatactaatagaaattctatttacatgtgtgtaggggcataaacagctaaatatggagccgcgtgattaagagccattgagtccaggccggccccatcatcatcattttagtcgacctggtgggaaacatccaggctgaccacctcctccacttgtgggtcggccaacactttgccatgggtacccaatgatgacccctctcgataagcagcagtatggtcggtctccttttagcactcaaataatgccttcccataagctaatgttctctccacaaaggcctaaatacccatgtagggcaaatcagatcgagggttgtgcaggcaaaactcgtaagtaagttcggaggataggtcgatgtaatcttccttaatggcctactagccatcaagagcctcctgtaacattcttcttgtgatcctcaagattgggttacaacccaaagatgagagca

SEQ ID NO: 40801 - DNA, 1567 bp, Cannabis sativa
actaattacaacttaaagcaaaaaaaaaaattatatgagaatggttgagcaatgattcaaaattaaaataactgtaattaaacttgctaaaattaatgctattgttgcaagaaaattatttgcaagaaatgtaatatgataaaaagtggcttgaatagctattcccccctagtcaagttttttcctagttattacagcatcggtttagcattattctagcattttgacacagagataacataaattcttccaggcttatgagaattttccaaaactcacaaattaatgtctaccacttatctcaatataatcctatatcaaaccagcaagcagaatactattgaaacatcaattcttaagttatgcaaggtaaatgaaatatttttattccacttacaaagaaaaacctaaatctaggatttctcttgctccatccaagtttaactactagatctagcccttccgaaataagatctagcttaacaaattgctactcatggccaagaactaacaatcaaataaaatggcaagctcacttgaatgaataaaggtaaagatgctaaaataagcttaaaaataaatcatacccaacatagaagttcatagccattcaaatctcaaaaagtctagctcatattcaaataagaaaataaaatccaaactaaaaagtatttctccatggctgctgtcctttgtttacaattcaagaagttttaatatctaaataaaagaaacaagaaaagaaaagaagaaagaaaaataataagggaaagtaaaagaaaatcaaacacaaaagcttgtgtccttctctctttgcactttggtcccccctctctttccttcctctgttgtacttttcttctgcaattacttctttttcaaaaatggcagttgtatcatgttcatcatggaggtgtgtacttagtccctcttttagttgttgggtgaatagggtacaaaatagtagaatttacgtggtgtatggtttttttaaaccttttatgataaatatggcatatttaactatggacccatttatatggcttttttaaactttggccacagtttatgggattttaaagcccttacggctggaataattttgccaaaagcccatattgtgtgtattgtattttatttaggttattttagtaattttaggtgtttaaatttttggttcagtttttttttttttaagatagtcgtttattgtaaaggagttttgcatgtaagcatcacgatttgatggttgcttccccattttaacttactttttgagttttcaattcatccctataaacactaaaccgcctatttctttagctatctccctctcatttctcactcccctctctcctcttttcttctacgttttcttctctggttttgccttttttttttgggctagcgattttggacgaggggacgacattgctcattttacaacttggaggttgcattgttcgacttatcttcaaggtattgattctttctttccattttattattttacagattttagggttttttttttccattttgatttatgtgtttgttgaagtttttt

SEQ ID NO: 40802 - DNA, 2040 bp, Cannabis sativa
ggggagactattatggcccatccctaggccttttttttttacattttggacaacttttattgtaagtttatatccattttgcttcttctctctttttttatctagcctatttctgcgcatattttatgccttggtaccccctaagtgacatgaaaaaggactttttgggtcacttaacttaaattcatatgagataacgcatatatttagtctgtcataggttaagttacaaaataaggaagaatgtaattattgaacttgtaactattgatagtacttgtggagatggtcagcattctaggctctagatactatggatccgtccattcttttgagcttataagtgtcggagcctatttcatcgtcaatttcatatgggccttcctaatttggcccaagtacccccactcctggctcttggaaggtcaggaagaccctccttaggactatatcaccaatggaaattttcttgtttttgactttagagttaaaagtattttgccaccttcttttggtatgctaccatgcgtatttgagattcctcccagatgttgtctactagatccaacgcttcttccagtaacgcttaatttgttgccagatcataggtggctcttctgtgggatgggattatagcttcaatcgggaccatggcttcacattcgtacaccattgagaatggggagtttccaatcgtggttcttgtagtggtctggtaggtccataacacacgtggcagttcctcatgccaattatttttgtaggccaacaactttttctttagggtgacctttagtattttattgacaacctctgcttgtctatttatttgtggccttgcgactgcaaagaaacttatgatgactccgtgttggttgcagaaatttgtgaattcatcacagtcgaattgttttccattatctgagactattttgtgaggcagcccgtatcgacatataatgttttttatgacaaagtccaaggctttctaggcagttatggtcttcatgggttcgacctccgtccactttgtgtaataattcaccgccactatggcatattttaccccaccatttcccataggtagggagccaatgagatctattgcccataccgcaaagggccagagactggtcatcaaagtaatattgggtagggcccttgggatatttgcaaacctctagcatggatcacacttaaagacgtagtctatacaatttttcttcattgtgggccaaaaatatccttgtcttaatatcttttttgagaggcttgggcctccggtgtggtctccacagaatccctcgtggacctcttgtataattcgtctaccttcaggatccaacacacaccttaagtatggcatgttgagcccccttcgataaagaacatcgtcgatcattaaataccgatgagcttggtactgtaactttctggacatggtcctttcttgaggcagttctcttgctgttatgtacttaatgatggggtccgtctaatctcacctttgttcgttggtggccactatttctttggtcttaatgctaggttccgcaaggtgttcgataggtaccatctccagcctttctatctcagctatctgaggctagcttggctaagcagtctacatgagcattcttttctcgtgggattcgctccaccttatattccttacactcttagagctactccctaaaaattgatacgtaagcgaccatcttttctccccgggtttggtattttcctgacacctggttgaccaccagttgtgaatcactataagcctttactctgttggctcctatagccttggccaatctcaatcctgctattaaggcttcatacttggctttgttgttagaggttgagaacatgaaccgcagtgcagcttggagtcgtaacctgtctgaggagatcattgctattctggcaccagtcccattttcattggatgcccagtcaacatatactttccacgtgggcacatcctgagttggcatactggctgtaaagactgcctatgttaatatattggtctat

SEQ ID NO: 40803 - DNA, 975 bp, Cannabis sativa
  modified_base (476)..(477): a, c, t, g, unknown or other
caatataaatatatcacgtgtacaaaatagtatacatataagcagttcatataggtagttaactgtgacaaatggatgtcacaataaatttgttagcggttcaataactgagggttttaccaccaaaatttgatattagatagttaaatgtaagtgaaatagtttttggcagctaaatcctcccaactgttgtttcacttgcatttaaccatccaagctcaaatttcggcagtaaaattctccaaactactgagatggtagtaaatttcaggtgtcattcggttaattatcactatggactgtttatgtgtactcttgtatacatgatacgttcatattgatacaccttatataattatttaaaaattatttttaaaattcattctaaaactaaataaaattataaaaataaaatgtttaaaaaaaaatattatcatttttaaaataatttcatattttttaaataataatattanntgtaccaatataaatgtgacacatgtacaatagtacacataagcagtatatattaacaattaattgtataaaatggatgacaccttaaatttacaagcagtagtttggatagttttaccgtcaaaatttaagcttagagagttaagtgcaagtaaaatgatagttgagagaattttattgcagaaaactcgcaagcgaaatgatagctaggagggtttagctgtcaaaaacttttttttattacaaccaacccaaagttatttcaagcaccaacagataaaaaaaaatgtaacatgtgtagtcataacacctccaaatcaagttattattaagttttaattttaccaaaattattttttcttcttttgaaaaggtacaaaatttaaatttaagtactactttgtactatattaaaaaatataaaattgaattatcatctatttgataacttttacaaaatataaaaagggtaaataatattttagaccctgtattttg

SEQ ID NO: 40804 - DNA, 1004 bp, Cannabis sativa
tccactccataagggcctctttctgttgggcttcctccgggatagctctcttctgcgcccctgactcccgaagactcttcatggcctcctccatgcgcctgaactcggacatggtatacccatggtcaattagtgtgttcgagagatgatcggtctctgtagcaatctggcaaccaacaaaaaatacaaatacgtgatctcaggcatcaaaaagaaaagaagcttgaatatatctctaacagataggagcttaccacggtaagggccgcgctcacgtccttgatttggtagacgagattagtagaagcacaagtcgcgtatctcttcatcaggagttgatttaggccggcagccaagtggctcatcaattgtgaagcaaagggagccagggtcggtccaatgaaatggttgaaccagtcagtcacgggatccagatttaaatccctgacattcccggcgtactcactgagagtaaaactatcctgggcctcccgcagaatctttttcaaggcctctacttcagtgttccccttcgtatactccaccgtggcataattgtgcttggcaattcagagctaagtcttttcctcatcaacaggattgggggttaaggcaatgtcgggtggcactgtatactcgtccacctcggacggaatccctgagctgaagctgggggcaggagtgtttacgccttgtggcttcttgatcgcctctgtctccaccatcttgcctttgtgctttcgatccaggggaggaaggatttcaccttcttcttcttctacttcctcttcctcgtcgattaaaacgactcggtccaggggtatgctggaagaagacctcccgggagtcaccacaaggtcttgtgcctaaggcaggtctggctctagattgtaggtctgggcaagagcgtccaagaggtcatccatcgacttcgctgcttgaagaaatagacaaataaaggcattagagcattatcaaaaaatcatgcatgcaagaacaaagta

SEQ ID NO: 40805 - DNA, 2513 bp, Cannabis sativa
ttttaaaaacgacgcaaaatacaatactgagagttaataaccgacgcaaaaaaaaagtgaaatccttaaagcaaaatcctcagccctctctcttcagacgcgcgattcagcctcacactattcacgtctctgcgattctcttcagcgccgcatctcctcttcagacgacggtgagaactcaccctaaccacctcctcttcagacgattcgacggtggtcggtggtctctcttctcccgtgagttccttcatactgcctctggttgtttctgagttcctttcttcataacctccgatggtcaaaacctcccgtgagttccttcagacgattcgagggtggtatgtttctattctttaattgattctcttaactctctattttgatttcgattcacttaggaaagacaaaaaccgattccagcaaagaaaaagaaaatgatgtaattttcttgccctaattttctctattctcagtccctaagatgaagaaaggtgataattattttttccaatcgtaatttagcaacttaattatatctgtattgaaattctgagaagaatgaaagcttgaatttcactcatggacttgagtgaagtattaattgctctttgtgtttgtgtctaatgctctttgtgctgtttgtttttattattaagcttgtgtttcgtaattggcttacaagctttaggactaatgtttttcagatgatttcaaagttggagcaaatcagaatggctttggagatggaaactggtggaattgtcagcttgagttgctgggcagaagctgctggtattgatgaaaaaatgcttaagcagcaacttttcggttggcatcgtcaggacgaggttgtaaggagtactaagtccttagttctataccttgcaagaaagtataggggtttagcaataaccttggatgatttagttcaggtatgttagatatagcataattttaaaactttacttttatagcagaacttctaagtttctggataacgaatgatattattttcgttttaggttatgaatatcaagtcttacaaccacatgatatcacagaaaatactcacaaaattatagaacttcttagatattctgatgaaggggttgtagttgtagatactctatcgttcatcgccaaggtacttaacctagttctttgttggtttttttggtaatttaaaatcattgagtggattttttgtttgcacaatggggcaattttagtttatttatagagttttgtttctatctaccttaatcaatgtatatttttgggtagtgggaaaatgaacgaacatgaaatgcctgacatttctacatagatttatgtgttcgtaaaaaaatgtttgtgtgatcgatattttttgggaattttataaaatttgaatcataatagttaaaagaaaatgggttgagattgaacccgtgattcttgtcaattgtcaatggtggttggaaattagttcatttacttaaacatttgctaaatcagctgccatatcaattagctggaattagatttaagtcagttatgttcgtttagatcttgcagcagctgactctgtctatatatatgtctcaacaataatttcagaagataagatacattaccttcttctttcttcaatactttctaaattttaatcatgaagctggacactagcggtctggattcaagggtgttttttattgaatttcatgtgtgtttcctctcttgcgaatatgggcaaactctgatataataaatgagtttgcaagtcccaagtgcatgggagcataaatagattggtttattatgaactttttaagaaaagtaaagtaaaattgatatgaatgtagatttcacagtgcaaaaaaaaaaggttgcgtctttcataatttggaattggatatagctagagaagaaagtagaaaatgtagtagtatagaagaagtagttactacttatccagagcagatgtagtgtgtggtacaactctctctgctctcatgatgagactcgtgtcatggggttgtcctgtatctataattaagagcacctaccctcactaacaagctcagtaaatgtcaagccttaataaatatctatatatatatatgtaatgtatctcattaataattaaggagaattgacttattctatagtggattaaatatgacaccaacatctagcttaaattgaaaacaactattcaataatagtattagaattatagttttttttattattattttcattatagactctgttataactcgaatcaaataccaatgtggttatttaactaacatattaaatttgttgtgcggcgtgtctttttattaaacatagcatatatgtgttaattgtcatatattcaaatattgagattccatctaagaacattttagcaggtgaaacaattagtgtacttctcagtcaatgattactgaagaaatttgaaactttaataatttagtgagttcaaatctttattttaataagtgagaagattaagataataaacg

SEQ ID NO: 40806 - DNA, 3150 bp, Cannabis sativa
tttaggggtaagtgtacagagtttcagatttagggtttaaggtttagggtttagggtttaagggtctgcttctagttccagttcacattttgggtcataaggtaaaatttaaggttcaggtgtgggtataggtccgagtcctggtctgggtctaggtccgtgttttggtttaggtccgagtcttggtcccaaatccagacaccaaccacatgttgagtctagtttgagttcaggtacgggttccagtttaggtccgggtctaggtccgggtccaagtccaattccaaaatttagacaccgactatgggtcgggtcaaagcctcgggtcttgggtcctgggtctcgagtctaaaccaagatcttagtccagttctagctcatgtcttgtgtcctggtttgggtctcaagtcaaggtttgggtctaggcttgggtcttgggtcctcagtcattggtccatgtccccgattcaggttaaggtcctaggtcccggtctaggtttggttcccagtttgagtgcaggtccaggtccatgttgcgtactagtccttgtctcgggtcttgatcttgtcgatgtataggtcacgattcgattctcaggtcctggtcccgggtccttgtccgagtacttgtcacagtttaggtttaggttttggtgctagtctgggtctgggtcccagtcctgatcttgatccaggttcgagtcctgagttttagtctgagttatgttacaagttcgggtccgagtctgggtttgggtcttggtctaggtttcagtctgtgtttgggtttgggtattggtcttgttctgggtctgagtctgggtctgggttctggttctggtcaaggtcctaagtcacgggtcctaggtcgcaggtcctagcgcaagtctgggttcaggttcgggtctgggtcttagaaatggttccaggttcgggtcttggtaccattccaagatctagacaccaactacgagtttggttgaagcgttgggtcgtgggtcaagatccgaatcttgggtccctgcccatgtctgtgtctgggtctgggtctgggaccaagactggggtctaatcttggatcccagtcccagtcctgggtcctgatcttggttctaaattagagtttgggctcccaatctaggtcttggtactgggtccaggtctgagtctccaatcccagtccggaacctgggtccgggtctgggtccaagtccgcgtctgggttcgggtttgtgtctcgagtcccgatttgagtttttattcgagtccgtgtcccagtccaggtttaggtctgggtcctattcaaattctagtttcacgactcaaaactagactcgaacttggacctaggtctggggtacgggtctgggtttgggtttggttctaggtccgagtctgggtctgggtttgagtccgggtatgggtcccagatccaaacactgactatgagtcaggtccaagccccgggtcccagtctagttccacttcgggtcccaggtccaactccgagtccaaggtcagggtccgggtctgggattgggtcttgggtctctgtcccagttctgatgcccgtttctcgagtctaggtccctcatctgggtccaggtcctaggtcccgatccgagtctaagagccggtcggggttaaactcctggcccgagtcttggttcaggttccgatatcgatctatgtcctgatttgggttcgagtcttggtccaggttcgggtttaagtctcgagttctgatctgggtctgggttccgaggcgtaggtccaggtccgggtcctaggtctcagtctgggttcatgtttgggtttgggtcctagtcccagtttcgattttgattcagtgtttgggtttaggtttgggtctcggtcttggtcggcgtctgagtcctggtttgagtctgggtctgggtctgggtccaggcccggatcccggtctgggtctttgtttgggtccaggtccgagtttgggtcccgggtgttggtctaggtctaggtttgggtcagggtctcggtccggatctaggtcccaagtttcgatcccggtctaggtctgggtctgggttcgagtctaggttcgtatccaaatccctatatagctttaagtctgggtctaggatcaagtcccaagtctaggtctttgtccaggtctcggtcctggtctgggtacacaactgtgtctggcccgagtttcggattaagtttggttctggggctaggttcaggttcggttctaggtttgagtccgggtcctggtcactatcctagtcttgttcgagggtcctagtctggcagttcttgtttaggttcccgttttgagtcccgagtctgggtgagggtcccagtttggatcctggtccaggttcgggtcctggtctgagtcccaaatctggatccttgtcacgtgtcccggtctggttctggttcaggtccccagtcccaggtccgagtttcggttcgggaccgagacttgggtgcagttctaggtcccgaccccatttctctgtccctagtctggttccatgtttggttttgagttcgggtccagggttggcaccgagtccagatctgggttgagatccaattctggttctcggttcaggtctaggtctgggttggagtctaggtcctggtccggctatggttccgggtctaggtccaaatcgtgtaacggttctaggtccaggtcgatgtcttgggtgcggtcctgttcttgggtcccggtctacttccgattttggttccaatttcgagtcacagggtacaggttaaggtccaggtttggatttgggactgggttcgggtcctgatctaggttcaggtccggggcttgttcccagatccagacactgactacaggttaggtccaagccctgggtccatattcggatccagatctcgggtcccagtctagttccatctcaggtgccaggtcacgagctcggtcctaggttcaagtccgtgtctggggtcgggtcttaggtcacggtcatagttccattcccaggtccctatcctgattcttggtacaggtcctggttctggtctggatttgggtcccggtctaggttcaggttgggtcgtcctagtcgcagttccaattccaattcggggtccaggttttgttctcggtccaggttgggg

SEQ ID NO: 40807 - DNA, 936 bp, Cannabis sativa
  modified_base (863)..(865): a, c, t, g, unknown or other
aattattgaaatggtggtctagagtgcatctctatttctatttttttttttttaattttttgatggaacctatttgtattattttaatatagacattattttatcttttttacaagatataagataataatgtctcattataagtttacaattattaatatcagtagtgtctagtacaagtatcttataaataattagtgatattatatataataattattaaattaaattatttgagactcgatacttaataaaactaataataatatgacactattaatatcttttagcatttctcgtaaatcttaagacctcaaagatattgaatgatttacaagctgctgagggacagaagaaaaaacaagatatgatagaaataatgaaggcattcaattttattatttttaatttatactattctttttaaaagtaaaaaaaacattaattaattaagagtaaagtttaaaaattattttaagttagaattgtttttactttttgaacaaagttagaattattttttaatataagactgctttattaggtatataatttttttgaggtgcatgtatcaattttcattacaaaagactgttattatttagtgataactttttaatcacaacataatttttttgtgattaaatttgacttttattcacagcaaaatgttacttgtgactaaaacataatatttgaatataagttgtcacaacaactattgtgattaattaaatatacatttagtaacaacaaattgtaatttttgtgactattagctttagccgcgaaccttttagtcacaatatagaaataataatgatttataattagtcacaattttttttacttttaatcacaannnttgttgtgactaaaagtaagattatttgtagtgtttgtatatgattttatcataaaataatgtttgaaata

SEQ ID NO: 40808 - DNA, 3296 bp, Cannabis sativa
  modified_base (153)..(171): a, c, t, g, unknown or other
gacactgcctgagagcttggaaatgatagtcctacccccaaacacaaaaaagagagcagggagacctaagaggagaagaataagttcaaaaggagagccaaatgtgcaactaaagtgtggacattgcaagaagacagggcacaacagaaaaannnnnnnnnnnnnnnnnnnaccacgaaagcaacaagaaccaaagcaaccaaggcacaagaaagcaatgacacaacaagaataaccggttttattgaatacaaagatacatttacaataaaaaaacactatatttgattttgtatgttccaataattgtttcaatatttgttgattatgaaatatatcttcaaacataattggttttaaaaaaaaatgaaaattttcataatatagaattgccttgtaaaaaaaacaacaaaaaaaccggttatattcaacatgcaccaaaacaaaagaaaacaaaaaaaatgaaaccggttatatttaaacatgaaccaaaaatacatgttctataataaaaaaagcttctatataatatatacaacacaaacaacttaatgaacataaaaaatatataagataactaaaataataaccagttaaaaacaaatcaacattaaataatgacctcaaaaactggagaagaaaacagttaaatatacaaataacattgggcattgtaagtaaacatgaaaaaatcggttaaaattaaacaaaaaactataaaaacaaaacacaatgtaacaacaacacttcacaaggaaaatgtaaaaaccataaaaatatgtattacaaaaagaaaaatcagaaaaatctaatatatacaacacaaacaacttaataaacaaaaaaaatataagataactaaaaaaataaccggttaaaaacaaatcaatattaaataattaccttaaaaacttgaaaagaaattgattaaatatacaaataacattgggcaatctaagtaaacatgaaaaaatcggttaaaattaaacaagaaactataaaacaaaacacaatgtaacaacaacacttcacaaggaaaatataaacaccgtaaaaatatgtattacaaaaagaaaaatcagaaaaaattagaagtatacttaaaacatataaaaactgattccatatattgtcaacctaacatagaaaatattaacataacataatgtattgttcaaaaaaataattaaaaaaaacactaaacaaaactacaaacattgaatctgtccagaaaacaatacaaatatttaacaagaatcaaatttcttcttcttggacttctttcccttcggcctatctttagttgaatatccttcataaatctttttctggccatagttatacaaagtcacagcgaggtcatccctatagtgtgtaatcatctcatccacattaggaggaatctcattaattttgccccggatgaacagatcagcatacttaatcacaaatacaccacaatcacttaaaaacaaaacaaaaataaataacaatacataaccagttatttaagcagaaaaaagaaacaaataaataatcacagaagtcataggactaaaaataaccagttatttacctgttgctttgagtggggagcttgtccacaaactcatatgcaataggagtatccttcggcaaagcataagggcctgactccaaactaatatcgttcataccatcataaaaatttaagaaatcaaggaagtatggcagtaactcacagtacggaaggaaatcagacaagatcttcttttgattcgtctttgtattcttcatggaattgaatacgaagatcttcctccttaaaatgctgaagtgaagaaatatccaatgttgttgaacaccgacatgacacggaccaacaacatcgtcaacaccgattcaaggctggaagcaaaagttatattgccccagaatgtaattggtgaccttgttgtcgtacttgatgacactcggatcacgtttcgcctttataaaatcagcatacactcccttaatagttgcatcaaaatatgagcatgtcgtcgtcactcttttattaacactggcatcatataagatgctcttcctaagatagtaaagtgccacattcagatgctgcacacaataaacaaaaacaaccagttaaaaattgaaaaaagcaaagaaattaagaaaaataaaaacagacagaaaaaaataaccagttaagtaccaggtcagtcaattcttcaccacaaatctgtaaaatcacaaaccaagtcttgtcatcaatctgagctatgttgaaatcaaagggaggattgatgtcgccagctgttttctcattgttcctgatatcacaaagaaaaaaatccaaaatgaaaaaaaaaaccagttaaaaaacaaatatcagcaaccattaaccgagcaccttcaatccatttaacgtatcccccgcaatctttagggcaggtgctcttcccaatctctttaacaaaaggaaacaactccttagggtcaaaagctaattcgctagatgcctccttatccttcttattctgaatttttggttcagaagaaccaaactcgttgacaaaaggagatctacaatgcaaaccaggttttgcttatctcttgacaacaacactggattgcaaaggcattacatctagaacctcaacctcatcttccacagcaggcgatgtagactcaggaattgacacaaaatcccattgcttattctttgcactaagtggggaagaatatgcccgagtgattctatcaaccaaatcaaaaatggattggtcgactgtaatcgtttcatacgaaaacacactgccctcatccctcccctcacctaagccagagtgaacctggaataaaaacacgaatcaattaaacttacaatctaaaaaaaaccagttataataaacacatccattataacaaagaaacaaacatacaaccttatcttctcaaacgagtgacaatttcaccccaccttcatcatcatcatattcaggaagattggattttgaaacaacctacaaagatagaacaaaaaacatagtcataaccggtttctaaataggaaaagaatataagaaacaggaaatgcaaaaaaagaaccggttataaaacacaaaaaaacaggaaacataaaaaaccatagaaaataaaaaataacgggttataaaacagaaaaacaacaaactaaaagaaaaaaatacctcgggtgacgacagatcggaaaactcattgtcattcccaccaacatcaagattctcagagcgagaatcttcaaccttctcctcacaatctttgggcacagatga

SEQ ID NO: 40809 - DNA, 2270 bp, Cannabis sativa
  modified_base (575)..(584): a, c, t, g, unknown or other
  modified_base (728)..(753): a, c, t, g, unknown or other
aataaataaaaacaaataacacgagataatttaaaccagttataactaaaatagaattacttatataacataatgaacacaaacaataaatatgcaataacgcaaaccgattataattaaaagaagaggaaatcagttcctaaaatgctgaaacataaagtaaaagcaaaactagttccacaacaaaatatctcataagacataacacttcataaaaccggaaccggttataatttttattttttttttaaaaaaaaaaaaagtgagaatcaattctaaaaaatattgaggcataaatatgaaaagaatcagttccataacaaaataaataaacacaaataataacacaataatttaaatataataaaaaggaaccggttatatttatcaaccagttaaaaatttaaaacaaaaaaattgattccgtaaaacaacttagataaaactcacacacaaatttaaataaaataactcaaacaaaacatccattcaacatgctccaacccaccaaataattacacccataccatatctaccccaaaaatacccattattatgttatataaccggttctnnnnnnnnnntaaccggtttgagttatttcgtgttatttacttttattcattataatactgttatagaaccgattctattttgattataactagtttaagttattttgtgttttttttttatttttatttattatgttacagaaccggttatannnnnnnnnnnnnnnnnnnnnnnnnntttgtattatttatttttattcattatgttatagagccgattctatttttatttatatttgagatatctacttctagtgacttttctagcgacaatgacttttccgacaacaatgacttttttgacaagtttccggtgacaataactttcttccggcaccagtgactttttcaggatcctcctcttgcgatctctcctctcttctctcaggttgacgactggcatcagggacaacaggttccctacttcaggcagagtcgcgtgtaggttggtttaggccgagaccttcttgttcagtcatttgttccctgcgattacgaatattgttaggacgctcagtatgacgtctagttgtattggttacctgagggttgcctgaacgtgggtttaggacctggggtggacgtcgggtcctgactcattctcttccatcgacttcagcttgcagagcacgcatctgttcctgcatggtcgtgtactatgctgtcgtaagttggataatgccttcggaggccaccactggtgtaatcgcgcgggaagtgacctactgtagtcgctggtgtggatgtgtccccagcatgtccagcaacttttgggaatagatcgagggggtgacgttggtccgtcccactcgtcctatgattgtatcagttggatttgttccatttctagggataggaacgtgcatggttccaacattaaaggatcttgttatgtccatttgtttggttggcagccatgatgattttgctccaaaatcgataagagagttctcacaaaaggcaccaaatgttgtcggaggaattcagacaacaccaaaatgtatgcaaacactaaataatcaaaagaaaaatagcaattactctacttagaatagtgagtattcaaagaaaattgcctagaaaataaaacaactggaaaaataaaatgaagacaagggaatatagtggttcaattagatcatggtctgctgagtccactgttgtaaattatttctgcttaatttattcatcttggatcactcctttatgtagaaagcaagtgttcttttagttacataactgattagttatagaactgctttacaataaataacaatattacatcagaataaaagtaaaagaataaatgaagaacaatttaatccgttttaataagtgcagcaacgtatgtgacttataaggtgcgagttgtctgttcatattcccgcacaagctcgtaggctttagatgcgttctatattcataaaaagaggttgatgagcctatcaccaggatgtctacgttctaactgagtcgcattaacgaacatcttatgtatcaacaacatgagacacgcgagtccctattaggtcatcaagtacgtttcatcattcagaccaatcgttatgtaaaaatgcgatctttacctagttgtaggagaaggctacttagtcatcgcatatgttttgatatatgtgcaacttgaattaatccctatcagttctgcttatcttacactgcgcaaggcgtagtatg

SEQ ID NO: 40810 - DNA, 1623 bp, Cannabis sativa
ccgctcttccgatctgatgcatccagacagggtctagggtgtgtactgatgcaagctgatcaggtgatttcctatgcctctcgttagttgaaggattattaacagcggtaccggactcgtgacctagaacttgccgcggtagtgtttgctttgaagatatggcagcattctctctactgagagaaatgtgaaatttatactgaccataaaagcctcaaatatttccttacccagaaagatttgaatatgaggcagagacgttggttagagttggttaaggattacgattgtgagatccttcaccatcttgggaaagccaatgtagtggctgatgccctgagtaggaagggtcccggacaagtaactagtatggttcagatttcatctcagttagcaaaggacgtggtcagatcaagcatcgagtttgttgtaggcaaacttcataacttgacgctgcaatctgatctactagaatgtattaaagctgctcagataactgatgcagaattagtaaagatcagagatgaggttttagcttgtcaagccagagactttacagtgtcagatagtgggatgctgttattcaagaccagggtttgtgttcctaataatgtggaacttagaaatgaaattattgaagaggcccataccactccatataccatgcatcccgacacaaccaagatgtatcaagattttaaaccctacttctggtggagcggaatgaagaagaatgtggtagaattcgtattgagatgcctaacttgttagaaaattaaggctgaacatcagagaccggcaaggttgttgcagcctttaaccctacctgagttgaagtgggaagacatcacaatggacattgtggttgggttacctagaaccacaggtttatttgattcaatttgggttgtggcagaccggtttatgaagtcagctcattttctacctattaaaataaccttttcagtggatcagtacgcgtacttgtatgttaaagagatagtaagattgcacggtgtgcaaaactccatagtttcggatagacagccaaagttcacttcaaaatttcggtagagtttacatcaggctatgggtaccaaactgaaattcagtatagttttccatcttagattgatggacagtacgaaaggacaattcaaatactagaagatatgttacgagcctatgttagggattttgagggctcctagagtaagtacctaccgttggtagagtttttgttcaataacagttatcaaagtacgataggggtggctccctatgaaatgttatatggcagaaagtgtagatctcccattcactcggatcaaacatgagagaagaaataattaggtccctagtcaatacaacggactaatgaatcaattgagaagattaaagccaaaatgcttgcctcttagagtaggcaaaagagttatgcagatccgaaacacagaaatgtacgtttcaagtaagggatcatgtgttcctacgggtgtctccaatgaaaagaatcaagcgtttcgggaaaagaggcaagttatgtcctagattcacaggttgtttcgaaattctcgagaaggttggacaagtggcatatcgtttagctttgcctccagctct

SEQ ID NO: 40811 - DNA, 4366 bp, Cannabis sativa
  modified_base (52)..(62): a, c, t, g, unknown or other
gtttattttcatcgttttagaaattcatattaggatgttaaaaacatacttnnnnnnnnnnntagatcttggtaaaatatattccatcacttctccccccgagcctcgtactctccggatacatgatttaccaccaactgtgagtcactatagatctcaatgtgttcggctttcatttcccgagcaagtcttaggccggcgataagagcttcatattcagcttcattattggatgccttaaattcaaatttgaccgcagcgtgcaggtgttgccccccatgtgtgacaagggcgattccttcaccggacaactgattcgtagccgacccgtccacatgtaacatgtagcttgtagcttccaagtcagcctgtcttctgtcttcaccatcgcacggctgagatacttgtactggctctaggttgcttactaaaatgctttcttctttacccgtacattcaaccacaaaatctgctaaggcttgacctttaaccatgggctgaaagataatctcgtactggctcaactccactgcccatttgagcaaccgtccgaaggcatccggtttttgcaatacttggcgtaatggttggtcggtgtacacccgaacaagatgagcttgaaagtaggaccttagcttttctatcaatgggtgccgaccttcagcttcaatgagccttttgctgatgtagtagacctggtgttggatattgttctcttctctgatcagtacggcacttacagcatgtttcgtgacagccatgtatattcctaactcttctcagtccagaggttttgagagtacacgaggttttgctagctgcgtttttagcttttgaaaggcctttttgcattccttcgtccattcaaattgcttatttcctcgcaagatgttgaagaatgggacacacttgtttgttgactttgaaacaaatctgctgagtgcggcaatccgaccagtcaaactttgaacttccttggtttttgttggcgatttcatatctaggagggctctaattttctctggattagcttcaattcctcgggcattgacaataaagcccagaattttacccgagctgactccgaaggagcactttagaggattgagtttcatgttgtattttccgaggactttgaagcattcgtccaggtcatctatatgcccccatccttcctagatttgacaagcatgtcatccacgtacacttccatatttcgtacgatctagtctttgaatattttatttaccaatatttggtatgtagctccggcattcttgagaccaaatgacatgaccttataacagtacaaacctatatctgttcggaaacttgtatgttctttatctggtgggtgcatcttgatttgattgtaccccgaataggcgtccatgaagcttaatatcttgtgtcctgttgttgcatccacaagttgatctattcctggaagtggaaagcagtcctttgggcacgccttattgaggttggtgaagtcaatacatactcgccactttttgttcggcttgggtactagtacaggattagcaacccaggctgggtagaaagcttcaattatgaaattgttgttgcgcagctaaactacctcttcttttagtgctagggctcgttctttgtccaacaatcttattttttgttgaacatgccagaaattaggatcaatattcaggacgtgtgaaattatagaaggatcgattctaatcatgtcctcatgtgaccatgcaaaaatgtccaggtttgctctcagaaattttatcaatgctgattttacttcgagcagcaaacctttcctaattttgagtttcctggtcagaacattcgagtcgattccaatttcttctagttcttccgttggaccaacatttgtatttggttctccaagtcggggatccacatcttcatccccgccttgggcggttccctatttggcaatgtcttttcccttgtccgaactctgactagaggatacttcctttttagccttggttagggcaaggttgtaatattttcgtgcaacttattgatttcctctcaggcacccgaccccattctttgttggaaacttaaggcacgaatgaaatatcgacgtgatagcctttaggtcatataaggctggtcggcctaacatgacataaaaggctgatggaacatccaatatcaaaaattgtgccattacagttatgctcttcggagctttcccaatagtgaggtgtaggcgaatttgccctagaggtgcaacactctggctggagaaaccatatacggcctgaagacaggggttaagtctttgagttggagccccattttttcatatggtgttttgaacaaaatatttgcaaaggctccattatctatcatagttcgggccaccattttgttggctatctggacttccacgaccaacggatcgttgtgcgggaaattaaatgttacggtgggttcccctacctgtggtatttttggcttcctttcttcgacggccaggaccatttcttcttgctcgtgttgtaatgttcgggcatacctttcccaggctttgcctgaatctccagctatgtgtgggcctccaataatgacttataaatgcccatctactggtggtggcagtaaatcttggttattgtctgcttgggcgaccctctaattttgatcggtcttgacatatttttgcacatgcgggttgttatttcttattaagaattcaatttcccacttcaaattgtcgcattcgttggtatcatggccataatctccatgaaaacgacaaaactttgacatgtccctcttacttatgtcctttttcataggagcaggtttcttgtacggagctactgactgagtagccatgtagatagtctccaaatcctcagttaagacagagaaagtagtgaacttggaaggattctctctaggggcctgttcaccttgcctgttgttgttgttgttgttgttgttgttagacctttaaccgtccgagcttgaattcattgggtactgaaggagctgaacggatgttccagcagagggagcttgtgattggttcagtttaagctcgacttctgctcgctgaatggcctcttcaagcttgatgaaaccatctgcatgatcgaggaagtcactcatggaatctactggtccgtctctcttgacgtccttccaaagctctccgataactttgatgccccccagtattgcggttaatttcccttcttcggttaaccgtgcaattttcgtcgcctctgtcatgaatctgttgatataagcttggagaggttctcctggcctttgcttcacttcgaccaagtcctttaaatgcaataggcattggcgagaagaagagaattgtgcatgaaattctaaggagaaagccttccacgagttgaaccttcctggtgtcaacttgaaataccattggtgggcggcttctgagagtgtggcagggaaaactctgcaacatacatctccacgtactcctagtaggtccatttgcatttcaaaatatttaagatgtgacaagggatcttccttcccagtatacatcttccaggtcatcttgaacttgtgaggcaactctggagaaaaaggggatccatgtgctcggtctaactctagatcgttgttcttctgaccgaccagaccttggaacatgttttttagttcatccaactatgcttgcacggatggattaacttgttcggtctcttggccgaccaaggtcacgtcaggatctctttgagctggattttgagtacggaccgcaggctgagtggctggcgagacatgttgttcgtctaaccctctccttctatttatatcgtccctgagatcatgagttgttaccaatctattaaatacagatgcattaggttgtcttagtgactggttggcctggccgatcatttggccggaaccattaacctaggtagagttattaggtataacctctcctaatgaattactagataaggtctggccgcctacctcttgccccacagctgcaacctgttaccggggattgggcaattggcctttcagggtctgagaagcattcccagctgaatcttcgtctgactcgctcagcgggatgctggccgcaggttgctgattagtagcttgataggctcttcgtatcagtacggtggcttgtcttatttggtcgtcaatggctgtttggtgagccctcaacgtttccacctctttatccatccattctgcgaacagacgcctttgctcctcaaatgcaaggttcactacggcacgacgctcttcctgatcatgatgtagagtattagtatgaacttgcatgagtccaagagcaacacagagattctggatctcagtgtcatct

SEQ ID NO: 40812 - DNA, 1030 bp, Cannabis sativa
  modified_base (830)..(831): a, c, t, g, unknown or other
tttttttgtaaaaaaaaatattttcaattttttttaaacagttttttttaatcaatattttggactccgaccccaacttagacttaagaaatcaaactaggaaccgaccccagacttggacccgccctcagtcccaaccggctttggacccgacttaaataaaattaacaaatgaaaattaaaataaaatttacaaaacacactttttatttttatttaaaataaaagtggttatagaatgcatttttgtttttcaaaaataaaattttaaaaataaaaattttacttttatttttgtaatcaaaacatttaaagaccaaagtattaccaaacgctacttatatgttacgtttttgttgcaacttatattttcggtttcattcaatcttattaaatctaactaaattaacatgtgtcaattgattaattgtccactttcaataaaaaaattattaaataatttcaaaactgaaaaaaactaacaattaatgatttaattataaaaagtaaataaataaataaaaatattattctttttctcaatattttaacttctattattatttattttaagattatttaataattttttaaacgtaaaaatgagttagaccacttatatattgacaggtggcattttatttaatcaaatcaacacttaataaatccctactataattattttaatagttaagccatttaattataatatttacaatgaaactttatttatttttacaaaaattagacttctttttacacaaattaaaattctcttcttatataattaatatttatataattaattatttttaaatgatattaaattnnttttttataactagaagaactaagtacgagtttttctattcgagtttgaggttgtttcgtttttcgaaggagcttgaccttgcttttggactctggtttggttttttgagtaaatgacttcttatagaaaaagatggaggagtttactcatttttttaaaaaatacattcagcctatttcattttttactttttaaata

SEQ ID NO: 40813 - DNA, 1662 bp, Cannabis sativa
  modified_base (1614)..(1616): a, c, t, g, unknown or other
caaaatacttaatagcatggcgatacatttatacaaaacttctaccccgagcacacgcaaaggagccgtagacaggcaagtgaaatccaatcccaagtgaaatccaatccacgaaataatttgatctatggacaacatcgtgttggtaaaggtcgtaatgccagaggaatcattactgcatggcatagagggggaaatcataagcgtctataccctaaaatagattttcgacggaatgacaaagacatatatggtaaaattgtaactatagaatacatgccaaattgtacatgctccctagtactttcgggtgcatgggctggcattttaaggaggacaatttttcgaccttgccagacttttggttgaaagatcactggggggcgatgcaggactcaacggagccattttacaaataatatctcacggctttattggcaccgcgctttttttcttggtaggaacgagttatgatagaatacgtcttgtttacctcaataaaaagggcaaaatggcaatcacaattctaaaaatatttacaactttcagtatcttatcaatggcttctcttgcattaccaggcatgagcgatttcattgtaaaatttataatatttttaggaatacttactagccaaaaatttcttttaatgaaaaaaatattcattaattttgtaatggcaattggaatcatattaactcctatttattcattatataatgttacgacagatgttctatggatataggctttttaatgcaccaaactcttattttgttgattctggaccgcgagaattatttgtttcgatctacattttattacccataatagctattggtatttatccagatttcttttttcactatccgccgataaagtcgaagctcttttatctaattattttttatccatggtctttttttaaaaaaatttaaaagtttgttggttttgtgcactttaaaataagttcttaattcttcacttaattttgaataaaataaatattctaatcaggtatgtaatccagcgcgaactctttcaattacttcatttccattaaagagttcaggttcgcactggattacaccaagttttcgtatatacacttattccgtcctatgtttattttgtatttgtcaagtcctttcttaagttaagaaataaaccttaaatatgcaaccctattcctaataaattaaccccaaaataacatacccaaattataagaaaacctattgaggctacgattgcggaatttacactttcaattttttttttgttctagtattgaggctacgctgagttggagcgagaagctgcggcggccaaggctgcacagggaacagttcctcaaacccaacctgaagaggatttatggtctcgtcccttaggcaaggccatacataacatagaaatcgcacttggaaaactagtcaattagctagagcagtaggtgttgtagcaaaactgattgcaaaagaggggaaatcagccacattaaagctaccttttggggaggtccgtttgatacccaaaaactactcagcaatagttggataagtggggaatgttggggtgaaccagaaaagtttgggtagagccggatctaannnttggctaggtaagcgtcctgtagtaagaggagtagttatgaaccct

SEQ ID NO: 40814 - DNA, 1346 bp, Cannabis sativa
actggccatcacttcatctcaaatctttattagctcaggatcctccaactgcgcctttttgattctttctaacaaatcagattgtagtgtcaagttgtgcaactttccaactacaaatttgatttcagctttagccatttctgaggctagttgagaagctaacgttacaatggtaaaaacctgcccgggacctcttctactcagtgcatctgccacaacatttgctttcctggggtgatataaaatttcccagtcataatctttgactaattacagccaccgtctctacctcatatttaaatatttctgggtgaaaaagtacttgagactcttatgatcagtgttaatctcgcatgtttgaccgtaaaggtagggttgccatatttttagagcaaatactacagcggcaagctctaaatcattcgttgggtagcgctgctcatactctttctgttgactggaggcataggctatcactttgtcagcttgcatcagaacacatcccagaccctatcttgatgcatcacaataaacaacaaacttttctcgatccaatggcaaagctaacactggtgctgttatcaatcggtgtttcaactcttgaaaacttgcttcacattttgtctaaccatatgaatcgttgattcttctaagttagcccagttagtggcatagaaatattagagaatccttgacaaaacgtcgattataccctgctaaattgaggaaactttgcacttttgtcacaaattttagcctcggccaatttttcactgattcaatctttcttgggtcaaccataattccgtcttttccaacaatatgccctagaaaggcacctctgacaaccacaattcacactttttgaattttgcatacaacttatgatccttgagtcgttgtaataccattcagaaatgatgctcatgctcctcttctgactgagagtatacgaggatgtcatcgataaacactataacacagttatcgaggaaatccttgaatactctgttcataagatcgatagaggtcgttggagcatttttcaatcagaacaacattaccaaaaactcatagtgtccatatctagttcgaaatgcagtctttggtatatcttcttctcaattctgagctgatgataaccagatcgtatgtcaatctctaaaaacacagtctttccctgaagttgattaaacaaatcatcaattttaggtaacagatacttgttcttcaatttgagcttgtttgattcctgataattgatacacattctgagggaaccatccttctttttcacaaacagaaccggagctccccaaggcgatactgtaacgccctgtccaaca

SEQ ID NO: 40815 - DNA, 1021 bp, Cannabis sativa
tttggttattaatagtgttgataacaaaaccaattagttacttttacataaaaaatattatttgtatatcatctaatttaagatacattttagttacctctaagacttatttgtatactaatcaattagttatttttaagttatattatggtagattataatttaaaatatatttaagtgattactttaaaaatttatgttcgaaactaatgagttgtcatgtagtatagcaagctaccatttttatataccaattattttatatatttttttgtaattttgaaagctaattaattattatataatataatataattcaattaacgaaattctaaaatgaatgttaacttgatataaaaaaaattataaaataataactaatcattatattagtaattaaatggtgtttttttctaaaaatagtgaaaaaatatatgtttcttatattttaaaatgttcacattaattaaagagaagagtagatcaaaatggtattttttcttaggctcgtccgagtaaggatgtgacctaaaaattatttttaaagtttgagagtaggaggagaattaaaaaaaatagaaagaagaaagagaaagaaatgtataaataagggtattgaaatatgcccgaataaataaaaacattattactattatttttgataattaaatcaaaaatagtgtgtgtagtataaaattttctttttatatatattgttcatgctcaatttttttttacattttttatttatattaaaatattttttaattatcacagatattttcaaataattcccaacgatattttatcaaatattatatacatataacttattagaattaataaaaatttaaatatttactaataaatacacaatatttaagtcatgcaaaataaataaattaatatagggaaattctacactgcacactcttaaaatggatatattaatgcacccctatctgttttagcatccgaaataattttttagtcaaactttttctcatggtcatgtacgtta

SEQ ID NO: 40816 - DNA, 1908 bp, Cannabis sativa
cgtttatatttttaaggtgccgtcagtctaacctcgttaagtcctaatttttcccacgtggcaatgacaggtcattcatttattggccaacgtggcaatgacatgtcatttactaaatttaaaataaaaagtaaacacttaaaataaatatcataaatcaaatttaataaatcttttatctgaaaaaaaaaaataattacataaactaaacttaaaactaaaacaaacatccaacaaaacttaaaaataaaacaatacctgtgaaaatcaaaatcaaaaatcaaaaagaagaaggaagaagaaggagacgaagacgaagacgaagacgaatcagaaatcaaaagaagagggagacaaagacgaagaagaagtttggggagaacagaagaagaagaagaaggagacgttcgcaccagaagaagactaaaactaagaagaagacgaggacgacagtggagacgaagaggagaggaagagagagtgagggcttcaaactgggtggaagggggttgcaatggcatttcgaaggcgtaacaaggatgatgcacctcctgattacagtaagtgttcatctcaactcctcctacttttgatttttagggttttcttagagaataatgaccccttttatatgatatttttggttggtggtgggttagttgatcaagaataaaaataggtgtggtctattagttggtatttaataaagttaaaaaatttagggaatcttagcaagttgtcgtgctcgtgggatacacttgcacatgggttctgtagggaatcttagcataattgccttttgctgaaagtggggtaaaatgctagggtggttttgccactttttggagggaagattgtgagctaattgctcacatatttgaactggtttgaaccattctttgaactggtttttaattctgctagggccattagcagagggattaaaggggcacagtgaatcatgtgtactccttgtaaccaataaactcccatggggtctccatttggatcttaaaaccaaaaatcatctcctacaaaagataaaatatacaaaatagaataagaataaatgaaatatgtttatgttaaggcataattatatgcaagtatatcttgagtttgagggactttttcctattagatgtttatgacaacaccaattatctaaacaaaaaaatacaataatgaacattttcattacctactcttcccatagaaatttgctttgtcccgaggaagaagaagtcattgcattgttgcatgctagatagtagtccggtcccattgtagttcttctcaagagaattggtcagtcctttgtaataagactttgcaagctctacgctgcctccatagtcttcagatagatattcaagagtctgcaaattcataaatgaatgtaatcagctatgtataatatatatatatatatatgaatatataaaaatatgtgtgtgtaggtatgcagataataaaataataaaaagaagatgagtatatatattttatttgcgtgaattacatcaactttgactcctgttataccaacctgtgatatattatggcaatgagtgttttcaatacttgttgtttctatttattagctgctgtaaaaattgctattgcaatatattgtcctagtttttatcttggaggaattgtttgtgtgatgatgtgagactacccaatcattgaacaaagctagtacttaagacacaatatattgcttaaatgtttgaatgagatacattggctaaattattgttttttaatttgattgcaggaggcaatgatgatctatttactgtgaaactatttcatgggggtcggtggtttactccatatggaaatttaaggtacgagggagggggtttacatacttcaacaactgtgaatttgaaggtttca

SEQ ID NO: 40817 - DNA, 1815 bp, Cannabis sativa
  modified_base (1290)..(1301): a, c, t, g, unknown or other
ggacccaagcagcaatgttggacctgtggaagaattagaagagattgagatcgatccagctatcccggctagaaagctaaaatttagaaaaaggttgctcgaagtaaaatcagagtttataaaatttgtgagtgcaaaccttgatgtttttgcctggtcacatgcggatatggtcggaatcaacccttctattatttcatacgttctgaatatcgatcccaacatccggccagttcagcaaaaacgaaggctgctggataaagaacgagcaatagccctgaaagatgaagttgaaaagctgcacaacaacaacttcataattgaagctttttacccagcttggatcgcgaatcctgtactcctgcccaagccgaataagaactggcgagtctgtattgatttcacagacctcaacaaagcatgccctaaagactattttccacttccaaggatcgatcaactcatagatgcaacaacatggcacgaaattttaagcttcatggatgcttattcaggctacaatcaaagcaaaatgcatccgccagaccaagaacatacaagttttcgaatagatatgggtctctactactacaaagtcatgccgtttggtctaaaaaatgttggagctacgtaccaaagattggtaaacaagatgtttaaagaccagatcgcgcgaaatatggaagtgtacgtagatcatatgctcgtcaaatccagaaaggttggggaccacatagaggacctggacgaatgtttcaaagtcctcaaaaaatacaacatgaaactaaatcccttaaagtgctcctttcgagtgaacttgggaaagttcctaggcttcatcgtcaatgcccgaggaattgaagccaatccagaaaaaatttaagccctcctggatttgaactcgccaacaaaaaccaaagaagtacaaagcctaactggtcgaatcgccgcactcagcagattcgtgtcaaaatcaacaaacaagtgtgttccattcttcaacatcctgcatggaaacaaaaagtttgaatggacagaagaattcgaaagagcttttcaagatctaaaggcacagcttgcaaaacctcctgtactttctaaacctctggacggtgaggagctgggaatatacctagctgtcacggaacatgccgtgagtgccgtgctgatcagagaagagaacaacgtacaacaccaagtctattacattagtaagagactcatcgaggccgagggccgatatccattgatagaaaagctcgcctactgccttattctagcaacaaggannnnnnnnnnnnattttcaagctcatcttgttcgggtacacaccgaccaaccactacaaaaaatactacaaaaggcaaacgcttctggacggttactcaactgggcggtagaattgggtcagtacgaaatcaacttccaaccccgaacagcaatcaagggccaagccttggccgactttgtggtagactgcacatgcaaaaaagaaagcttaccagaaaacaatcccgagccagtacctcagccaagtaacaatgtagacaaaccgacctggaaactacatgtggatgggtcggcaacagatcaagtatctggtgcagaaattaccctcgtcacgcttggggggcaacacctacacgctgcagtcaagtttggattcaaggcatctaacaacgaagccgagtacgaggctataatcactggacttaagctagcccaggaaatgaaggacgaatacattgaaatctgcagtgattaatagcaggtggtaaatcatgtatccgacgaatacgaggctcggggggaaaa

SEQ ID NO: 40818 - DNA, 987 bp, Cannabis sativa
atgtggccatgcaagccacggtttcttgtttcctgtggactcggttgatgccacgaccttatgcacacatgggcgtctgcaaaccatgcaaaagaattttttttgacaaagtttgactttattttgttttgtcttcttgttttcttgagtttaacttttgattttcatccaaacaaatcctatgtggtcatgcaagccacgattttttgttgtctgtggactcggtggatgcaatgaacctatgcacacatgggcgcctgcagaccatgcagatattttttttttttttgaccaagtttggctttgttttgttttgttttcttgagtgtaacttttggttttcatccgaacaaactctatgtggccatgcaagtcacggttttctgttgcctgtggactcagtgaatgccacgaccctatgcacacatgggtgcttgcagaccacttttagttttcatccaaacaaatcctttgtgacaaagcaagccatagttttctgttggctgtggactcggtggacgccacacgatcctatgcatacatgggcgctgcggaccatgcaaaagatttttttgaccaagtttgactttgttttgttttattttcttgagtttaactttttgttttcatccaaacaaatcctatgtggccatgcaagccacgatttttagttgcctgtggactcggtggatgccacgaccctatgcacacatgggcgcatgcggagcatgaaaaagattttttttgaccaagtttggctttgttttgttttgttttcttgctttcttgagtttaacttttggttttcatccaaaaaaaatcctatgtggccatgcaaaccacagttttccgttgcatgtggactcggtggatgtcacgaccctatgcatagatgggcgcctgcgaaccatgcagaagattttttttttaccaagttgggctttgatttttttttttattttcttgagtttaacttttggttttcat

SEQ ID NO: 40819 - DNA, 2800 bp, Cannabis sativa
gccactccgggtaatacacatctcggatcaggccattggctagtagcttgtccacctctttttcctgggcctccttctttattggatcaaggggacgccgcttctgctggactagcggcatatctaaattaacgttcaagacatgggtaatcacatgtagacttatgccgatcatatctccttggcaccacgcaaaaacatccgttgctgtccttaattctttaataattttgtctttctcctccggttctaggctctttcccagtcggaggatcttgatagggtcgaggtcgcatacttgcacttcctcgacgtctttaatgggttctacaatctttttggattccacacggggatccaactcatcttcttttgccaaccttggctcaatattctcacggaccattaacacgggtaaatgggttgcgacataataacactgcctggcctctccctgattaccccttacggtccccaccccagcttcctgggtagggaatttcagacacaagtgccggatggatgtaattgcgccaaaattaaccaaggccggtcggccaaggattgcattgtatgcagttgggaagtctaccaccacaaaggtacagtacttgaaagtactctagggtgtatcctggcacaaggtgactggcaacctcacttttcccattgggataagcgtggttccattgaatcctgtgagttgggaaccgcttggtgataaatcccagtccgtgaggcctattaccatgaaggcttctttgaataacaagttcacggaactcccattgtcgatcaatattctagccacaatcttgttggtaatgggagtctctatgacaagggggtcatgatgagggaaacgcatcagttttgcgtcttcctccgtgaaagtaataggctgatccatgagtcggggcctttgagttggaagctgggtgacttcccacacttcatcatgtttgatggccccagcgtagcgctttaattctttttgggtggtccccccaatatggggcccactagagatcacgaccactcttccgttgggtcttagtggcaggctaggggtctattgagggatcgctcccccggagggtacagctggtgccaacgctccgggtgtaccccctggtgtcccttgaggcaatggacaccctactggaaccgggttgagatggggtagccggttcttaatccactcatataggtgacccaatcggatcaagttttcgatctcgtctatcagattcttgcactcattggtactgtgtccaatgtcgttgtggtattcgcatctctttctgggatcccttcgcgaactgtccctgtacagaggaggaggcttctggtagtgcgtattttgccttgtggcggaatacactcgctcctgcgtgtccttcaactttgtgtactgggtatattggggagtatacccccttctttggcgcttgtcctccgtgcagttgctgccttttgaggacctcttgctccgggaactctgagaaggtccggataggcttgcagcaggagcggagtgagacgggacttgtccactgatccctgaggggttacttaggggattcccataatgcgaagatgcaggagccaaagctgggctctgattgtatcctggggtagcgaagaattgtatgccactcattggtggagtaaccggagggagggttcccgagagctgagctccgggtgcatatcctgccattctggttggatagtatcctcagtaagccactatttgggtttcttccaagttgatgtacttttaaacccttttctggaaatcctggaggttagcgactccttcttgttgcaattatttacagaatgaggttcctctatggattctggctagaagatgtgcaagttgttgtccatcatcgactttattggttttcgaggcttctttcttgaacctctttataaaattcttcaaggtttccgtgggtagttgcttaatgttagttaaggcgctgacttcaaggttgatctttctcgtcgcaacaaactgtcttcggaaactaacttgaaccttgttccagcaatccatagatcctggttccaattttttgaaccattcttccgcggaaccgcccaacatcagcggaaagtataaacacttggcgtcattactgaccctcataactgtcattactcggttgaatcaagacaaatgatcgttggggtctgagtccccggtgtaagccgccatctcgggcatcttaaaattttcgaggagctctgcttccaatatgtgccgagcgcatggctctcgatcctcacagtcatagtccgagtcatctcctttttgcctccgggagacccgagcgatgtctttgcgcagtgtcaccaattctgctaaaattccttcattcagtgttcccgcagagactgctggtatatgtttcttttttttccaggtgatcccgcaaatcaccgtgcttttcgttgatttggtgtcttaaattaatgggaaggtgtcttcggtttccccttcctctttccccaggctcttggtgcacagaaatgctctttcggtcatcttgatcctgagggccaagactccccttttgaagtttgaccctctgcggacctttccatttcaggaaatctgagcgaacctttcgcggatcctgcacttttttctttctccctgggatagaagtacggttttttctttgattttcttcaaagggataccgtataggacttggttccctggacttgtgtttttgagtgcttggagaggactctttcagcgtttcctcgagtcctgctggga

SEQ ID NO: 40820 - DNA, 2813 bp, Cannabis sativa
  modified_base (1128)..(1133): a, c, t, g, unknown or other
aatatcacccacagccgcaccaacctttctctctctctctgtccctctatctcacccagtcgcaccatggcagctacactaccatatttgcccagccgaagtgcccatcggagactgttgagatgcccattgccaaccgcctaaacgagagccaccgcatagccaccccatcagtcacgctatactctctctctctttctcttgatctctctctatctctttccctcttttgatctctctattttgaatctgatattgtcattttttttaagtttgcggtggtaagataatggtggtgtcgtggcgcgcggtggtgtgctctcccgtctctaaattttttgtaagattgttgtaaatttgagatattagatttgtttatgtgaaattgaaaaaattgtgtgaaactaaaaaaattcgtgtggcatcgatctggttataattactagatttctttattatttttttaaaaaaaaattgctttagtttatgaccgaagcaaaaaacaattagcgctggtgcactaattttgtttgcttcgattcataaccaagcaaataatcaattagcgttagttcataactgaagcaaaaaatatcactatttgcgtctacgattatagcgtcggctacaccaaccgaagtaaattcattatatgtcacttaaaaagtgaagtaaaaagccttttttgtagtaatgaaaataaaataaaatattttaacggtaaaaataacagtaacaaatatttttaatgatatttggggaaattattaacggttcagaattaacttaagtgtatataaaaatatttatatttatattgattctcataatttaattagtaatcaaacgaattattttttaacaaaaaatagattttccttcactttaaaattataacttctaagcattacatgtgaacaatttaatgtaaatacaaaaaatcacagaataatatttttaataaattgtagaaatagcattaattatttctaattataaaaaatacatattaaagataaaattaattctttaagaagcaaaaattataagcatatattgtactgagaatcaaaataaaaataaataattaattaaatacactagatttcatcgtccaccttaataatnnnnnnacttagaaacccataagaaaattaactaagaaaagtgatagactaacactgagagctttgagctttttctttggatttttcattctgaaactgtattgaattctaaaattctaagcatctatttataggaacgtaaaagtactaatgcgcaattaaacttatttcaaaatatattgtgcaatgaggtttggcttcaattcttcaaataacaaaattgaatacgaatcaatgttagtaggattcagactcgccaaggatttgaaagttactcaactattgatttttagtgattcgtaattggtagtttttcaagtgtgtggagaatgccaagtaaaggggccaaatatggtggcatacttagtcaaagttaaaagctacctggagcagttacaacacctcatggtcaagcaaatcccaaggaaagcaacgtcaacagcgatgcccaagctaagcttgcatctacccaaaaaattaacatcccagaatccgtatcgatggagttcttagcctaaccaaccattaaaagagatcatatgttgtaagtatgaagggaggaaccctcttggatgacaccgtacactaagtacatccaagaagggatgtgtcctttggacaagatggaggctcaaagaattctgtataaagccactaggtatgtctttttaggtggagttttatacaagagagatttccccactctatttatgcattggataaaggaaagtgaagcacaattagtgctatctgagatacatgataaagaatgcggaaatcgtgcatggagatattcgatgtgcaggaaagtattgaaataggagtactccttgcctagtttggataaagatgttatcacattcgcaaggaaatgtgacaagtgtcaaagcaatgccaattatagcaggcgccctccagccaagctcacaaacatgaccaacccatggtcgtttgccatgtggggaatagatctaatcggagttttttccgacaggaaaggctgggaaaaaatacgatgtggtggaaatatattattataccaaatgggtagaagtagaggccttagttaacatcactgctaacgaggtggtatcctccatcaacaagttcttgatatgtaggttcggagtaccttacaagatcatcactgataatggaacccaatcaaaggggattcactaagttcctattgccttgagagaggcatcgagaggggattcccagttgtagtacacccccaggctaatgggcaagttgaggcagcaaataagataatcaaaaggaacctcaagacaaagttagacaagttgaagggtagattggtagatgagctgcctaatgtgctctaggcatacaggactatgcctcgctccaccataggtgaaactcctttatccttgacatatgggtgcaaagttgtactccccattgagatgaaactcaactcattttgggtgaagaatttcaatgaagcagcaaatgagaaggcaatggtgcaaagtttggatcacttggaggaaaaattagatgtagcccaaatgaggttggcagtgtattagccaagggtggctactataattcaagagtttgcatgcatgcctttaggaccaaagacttggtgctaaggaaggtcctctcgtacactagggactcgagggcaggaacgttgggaaccaattgggaaga

SEQ ID NO: 40821 - DNA, 2349 bp, Cannabis sativa
tcataattaatcataattaactgacaatttccaaattagctaagcgggctttacataaaagctttcaaagaattgcgcgatacacacaatacaatgccataacaaaaattaaaaccaattgttttaaagaatattgtcatacatatgtatcaagaaagaaactaaaaactcaaaccatatatatagctaagccagtaatagctatctaccaatgtaaattatataatctaattacatttgtaagtaaatgtattataacgtgggtatattaatgtgaacttgagaattggaattcattatatatgtatatatattgaaatcttaaaaaacaaaatatggacaaatttgcctcgttcctaggtgacattgtatttatatgtatttaaaaatcttatttcaaaagcaatatctatatgtatttaaggatgtaaccttcttttgaaaaaaaacaaaaaaataataaaaaaaaaatatataataaagtagcacccactgaattttaatttcaaaatcttgaaacaaatatatatatatatatataacaaatacactttaaaagcgagcaattcaatctatgaacagtttggtaatataatgtaccaatatatcacatctaaatagaataagcaaatgtgtgatcatcaaaatcatttaaaagccatggaaccaaaactcaatacccaaaactttcaaagggttatacaacatagaaaaatgtgttaaactatagaatcataaatgtgttcacaattaatcattgtcaccacttgaaattattctaaatttaaaatcttgatacaaataataaaaaagcaagcacctcatactagcagaggaaagaagatttgaattcttgccttatgcctcttatttacctgcaataataaaataaatagaagcatgatattagaaaaaaaaaaagatgaagaaattttttttagataccaaagtgtagtctttctgttaaaaaataaaaataatcccttggggattaatgagcaagtatactttgttggcaaatctgctttagtcttatatctcaaagaaacaatacaaaaataaaataaaattcgtaacagctaaaaaaaaactaacttttgaggtggaagaaacaactatgagactttgaaagtacattgttgacataaattaaaaaggacatataaaaatatcagcctcttttaacataaacaagcgaaaatccattcattataaaatgatatttatataaatgggatcaaatacacaatacgacaccattattttgtagagcaaacaagaaagaacataatacatttagaaagaaacgacaaccattaattgacatgactcttcaataagaaaaaaagttatatatatacgaaacaaatcaattgaataagagagacatacctgtatctttaagctctcaaaggtaaaaaaaaaaaaaaaaaaaagataaataatgaggcggttaaaggtagaagattagtatgtaatgtatgtataatatataatatataatactttacaattataatatatatgatataaataagggaagtctttttgttttttttttttgggctgatgttttcggcccaacataaaatctctaaaaccttaatttcttgggaaatttacatatatactgttttttgaccaaaactttacaaaaaactgggacacggcaaatacaacttttttactgcccaagcccgttttctttacttttatactgccgaagcccaacaacttaacttttatactgtgaacaataaaaaacaaaaaaaaacggggttgcttcgtgtttgtggagtcgccggagtcggagataaccaagaaaaaaccattaaatccggcgaagagtttttggtaaatggaagcataatcgaagaacaagatttacagaagattgtcccccaaaaaacagaggtaaacacaacaaaacccaaaattaatttaattcttaagaaactaaaaaaaaaaaaacaaccccagatttagatctgaagtttaagaaaaaaaaaaacgaaaaaaataatgtgatgttcattaatttgtgatgtgaaatgataaatgagggttgttctattgttaatttgctgtttgtaacataaaatgattggtaaatatagttgacaaattactataattgttcatacaaaaaattagggttgttctaatgttgttttgcagttattaatacaaaaacattccttattatatgtatcagacaaatagcataagaaaaactaataaaaaataaaaagggtaattttatttggttgttttgctgttgttttactgttgttgtattatttttttggtgattttgtttggttgttttgctattgttttactgttgtt

SEQ ID NO: 40822 - DNA, 2673 bp, Cannabis sativa
attcacaaatctaattacattttgattttccaaacgcaccctaagtaaatacttggccaataagaagagtagtggagataggccatgcttagaccccactctaacttatgctatattttccatgcagtagttagatcgtttgtgtgcatacacaaaggtaaacatataatgagaaaaacgaagcttagatatttctcttatagtatatatatcttttcttttattcttaaattaaaaaaaaaaaaaaaaaaactaatcacctcattttggccaaaatgaaaaaaaaaaagaagagaaataaaaatgattacaaattaaagagttataattaattctacataaacaatctaagaagcttagatcttttatcattaattcctccaccgcctaaaaaagtatcagaatcaactgaactactacccaacgtcgtcgtttcggacccttcctccgaagtcggactcacctctctactgatcttcttctccattttagtcccggcagccatcaagcacagatcaagatccgacggttctaaaccgtacggatccgatgttccctcatcaaaattattaacggtactacatggtcttttcttgggccatcgccgccgcgagaccgttggatgatcagccgaagacgactcagagagtgtccccaacgcgccgccgcgaagaacagtctcgacggccgcctgacacacgtgccagtttcccatccataacagacctacggcgccgttgaccggattcacagtccttccaacggcttcgtataacagagattgaaacagagctgttcgatgaaaaagcctgatcagtttattaattaattgtttgggtttttccattttcattgaattgaataagtaaataaataaataccagggcggtggtgttgtgggacggcggagatgaaggacatgaggccggctcggccgaagaacttggcgacgaagagagtggcatgagcttgggcctgaggcgtttcaatccactgtagacattctctaagcatacaattatcactgcaaccttttcggagaactcggcagccattgcagctcattctgagtttactcaaatatataattctcacatatatatatatatatatttatatttattctttgtaggggcaaaatggtaatcttacaagactgaatgaaatgagagtgagagtgaaagagggaatatatgtttttgcatatatagagagggaaaatgtgcattgcggagaaaattgaggtagattagttaagaaagtaactagggttaagttttggtatttaaatttaaccggggttgagttttgtttttatgggttccaaggagttagggtgaatggtaaacggttccgtgtttccacacaagaggctgatccaatatttttattgaaatttatgtgatcagatcaagttgttctttcattctccaccgtcgattctttggaaaacaatgatcgtacgtatctatatctatgtccatctccaaaagattctttttctctttttttttcttctttttatctccttatttcggatcaaaattatacagtattttttagtcaattatatttacttacaacacaaatcacactcttggtagtatagaatagtcagatgtgagtttctttatcctatcttttaaaataactcagactcgtttagtatgtattaagtattatattatattaaattaaattatatatataataatatattaaattttattttatatacaaaaatattatatttttatatgtccagaaaaataaatatcatattaaaatatttaatataatatgaaatttttatattttttttcaatactatctttcaacttttttattattattaattaaatattaaaaaataataaaagtaaataaataatgtacaatttaaaaaatagacaaagcaaaaattgtaaaaatatattataaaatattttatcccatcaataatttgtagctatatttagctaaaaaaaatagctaaaaagttctttagctaaaatagagaagagtttggcacattgatatggggaagaataagataattaaagtttcagctatatgttttacctcttagctattatatttcgtgggtacatattattactcaaataataataatgccaagacttctttgaagaagttaagcaagaaaagaaatgaaagaacagagtatgttcaatcaaagagagtgcagagagaaaaatcagaaaagctcaaatcttattactgaatgaataagagtatttatacaccaaagattacaactgaaccaaactaaacaacaagaaaatgtaacaaccaaaataacagaatgactaaacagacactaaccaactgtaaagacagttagttagttaacatcccccctcaaacgaaaaggggaagacacaactttgagtttggttctcaagtaatgaaatcgatccttgggcaaagatttggtcaaaatatcagcaacctgatccacagaaggaacataacgaaccgagacttcattgttgagaatttgatcacgcacaaagtgttgatcaatttcgatatgtttgcaacgagcatggaaaaccggatttgctgcaagagcagcagctccttgattgtcaacccagatgattggaacatcagctaaggtcacctgcaattcactgaaaagagagtgaa

SEQ ID NO: 40823 - DNA, 948 bp, Cannabis sativa
acagaagaggaggaatatgtgaggaccatctcttacgatggtgtggagaacctggttgagggtggtgtggatgccacacaggctaaggaggacacctaagacccagctatttttagaagacaagcagaaaaagtagtagaatatgtcaaaaatgctcctttgcccgaggcagagactcagttaccattttttttaacttttttatgattattgattatcattagttgcgattacttggttagttgtaatttacataggttgtcagtcattgttttatagtttattgtgttatatatatttttatcgatgcattgtcgataggatatggatagcatgtcgatatttccttcactttttacggttaattgatattgtttgtcattgaataattcatttcttttttctcaaatttgttgatatgatgtcgataggttgttgacaggttgtcgacaattgtttatcgacattgttttttgtagtatgtcgacttgtattttttctttctgaagatattgtcgagtgtatatcgacaagttgttgataggttttcgacaactaatctaatggatgcatcttttatttcttggctttggacaaggccaagttataacagtgacgggcagatttctgacatcctcttgacatcttacctcatgccttgctgggaattttaggcagaggtgatagttggatgttatgccttcaaattgaataaggttggttagcctatcatggtgttgagagccaaagaaatgttgatcacaacgaactacaccatcaaagttttggtggttggaatttatccaatagtgaggggtaatctgacataaccaatgggtgtgatgccttgggcaaagaggccatacatcacttaaatgcagggtgccaagtcagcgagttggagcctcatcttttcatgtaatgattttgaaaagaatgttggaggag

SEQ ID NO: 40824 - DNA, 1230 bp, Cannabis sativa
tggtattggaggaaattgattgatgtcaaaaatcaagtcaaggctactatggatatacaacagtttgctctggctaactatagaatatccaatggctacaaggcttactgccccactactccacccaaagtttattggagccaagaggtatggaatagattgaatatacctagacatagcttttgcttatggatagctatacaggataggcttagaacaagagaaaggttacacaggtttgagattattgacgaagatgtctatttgctttgcaagaaccaaaccgaaacatctaaacatcttttcttctcttgtcccttctcttctctttgcctttcctttgtgaaatcatggttgggatggaatgttgaaacttcaacacttataagattgataaggtggctggaaagaacaaaaattagtaagtttaaaaaaactgtgtacacagctacagttgctgctctcgtctactatttgtggaagaaccgcaatgacatattgtgcaattcaggacatcaaacaccagaacaagtagcaaacttgatcaaggttgctgtgaagaaccgaatttcctgcacttagccaaagaaagtgcagctggtggatgaagaatgatttttgagattgtagatataattttgtaactaacagaggtgtttgaagagcttacacaggaaatgtatagattgatattcaggtcttcatttgaaggtcctaaataggttgtaaattgttatttggagtaatgaaattcatgattgattgataaaaaaaaatagtcacgcgtgcaacacactgtttgaatgtagtttttagcttgttaaaattttccgaattttttaaaattttgcaggatgtcttaaataacaataatttacataaccatgagaaaaaattggactaaaaaattatctcgaatactaaaatggatagagatgtattgatacatcacttttgagtaggtgcattatagaattttctaaatgtatatatgtaaatttattaaattaccttcattaataattattaaattaaaattatgtaaagaaagtaataattttcatagcattttgtttctttttgttcttgtttaataaccaaataacataatgaatgctcttattgatgtggtagagtcaaaagttggtattggtattgttatttgatcttatagagaggatttattggtagtataacttcaattccattacattcggtctaagctatttg

SEQ ID NO: 40825 - DNA, 2986 bp, Cannabis sativa
taataaattagagagataattacataagacactattttttctaaaaaaaaattacatttttaagttgaaagattttttatatatattttttaacagttttctataaaaataacaaggaaactacataaaagtaacatgaaaataacatctaaataacattaaaataacaacaaaaaataagatacaaataactaaaaatcaacaacaaattaacaagagtacaacataaaaagactgcattttctgtaaataaaatcaaaaaaatcgtaaaaatatttaaaattccttgaaaccgtacttctgtaatttttttttttttttgtgtatttgtgaaattatccctaaactaaaacccctttttctattttaaagcttctttaaaatttattatcaatgctttacatttagaaattattacatagaaaatataaattgacactttatttacaaaaatatctccataaggtgtagacaatatttatacattttatgtaattttaattaccaaaataccacttacactatcacttacacaattagacgatggttgcagggtggttgctacgtggttgcgcggtggttgctacgtggttgcgcggtggttgcatcagacaaaggtttcaatcaaactatggttgttgggtggttgcgtggtagttggctgaaggttacatcagacgaaagtttttgggtagttattgggtggttggccaaaagttgcatcagacgaatgtttcaatctaatgaaataactgttagaaaaatgtttatgcaactgttctgaaacattaaaaatcagaatagtgtttccacgtacgtataactctatctacatgtctctttatgattcaatatgaacaaattcacaattagaaatttataaaaaacaacgaaaatacgccaggataaatattttactatagtattgacgtaatgttttttagattatacttgagttggattgtttgggaactccaaaacaaccttttgagatatgcctttcatagatctaaaaattgaagtcaggacattagttttatgcatattaaactggatttttggttaaactagagtttttctacattttttcatgaatttgaaatagcccctattttgattgattctgctcttctcaggtgaagtcgccgaaattaatggtggttctcttttcggttgaattttcatttcggttgcgttgggttgctgcgtggttgcgcgatagttgcccaggaagcatggatcctgggttgaaggtatgtgtaagtggcatttgtgtagtttttttttatttgggttgtatatttttttatttggcctagtatttttgtaatattattactgttatcccaattttggcactctgatgtggcatcacatactggtgacacgtggaattgacttcacatatctgctcgaaagagatatggcgaacagagcgttgcacatatctgcacagacgaagccttcctagccgggtagtggacgatccgaataacgtgccaacacttagcaacttcaacatttgcatcgtgaatcacaaaagcaatccctataattttgagatcatatcacagagatatggcaagctgtccaaatcccttaattagtgtattctgtatttaatgtctaatcttaccaattatagacattgtaaacagaagggaaacttttccctcaaagcttatagccatataaatagtgatctattctcactgggcaaaggttcgaaaaaacttatctaagagtatatactcagagatatcattgtaagagctctaagaggggaatcactgcattcttcgttcttaagtcaatacaaatcaaggggggtaggctattaccgaactgctcagggtcgaatctctataaaaactttgtgtctttatttatttcattatattacatctatattatatcacttgtcgcttacaattaagactcattgttgttggccaaaagcgaggtcaatatttttgtactttcattgagagccagaatcacgaacttgctattcatttcaaatttaatcataagtgcaatggtggtacaaacttgtagagccgtaatcgattcagcaaatccactggcagtggatcccgcactgcagaatccaagatatgcaggggttccaccagccacaaatcttgaacaaccgccaaccgtaggttagggtggaagcgcgcctagtgtgcaagagactggaaataccagttcagcagccaattagggtattcccaatattggagttccgccagcaacaaatatttgaacaactgttggagatgacactgggatcccgaaccttcgtgctgctcttggactcatgcaaggtcatactaataccctgcatcatgactaggaggaactccgtgctgcggtgaatcttgcatttgaagagcaaaggcgtctatttgctgaatggagggataaagagattgaaacgttgagggctcaacaagcagccattaacgatcgaacaagacaggccaccgtgctgatacaaagagcctattaggctaccaaccagcaacatgcaaccatcatcccgctgggcgagtcagacgaagatccagccgtgaacgcttctcaaaccctgaacggtcagctacccattcccctgtcataggtttcgcctgtgggccaagcagtaggcaaacagaccttgtctagtaattcgtcaggggaggtcatacctaataactccgcccaagttaacggttctggccaactaatcaatcaaaccaaccagtcactgagacaacctggtatacctatattttatagattgggaatgcctcatgatctcatatatgatctgaacagaaggaaagggctagacgagcagtatgccgcacaagtcatttagcctggggcccgtgttcaaaatcccacacaaagagatcctgacgtgaccctggtcggccaagaggctgaacaagttaatccatccgtgcaggcacaattggatgaactaaaaaatatgttc

SEQ ID NO: 40826 - DNA, 1537 bp, Cannabis sativa
  modified_base (1502)..(1505): a, c, t, g, unknown or other
ttatattataattaacaattaattaattattatcttttcaactgttttatgtacggttacaatctttaatattatcattattactatgtgtaaattttgtcattattacaatcttttaaagtctttttcttaagtgaacattaatttttgtataagaaatatcatatatgtaataaaatatatgaaaaagttagaataaatcacaaattagagaaaattaaacactaaaaggagaacgtgccacatcattaggcctaacaacacaattatatagatatatagactagggaatataaccgcgcgttacgcggtctttataataataataataattgaacttataattttttaatcattttttaatttatttatacatatgtaaaattactatttaagagtaaatatcattttaacttctaattaattaataatattattattgtagtgtttaaaactgctaaaaaaaatttaaaataacagacaatcataatatatattacccattaagaagtattatatatatatatatattagctattgtaataatattatttcagcaatattacattttacaataatgtgtatttatatatacttataaggaatacttcttaatgggtatcacccactaatgagtaataaacaaatttaactataaatattaatttttaaaatactaaactattagattttggtccgatagcgaataataaaaaaaaattaattatataatattgaattaatatatgtaatctatattatttttttatttttatatattattttaatgaactaagccgcgattcagatgattttttacaataattataatatttttatattgttaaatctttatggtagcttatgtactaacctactcatgcctctgatgttgctcttgctctttctatgtagcatatatcatggtataattagttccaaactcctcacccaaagctttttcctcttgccatatatatgccatttatatttttttatgtcccatctcatgatctatatattatatgtatacatgagaaagtataagatctaaatttttaaataatcaatggtataaccaaaggtctcctaaattaattacaaaataaatttattatataagttacattttttattaaaaataaaaaatgccaaaaactttgattctcctaaaattaaatcaaataaaaaaaaatgaaagaggtcatataaaattgaaatctcatttaaatatataaagctctaatatttacaatgtagcataacatgagagtgattctaaaagaaataatttaaatataataatacacaatgttgaataagcatatattaccatcttattttgctatgacctataagtttctttctttcatgataaaacttcatctcacttcttgttgttctttcttcattacttcgtgagccaaagacttatatatatattgattgtatatgcaaattgtaacaccctaactatctaaggcgtattacgtgatttttannnntactgtgcagctcgttgctagtcaacgaggtt

SEQ ID NO: 40827 - DNA, 1488 bp, Cannabis sativa
aggaaatgatgttgcagagttttggttgctgtcgacagcagcagatggaagcacctatttgcccgagtgaagtcttcatggaaacggactgcatagtttattatagcagcaggctgtcgaggagaaccaccatgaaccactttattcttatccgtccatatgccccacattatacatagcagcaactcaaaatcttgctgattcaaaatggttgataaagagtgtaaataatcaccattaaacatgttttgagccttagaaagatcaagccgaaactttgaagttttccatatgactttagcatgcttacaaccaaagagagcatgtccgatagattcccaactcgaggcacaaagagaacattcagcagaagttaagaccttttccttaaataatgcagctgctgtaggaagaatgttatggagcactttccaaacgaagattctgatctttgggggcaaaaccagattccagaaaaatttccaccagtcactgtgattattagaagttgaggagcaaagttgttcttccaaggaatttgctaggtgaaaaccagattgcacagtgtaagatccattggaagtgtagtgccatattaaccgatccatctcagcaaagtaacttagtggaatagttagaatacgatctgaatctattggttgaaaaaatctattcagcataggtacattccaaactcgttcctctgtgataaagcttgaaaccggcaaagagttggatcccaaataacttactggtttaaactcattacaacccggaatccatggatcaagcttgctgtctatatgatttccattcccaaccttatatctcaatcctttcactaacaactccttgccccaagagatactttgccaagtcaatgatggtgagtggccaatgtttgcatcaagaaaggtactgttagagaaatatctatgcttgagaaggcggctcaagagagaatctggcatatcgaaaatcctccatgcttgcttggctaaaagagcttggttaaaatgaacaaaagatcaaaaacccataccaccttcatgtttcgatttacataaggaattccatctcttccaatgaattttggtgccattttgattgctaccccaccaaaaattagccatcatactctctaattgattgcaaaatttctctgtgagcctgaaacaactcattgcatatgtagggatagattgcacaacagctttcaataacacttccttccctccaactgaaaaaaaaaaatcattccaagaattaagaagtttccaaaccttctctttgatgttgctgaagagctcatttttgtcacggccagagtaggaaggcaaacccaagtatcgctcatggcactcagttattggcatttgtaaggtctgggagaaaaaaatttgggctgcttgagaggtgtttggcgagaaagacataacagacttgtcattgtttaagacttgacccgatgcttttacacccacggaa

SEQ ID NO: 40828 - DNA, 1335 bp, Cannabis sativa
gggacagttcattttgtcaaacgaccaataccctaatagtttgaaggaaaagggggaaatgaaggatgtaccctatgctatggtcttaagatttttaatgcatgtgatggtgagcaccagaccagatatcgctcatgctctaagcatcctaagccggttcatgtctgatccaggcactgaactagaaggccctcaaatagttattaaggtacttgaagggaacttgggattatgttctgacctatgagaaggcaaaaggagaattgtagttaaaaggattcctgcatgctaattatgtgtcaaactgagatattagaaaatcaaccacttcttatattttcttcactaactgaaattgtataagatggaaggcccaattacattctgtggttgctctttccaccacgaaagcagaattcatggaaactaacattatggcttcggggcattctttatgaattgaaacaaatctaaaggggagtgactgtgtgttcgaatagccagtcatgcatccatctttgtaagaatctgatttatcatgaaaagagcacacatatagatatatggctttaatagattagagagaagatagaagaagggctggttgatttggagatggtcagaagagaagataatcatgttgatgttgggactaaggtcttaatagtaaacaagttcaagcgttgcttgaactttatctatctcaaaagttagtaaattgagatttctggaacaccaaccataatggttgcattctttctttttcatcatcatacttttaatttcaagtaactaggtggaatttttggtgtagttcatctaaacgaaatgcttcaaaagtttttcctacaaatttgtctgtctcctagaagtacgttctcggacagctaactttcattctggaaaaaatctcgtagaatgataattgccatccgaaagggagttcccgaatgactattatgtccactttgggtgtagatttcaggaaagttaatcctcctccagaagggagttctggatggctagttgttcctcttggaagggagtcccgtatagtcgactctagctggctctttcttatctgagaagttccctgagtgagtgcctcggtctgtttctagaagccctcatatctgctcccagatgcactcttacttatgctgacgtggagatcttgctcaaaggagagttaactaagttagttatttcctaactaacttaacaacctaatttcttacagccatcaactttaagatcttgatcctaagcctataaatatctccaacacttatcatttcaagtatgacgattagattgagttgagagagagagaga

SEQ ID NO: 40829 - DNA, 2028 bp, Cannabis sativa
  modified_base (173)..(176): a, c, t, g, unknown or other
agggcacaaaacccaaatgtactccccttttagttatattaatttttgagataataaaatgtagattacaggctaaaattttgtaatttctaactatgactctcttcagcattataatgaaaatgtgttttgtaggtgagaagtgtgaaaaaagagaggattctataccttannnnttttgagcgtgattagctttgttcgagtgtcttcttgagcgggcgtatcctgctctttatatagtggtaggccttacaagttgttacatagaaatatccctagaaaataggaaagttacatcgtatatttgaaatataaaatagataactaataatccctaaagaatagggttattatttgttgatgaagaatccctaaaatcatggacattttgaactgttctgaagttgtaggagtgctgaggatgatttggaaggcattgtgggaaaaaacacaattgttggaatgtcacttgtatgctttgtcagccagccgtattgggaggctgcctggtacatggaggatgtcacccatggtcggccaactaaaggtccgaccaggaccctactattgactgtatatcttgtttgagtccacattgccatcctggaatcttgaaggatagatagttgttcggcactaacctaaacggttagtgttgacatgtctccttgtgatcttgatatctttatggttgaggacctgaggtaaaccctgttcagatattgatctgttgttctccacgtgtcttctgcttttagcaacgtggaggtgccacaacaggtaggcaaaaattgggataacaataagggaactaatatttgatactttcaaaaatcttagattctattattgtatatcatgttcccatccattcattttattaagtttccaaagtaagaatcatcttctttgagaaaatttaatgatctactaaagaacctaatgaatacaaacaacagtttatgaatactcaaaatttagactaatctacttgtgatcatcattgtgatataaataactgttttatgataaatggcacgttaataaaagatattagttggtccagtcatgcataatcaaattatacacagtacatttactaattatctatccacatatgtgatatggataaaacttatatgtcactaaattatagtgcttagtaaatcataattggtaattctatattaaaggttccatactttagtacactaccgacttattctacttataaagtatgatcctaattctcttatacttctttacaagataatactttctctatataaatatggaacttttttatattattaattatatttccataataaacatattcatttataatatatttatatttcatactatatgctcaaccaaaccaaactgatccaataaatcattagattggattggattggactggttccactcaatggatgaatccttgtattgaattaaattcatctaatatttttcattcaatatttattagatcagatcagatccatctaatataaattagattggttagagccatccaatccaatccttcaaagagtaaaacttgatttttcatttaaacctatatgtcttctcttctatatatatttataattatttccctctcattcttttatatggcatatatatgtaatcaattctctttttatttacctaatttctatcaactgttaattcttactcaaatatatatatatactaggttgatgttacgtgcaatacatgtataattagttgcctttttaattaggttcaattaggtaatgttaaagtacaatacatgtatgtttaattttttttaattaaatgtattttttaaaatttttaaaatagagtttgagattttagtctttaagaaatttttttagttattgctacattagtgtgtcatttgaattgtattacatatatacgtatttttaaaatttttttactatattcttaaccaaaactcacataaccaaatttgaatgtgtctatatataagttggattcgtaaatttg

SEQ ID NO: 40830 - DNA, 1386 bp, Cannabis sativa
ttttccaactttctttgctagttttaaaccgttgggaaaaatccccccttacgttttttcccaacggtttctttgcttcagttttcccaacggtttcaaactgaagcaaagaaaccgttgggaaaaatccccgcttacgttttccaatagttttcataattgatccccttattaaccgttgggaaaacccaattttgtagtagtgtatattcggccacagtcattttcccttgagtcaacttcacaaagtcttgcatatgtgaagcccttacagcgatgttataaaatttttcctcaaacaaactcttaaactcgtcccaagtcatagtactaacgtcttgggtttgccctacaatgtcccatcggacgtgggcatgatcttgtaacataaatgcagcacaatttactctttctgttcccgtcacccccatattatctaggatgcatgtaatagtgctcatccactgttcaaccttaattatatcggtacctcccaaaaatgttggaggttgcagcttcacaaagcgttcaaataccgaatctctatgcggcagtataaatccaaggttacccaccactggcacagaagctggtggtaacacttgttctgcaggagctactggtgccagttgtctcaaccaacgcaattcatcttcttgacgaagtatgatactttgcatttctagaaacatctactgccaatcagcaggcgaattagcattatcaaccctgcattatcccccagattctgcggtggtgcaagcggtgctggtggattggtttggtcaacaccaagctctacatgctcgccccgtggtctagatgattgcgaaggtccaactttcacaaataaccctataatcaacaaccccagcgagtcaggcaccaataccacacttacccacttattgccttaaaccctaactcgactattttatttcttattaaataaatatttatcaattaatacactaatcatggctttcatatcacaatttctagatgctcacatactgcctaaaatggaaagcggtaaataaataatcacataagtagttaagtatttactctcaacacttactacaccacgagctgagcttgtctttgacgatgattgtacatgttcagctggtctacaggaagtttaaaatccttggcgctttgataccaaactgtaacgccctaacaattagacacaataagacaaccagtaatataatctaatcctgctaaaccgggattactagaaaattatgagcgggaaactttaaactttgattacaacggaataaaaacttaacttgtaataatttaaacttcacaacaaaccaaaaagacaacatgtttcgggatcccacaaaacttttcgcaaaatattacaagtta

SEQ ID NO: 40831 - DNA, 1441 bp, Cannabis sativa
atattaattcacatatattgaactatataataatataattcatcaattattcataattatctagttagagttttgctaatccatttctaaattcgagggtgttacattagtaaacaagcatatctttaaaatactaacataagtataattttttcacctaaaataatataaatactactacatattggttgcatcatcatcaatatcatcattgccttggccatcattatctccacctctgtccgactagatccaacatcattaaattgcagtggcgagaggtctaactgaaatcctggaatactcacaatcaatttctgcaccaatgcccgcattattaggtcttgattgacttgattttgcttaagagcttgattttccttcataatggtttgattttcctataaaattgcctccacatcgatcgattgagaacctgacatggaagatgaagaagttggtacgcattttcctccaattgccttaagcttaggcaacggcccaaatcctttcacataacgtgaatgtggtggaccaagaacttctacaactatatccatatcggatgggtactggctcgaatccccagcaatgcacgaagcagcaaatgatgcatttgtagatgtagaaccagatgcaagcatgggatattttttttgtgtcatcacctcctacaaagaaaaaattaaatcatcaataatgtaaacaaatataactttaaaatttaattaatttaagtatcaaataataaacttttaatgtaattacatatttttcttttgcagcgtcactcaaccactggctcttgtcattctttttctccaaacgtgtcaatagcactttcataggctccagttgttggttaattatctacaaaaaaaaaaatgattaaaagaaatacatattaaaagtaagatgatttatgaaacttttcttactttaacatgcatatgtcccacgatggtctttgaactgtacgcccctaatattggcattttggatcgtgccactttattttaatttaacttttttcttgttatattatttctaccgaaattttgacagcataacgacttaaaattcataaatctcaaattttaaaacctatgaataacataaacaaatattctagaaaaatatatcactacaagaaaaccttcttttgccggcgcatttttgcgccagtaaaagtacactaaatgcgtcggcaaagctttgccgccgcaatattgcgccggcaaaacttgtctgggaatcttggtcagtaaaagactttttaccagcgcgtagactaaatgcgccggtgaaactctgttttatcggcgagaaatcacgccggtgaaaaagaagcgccggtgttataaaatacccttatccgctatgaacctgctttgataaccttttgttgacgccaattctcagattggcgccaacagttttg

SEQ ID NO: 40832 - DNA, 1629 bp, Cannabis sativa
taggaatatgaaattattgtgaagcataaattaatgattgatagtaaagctacccataatttcattcaactaaaattgtttcaaaattagctattggtggtttcaactaaggtttatgaggcagaaatgggcactgagcaagttgttcatggggtaggattctacaaagtcattcccctaacactacaagagttggaaattattgatgatttccttcccctacccatggaaaatacctctatagtactccaagtatagtgattggacattcttgggggcggctatccccattaggagtgtaatatgatattgaatgttggtgggaaatctaacactaaagggtgatctgtcccggcataacacttaagtcgatgattactcttcaacacaaagaagaaggggtttgggtcgagttgggcaatgccaaagtgtcttcggaagataatgcaataaaccactcactagttggcttgttacaaaagcactattcaagaattgggaggttttctgggccatcataagtttgtgggatgttatgagagtattgcctgtccccttattaatcaagtgaagaaggatcagttttgttgctccacaatggccacaaaagctttttgccaattgcgagtactataccttttttagctcttcccaaattttctgaagcttttatggttgagatggatgcctcgggacatggtttaggcattttcctcatgcaagaggcccgatcgaccacctatttcttctaagtattgaagccttgggcacttaagtccatctatgagaaagaattggtgacaaccgattttgctgtccttaagtggcatccatagttggtgaaattttgtggtgaaaatgaattaaaagagtctgaagtaccttcttgcacaacgaactctcactatgaagaaataagacatgggtaattgagttgctgggatttgactttgagatccattatcggcctattgggggtaatcgtgttgctgatgctctatcttatatgccctggtggagtgtaccgtgcttactaccacatcttggctagattggagtgttatgtcacaagaaattagctaagaaaacttttatccaaatactcgctaatttgaagcaaggtaatagtgttaaagggttctctttcaagtgagaagtcgctctataaagtcaagataattgcaatgttgtaggtgatgattgcatatctattatgagtggatcccgaaatgtgacaaccacagatataacctgtggacctggtcacggaaatcagataaataatatagttgttgttttacttaattataatttttttttgtttcatagtatagtaattgtgattaatttactttgataactgaagtattggaagtttgagagctgggcatgcagaagcccatgtttttgatatattcgttcgtagagataagttttacgaaaccaccaatggatttcgaattaagacttggcaggtgcgtatacatataagtgaaaccagttgtgtgtgtattttgtatatgtacctatctttctataataacatcaaaaacaaacaaacactcaaatcttatgatttttatgtaaacaataatacagagagatgtaaaggagatgcaaggaatatta

SEQ ID NO: 40833 - DNA, 1835 bp, Cannabis sativa
tggtctaaaaagaattcaacattgttgtgatgttgtgattaattatataagatcatcatcttcttcttcattggaatttgttaaagcaagaagaagaaagctttggctttttgtagttgcatcaatggtgggtttgggttgctctatggttgatttaagttattgtatgaaatttggtaaaagattgtactcttcttcaaagtttgtttggaatttatggaaatattttgtgtaattattttgtattgattagaaacaaagatattgtttcttggccattccaaatgtcttgaatttacctcatatagctttgttataaacaagacaataagcccattacatgaaagatttataaaatatggacacaaacatgattcgaataaatttcgtataatgtcgaactcgtaaaatctcgtgtcgtgtattgtataggtgggttgttagctaaatttttgtttttagtgtcattgtgttgtgtggagtaaatttatttcagttagctaatacagacacgacccgtaacacaaaaaattgataaaacatgagtgtcaaatccataaaatctcaagtcgtatttgtgtcaaacttgtttgtcattatttaaattgccacctcaatgtatcaaaccacatcgcaacactatttttgaggtgcacttagtagtataaaattttgtagtacacccatattattttcaacatctcgtaaaatttttagtttaatttttttcataatcatttatgttgtaattatttaaatttatggtgtaattatttaagatattttataaaattttaaaaattaaaaaaaattaacacgtcgaaagtatatttaaatagtattggggtgcaaccaaagtcttctagaaataggaggcatcatgagtatcagaaaaagatacaaaatttaatcatgtgaatgaattctaagaatatcaaacaaaggagattagtctcagtgcttgagaaaagagcaagcactctcgaggtagagtggatagatgaaaaatcaagtgaagatacatccaaacaaatattatattacacaatttttttattttaattatgcaagtaaaataaattatttaaaacttacacaatgaagaaataaaataaagtaaaaaattttttagaagccaaacatatgaaataattttttggtgcattatagaagcaccaaaaaagtgttaaaggataacaattgtgttgctgattctcttgtcacctaggggtgggtgcgatattcataagctaaaaagtcttttcgaccatgagactgtttctgctattctcaagaatggaaaccctcctggtattggcaaggatagttggttgtggactttggagagtgacaggtaattctcttgtaaatcagcttatctggcccaaactttggatagaacgccttactgtgacgtcgctccaactctttggaataaactttggaatagtaacattatggagcgtcataaggttctctggtggtgcatcctctctcaagctcttccggttcgagcagtgattggaagaagatttctgattgaggatactagatgtcctttatgtggattgggggaggaaactatggaacatctatttctaacatgtgaagtggcgatgcacttgtggcattcgtcaccttgagaaatttttccggtgtgtgagactggtattcgagtttgggattgggtgaagttcatttggagccttaacaatagaggtgtcaggactgaggatgtctttctctatgcttctattgttgttgacaatatttggcggatgcgtaatgatgtggttcacaacaatagccctcctgatgttttgaaatgtattgac

SEQ ID NO: 40834 - DNA, 1525 bp, Cannabis sativa
ttcattattgaagaatttattaaactttaataacattatatataaatatatatatatgtcaattgtatatgtagaagatgtatcatgtagtccataagcattttttattgatccttctactcttttttgtcttaatttgattaactttttattttatttttcttatttaatttgtgtatatttttttttttattaatgcatatggatgtaactattagtttattttattattttatatatggcatatatgtactaaaatagcagttatatgtattaattttatcgttattaagcctaaaattaaaatatgataaaatattaataggaagtgaatggtgacaaatgtctaggaaatgggaggtttcaattgttctttggtaattataaggaagagactgaactgaaagtaagtcaatgagatttagacttcaaggatggataaaaaaaaaattaagatgaatagatttgagaaaaaaaaaatcaccttcagtagcattctactcaggaaaaaaaataacttaaatagaatttaaaagactataacttgagcattaatatgtggaacatttagttagaaagaagttactcaaaagttttgaaggctttttgttttgtctattacaccaaatacacataattatatttatgcaattaataacgaacaattatgaagaaaaaaaaatgacacatgaaaatgggtttattatttctgtttgttcgtagggttaaaaatgagtttgtgacatattttgggtcttttagcatcaatttgaagcttctctcaacacatcttaacttagtttagcctctcattaataaagtagagtatctttgtatattatgaaaaatagagagcgcgagagaaataagtaagaaataaaaatgaagattattttaatatacttaactaaagatgctttggtacagtatggcttaatatatgaagtaaatgaagacacggttagtttgataaaactaactaaagttttaacaacctgaggagtacctcaactaacttaattaaaactaattctaacatatgtagaaaataattactatttatttctattaattaatttaattaataaaaataatagaaatttttacattacatttctttttcgttataattattctcattaatagggataagaaatttgaattattaaaaaaattgtaaaaaaatttttttaggatgttctatgaaaatttaaagaaaaatgaacataataaagaattgttgtccgaatacttctttcgcccacaaagcattttattcattttattagttgattcaatttaatattttaataatattattataattcatagtttacattaatctaatatttatataatttttcaataatttaagtttatagttatttatatgatttttcatttagtaaaaaaatataaatcaattaaaaaggttattaaatttcttaatatcgcgcgaagcgcgacttagttacctagtatatatataaatgattgtttcagagagtttgatgtggcaattcaa

SEQ ID NO: 40835 - DNA, 3056 bp, Cannabis sativa
  modified_base (27)..(31): a, c, t, g, unknown or other
  modified_base (157)..(160): a, c, t, g, unknown or other
  modified_base (228)..(232): a, c, t, g, unknown or other
  modified_base (290)..(291): a, c, t, g, unknown or other
  modified_base (338)..(359): a, c, t, g, unknown or other
  modified_base (458)..(463): a, c, t, g, unknown or other
acctttcttttctttttatactaattnnnnnagggttaggattgaattatttggaataaaaaaataataaaataatagcagctgaaataggacttagtggccgcccctatgtgggtccatcattagttagatttttgtcatttttctcaaccatttnnnnatttttcacaaatactactttttgaaattccagtcttataaatgtcaaactatttatttaataattannnnnaattatcaaataaaatttttatttgtgttatttactaattagactccataaagtctcnnaattaacaaataaaccccaaaattatatttcttcacaatcaagccannnnnnnnnnnnnnnnnnnnnnctagacatagtctaattttaaaataaaaacttaacatatatgagattgaattaccataaaagatattaaaatttccttcatatttttttttttaaaaannnnnnacaaatgaaactacagtgattgtcagagttgtcactggtgccggaaaatgcaccagagtttgttgtcggcaccgaaaaagtcgctggagttgctgccggcgccaagaaagtcgtcagagttgcaacaggtgccgaaaaagtcacctaagttgttgtcggtgctggaaaagttatcgggattggtattatcgccgaaaaaatcaccaagaaactagttttttttgtgattttttggtaattttcggggacaatgctaattctgatgaaatttttagagtttgttgtcggtactgaaaaagtcgttggagtagttgctggtgtcggaaaagtcgtcggagttgttgctgacgccataaaagtcctcagaattagcattgtcatcagaaaaatcaccaagaaagaaacccatttcttggtaattttttcagcgactatgccaattctggtgacatttctgaagtttgttgtcggtgccggacaagttgctggagtagttgccattgtcaaaaaagttatcagaattagcattgccaccaaaaaaatcaccaagaaactggttccttggtgatttttccagtaatttttcccacgacaataccaatttcgacaaattttccagcatcggcagcaactctgtcaacttttctagcaccgacagctactccggtgatttttttgacacctgcagcaaactccgatgattttttcggcaccggtgacaaatactatagtaaactacctaaacaaataaaaacgttaaatatgagatttgtaaacctaatttacatatatatggcatattaaatgccataaaaagatctaaaaataataataaaaaaaataccatataaattggttaaacttaaaagtatcatatttaacataagaacttttaaaatctcatagtaagtgtaattttttttattttttattagggtccaagttttaaaattaaattactgcctccaaaatgtgacagccctgctactttatatagatatctaaaagttaatttttgttttgttttatttaaagaaaaaaaaaataaagaaccttataattttacgctgtctaattaatcctttttttcttctcatcttatttcttatatcttccaaaatttgaattgtatgtatacataaatggacaatttatttaatcatgccacagacatcattgagtttcatcgtttatttatttaattctactaaaaaattaaaataaagttccgtgttgaataaaatataggaataccaagatcagagtatacgtagctagtcatggtatacatttaattttccgtaccacggctcagtcacaatttctggataaatgtccgtacgtacctcaagttgttattgattatgtatatatattgttttcaagggttattaattatataatttttgtttgaaaatgtattaactatataattaggaaactcattttatttttcttttgccaagtggtatgtatatctaaaaaattgtattattaaagaaaaaaaaactaatattttgtcatgtaaccatcttaatccttaatttgaactcgtactcgtccgtggcttattaggcgattgacataaatggcatagtttactttggacttttgcatatgtaactttatgcgttctcttattttcaaagatttttgttcctttattcttattgttccaaacaacaaatgtgggggtcaacagaaagaaactaaaacattatcattaaaccataatactatatacatgaattttcattaacgaaaaaatgatcgtaatggagggacttgtttacaataatttttacagttcatggaaattttggttacaccacaaccgaagtccataattacgctattgtgtttgttgtttatcttgctaaggctttttcttcattaaatggttgtatcacttacaaaccagaagacaagtattaaatataaatataaccaaattttgaacatccatctatattgaacaccaataccaaagaaaacttaaattcaaacctcattcacagtactcctcgatcgaaatgatcttaattaacaatatttactcttcataataattaattaacagttgtcaaaaatttcatttgtttttaaatattcattaatatttttccacgaacagaagaaaaaataaagtgtaacgtctgaatattaatgtgataacgactttggctttgatgttatgtcatatatcttgactttcacatatatataaattcacatatctatatatcataatttggtcccggagaatatgctaacatggtgtacaaacacattccattctgtgtaccgactttttttttaatacatcctcctattataaatcaaacatatttatttacaataacagataatatagaatagagaatatcttccaaccaaattaaatcattatttaattctaaaatatgttttactaaaatcataagtgactgtattagcttctctccaaaaataaaacaaacaactcaaaaaaataaataaaaagaaataaaagatcaacaaattaattttacaattataactgtaatagttaatagggtaaataccattttggacctgtgttttgcaaaagtta

SEQ ID NO: 40836 - DNA, 2618 bp, Cannabis sativa
tcacctatgtagataatacatgcatcgataggggtagctggatcatcctgatagggatcatacccgttaggaaagacttcatcatctccacccatagcaggaggttctgttgctagaggtactggtgctagatctgctggtctattttgtagtgaagtaatgatagatcttagctgctccatcataaggtcttggccaaccttcacttctaggtgactatgcgtatatgcatccttcaactctgtctgagaagcgtaaagacccttcacatcttcctctatcctatataacctgtcaatcacatcacttttgtcagcaggttgagtctcaggaatagcagcaggttgagtctccgaaatagcagcagattgaaaatgttctgcgactctcttagcttggctagcaaaaaattgagggtcttgggtgttgtctccagcctgtgcctcatcaacacccatctcaactaggacctcagcaccattgtatgtgatggtccgagcatacgcctcttcatctgggcgaggatgtagccccttcatcactagcaatgtttgtataacaaaacaaatgcaaaataagtgttagtaataagtaaaagttgattttttttcaaatcattaaaaaccatcgacaaaatatcgacatcctatcgatatcatatcatatcaagaacaaaaacaaatacactaaaattattgataacatatcggcatcatgtcaatatcatgtcaacaaatataaaataactatcgataacatgtcgacatcctaacaacacttaaatatagacaaaccgtcgaaaacatgtcgataaaatgtcgacaaattatcgacaaactcccaataatacaaatattaaacacaaaatgcacatcatcgataaggcatcgacattatgtcgatatcatatcaacaaacaaaaattttttaaaaaataaacataacagttcaaaaaaattaaatgatcataactgttttgaaaataatgtactcattttcttcttttcgatgtcagccctgctggtccagcttagcatcctgggaaaatgaattccctgagacaaaccatacttactccccacctctataatggcctcataggcccaatactgtaatgcaggtgcgaagccgtaggtagtgtatttgcattcatgctgaacatccatcttcagcttcttcttctcataattttccttctattttcaacatgtcttttcggagggagtgcatcagtctggaaaatgagtagttctcccatggactcttgaagaaaaaatcaagatcttcaacccattttagtgtgtcagttgtaatacatgcatttccctctcagtccagtaagacaatctccacaaacaagcacaaccctagcttgtatgcgtcttatgggacctcgtaggctaggaacttattctaaagtagttttgtcttcacattatctgatgggatgaaataaagatttatcaaccggttagaccctgacatggcttctttctcatcgtctgttggcccctttgtgaagttgaggcctataatcactgcgaactcgaccacactaaatttcatctcattctgtggaatgtaaaaccgcatttcgtcatccttctcagcgtccacaatcattttatgcagcatcagttggtggaatagtactgacaaaaatgatagagcaccagcttgccataattgactgaaagggtttgcctttgccctatcagtcaaactgtgcttatcaaattgtggtttgatcaacttgctaaaaataccacttcctctataggtcacacgacctgtaaaatgcttagggaatggaactataagcttcggaggtatctacaaaagggaaaaaatcagcaatgtcatcaagaaactatcgaaaacctatcgacaaaattattattcctcaaaaataaagacatgcaaaccatcgacaaaatattgacaatatgtcgatattgtatcgacattcaagcaaagaataaaaaacagatcattattacaattgtcgacatcatatcgacataccatcgatataatatcgatatgaaaactatataacccattttaatttctttgctataatatctacatactattgatatcatgtcaacatcttattgataaacagtttaaaaataattacttaaatatgtcgacaaaccatagataatatgtcaattacctatcgatatacagtaaaacaaataaaaaaatatgttcaaacaatcaaaatacaccattttgatctacctttgatatcttatcgatatttcatcgataacactgtaaaaaacacagaccccattgaaacatatccatcatctacaacctatcacctaaaagagcacaaaatctacaaaaattccactaatctcaataacatgcaaaaattggcatccaaatccatgaaaaatttatttttttcaaaaaaaaaaacctttccgtttactgagcttggtgatggtggcgacggcgtctgttcagtttcaacgaacacgggtcgtggtgttggcgacggttcgtggtggtttcgacgggtctggttgagttccaatgtgggtcatggtggtcggtcgtggttgtttgggttgaattcgagagcgagagagagagagaga

SEQ ID NO: 40837 - DNA, 1483 bp, Cannabis sativa
  modified_base (878)..(879): a, c, t, g, unknown or other
atgaatgaaaaatacttctattactttttgatattgaataatctggatttcattgaaatagaattttatttagggcataaaacccaacaattcttatgtttcaagtaaggtaattgagaatttgaataggcctagtgatgtactttctagaggcttcaaaactttactgcctactggggagctagttatctccaacaggtgggttcgatcccttccagtatttatggaaggaagagaattgtcagtcgatctgatagaactaaaaatttggaagactttgatgttattttgggtatggattggcttgctaaatataatgcaactattgattgcaagaggaagatgataacttttcagcctgagggcgaggatccctttgtatttgtgggtaagatgcaaggatcccagattcccctaatctctgcacttaaggcaagagatttgttgtgtgaggggtgtatcagcttcctagcaaacgtagtggatacttccagggaaccacaagcaggactgaggcatgtcctagtggttcgagagtttctgaatgtttttccagaggagttatcaggttaccaccgaagcgtgaaattgattttgagattgatctaataacaggggcagagcttgtatcaagagaccttataggatggcacttgcagagctgaaagagttgaaagttcagttacaagggatgttggatttaaaaatttacaagaccaagtacctcaccttggggtgcaccagttttgttcgtgcaaaagaaggatagaactttacgaatgtgcattgattaccgggagttaaacaagttgagagtaaagaacaattatccactgccaaggatagatgacctatttgatcaactgcagggaaagacnntcttctcctagatcgatcttcgatctggttatcaccagttgaggattcaggaagaagatattcccaaaatagctttttggacccggtacagacattatgaatttttagtcatgtcctttggattaacaaatgccccaacgacatttatggatctgatgaaccgagtgttcaaagatttcttggatgattttgttatcatctttattgatgatattctaatttattcagacacagaagatacacacgaaagacatcttcggatggtgttacaatgtctcagggagcataaattgtatgccaagtttaagaaatgtgaattttggttgcctcaggtgagtttcttggggcatgtgataagtaaggatggtattctagtggatccggtgaagattgaagtggtacgagactggcctcgacctaagtcagcaattgaagttagaagttttctgggattggcagggtattatagaagatttgttgagggctttgcaaagatttctacgcccttaatagaattaactcgaaagaactgcaaattcgttaggactgataagtgtgaaagtagcttttaggaactgatgcaaagattaattaccgctcctgt

SEQ ID NO: 40838 - DNA, 1019 bp, Cannabis sativa
taagattaactaagtgatattgacttagaaaagacataacgttaagtttgtgatatcttttccactgtcagtattggtttagtctaaagtatagccaatacagctgatactagtatactttactaatgctctggaaaggacattccacatatcattgtgtaagtaaactttatcgttgattatcgcgtctgagtaaatccagtgcagtgataaattatgagactaaatactttgaagcatgtaatcagaactactttcaactgtgatgacatcactatttttgtgaataattatatgtcatacccgaaattcggctggtacttcagaggatgacacatgtcaaccttaggaaatacgaatcaatgaacacattcgtaattatatcaataaatattaaaatggaataactcattaaatgcagaattcatagagtatatttataactcccagactgcacagtctttagcgagacaagaatgtaaaaactattgatttacgtattgacgagaaaccattttgcgtcagaaagcataatccaacggagaacataggtaatggatagtgagacatccatttcgctgtaggaaggcatagtcctggtaaactctagctcgtggagaacctcaggatatggttgtccagtctgcaaggccttatggtcaaagagcaattcttaagtttgctagtacattggtgctcatgccattgattgaagacttatgaatgagccaagttgttaatgtaccaagcgagatgccccagcgagatacgctttacagcgtgtcttaatccatgtcagcgttgaccctttaaaagcggtttaaatcacaactgtgtgattcttaaataataactgtatttagttatgtggagcgtaaataaggccaacaattttagggaaatattattgtggaattcgaatttgaatgtaattaactgcctacctatattacgataaataggggtagattatactaaaaatgggacagaaaatacttgagagaaaaaagaataaactg

SEQ ID NO: 40839 - DNA, 1870 bp, Cannabis sativa
gaactgtcgcgggctcgggaatgccgcgacagttcgacaactgaaggagctcatccggaagtcgaatcccgaagttttgatcctttctgaagtaaggctaaaagaagaaaagcgtgttcgcctcttgaggaaactctaattcccaggtatttgctatgttcctcctatgggaaccgggggtggcctagctttatgttggcgattgggagtggactgtaacattcaaaatgctgataaaaatttgattactggtatcatttcttctgaccctttacaccgtccttggatggtaatgggcatctacggacctcctagttatggggagaaggaggagttctggaggaatttgggggatattgtggatcaatgcaatctgcctatgcttttaatgggtgatctgaatggaaccttaaaagatagggaatgcttgaattatgttaaagcttccagcacaacaagatactcattcgatctaagaaggatggttctccgcactgggttaattgatttgggttacactggggttaaatatacctggttcaagcataacgtggatcccttggcgggagtttctctaaaaagggcacgcctcgatcgagccttggcatcagcagattggcggattgcgtggccaaatgcaattgtttctcacctcacagccacatcatctgatcataatcccattctcctcgattcctcaggaggaaagtattgcaccaagcctcaattcaaatatgaaatgatgtgggaaagagatcctcgggtgttctgggtggttaaaaaagcatggaatgagtcaagtcatgagcacccgatggttaacctataccgcaaaattaagcatacgaaggcttctcttaccaaatggaataaatcacattttaggagattgacaacacaaatcaatgaggctcgtgctaaacttaaggttattgaagagacccagaattttgatgaggaggctcactccgaagccagagcgagactagacgaggggttaagaagagaagaaatcttttggcggcaaaattcgagagtggcctggctaaaagacggtgactgttcaacaaaattcttcatggctagtacggtaacaaggagacggcgtaactatattcaatgtctaaagaatgacctggggcagtcgattgaaaatatgaaagacatagcccagttattcattgataaatttaccagtactttctccaagaatggatcacggctcaagtttaatgttgaggagtggactcattgaagatcgatgacgctgctacggacgacctgatggatactccttctgaggaggaagtcttgaaagccttcgcctccatgggaatcgacaaggcacccggactagatggtttccctgtggccttctatcgttctcattgggacaccttaagagaggactttctcaaattcatcaaccacttctttgcaacagcaaaactaccccaatacatcaatgatactaatatagtattccgaagaaggactgtccatcaatggtttgtgattttcgacctatcgccttgtgtaatgtgcactataaatgtatttcaaagattattaccacccgtctccgagatatcctcccttccataatctccccaacgcaaacgactttcatcaaagggagatgcatcaccgagaacactgcaattgccaaagaaatcattcattctatgtcccgtaaaaaagggtcgaaaggtttcatgatgataaagctcgatatggagaaggcctacgacaagatggattggattttttattggaagctctaagattccacggtttcaagaaccccctgctgggatggattaagagctgtatacaaatctagagcatgaatgtgttgatcaatggggtg

SEQ ID NO: 40840 - DNA, 3438 bp, Cannabis sativa
  modified_base (3409)..(3409): a, c, t, g, unknown or other
atttaaaaataaaaattatataaataaattttttattttaatttaaaatacttagaatattaataatatttttaatctaatttttaagtttattgatttaactttaaattaaaataaaatgaaaaactattataaaatattgatatttttaaccatatttttaattttattgttatttattttatcttttaaattgaattcacacaccatatttttcgtaaaatttgcaaataaaaaacttttatatcatatttacaaatccaataaatatatagatacactcaaatttggttatttgagttttggttaacaataaataaattacgatatatgcattatcagatatgttacctaattaaaaaaatttaaaaatttaaaaaatatatataatcacattcaaataacacaccaatgtagcaatagttaaaataaatttcttaaaaaatcaaaatctcaagctctatttcaaaaatttaaaaaaaaaaacagtgcctaattaaaaaaaaaataaacatacatatattgcacttaatatcaccttattgagcctaattaaaaagaaaactaactaattaattatcattatatcacatcatatatagatctaaagtttggcatcccaataacttatcaatataatataatagcattataaggagttcattctttaattttaattttgtgatcgtatttatgtgttgaaactaatttagtttttccactagtcttgtcttttgacatagttctttagtcttatcttttgacatggttttttagtcttttccttttaggtttttcggttcgagtcttgtcttttggcatgtgttgtgtagctcagaatcatcatggtgctattgtagaagcattcaacaaggggaagattagatgtgttcaactcgaaattactgagataataggcattaaagaagcattgagttgaattgcaactcattcgtgggatagaattatattagaaatatataacttggtgtgtgtccaagcgattcaaagcggtattttatgccttcataatttgtgttttgtaaaacgatctgcaaataagttgactcattgcttagcaagagactcttgtttctctacaggtcgtgtgcttcagttagaagattgttcctctgaaatacgttctattattttgaacgaatttataaattaatagatcatgacataacattaatctaatatatatatatatatgaattttcgtattacatcgaaaatgtcgacaatttttgcataaattatagttccattaatagacatattttcatccaggacccaactacctgagctagcctatgtgatcgtttctttaaatcactttgccacttaaatgacaataaaagctagatgaaaataaagttatttaaataatggcattggccaaagtctacagtgagagatgtacaattgagaaacaacatacatataacttaacattattgagatgctactgtacagtgttgctaaatatttctattttacaactgagtttctatgaatgacaagagtgccaaaccagatgcccaaacatcatcatccaatacatgctctgcgggtgagtgacttactcctccacgacagcggacaaataacataccaatctgttcatgtatacgaccaaaatgttataatgagggacaatttacactatcaaaactagttttatggtgaagcaaaaaagagtaagcaaacctttgttaaatgagaaattgccattgcatcgtgtcctgctccactcattaagactggcaattcactctggatctcgcctctcattctcttgaccgcggcaaatgctgaagacctgagctgtgaactcagctcagaatcacacattactgcattggcatcatgctgaaatgaacaatagaacatgtattaaattattactcattgctcttctaataaaattaacaattttttacataaatattgttctgcaccttgcggtcaattgtgcatgacactgatcgtgtatcacatatctggtatatccgatccgataattcgtaaatcacagcttcgcgtcccatgtcatttatggtacgtaaatccactgtgaatgtaacctgaaattaatattccatattcaatgtgcacgttaaattttgacaatacacaaaggcatcttcagtgctactctactatcagcaattgcacgagctcaagttcttgcctggcctgggataacattacttgcacttggccatgtcgatatttctccaacagtgcagacaagagagcttgaaagagattctaatgtggaactattgcagttactatcagatggcatgaacttctcaggatgtttacaaagactttccaaaaatacaatcatctcagctgcagcagccatagggtcccgacgcattgacattggaacagttccagcatgaccttgagaacctctgacagtaacctgcaatggtgtgcacatattttcgtcaaagtcattactagtcttatatgcttgctaatgtgcatacaagttcttcgcatgaatgaactacaaattatgagaatgctaagagtaaatttttctgtcctccatttatcctttaaccacatatattacatgcttacacaagctatgtattgaacaggtagaactaatacagttgacatacaaaggaaatattaaacaggaaaaaagagaaataaagaaaaagtttgaagacggagtttaacctgagtaaaatgactaccaaggtctaatggaaagatcacaagcaactagctatcgtaataagtgggacgtgtctttattattagctatggtaatcaattaaagcgtgtataaggttatggaggaaagaacagaagataaaaaagaagcttttaaacatttcttctaacaagtagctgtaaaagaatcatacttgattttggaaatagaaatggaaaacataaatcagagctggatttgactaaacagcaactgaaagtatgagactgattgcatggcacgctcatatgaatattgtcagtcagtggaaaacgatttctaggaagctgcatgtttataaatgtcaccacactaaaatgtaaactgataattgacgaaagatgcatataatcctaatttaatgctcatgtagcaagttcaacagagtcatgataggccttaggatattaaataaaagggtataaatggtaattgtaatgaggcatatatatatatatacatatatgagtgaatagaaaaggaaagggggagaatgaattagttaatgagcagtagctcttgggagagacaacttgataggaatttcctatcaattaatataaacagtagcaattatatcaaaataataagctgatatattgatagcaaaatgtaaagagtacagtgttgctgggtattcgagagacccagtgctctcccaanagctactgctcattaactaattcattctc

SEQ ID NO: 40841 - DNA, 1882 bp, Cannabis sativa
ccaacctgcttggtctagagtggcttgaacatgtacatacatcatccagctctcgcactcatggttgatcaaaaacagatttaccctttcatacacaatagagcacctgtgagctaagcccaggaagacaataaaaatatcaataatcataattagcacgttatccaaacattaatgccattcacatttgtctgtatgacacagaccttcatgttacgctcacatttgtctgtatgtttatgtggcatagacctacatgttatgctcacacgtctatatacaataaagccttagaatggttcatctcagctttagttaccgagtctaacctaattatcacttgaacgcataaccctgaaactttacctacattgcaatctcctggcataacaatatatatgaataaatcactagggtaataaccctaggcaattaaaccgctcatgttagggtaataacgctaatcctggtttctaattaatcacatataacattttcaacaaaagcgccaccacacatagctctatgtgcaactactatcttacctgatgtcccctaaacgtggagattctaaatccccgggtgctcctcaccaagtgttggtaatcctagttataaattatgagatctacaaatatagggttaatccctaattccactttcacataatataaacttggcattcaaaacacagatatgcacatagagctcagaatgagctttctaacgatatatagaactcccgaaacggagtccggatcacaaagttatgaggattcgaataacgtgttcgaatctgcccaaaaacaaggagttgggccccggtacccccacatggggccagagcacctaggttcgattcccaagccacaaaccagaggtgggccgcggtgcccaaggagctaggccgctgcccctgggtttcaaacccagaaaacccaactttaaggttcaaaaatcaactccattcacacccaatccaacccaaacctaaacacaactcaaattaatcttttaccaactgataagtacctaaataggcattaaaatacataattttcatgctctaattccagcaaacacatatcaacaatttcaaattaacaacacaaagaataagctccaacattgagttaaattccatacaaccccatattcaaatatttacacattcaagccaagaactcatacctcaagcaactaaattcagagctaaataactaaataaaaacactaataaaatctctaaaattctctctaaacttaatccaaaacaaaacacaaaagctccaaacacaaaacatgctcacaacaacaagaaaatcctaacatgcatctcaagatcataaacacataagaacatgcttaaataactacaatttcagcatcaatttaaaggcaaaatgagataaaaactacctcagtatctcaaatcactctagctccaaagattatcacaattcaagcttgaaaccaagcaatttccaacaaaattaaagaactagaagaaagagttttgagagagggaggggtcaatttaaagggctgagaataaatgcataaattacttttcatttttgcaactaattctcttttgttacaaataatccactttgccaatttaccaaagtgccccagggccatataacactcataaaagcatttaagggtaaaatagccattctcatcacaaatatactcaaattaatttcagtttattcacatataaataaaataccataattaatcccataattatatttcggcgccgaacccggtttagcccgaaattagggctgaacatcgggcgggtttatcgggttttgggttggcaggtttcgggttttgggttcaaaaaattgaaaccgaacccggacccgaa

SEQ ID NO: 40842 - DNA, 1321 bp, Cannabis sativa
ttgtctaggggtttagacaacattggtggttgggccaattgcttcttcagctcctggaatgcattttcacattcccctgtccacttgaattttttgttacctctgagagtgttgaagaagggtacgcatttgtctatagacttggacacaaatcttcttagtgcagcaatgtgtccagtttggctttgtacttccttgacaattgtgggcgacttcatgtgtaaaaaggcttagatcttgtttagatttgcttctattcctctagcattgactatgaagtcaaggaattttcttgagcttatgcaaaaagagcatttgaggcggttgagctttatgttgtagctgcaaaggattttaaagcactcgcctaggtcctccacatgcccccaaccttttcgaacttaacaagcatgtcgtccacatacacctccatgttgcgactgatgagatctgtgaacatcatgttcaccaacttttgataagtggcccctacatttttttagccaaaagggcatgactttgtaatagtataggcctaggtccatcatgaagctagtgtgctcctgattagatagatacatctttatctgattgtaacttgaatatgcgcccataaaactcaggacttcatggccagttgtggcatccactagctagtcaattataggcattgggaaagcagtcctttggacatgctttatttaggttggtgaagtctatacagatcatccacttcttgttcggtttaggtaccagcactgggttagacacccactgaagatagaatgcttctgttatgaagtccttggcccttagtcgtttgacttcatctttgagcacctgggcatgctccttgtctagcaatcgcctcttttgttgaacaggctagatgcttggatcaatgtcgagtgcatgggttatcaaggaggggtcaactctgaccatatctccatgtgaccatgcgaataggtccaggtttgcccttagaaattctatcaagattgacttgatttttggagccaaacttttaccgatcttcagtcttcgtgttgggtgagtgggatcaacttccacttcttccaactcttgtgcaggtccaaagcatcctctaggatccctaaagtgaggatctatgtttgtgtccccaccttgggctaggcttcattgcccctattgggctcatcttctagagtcttggtgggcatcttctcctatttggccttaaataaggccatgttgtaacattgatgggtagactgttggtctcccctcacgcatgccactccatgccgtgttaggaatttaaggcataagtggtaga

SEQ ID NO: 40843 - DNA, 1133 bp, Cannabis sativa
aacttacaaaacattcattctaaaagaataatacttttttttttctcatcatcacttatacataaccatcaatatttttccctcaacaaaactctcacactcttacaaatacataaaaaatcaatatattattgtgtaaaaaatgacgaatagtaatttttttaggctcgaaggttattgtatagggtcaaaaagaaaaaaacaaagtttcaacatctaggctcaacttgggtaaaattagggaattaacaaatagggtaggtttgaaactcaatcgatccaaaaaaaattgcttatataatatctcaaaataatcatgtgtgtaatttattaattttgcttctcaaatgattatcaaacaagttctagagtggttgagactttaaatcaaaagtcaaacatgcatttatctttccaaacattaacaaatatgataattcaacttttttttttttttttaaaatcaagcttgagcagtaattaatcatgagttacacacacaaatcgtgagaatttatcatttttctagaattataactattacacaactaagaatttcatcatctacaaaattatttttcaatagaccatgcataagacatcaaacacgagcaatcattgtcaacagaattttattcaaaccatgcttactaaaactaaagaaagaaattcgtgattcactttctcatgcaaaaatagagtgctcatactttattgtaatcccttaattagtcttttttagcctctaataataatattgacttgtggacaaatgccatatttcttattttattttacttgaattatatttcttcggttcatatatttaaattattagtttttaaaaatctcggtaagcaataggcaaaccatgccgtttataaaaatagaaacaaaaaccctaatagcaccttcaacttaaatactaataattcgtcaatgttgaagtatcaaagaagcatgaagaatgctaaatctccaatccaaatgaacacgtgacaaatcacacccatcaataactatcaaccaaatattttctaataaaaattggctaataacaatcctattattcaatgtcactaaaagaaatgttacttttaccagtacagttcgctactgcgttggtaaaagta

SEQ ID NO: 40844 - DNA, 2493 bp, Cannabis sativa
tatatttatatatatatatataaggcatggaggacgtgccacaaacacgtaactcccattaaaatttgtgagttataatcatatatcttacttttatcttttatcaattatgtttgaacaaatgttaaaaaaagttatgtttaaggaagctcatagtatagaataggttcacttattgaagctaagatcatcgctcgtcctatctaattaaatataagctcatatgatttgctttactattatttactaataaccaaagcttataaaaaaataaaataataattaacaaaatatatatatatatatatataaaaataatagtggcataagtatcaaaatttttaagtttgtaagtgataattaacacaatatttatttttagtggcataagtatctaatatttgtgaaactgtaattttcctcaaacttcatcagtacagactccgtttaaatttattaaataaagatttagaagtaactgatactatatatttctatctacacctaatgatctagaaaaatgagtctaatatgtgtcttatttaagataataacagagcaccgataaaattagaaaaaatttacaattttataaatattgggtacttatgccgctaaaaataaatattgagtttatgccggttataaacttaaaactttgagtacttatgccactaaaataaatattgggtttatgctacttacaaacttacaactttgagtacttatgccactatttaccaaaaaaaaaagaacaaaacaaaaaaattaatattatatgtatgctcatatagtcttctacactaatattatatatttattgataaataaatatgaaaaaagcattaaaaataagcaaaaaaaaaatgaaaaaaaacaataggagaaaaaaatgtaaaaaatatttttaaaaaatagtttaaaagagaaaattgagtaaaaaagatgagagaggtttattgaaaaaaaggaaaaagaaaagtgaggttaaaaaaaaggacaaaaatattaataattggtacaaacaaaataaaacacacaactctaaacataaccaaaaaaaaaactacaaattactaagaatcttatttagtttgagaaaatataaagagcacactatataaaaccttacctaagcggtgcgtaacaagtaaaaaataataaatattatatttttatttactattttaccacttattaatataattaatcaccttttacattttatttatatatttaatacaactttatatgcttttaataaaaatttaatgcttttgttgttatttttgcacctatctatcaaaaaattgattaattttaccctaatgcattggtgcactattataaaattttggccaaacgtaatattgacttgttttttttagctcaattatgcaccattcattggaaatgataagaaaaataccaaatgaggtgttaaacattataaatggtgacatatgttattggtgcattttaataccaagtctcacaaattttaatttagtgaataatatgggaaactgctaacgaattcttaagtgtcatatctgtatagtgttggacatccaaatattaatgttctattaataataaaaaaataattcacaaaaaaaaattattatacataaaaaaaacccatagaacttgtaaaaaaaatatacaaaaaataatttgtaagaaaattaataaaatgtaaaataaaaattacaaatcattcataacaaaataaacaaaaaaaaattacattaagtttacaattgtgcattggagtataatattaaaaattgatgtaaatatatcataaatttttttttcgccaaatataatacaatttttacatatcatattggagatgttcttgcaaacttatatataataataataaaaaaaaataaaattctagtattcaaattaataaagatatgtagattttaattacaaaaatatttagggacacattaattaaggtgtcaagcactacaaaatgtagcataccgttattagtgcattttcaatatcaactcgtgcaaattttaattcaataaatgatttagaaaactgctaacaaattattgaatactccatagatatagtattgagcaccttaaagtgccacttaacaataatagtacaaaaaattatttactaaaaaaaaattaaacaaaaatcattcataataaataaagaaaaagaaaaaaagaaaatgataatagagactaataaaaatatgtacatattaataacggcaatattaaaaagcacatttaagtgtcaagtaccacaaaagacagtatactgttattggtgcactttaatatcactttctgcaaattttataattttttaataaatgatttagaaaactgtttgttaaacaattattgtatatgtgaatcaatgtagtattaaaaaatttaaggtgtcatataacaataatgatacaaaatattattaaaaaaagtattacaaaagttatttaaaaaaaaa

SEQ ID NO: 40845 - DNA, 2524 bp, Cannabis sativa
tttataagttcatatttagggtgttaatcaacatacttgtgagtagacctaagatcctggtaaaataatttccaacatatatgtgagtcgataaactccgtaagaaaagcataatcgtaacataaaataaactagattataactaggcgtccatatacccaattacaatcctatctcgcgtcccacgcgtactgagtttggaaatttcatacgacagtacgattgaccataaaatcagcatatactcattactctaattgtactgatcatgtgatagcgtcaatctgtaccctaccaaatatatattttcagtgcaactctatgtacactaataccacccttactgatatgttatctattaggcatttataaacatgcacgctaaatatgtaaacacatatgtaataattatactagtcttaccttaattttaaattcaagtgtgtcggtcaacctgagtggaaactgttgctcgataatttacagatctttaagtcacaacatacataaaattgataattgatacgctaaatcacttttcggagatttaagcttaaaactaaaagatttcttatagatagatagcgtggaaataaactaaatattgataaaatgcaaaaaaactagagtctatatctaaaaaatctagttaatcgaaactccaaaaaggttcaccatttcaaagggtcctactaggaaaactggttcaccgttttcaccattttatgtaaaaacggtgaactgtttttctctatagaaaagatcaaatttttataactaggtcaaatctaccccaaattctaccaaactctccataatacctagtcaagacaatataaacataatccaaccagaaacaggagctagaactgtctaaaaacaaattcaccattaaagacacaagtttgagcttaaaagctgaaacgttgatctttctcaacaatagtcactaaatccagcataaaacaacacaattaattataaaaaaaaaaaaaaaaaacttcagaaaataattctaaacactttcgattcgtacaacaacccaacctcagaatttgcatgaaaacctaactcaaaaacttaaacttttaaaggaaaagggacgtaccttgagttggctagcaaggaccttgatttctaggctgaatcccttccaatttcaggttgaaaatggaaaatccccttagttttccttggttcctcttaggccgataatgaaagcaaagagaaaaagagagacgtgtgtttgtttctaattttgtggttttctaaaaacaaaactaataaatctatttttttttatttagcttatacttcagctaatgaattaacaaagaagcaataaaatcccactaattcataaaagacaaaaagaaggtaaaagacccttttaccctcacttcaccaagaagtaatctacataattaggggtaaaatggtctaaaatcataaccccaagtaagcccaacatttcaaatgcctaactatatttccccactatttctaaagtacaaaatcatatttaagtgactatgtaggccaaacatcgcattccactattaccgagcataaaatatgaaaaacataaaattttatatataacataatttatacacctagaatttaaatatatcaccataattgcaaaaataataattaaaagtcttccgacaataagccttaattatttgttaatattgaatataaagctaagtggtcaatacaattattctcccattagaaggatttcatcctcaaaatctaacttgaataactccggatactgagtcctgatatcggacttcaattcctaggtggcttcctccaccttattattttttcagagtaccttgaccaatgttgtcttattctgaatgactttatcctttatgtcaaggatctacactagttgatcttcataggacaaatttgtttgaaactttagggtttcataactcaaaatatgtgtgggatctgagacgtatttacttaaccttaacatggagagagacatgaaaacatgaaataatgaaatacgtaaatacgttatgcactgctgataaagctaaaggcaaggctagacgataagcaactaatccaaacttctcgagaatctaaaaaggtcttgtaaatctagagcataacttgcccttttttcctgaaatgtttcaccctttttattggagatacctgtagaaagacatgatctctaacctaaaattctatatttctacttttcggatctacataacatttctgcctactctgagagacaagcattctggccttgatcttctccattacctcattggttcgctgaactaattttggacctaagtattttctttctccaatttcatccagtgaattatagatctacattttctaccatacaacatctcatagggagccatctctgttgtactcttatagctattattgtatgaaaactctatcagtggaaaatacttactccaggagccttcaaaatctatcatacaggctcgcaacatatcttctaata

SEQ ID NO: 40846 - DNA, 1603 bp, Cannabis sativa
ttgaactttaaatttaatttttatatttatctcattatcacaataactaaaatataacaattgaatgtgaaaaaaaaaataaacattagtgctcgttttggacgagttaacccgactaaacaaaccaattcattgggtgggttgaatttttttttcttaattgggtgggtcgcacttagatttttgtaactcgatctttacattggattaaataaaatgtaacataaaccgaccaaaccgaccgacgtaaacccctagctcaacctggcccagtacaaatactggacgcccagattgacaccctgagtgcaactcgcatcagtttcaatacgtaacaacttcctacgtggaattttcttagccattgtactaggatacatgagagatatgtcccagccaagtttcacaatttagagacgagtttggaagaaactgcacccaggctcctcgggaccctactaggcgcccaagttgacatatagtcaacctgggggatatgaaggctagggtttaggttttcgagaacttctttggatcttcaattcctcaaatctaacaaggaacaatgttgtgacatgggtttttatcaacaataacccgaagaagcacttcccaggtaaattgttgtgaaaattattatacgcaagtatacatagtcacccaagtaatataatgataattagtaagatcgtatccacaaagattgtatatcaaattttatgtaaaaccaactatttaacaacttaaaattttaagaaaattaatttgtttgaataatgaaactaaaatgaaatggtagatatggaaatatgattagaatatggttacaattgttagaaaattaattccaagaaaaagtatcaataaaagagtagacttgaatagttaaatccgcatttgtctaaaactgcccaaattgttccaacatcatttcagcaaaacacacaaacttaactagaatttccaatatgttcattagatttttccgaaattcatggtaagttctgtcatctaattaaatatattcttacattaaatcagatctaagaatacaattcaagcaccaattctcaaagttatgcaaggtagtaaaatattactattctactcactaagaacaatctagaaatatatattttttttatcattcaagtacaaactattagatctagccttttcaataccaaatctagcttaataaactgttattgacactactaaaaaactcggaattcccgtcggttttacactgtcggccgaagaattcccgacagtccataaaccgtcacctatacgagcgttgcggatactgggtagaatagatgacggtcgaaaactgtcgggaaaatagtataggccacagtttaaaaccgttgcctatagtgaacactattggcgaaagtttaaaaccgtaaccgtagcctacagtataggctacaggcttagtataggccacagttttaaactgtcacctatagtggtataagcacggttttaaaccgtcgtttattgtaaaattttcagattaattttaaattttgtatttttcaacgacggtttttgcccgtcattaggttgcaaaaaaagggaaaaaaaataaaaa

SEQ ID NO: 40847 - DNA, 1703 bp, Cannabis sativa
  modified_base (271)..(272): a, c, t, g, unknown or other
  modified_base (397)..(400): a, c, t, g, unknown or other
aaccgcgagcttgctgggctcgggattggcggtgagggcgagcaccctccaccaccacaaaattgggaggagttatatgccgcgatgcaagagaccatcccgcagtttggtgaacaaattcaagagcttagggagcagcgagctcagtctgctccaaaccttaatcctgatcctccggcacctctagtagtgccaccgaatgcagggaatcgcctagagccgttgtacgagcggttcagaaagtaaaacccgccagtgtttgagggtggtnntgatccactcaaagcagagcagtggatgagtatgataatatccattttttattttgtgcgggtcgaggacaatgatcaggtaagatatttatatgctgcgagaagatgcccgtatctggtgggannnngtgtctcagggtcatgacctgaataacatgacctaggatgcttttcgagtattattttacgagaaatactataacgagtctatccaggcagcaaaggtagaagagtttatacgattgactcagcgcagtatgacagtaatagaatatgccactaagtttgatcgattggcaaaattttcttcagatgaggtagatactgaagctgctagaaaagcaaagtttatttgaggattggatgaacacattgcacgagatgtgatagttgctgctaaacaacctggggttgttcaaacttatgctcagatagttgaattggccctagctgctgagggtgcagaagatcagatacgaaagaaaaatattgtgagaagagattcatggaagcagacatctggtgttggttctggtaggggtaatgaccctggtgatcgcaagaaaagacctagtgaaccatcagctacaggcctaaacaaaatattccaaggtaaccaaggtttctgtcgtggtgggaatgaaaactggcaaacttttcctggatgtccaagaggcgccaccagggcgagtgtcaagctagagcatattttcactgtggggtagtgggtcacatgacgaggaattgccacagctgctgcgaccggaataaaagaaggatgatacacctgctcctgctcgagtgtttgccttgactcaggctaaggctgatgccgacccttccacagtgacaggtcaactctctattgttggtaccatattgactgttctaattgattctggtgcaacacattcttatatttcaagtagaataattgagaagttgaataggcctagtgatgtattttttagaggcttcagaactttactgcctactagagagctggttatgtccagcaggtgggctcggtcctttctaatatttttggaaggaagagagttatcggtcgatctgatagaactgaatttggaagactttgatgttattttgggtatggattggcttgcaaaatatagcgccactattgattgcaaaagaaaaatggtaacttttcagcctaagggcaaggatccctttgtgtttgtgggcaagatgcaaggatcccaaattcccctaatttcagtacttaaggcgagagatttgtggtatgaggggtgcatcggtttcttagcaagtgtagtggatactactaaggaaccaccagctggaccagagcatgtcccagtggttcgagaatttttagatgtttttctagaggagttaccgggcttaccaccgaagcgtgaaattgattttgagattgatttaata

SEQ ID NO: 40848 - DNA, 1418 bp, Cannabis sativa
  modified_base (1086)..(1087): a, c, t, g, unknown or other
acttgctatgggtggacatgtactctttcactatagggctcgaaaatatgaagagaaagagagggagacttgcattctacagaaggaggttctcaagtctttagttgtctcacaaagaatgaaaactagaatgacttaggttggattggattgaatgagaaccatcttattattttataggacttctcctagggttagatttaaattatatggcattaaaaatgaattactcctctaagggtactgaattctttacttcttattaagtgcatccgaatgtgcgcagaagacacatctctaaaattctacccaaaaggaatagagataaaaactagttaagcaatttcttcagtttgaataactttcttgtgcttttcaaaaaacaatttaagttatttcgcttcactagtggaactatattattataaatgggtttttacactcttctaaaataattcctccacccaagagtaaccactatcactaatattaagttctgagttggtgtagttataagaattctaatatacacctctatcatctaacatataggccacattcagagatttttttttattgtctccctaatgttccttgtttgattacatctttgatggctcccactcaatagtaggagtctggtttaatgcatacataagtgtacatttaacctcttactatcgatacttagagacatcttattgtgacattttatcttagtctggaacattatgttccttgtagactaagtcatcaacataagatactagtatgaacattaatgtaaaatacttgttaagactaagtaatcactatacatactgttatcccaatttttgcactctgacatggcatcacattaatgatcacgtgttgaatccacttggaacatctgctcaggaagcatagtccgagcaggatatctcgccggcatgtccagagcaaagtattcggcaatccgtgcagagtgaccaatacttagcgaattcagctttcgcatcatgagtcctcagcacgatccctataactcagggatcaatttacgtggatatggcatacacacaatcccactatcagtgtattcannctcaatcccacgatccttgcattccgcattaatcccatgatcattctgtttatacgcattgtaacgataggggaaactcttcctctcaaagcgtactagccctataaatagtgatgcatgttcactgggcaagaggtcgaaaagcagttgagctaagactataccctaaatatattatctaagaagtatacatttagagatagtgttgtaggacctataagaaaaggaatgcttctccttgatcttaagtcaatacaataacgaggattaggctattaccgaactgctcggggatgaacctctataaaattcctgtgtctttacattgctt

SEQ ID NO: 40849 - DNA, 3469 bp, Cannabis sativa
gaccaaaccaggacttggacttggaaacgtaaccgtacatggacgtagacccagaaccgtaaccgaacaaggacctagactccagctcaaacttagacccgaaccggaaccaacaaccagatctcaacccaaacttggactcgggacccgaactcaaacctgaacatggaaccagactcgggacacaaattgggccaggacctagaaccgcaccccagtctcgatcctgaatccaaactcagacctgggacctaaaccaacaccagatcgggacccgtgacagggatctagatctagactcgagatctgggaaacagggcttggaacaaacccgtagtaggtgtctggatgtgggactaagactaggttccgaacccggaccaggacccaaacccgaacccagacctagacccaagacccgaaactagaacctaacaaggacccggacccaaacttaaaaccgaactcggacctagccccagacccaaatcgagacaggaactcgggccttgacgcggacctaaatcttggacccgatcccagacacaaactcggtcctagatagggatctggatacgaacattgactcggacccagacccagccgggatcgaaacacgagacctagatctggatagacatcttgacccagacccaaacattgacccgcaccagggaccctaactcggacctggacccgaacccagacccagatcaggatccaaaccttgacccagacccggacccaaactcggaccaggactcaaacgccgacctagacccaaacccgaacccgaacccagacacagaattcgagtgtgggtctgtgttcgagtccgagtcctagtgtgattacaattttgggtctaggtcctcctcctattcttgggtcccgatccgcttcttgtttcggttctagtttcaagtcacgaggtacaggtcgagtccaagcatcgagtcccagatcccaagtcccgaggtgggccctacgtctggtttgggtctagggtcgggtcctgaatcgcaatccaagttctaatgcccaagttctaatcccagtttgggggaccaattcctaggtctaggtcccccatctatgttcacgtcctaggtcgcagtccaggtccaagtttgtgttccagttcgatttcatgtctcaagttcctatctgagtccaggtcccgatttgggttcgggtacaatcttagtctgggtttaggttttgggtcccaattccgagttttgttcttgggtcctgggtttggccccaatttttaggtttgggtcttggtttgggtccaggtcccggtcttggtttaggttgcaggtcaagggtcccggtttgggtccaagtaccgatatgtgttttggtctaagttttggtttaggtttgggtcctcttacagtcccaggtctgggttctcatcccactcctcgtctgattccaattccgagtctaagatcgggtccggatcctagttcgggttcgggtccgagtcttggtacagatctgggttcgggtcctaaattcaaatactgactatgggtctggacaaagccttaggtctagattcatatctcggtcttggtttgggtttgtgttaagagttgtgtcccggtagtcagttcctaggtttcgggtccaaggttgagtcctgtgtctcgagtttggggtgaagttttgggtctcggtctcggtccggcccagttttgggtccaagtcccccatctaggtccggatccttcgtctagatcttggtccaggttcgggtttggggccaaagtcccccatctaggtcacgatgtggttctcaggtcgaaggtctgagtctcgggtcccggtcccatttcgggttctagtcccagtacatgttcaaagctccatccaggtccgagtcccgggttcgagtttgagtctcgggttcgtgtctgagttttggtacgagtctggatctgggtctgggtcttggtctgggtttgggttttggtctgggtctgggtgcgggtcttggtctgggtcttggtctaggtccaagttttggtacgcctctgagatctggtccaggtctcgggtcacgggtgcttggttccaggttctgggtcacaagtcctggcgcaagtctggggccgggtttgggtctgggttcgggtatcgatcccaatctaggtccgtgttcgattccgcatcaagatccagttctgggtccaggtcgaattcctggtccaaggtcataattccagttcttgttccgatttcaggtccttagtccaagtatgggtttgggtcctagttttgaaatggttccaagtttgggtcttggtaagattccaagatccatacacccactacaggttcggtccaagccccgggtcatgggtcaagatccggttcccaatcttgggtcctggtctcgttccgattcagatcctgggtcccagtccgtgtcaaagtctgtgtctgggtccgggtttgggaccaagaccggggtcgggtcttgggtcacattctaaatcttgggtcccaattcttgttataatttcaagttcgggtccctaatccaagtctcaacctgggtccaggtatgagtctcccatcccggtccaggttctgcgtccaggtcttgatccaagtccatgtctaggtttgtgttcgtttctggagtcccgatcctagttttaattcgagtctacatcctggtcttggtgtgggtctgggtcctagtcccttggacttgttcccaagtctcggtccgcttctagctgcgcttccaattttgggtcacggtgtacgcgtctgggtctaattccgggtttgggtccgagtccgggttttggtttgggtttgagtcctgataagggtcccagatccaaacatcgactatgggtcaggtccaacccctgggtccagatcatgatcacgatctcgagtcctagtctagttccacttcgggtcccaagacctggtctgggtccaagttcagggtctgggtcgggggtcaggtcttgggtctcagtgccaattctgaagcccgggtcccgggtccaggtcgcccatccaggtcttggtcataggtcccggtccgagtctaggacccggtcgagcttcaagtcctagtccgagtcggtatcgggttccaaatccaggtcagggtcccgatctgggttagagttccaagttcgagtccagatcttggtcagggcttgggtcccgggtctaggtcccccattcaggtctgggtcctaggtcctagtccgggtccatgtttgggtttgggtcctagtcccagttctgatttcgattccgtgttcaggttcgggtaaaggtccgggtctaggtcgcggtttgagtcctggtccaagtccagagttgggtttgggtccaagtccggatccctgtctgggtttgggtttgggtctaggtccgagtccaagtcttgggtacgggcccaggtttgggtctgggtctcggt

SEQ ID NO: 40850 - DNA, 1662 bp, Cannabis sativa
  modified_base (37)..(48): a, c, t, g, unknown or other
ctctttctctcttcatcttcttctttcttctcatctnnnnnnnnnnnntttatattattttataacaattggtttattattggttaagttttttacccttaaattctctcaactattattttagttatacttaactgtttaagtttaaattttgacggtaaatttttttaaattattaaattacttgcaaatttaaaatattatttatttttaaccgttagttgtcaatgtgtacacttttatacatgtgtcaaatttatattagtaaatctgatattattattttaaaaatataaattattgcaaaacttataatatctttatttttaaaaaatattttatttttatttttataattttattttattttaaaataaattttgaaaataattattaaataataatattaagtgtgctaatataaacgtgtcatgtgtacaagattatacacataagcaacccatagtgatagttaagtgaatgacactttaactttgttactagttcagtagtttggagagttgtactgccaaaatttaaacttggagagttaactattttggttaaacgagattgtgataatagcttgttgagtgtgtttccttgtgagacttcaggaccaattatttctcaaattaactgtttgctgatgatagcttatttctcttaaaagcttcgattcaagcatgaatgtgatttaaaactctcatcactacttctaatgttagtaaacattattcactaatacttaagagaattgttaaaaggtacgattagtgcttaatatcctccttgatatcatactactatcagtgtaattaagtagcaggtttcatataattttttttttgaaatggtcttctataacttataaaaaataacttttagagaatatcgctcaccaatcatttaaggtgtcacttatgaaatgtgctaaatactacgggtactcaataacaatgttcaatacttaaaagaataagctgatttaacaatttaattgaataaaaattatgttttgatgtaattctaaaaaaaaaaaaattaaggatgatgacatattattttgatttattatatagtttgtatttttttttttttttttgtagaactttattatatagtttgttgattctgataagaaaatttgggaagtcaaaatttgattaattaacaataaatgagttttttttgggttaaataacacgtttttctaataattgggggtcctttagattctcgataagattttgatagagaaaagaaaactattaaaacttcctttaggcttacaaccagccttcctacttctcttcttccaccttccataatttatcataattataaggggaggagtgttactatcaacctattataaatttttagtcaattttcatgcttaaaaatacacgccacaatattttttttcaaattatttttacagtggtattcgttctgcttacaatatcatctttgtaaatttttgaatagtttacagtggcaaaaatacgtttgaaattttttgaacaagcgtgataaattaaaatatcaagaactctattttcagcactataaatcattcgaaattttttaaaagtttacaggtatgatagtgtaactataagaaatatcgcaatgaaaaaatgtattctagcatgtgat

SEQ ID NO: 40851 - DNA, 1417 bp, Cannabis sativa
aaaaaatagatgaatcattaaataaaaaatttatttttgtggatttaattcgtatttttgtttcgtgtttatgtgtcgtgcttttgtactaataaatttatttttttcgtgtcgtgcttatcgtatcatatcgtacttatccttatattttttatgtcagacccaaacctatattattttcattccacccatgctcctgcttgtatcggtatcgtatcgtgcccaaaaagctcagcctaaatgtacaacctcttttactcacactttttatatattaattggacacctaatagaaaccattcattgcattatgatgttaaatttttttatccaatagaaactagtcattgaattgcatactattgttagtgttatagtctgggtgaggagtgctaccgtcaacctcctgttacaaccccttagtcaacttccactcccgaaaacaaatgtcgaaatattttttttttcaaatgacaagtaggacaattaaaagaacttggaatagcaggaatctgtaaatgtttattgagtttattagaaatcattacagatgggtgtccaaggcgtgtgtgccattggtgagcattactagtttgaactgaattattgtcctcaaagtctgtttgttgtaggtagtagagattgtcaattcttttagccatcccaatcctcgatgtcagtgaaagttcctgaatatagctactgttagtattgaaaataacagagatcttggtattgtgtgtgagtgcactggctgaaatgagattgtatttgaaatcaggtacaaacaagacatttttaagagtgatgtgagagttaataataacagtgccaatcttgtgaattttggctttggaaccagtaggtaggtgaacagaaatatcagtagggttagattgaatggaagaaaaacattcaaggtgatagcacacatgatgtgtggcaccactatccataatccatgagaaaggatcggttatacttgaaaaaaatttcaccacagcttttttagtagatgtagaggcatctgttggctgaaattgttgtgctaacattgaaatgagttgttggcactgtgctggtctaagctgtgagttagaaaaatcaagtgtacaggaggtaacttgggatgcctgtggattgttgttggatgtggttccagcatcagatttatggtgttggtagaatctaattttcgattgccatagccaggagggaacccgattaggaattcatttatctttgtaatgacctggtttttggcaattggtacaatgtggtcgtggccttttatttttggatgctgcattttctgcaacagcaggttcttgaggagtagaagaactagaggcagccattgggggaatcattcgatggcctaaagatctttgtctttcttggttgattaccatagaaa

SEQ ID NO: 40852 - DNA, 2457 bp, Cannabis sativa
  modified_base (869)..(890): a, c, t, g, unknown or other
aaatacactttatttttgtttgatatgtatattttttaagaatatgaattgaaagaaaaaagttaaaaaaaattagtacaattaaaaatataaatttatatacaataaaaattatcaaaatgatgtgcctttagaactttttggggtgtaaataaaatttccctttggactttctaaagtaaattacaaaattatccttatttttttttttttgttaattactattaaatcctcacatcatttaatcacaagaaaaaatcataatttagagagctctatttttcatatacaatattatgcttataaatacacctttttatttcttttactaatctataattataatttttcatataatttgtttatataaaaaaggctacaaaaaatagattagaactatataaaaagggtaaaaaaaatttgggcttttacatattaaattatttatttaatcttttttttccattaaaatctcatataatttaatataaattatattattctgataaccaaaattttaagcttttacatattaaattatttatttaatctttgtctttttttttattaaaatcttttataatttaacacaatttacattagtttgataaccattatacttttagaaatgagaaattttgcaaatgatattttttgtttttaattattttttgtggataactatatgttagttaataatcacacaacaaattaatataaataatacgtgtatatgtatatatcatagtttacatctataaacattactataaataattatatattaattaataatcacataataaattaatataaatagtcatatttgtgttgatgaaacaatatacatatattataatttatctatnnnnnnnnnnnnnnnnnnnnnnaaaaattattaaaatattcttttaattactctctatggataatctaatctataactatatataaaaagtgtcgataatttttgggcttttacatcttaaattacttacttaacttttatcttttttttttttcattaaaaccttttataatttaatattaattaaattattttaataaataatatacttttacacgtgagaaattttgtgagttatatttttaatttttaatcatatattagctaataatcatacaacaaataaatataaataatcattgttataaaacaatatgcatacattatagtttatctataaacattataattaacaacaaaaatttttaaaattattctaatcccttatataagtataataatatattattttaatcactctctattaataattatatattagataataatcacataacattattttaataattatatttgtattgttggatataaactatttgcaagcatatattataattgaagtataaacttgatcagcaattaaagaaaattagtagaataatataatttttttgtattaattatcataataatataattatttatcatatatatatatatatcttaataatataattatttataatatataaaataaaaatattatttttcatatatatattttttaattttataagtataattccctaatttaaattaaaagtagttaacattagtttcaaattatttattaagcgtattttttatatatacatcatgtgatcatcaatcatatgtcaaaaataattggcacctctaaagtgaatttctaaggtcttgttgatatatataggcaatcatagattataagctaagctatatcagccctaagtgatgtatacttgaatttgaatgtacacctcttataacatatataatataattataaacatatacatatgtgttatgtgctaataatattttagtaagggggttaatgaattaatgccactaatgatagctttagagaaagtagatcaaaaaagaaagcacaagatcaaatcctttttcttgtagaaaaaggaagaaaaagggggaagaaaatttgtgataatattcccatttggggcaaggttgatatggagagcagcccaccaaagttctagtaatgagaggaaaattacttgggaaaaggagtggtggtggtagtgtggatggtgatcttgtgggtttttgttaataaatattggtgctctaccctcactcagtcaacaccaaaagtaatacataaatttaaagatattaggcgccgatagtacttaatattttttataaatagtgcattaagattagttagcaatattctttaaaatctattttcttaagttatatgagactcaatacttaattacaccaatagcattatgacatcgaagagggtgctaggcactagttaatggtgttcacaaattaatttggtccgatttataattttttcaaactaaaccagtattacggtttttcaaaaattcaaaaccaaaccagactaattaaattatcagaccaatccactcaaaaatagattg

SEQ ID NO: 40853 - DNA, 3522 bp, Cannabis sativa
  modified_base (293)..(307): a, c, t, g, unknown or other
  modified_base (423)..(423): a, c, t, g, unknown or other
  modified_base (2187)..(2195): a, c, t, g, unknown or other
  modified_base (2555)..(2555): a, c, t, g, unknown or other
tctgtcgagacatctccagattcaacagttaaagacgtgtttaatacacgatagttttgacccaataaaagcgagaaaatcacaactatacggttttgaaatcataaaccgcatttacacaacataatatgtaataaaatcccacaattttagggatgattgctgtaaaattatttcggtcaactttgtaattaactgcccactatataattataaatagtggcagacaagttcaaaaaagggacgaaaaaactcatatgaaagggtccctgaaaaatactcagaaatctgannnnnnnnnnnnnnnggactatgcagaattttaactacaaaaccacgtaaaaaccccctgttcatattctttattttgatatctttaattttttctgtgttgaaatcaatattgtgaggctcaaatttggntaacaaaaatctgcgttaataatttggtgctttcatcgagagcctctgtgaaaaagctctgagaaaaccctcccttcttttgaagaaaaacaacctccttcatggctgaaaatccagaaaatgttaacaccccacatgaggaagccaaccatcattctggaaaagagcccatgggctccagaagatctaccaatctgtagtccagaaggaccacccattccaggaggcctcaacctaagggtggccctagtgcgcggaccacatgttcgtggagaactcaacccggcgttggtcctagtacgcggacaacacgcttgaggagaactcagcgtgggaatggtcagaaccccgggacgagggatgaagagctcaatcgtgcgggtgcccaatcagtgagagaaagaacttatgaaacggaaagtcgtcacctgagacactgtctggaagaggcgcaacgtaggaacgctgagttagaacgtgaggcagcctcggccaaggtgccacaagggatgaataccaaaaattaacctgaacctggagtgagaagaccacgaggcacacctcatgggtcacgaaccaggagacaagaaaaggcccatgaagaacaacccagggaaaatgggacaccccctgaaaattaggacgaacagccagatgggaggcaaccggaaattgatgaacaagaaatcccacatgaaaatgaggaggatcttgggactcaaccgggagaacagagatcacttgctagaaatcaccaacgtccttcccaaatccatagagcgaggactcgtacatatcctgatgggggaaatacgacaaactgctctcgggaggaaagaacagagcatgaagaagcaagtgtgacttcgaggcgatccagaacccatagtcgatcagctcgaagaggagaaagtactcaacgagctaatgatcgagaaagtatggggaccagtagatctgcgagctactcaaagacaaagtcaatgagtaagatgcgatctatgagtaagacaaggtctgccagcaattacccccagtcagatctacgagagcacttgaatcggaaaaaacctgaccttcgccaaaagcttggttcaaagcaagaggatccaatccaattgtggataaacgagctggagtacaagttcaggagatattaagtgggggaattagggaaactatgtggatacgactctgacgaggagcttgagtcgtatcacccagatattatgaatacccattttccttcgggattcaaaaacccgcatgtcttgtcttatgacggaaccacagatcttgtctcgcatttgaataactttaatacaataatgcgagcgagtaatgtgacgaacaatttacgctgtatgttatttcccacctcgcttgttggagcagcgagtagctggtttaacaaatttactcatcattcaataatttcttgggagcaactgtccagggatttcaagaagcagtttcaggccgctagggacaggcatcctgaagcggcctcgctaaccaatataaaacagcagcctgacgaaacacttaaggcgtacttaagtcgttttagcacggctgccgctagggttagaaatttggacaacaacacgcaacttacagcccttcaggcggggatctctactaatccattaaccgcagggggcaagttgtgggatgacttacaaagacgtcctgtgagaagcatcactgagttcaacgaaagggcttaggtgtttgtccggaaggaagaagcccgaaaggaannnnnnnnnttgaaaacaagctcgggaggtaaacccagcaatgattcaacaggtactgcttccacgagaattgataactcgggggcttctggtccgaagagaaaggacagaattaaggaaccgtcgaaggagagaaagaaacaaaagaagcgtgacaaatacgtgccattgtataatttcttataccgagcttaatgaaactaggagaatatttacctcgcacatgagcagaaggtagccttcggcaaacccaagcctgtgaggaattcgaggagcaaaagagatgctaacaaacattgtaaattccataaggatattaggcatacgaccgacgaatgtcgccaactgaaagacgagatagaaagtctnatcgctcgaggccattttaagtagtacgtgaaaagacagggccaggggtacaaccagcccagtctgcccaataacccaaacaactaggggttacaacctattcctgtggaaggagagaacattctggttatttcgggagggccacatatcgcaggggaaagcaataacgcccagaaaagatatgtgaaagaagtaaagaacaagcaatcgaccttttccccaaaaccttccaagaagatgaaaaccaaggaacctcccattacattcacaaaggaagatgagaaaaatgtgagatatcctcacgtcgatccattggtgataaccattcagctcgccaacaaaaggatcaagagagtgttaatagacaataggagctcagtaaatatcctttataaggtgaccattaagaaaatggggctcgaaaaagccaaattaagaccttgtatggtgaacctttgtggattcaccagagacagcattgctagccttggcataattgagctcgcattgaccctaggtgaggcacctttatctgctactgttctggaagacttcttagttgtctacctgccctcggcttacaacatatcgttgggtcgtccagcactgatcggactaggggcagtcagttcgattaagcacctatccttgaaattccaaaccagatggcgtgggagtggtgcgtggcgaccaaatgttggctcgcgattgctatcgcatagagctacagcatagaaaagttggacatcagttgatggcaattttggcagaagacattgagaaggaagatgaagatcttgaccctcgagttcaagataagagaaacctattgaaactaatcgaggaatcgaaagaggtcattctcaacccagaaaatcccgcaaagtgtgtatacattgggtagaacctggacgagaagctcaaatagcagctaataagcttcctgaaggcgaaccaggatcagttt

SEQ ID NO: 40854 - DNA, 962 bp, Cannabis sativa
ttaatgcttgatcaccattaataattagtatagagattttaggttttacacttgagagaggtaatctaaaatcggacttagaattgcatgacatatgaaagttgtgatattgagaaattccgctaattctatgagtttcatttaaagagaaccatattattttatgagtgcttatttgattaacattgaataaagatatcgtgttagttaatttaagctaaatctatcatcgctctagagagattagtaggttataaggattcttgaaactacaaatattatgataaattgggataatcagtaaattgagattcatagttagaaatagggaaattaatgctctaggtttttacttcttgattaaaaattgttgcttgtctacttatttttctatttactttattacttgattcttaattataatttactttgggttatctaattaaagtataaaattaaagagtataatagttagtaaaatttaattatcaattcctgtggttcgacaaccttttattagtattaaaactttgctataacaatgttgtacgcttgtagcaaaaaaatagttatcaacttgcattctatataaatgagtgattcaaattaaataaaccaagttgaaatctttgcaacagtggactaagcagaccactctgactgaactactataattcccttatgctccctttactttttacttttatgtcatctgtttagtagctaatagtttgactactcgctactctaagtgagtactcgcacatttttaattaagtatttttaaatgtattaaatacacgcacgattttggtgttgtctaaaattctccgaccaaagagaagtgtctgtctattgagttttttttcttgcttttttaattaattaagttcagcaaatacatattttatgttattcatactaataataataataatggatatatatacataatagctagc

SEQ ID NO: 40855 - DNA, 1584 bp, Cannabis sativa
tgagtagatctaagatcctggtgaaataatttttaacatcatcttcatcaaaggctactggtgctactgttgggcttctcaaattacctatgaagcctagtcgatcaaagaaaaataagttggcccctaaaagaaaattgattttgggcacatcgtcatctccatcttcttctccatctcatgcaaagaagaaatcaaaggctcatcctccatctccatctccatcaccatctttttttgaatttgagcccgaggaagaagaatctgagtccaagactgatgagtttgatgaatcgtttcttgatcatgttgactctgaactagaatctgaagaatctgagtctaaagatgttgcagctatcctattccagaagcagagtgtgcccatacaccagtccctccaccattgtcttcaaagggtaaaggcaagaaactagttactgaaaatatttcttctccacggatgaaaggtgtgcactttaaaactcattctcctttatttttcttcaatgataatgctcgtgacatggttatttatgcacaaagaaaaattcttgttgaaagaaattatattttgagtgatcatcgtccatatggtgttcttaacattcttcaagagagaaaatagcaggttctttggctattttttttttttggctatgtggataggattgttaaagagtgttaaagagttctatgcaaatctcaataataaaattgttgagtctaactctcaaatgttttgtaaaatttttgtgagaggtcattggttctctttttctccacaagatgtgtcaaaagcattgcatcttcctattctcttgctattccaggtgaagaggagagtgaacctctagacaaggatgaggttctttttgagatggtgtggcctccaaattctatcatctcgatcaccaatctcacttttatgtatgtcgtgctttacaagtttgctacgaaaaattggaaactgacttctcacactacacatggcttctttcttatacaaggttgaaactggacatgatattgatttggccactgtcatccatgaccaaatcattagtttttggaaaggtaacaagaaaaatctaaagcttccatttcctcaagtcatttacaaaattttgagtgtacagaaaagtgatctcaagacagagcaagaagattgtggctcattccactgctgcatcttacaaggcatctgcaccaattcctaatactgttgaagcctcatcgtcaaagaaatccgagcctcaatctctagtgtttgctttagatgattttcctacagaagctattgttctaactacttcagcatctatctctgcagaactctctggtgttcgagcttcccttaatgccttaactgatcgagtaatgactcttgaaggactccaacgttcagttctagatgctgtccaagccttggctaaggccccagaagcttagtttttcttgtcctttattttttctccattcctaagaacattgatactttctttagtcttagatttgatgtatttgtttcttttatgtttttcagtacttaggctgctttgaaagacacaaagggagagagta

SEQ ID NO: 40856 - DNA, 1936 bp, Cannabis sativa
aaaatatgtccatttaaatattatttattttctgggatattacacctagttttgtgtggcaaagcatatttgaggcaaaagagttattgaattctggtgtatgtcgttcaataggtttgggtttttcaatctctattcttaatgatccctggctttctgatggtaatccttttgtaatgtctgatcatctagcgttgttcaaccaatctgttagcaacctccttaaaactgattcaaaaacttgggatgaagatgttatcaaggacttattcgacactagagatcaaaatctcatcctttctatttagctaagtgacaatactatggatgataactggtgttggaagtttgagaatcatgggagatacactgttagtagtgcgtataaacatatacaagtgttgaagggagcttggcctgctattcaaccctccagtttatggcgcacaatctggaagttaaaatacctctgaaagtctgcaattttttgtggagggctgcctcgggtgttttgccaacttgctatcagctgcagaagagacatgtgtctttgaacattgtttgccctgtttgtaatttggaagatgagactatctataatgttcaagttgattgttcttttactagatcatgttggaataggtctttggtggatattggtaatacaatggttgctgattttttcagttggcttcaagagattgaaagtcgtgggaagatagaagaaatggaagagttggctatggtggcttgggcgatttggagggctagaaatgaagtcgtctggcagcagaagagttcgaatgctgctagcattgtagcatctgctagatctttcctggatcaatataagaccgctcaagaaaggagaggaaactctctttctcatttgtttgaagatgggtataaagctgagcattggttgaatagtagaaataagatcaaggttaacgtggatggagcattgttcgctaatgaaggacgttttggtatgggctgcctagccagggagtcagggactatgaaggtcgtatggttgaagctttctccttgggaaagcttgctctggttcaacctgaagtgatggagattattggtataaaggaggctttgagttggatcaaacgtcatgatcggcaaaatgttgtcattgagactgacaatttattacgtttccaggctattcaaagtaacattcctatggccatctcaatttaatttattggtgcttgatgttcgtaatttattattgtctttgaattatgtggatttatgttttgtgaaatgatctgcaaacaaagaatcaatagttgtttaaatcttatttttttagtaaataagtaattttattgctcatgtcagtctatacaaatttgccaacttttttcaactattatatactcccacacaagtttgtcaaccaatctatgtcctctttcccaatttttactatactcatactattaagtctatctcgagtcactttttttcacactcataacaaaactcttcatagtttgtacactattttcccacaaagctctattcctagattttcaaattatatgcaccaagcattaaaaataaaaatgcatattccccttttgacactactcatcatggccctcctaatctaattcaaattcctttgaatctgtgttgatttgttccatatacagcccattgcaacacttgattcacacacctcttactgaattcacacctgaagaatatgtgattatgtatctcaggctccaaactacataaaacacaattattctcttccagaatctcctgcctaaataatctgctcgtcgttttctctcccaaactgccatccatgtgatgaacctatgttttggcacactgtaccttggccaaaatttgttagcaaaccagatcttcataccaggttctacaaaaagtttattacata

SEQ ID NO: 40857 - DNA, 1732 bp, Cannabis sativa
ggggggggggggggggggggaggtccctctctttctaatggatagattgttatgttggaatgtccgaggggccaatcatcaatctaaacaacaactaataaagaactttataatttctcaaaagattaattttgtgggtctcctcgagactagggtaaaggctccaaagcttggagccttgtactctaatattttcgatggatggtgtttttcctcaaacattgcgtggcattcgggaggtaaaattgcgattgcttagaatccttatagatttatggttgatatcatcaagtgcactagccaactaatgcatttgaggatttcaactattgaaggtttcaacagtctgcttacggttgtatatgcttcaaacaacaggggagagaggaaagtactttggaaggacttgtgtgatttatactctgatgaaaattggtgtgtgatgggggatttcaatgacattctagctaaagaagagagagtggggcatcgagtaaggtcatatccagattcagatttccttaattgtgtgaattattgtaagtttgaagatgtcaaagctagtgggaattttttcacttggacgaataaacaaccaggggctgataggatatattccaagatagataggatcatggccaaccaagcttggattggaaaatatgagtttgttgaagctgtatttcttaacgagggactattcgatcattctccagtagttcgttctttgcatcctcaagtggtggggggaaaaaagccattcaagtattttaggatgtggaaatctcatcctaaatatgattccatgctaagagatatctggagcttgaaaatatcagggaatccaatgtatcaagttgtttgtaagctaaagcaattcaaagagaggttgaggaagttaaacagggaagcatattgtgatcttcagcagcaggttcatgaggccaaggcatccctcgatagtctgtacaaagccaactacagcagcagcctcttgaagacagtttacaccagcaggaacgatcagcccgtgagcttttaactcaaaagcagaaggattactcattgttcttaaaagagaaagctaaagtggagtggattcaagatggtgactcgaactctgctttatttcatgcttgcattaagcatagaataaggcaaaaccgaatcctctccattgaaaaccaagagggcagcagaattacagaccctgaactcattacagcagcattcctagacttctacaaaggtctacttggaaccaaaagagaggagaggaaggtagtggagaacagtatactcagcaatggccctgtactatcctcaactcaagctgattacttgctttcggaattcacaaaggatgagataaaaaaggcaatattcaacatacctgcaagcaagtccccgggtccagatggcttttctagtagcttctaccaagataattgggagctcattggagaggacatatgtgcagctgtgcattcttttctgaattcaggtaacatcttgaaagaaataaactctaccataattacattggtgcctaaggtgaaatgtcctaactgtgttaaagactttagacctaaagcttgctgcaatgtgatttacaagattgcaatcaagcttttaagttctacaatcaataacatccttccttcaataatatcacagactcaaggtggttttattaaagggagatttgtaggacataatatcttgatatgtc

SEQ ID NO: 40858 - DNA, 2491 bp, Cannabis sativa
  modified_base (1140)..(1140): a, c, t, g, unknown or other
tgtaaagggttttatttagggcacaaaacccaacatatatcaacttgtattgattcaatgaagggagtgcgattgtcctctacttgagtaaaagaggatggaacattggttggagttatttttgaaagcatttcctctaacgctactttactttgcggctttaagttttttatataatcttcttcaaggaatgtggcatttgtagaagcaataactttattatccttgttactataaaatagtccaaccctagtctccttaaaatttccgacaaacatgtaaacttcagtttatgcttctagtttaccttatttcattcttaagacatgagcaaggcaccccaagattctataatagcgtaaactaggtatacgaccattccatagttctacaggtgtcttagggattgatttagatgaaacaacatttagaatgtcattggccatctgagtagcatatccccaaaaggacattgacagggttgaatagctcagcatagacctaattattttcaaaagtgtgcgatttcttctctctacaactccattttgatgtggagtgctaggggaagtatattgcgattcaattctaagtttaagtaaataatctttgaactgtatatccatatactctcaacccctatcagttcacaaaatttttaatgttttacctaattggctttgagccagagcatgaaattcttaaaaattctcaaacatttcaaatttcttttgcattaggtaaaaaaaactatatgcagagaagtcatcaatgaaagtgacaaagtactcaaaacctcctctggcttttacatttaaaggtccatagacatctgaatgcattaaccctaggggttctttggcacactctccctttgcatagaaagaacgcttagtacttttaccttctaggcaagattcacaaacttgtaattcacccaaggtgatatttttcaatggaccttctttggttaacctgtgaagtctatcatagcctatatgaccaagtcgtaaatgccatagatatgtttcatcattattatcaatctctttctttttatgatttctaagtttagcaatattaaaaagttcgttgttgagtataattggtatttccagtcttaaaacataaagcccttgntccatgtgagcaacacataattgaatgccattacgagaaatagttgaaatagaactaaaaaaattcaattcataaaattgtgtgtgtaaacataatacaataatcaagtttctactaaaattctaaataaacaaaacattgtctaaaagcaaaaatttattcttaagcttgacgcaagcttttcccttagcttggaccgatactaatttgccattcctaactttgaggtttaactcccttagatttaagaaatctcaagtttcaagcggctgcaatgaagaaaaagcatggttagtagatctagaatcaacaattcaaatggatttgtcattctctagaacacatgatttaaaaaaaatgcaataccttcgttcaaatggtttagaagtttgggacatctcgattttaaatgtcccttctctccatagtgagaaaacaaaagagtatgtatgctcagttgttctttaattgtttcaatttttggttcaatttcgattctagctctcaaaattgaactcgaagaagaagcattattgtaggaatcatcctcaatttcttcagctttcctttgcccttttctgcaatgctagaggaagccctccttgcgagtggtaaagtccgttcgtaagcacgcagttcagcgtccagcttgtctatgtcggatgagtaaaatttgttgatcatgtatgatacaaaaaatccattatactcagatggaaggctgttgagagtgaattgaacccattgctcttttgatagatcaattcccagcagatttactttctggaactttaagttcatcatgagcaagtatgaattgatgctctgaccaggcgacatcttcacactatagagttaatttgcaaaggcatgcaaaagataagggttggggtgggttgttcattttgaaactataaatatcaataaacagagataaattacttggtttaattaaattcatacacaagttctaaaaataacaagtaaggaaatatgtttgcaaaaataccaaaataaaacatattcaattattttctaaggtttccaacaaactgatacattgtcccatttaggcgagagtcaaagatatcatttattgaatagactagtcaactcatctaacatggaaaccgttctagtaaccttttattcgatcgaaaaaagaatccaacgttgtcccatttagacgatagtcgaggtcattcctatttcatgagttctactattgtttcatagtttgtaagccctactcttagcagcaactattagggtggacattactaagaataaaagacttacaataatacttatctttttagattctactacgttaaattgttaatgaacgaac

SEQ ID NO: 40859 - DNA, 1171 bp, Cannabis sativa
gaccaatcgcatgaagccgcttatggactctatcatttctgaagcacaaagtgcgtttgttcctggccgccttatgacggacaacataatggtttccttcgaagtgttgcattacttgaagcgtaaaaggaaaggaaaagaaggctttatggcactcaaactggacatgagtaaggcatatgactggcattgagtggcgttttcttgaagccatgctttttaagcttggttttgattcggtttggatacgtttggtccttaaatgtgtttcctctgctaagtacatggtggtacatgggagtagagaggttggtcctattcttcctacaaggggtatccgacagggcgatccattgtccccttttttttcctttatgcggaaggactttcagctattattcgtaagtacgagttgaggggtttgattcatggatgcaaggttgctaacggagctcctagggtgtcccatgtgttatccctctattgcaaaggctattgaaagggaatccatgagtattcaggaactccttcacaagtttgaaatggcatcgggtcagaaggtaaatttcaacaagtcgtctatttttttcagctccaacactgacatgggctctcgaacacttatctatcaattgcttaatatgaaacccgcagatgagggtagtttttacttgggactgccaagcacaatagggaggaacaaatctgctttacttggctttttgagagataaagtgcgaaaaagacttcagagttgggaagggaaattactctgaagagcgggtaaggaaattcttattaaatcggtggctcaatctcttcctagctatgctatgagtgtgttcctacttccgcttgagatctctcgtgacattgagcaactgatgacaagtttctggtggcaatcctctaacaaaacaagtaaaggcattcattggatgtcttgggatggattaagtcggtccaaacagagtggaggtatgggctttcgaaacttgagggacttcaacttagcttttttgggtaaacaaggttggcggcttctaactcggggtaactctcttcatggtcgtgtttttaaagcaaggtactatccccatggttctttcttggatgcctctctaggtaataatcctagttttatatagagaagcattatggaagctcaaca

SEQ ID NO: 40860 - DNA, 1363 bp, Cannabis sativa
  modified_base (48)..(58): a, c, t, g, unknown or other
tcctgtttgtgttcattaggttctatttcactcgttaaagtttctcannnnnnnnnnntcttacaacttctattttaggaatctagtaacatgagtgactaggaacatgatatacaaaaatgaaaattcaagttttcctaatggaacaaatattagttcccttatagtgttaattctgggagtgctaacagttggatccatatctataataagttatagattaaccgttgctattgaattaatggtacataaagaattcaagagataattagaagggtaaaataatacttttgacaaactctaattatgaactaataaaggataaactacttatttgattatatcaatggactgctataaagaattctataaatataattatatattttcaaagagtacaaattcatatttatagtggagtaataataaaattaataaaccagattattttattaatgagactcaatagtaatcaagtgtttattggagcttcaaaatatagattcatagtccttagatcacctatatacaacactgtataggaaaagatatactttgtaagatgaattgagaaataattaatttctaagagaaataattcttggggcaaaatagtaattatatataaattattattttgtataattatgtcaattatgaattgaataattaaattgaatttaactatttagtttgataaaattatattgattagttaaatataatattattatcaataatattatgatagagaactttactattttagtagaaaatcataattattcaattcaagttaaataagatattaatgagaattaattaattattatttattgtaaataataaatcttatctaaaagataaaattaagaaattaattttgggctctaaaatatgatccacatatgtagggtgacatataaaattcaatgaattttgttttgattatttaattaattaaataaatcaaaataaaataaaaattatcttttaattatttgaattaaatatttatttgataagatatttataattgaggataatataaaatagtaaagaattaattgaatttagatatttagttactgttatatgaatttatttttcaaattaaatacaatattttttattttataggattaaatatctaattataaaatactacatatatataagatatattagtaatacagaataacaactaactgaacaacaaattagagaaatatagttgagaaaatacaaagagtttgtttctctctaaatttttgaaatcatctctctataatttcaaaactctctctctctctctctccctctagggatagagattttcatcctcatctcataatcacattgt

SEQ ID NO: 40861 - DNA, 2728 bp, Cannabis sativa
tctagtaactctaaaatcaacttgctacaataattccattaacattgctaactaaaccctttgtgatatttttggtctccgattgaatttttaaggtcgccaaacctgaaaatattgttattccacaaacaacttacattgtacccacatattccaaataaatttctttaattaataaattatgcttatttatccacttatagtaaaattcacaattcatgctgaattaaataagtaggatcataatcctactcattactctgcaattaattcataatatataataaattctaattatttcataattagatttttgagatattacacatagttttcaggttgaatttttcgaactaagatttatttggtgtcatatgaaatgaacacgcagaatccaggatccattcagaatctgaattctcagaggtaacaagcaaagcactagtcgagtcatcacaatcactcttcactactgcatctccttcagatctcgaatcatctgactttagcctctccagacacgtctttttgacatgactcaatttttttgcaaatatttaacattcttttggctaccacactaagatttagatcttgattttccttttgaacctttatgggtttcccttttctcacttctgcctctcgtatacaatccattgccacttccaaagttctttaactaactcttttgattcaactctttcgaatttaagattgattgaacatcatcgagtgtaatcaactctttttcatatagcattgtatctttaaaatgcccaaatgactttggtaaagaactgagtaacaataaggcttgatcctcatcttcaatggtaacaccaaaattttcaagatccaaaattaacttgttaaaattgtcaatatgttctccaacagattggtcctccatcatattgaaagaatacatggcctatttcagatataatctatttaccaacgatttagtcatgtacagactttcaagctttagccaaatcccagcagccgtggcttcttttgcaacctttcttagaactttatctccaagagtcaaaatgattgtactatgagcctttgcaagaatctctttcttgtccttatcagacataaaatcaagaagagatttttctccaagcaaaacctcgtacaatccttggtgaactaacatagtcttcatcttcattctccataatccaaaaccattcatactagtaaaattttcaacatcgtatttggttacaacaatgattacaaaccaagctctgataccagtttgctgtgaaaattcaattaatgacttacgatgtaattttactggactaacaaacacgcaatcaagaacaatactataagagaattgcaagaatcaagtaatagattaaagcagtaaaacagagaaaaatacacaccaagtttaacgagttagagttaggaatgtaaacggggcagggcgggtgcggggattgctcccccacccccatactcgcttcctaaattcaccctcatacccgccccaatacccatttaaattaaagctagagtgaggcggagattacccgacgggggaaggatttctatcgggtacccattacatatatatttttgaaaaaaaaataatgtctcaaagagaattaaaaaaaaataatcataaaaactcagtaaaacaataaaattaagtggaatagtgtgtatagtaaaataaaatgaagtataatcaataaaaaacctaaaacatgaagttattttaattgtagtagtcatgattttaaaacttaaatatatacatatatcatatcggggcgggtatctattcccctgccccaccccgtttccaatccaggtatgaacatttaaacccatacttgtcctcgcccccgaaagtcaacccctattcccgccccattaggggcgggtaccctcgggtataattgtcatccctaattagagcattgtgcaatgctctatgtatcggtcagaacaacaacagtcatatctttattaatatttgtgttttcaaggttacaagaattttttcaaactattacagagatcacaagatgaactttctctctagtttagaccctctctctctaatcttagacaatcatgattttctctcaagctttcaatggtctaattctctatgggttataaaagcaatagctataaatagattttcatagttgctaaaattagttctgattctatcgtggctaattaattatgtctcaattctctaagttagcaccgacaacatattccatgtctgcttcagaaacgtgccttctgtacggacaatctggaagacaatcacatgttccgaatgggagttcaagattgatactagctatctagaagtacgtctccagatttataacaagctattcaaaaaactttacttacagaagataagctttccagaagaactattcagattggccacaactttacaaattaacaaagttttttggatgaacaccaaactttccataacttctttccagagtaacaactagctttttggaagatgaaatttgtaaccataatcaacaaatatatatttgaaaaataaaataaattaatttaaaattaaaattaaatcattttaaaaattaatttagaatatattttttctaaagaaatgaaaatcctaatatcatctttttttttaaaaaaaaaaaaagagaaattttatttatacccctaaattttttaaagacaatcc

SEQ ID NO: 40862 - DNA, 1044 bp, Cannabis sativa
atatccaatggcctgagcttgctccattggcaaattgttgacatctacttggcatctatcataagagtgaggtcatccacacaactcacatatcactggagccttttctcttgagtagtcatcatctttgttaaggcttctagttgggcggttaacatagtaattgcatcaaattcatgtaaacctactactacttttcggttggcttctctcatttggccattgttgattattcatggccatctcttcaagtaaatcataagccttattagtactttccctcataataccccaccagaagaggcatctacgagtgtgcaggtattaacagtcatcccttggtagaaattgtggacttatatccacttctcaatcctgtggtgaggacactttctgatcaggtctttgaatctttctcaggcttcatatagagactcattgtcttgttggatgaagttgttaatttcttatcttagtctagcaaccttagtaggaggaaagaacttggagagaaatttcagggccaattcctcccaagtgttgatagaatttgctggcaaagataccaaccaactcttggctcgatcccttgatgagaataggaatagcctcaatcaaattacatcatcactaaccccattcatcttaaatgtctggcttacctccacgaaattcgcaagatgcatgtttggatcttctgatggcagtcccccaaactggactgtggattgaaccatctgcggtatggctggcttaatttcaaagttgttagcttcaatggcaggtgaccttatacaagatctagcccctgtcaggttgggtagcacataatctctcaagctacagtcaggtggattaagaccattagcctagtcatctacgacacctccattattacagttattggccatctctacttcttggtcaacaactcccacaactctttccaatcttttccttctattttgtctacaagtcttctctattttaggatcgacatgcaatctagaggttagtccttgatgtcacataaactagttgttc

SEQ ID NO: 40863 - DNA, 1132 bp, Cannabis sativa
ctgatcaaggcgatccaatggtgataaatccaaacatgcaaactattggaaacacgagtggaccaccagggacaaaccccaaacaagtttatacacaaccacctacggtaggccattgagtgacttcctctcttgctgggttcacaccaagcttacaagagattgggaacaccagtacgactgctgatcaaacattcctaacaccgaggtcctgtccattaatattacttaaaggctagttggagatgacattgaacttcagaatctgtgagaagcacttgggctcatgcaagggcataacaacactctcactctgcatgcatcatgatcaggaagatctttaagcataagcaaccattaaccttgcattcaatgaggaaagatgtcaactcatagagtggagggaccaagagatggaaattataagggcacaacagacaaccattgacgatcgttctaggtaggccactgtgctgataagaagggcctactaggttaccagtcaacaaccaacaactgaatctagtatccccctaagcgggtcagaagggtatgcagctagacatatcgcacagactcgtagtggttagccacaatccaaggtcacaggttcaaactatactaatacggaggtctcaggccaacctcttagccaaacaggtcaaacgccaagaccacctggcactttagtgttcgatcagctaaggcatcgtgcacgacctcaaaaccaatttgaattgtaaaaagggactggatggacaaaacgttccaccgaccgtccagccagatacccgcacccaagatcagttcaagaaatcctaatgtaacataggtcagtcaacaggctgaacaagttcatccacttgtgcaagcataagtggatcaacttaaaagcatggtacaaggtctgatcggcccaaaactcatagatcttgaattaaaattaactgcgacgtcagagtcggtggtgattccatgtgtgctgtggcaattgccagggactctatggggtcgattttgtgggtggcaactaaattgcttaacttcgctgactctatcatcggagaagcagcggcgtgtctattagctttggagacggcggtctctatgcatcatccttttgttatggtgg

SEQ ID NO: 40864 - DNA, 1340 bp, Cannabis sativa
aatgccacataattactaacctaaacctagtggttacctataaataggtagtgacggcctacaccaaaataagagttgtaagtgattcaatagattgccttcagaaaattgagccactcactatccttctatagccgaccccctctctctgtaaagaacgcttagtttaaacttaaaaattagcagataattaggtcttaattatgaaaattatttgttgatattaaattaattatttatgataatttatttgaatttagaatgcattttatatgtcacatatagatatttcataattttgcattttcggcgcccgacaatgtttgaacgcggtgtatggcttagtagaatcacatcttagtattttggtacagtggggcagtttagttagacattgggaatgtcgggattaatcgggaatttagaatttcccaaaatacccttagcacccttttatgttatttttgtgtgggaggggcataatggtcattttgccccatttgtattttgtcctttagtggacttagttgcattgtatttcagcttttatttactatttttggcggatattatctaagtaaaagtcatttatattaatcattttacaaaaataaggaaaaagaagcaaaacaatttttccactcaaagctctctctttctctctcaaaaatttcttagtgcagctaggttttgatttgttttctgcatttcaagctgggttaagcaaggggtttgagatctcaagttcttggtcagtgtcttgtagcttttgctgatttcttgagttggaagaaaaaggaatttttgcatgttttggatttttggttgttgtagttgttgtagctgttagatattatttgcagaggttaaattatgcttgatcatgttggtttaagcttgtattcgtggttgttagttagatttaacaaagtttgagttttgaactcaaaacttggagctttaatggtggtttttgtttctgtgtatgggtggctgttttattgctttagaaatgttcattgcagtctaattagcaggtttggaaagtttggtttttattggggttgaattcttcgagttattaaaattttggtgattcctgcactgaaccgaaatttcggttcagggaggcctgtaggaaccgaaattccggttagcttccaggaatttttcccagagccagaattccggttggggcaaatttgggaaccctagtttttcccatttttgagttatttaggatatcgccatgtaatatatagataggtaaacttttagtttcaagtttaagtccccggaacgtgatttagcgtatcgcttatcagtgttgtgattgatgt

SEQ ID NO: 40865 - DNA, 1842 bp, Cannabis sativa
acttgccagaaggaagagattcggcagaaactacatgatcaaaaatcagggccactgtgcagcagtcctggaaaacttacaaattaaaatagaattctatatgataaaagaagctgtattagtataatgtaataactgacaaactaattaaaaaaaaacttacctatgcacgctgtcagtgtggatcgactgttttttcaagaagccaaagacagatatcaagagcttgagccatattgtcctgtaaatggcaaaccattaatgcatacaaggatcattacttgtgatattccatcaaaatacagagatcattgataaactaaaatagtaaaatatagcttatttgtagcaaaaatccatattctaactcaccttttgcacttaggtatccaacctcaaattttttgcaccggccaaaaatgctgttggatttcttactccaatgaaaaatcattcaactgcagactatataaatgaacaaataagtttcaatgtcagtttcttctcttttttttcttttgaacttgtgaactttgacaactgaaatagaacaacaagcttataaggatgcaaagaactgaaatataacttaatttttttcttctcatcactttcgtaaatcatgtatggaggtacaaacttagggcatgcaacactacaacttaatttgaaactctaattccaaaaatctaaaaaagaaactttataaataacaaacacctttacacatgcaaagtctacactgccaactgacttgaatttcattgctaaaatgataaagcctcccacactaatagtgttagtcccatcaccattcagcaccttaatttcaaaaacacaattttatttttgtcttttaccttctaatttaaatcgtaagaaaaaactggcttcaattactgccccagaaagaaaatatatcaattgaaaacaaatgagaataaaacataatgagtactagcaaagaaccttggcagatttatcgagcgaaccggtaataaactgcgaaccgtctactgattttgtaagtgaaataatggttttcttgtggccaacttccttctccgactcaataagtagctttccggtctataagtttgatggatacagtaagataaatttacacaatcaaaatcaaaagaaccatttagaaaatactctactttatgtttaaccattcaaattaaaaccagagagttatattcaccttagaatcccagacacgaacaatggtatcttcaccaacactaataatggtgcggttaagaggtccccaaacagtcctgttaattcttccctgaggacccttaatgactaaagcagattcaccaatctctgaaaaagttaataaaacacttaagaacacacaaaccttaaacaacatatacctattttaaactcttgaatacaacaaaaaacaaaggttcacctcaaaaatagtgacttacgatcttttggatcctcagcaataatcttgattgaattgtagaagtgtgacccataaaagggtcagcggtgataacagcgagcttatcacccaccgagaaatcgacagatctagccggagaatcaaagttaaaggtgaataattgctaaccagtctgaacattccatagcatagccgaatgatccgcacttccagtaatcagcaacatcgaatcccccaaaccataaaccttccaacccatcaaacacaagaaattaaaaaccaaaaatccaaaaaggtaaaaattttaaagaagggagatttactcgatacttcgtaggaccaaacggcaccgttgtgacctcgatagggaaagagagagacttacggaggtggaagatctacgccagttcgaa

SEQ ID NO: 40866 - DNA, 1647 bp, Cannabis sativa
  modified_base (440)..(444): a, c, t, g, unknown or other
  modified_base (912)..(924): a, c, t, g, unknown or other
  modified_base (1394)..(1400): a, c, t, g, unknown or other
aaagcactgtagcgtgccttagcactagggcgttacatattggatgtatggttatacatcggattggattgataatcacagtggaaaatatatcataaacttactgtaatatttttttttaagtaaatatcacttaattgatcttagattaatgatctcaatcctgagacggttaggttctggttgaagtgtattacttgtgttctttgattggttcgttaaagctaaccaaatggattggcccaataattacatcttgggaatacggtagtgcaattgagtgggaacgctaatcatagagacaaaatttatagcttctataaacatttatagaagtgtaatgataatttccattgagcttcgctaaacgagtttaaatggtggcgtactcattggagaaattatattagtttaatggaatatcatttacaagtagctannnnntttaaggataaaatacattcaagggtagaacgttacattgttcctactcaatgtaaatcatcaatagaggatcattgattatttggattgaaacaatagataatttatagagtatctatacttggtatagagcgttctatataattagtagtgcaattcctaatctatagtggagtcaggaggaattgataagatagagaatttcctctgtaaattctcgaactacttattaggagtttgattatataggcccatggtcccaacactagttgagataatattgtcttgcagactcaattaatttattttaattaaccaaatagaattctcaataagactatgtcttatttatgagctttcactaagcaatagcttatttgggaagaaaagagatcttagggtttgtttattaattaagagactttgaaaggtttgattaataaataagttaaatggaaattttatttnnnnnnnnnnnnnaattattaaatagatagaatacatttatagagttagaattaagaaatggcatttgagaagagaaaagataagtttcaaataaaatggcaaaattgaatcccaataggcccactaaggaattcggccaaaaggatttaaataaagcaaaatttatcttttcttttattctatttaaattctaaacctaaccttaataactaccatataaatagaaaattatagctcttattttataacctaattgactctttgttagatatatcagagaataaagaaagctccttctatttttgaattctcttcttcttattctcaataatttcgaaccctgttgtgtatgagtgattgcccacacaatttgagtcaatactgaagatagtgtggaagactgtgtagtgttcttatcacatgaaggggaaactaggttcagatcttgatcttactttacgatagaaaggatcaagggttannnnnnngaatggaaggagtcatattatttcactgccatcaatgtaaggttttctataactttatatgtgtttaattcattattttagggaattgatatttaggaagttagattatagatttataatcaaacatacatgatagtaaatctagattcttgtaaaatatttccaaaacctggcctcagaacaatggtaatgatttactttcatgaaatatatatttcaaaatatgtttgcttgatttggatgtgtt

SEQ ID NO: 40867 - DNA, 1592 bp, Cannabis sativa
gtaaaataatttccaacatatccatctttggatggggtgtgagagggaccccataagtcagtatgcactaactcgaggggttgagatgcccttgcatcagatatggggtagggtaatcgatgattcttgccctgtttacaggcttcacaaaattgaagatttttcaaatatggtttgatgttcatctgtgtcaacattttggcaagtatctttggggcagggtgtcccattttaacatgccactgattgatattatacttattagcaactaaagccattacaagagtaagagaatgagttggaaaagtagtatttttattaatgaaagaatcattacaagagattatagccgatgaatcagctacattattacaagggatttctttagctgatgtagaatcattaaaagagatggtagtagagctaggactggtagtggcgagttgacattgaagatgaacatctggtgtgacaaaggaacgatgagagagagtgtataacccatttttaaccctccccttgagcaagacagtccatgtggccttgtccttgacaaaacaacatgttgagtgaaattctaagaatacatggttatcttgggtaagttgtaagacactaacaagattctttatgatattaggaactttaatgacagaattcaatcttaaagggagatgagaagaggttaaagaggcattaccaacatgagaaataggaagttgcttttcattacctacagtaagcgcatcagtgcccagatatggtgattcaaattcaagtggttccatcccttgagccacatgattggtagcacctgtatccgcataccagtcgtaatcttcaatgaattcaggcatggtatgggatgagtaagcttgagggtaatcgtgatcctctatttcagtaagaaatgctttcgaatcaccagttcttggagtcacaaagttcttatcgaacctataatgacatatggtagcggtgtggcctggtttatgacatacttgacataacaatcgaggaattgaaggagggccagatctaggatttcttggtggtggtctggggttgaaggaacccctattctgagaaccataatatcgatttgggggtgcaggaccatttcttggattgttgatgctaagattagcagacatcttggtagaaagatcaagaactgtatgtgcctttcaattctgctttcatgtgttagtaacaaggattgaatggactcaaaagagaggttatcaacaagactagtaacatgtaccactacagggtcatattctggccctaaaccatttagtaaatgcatgattaaatcactttcctcaattggatgaccagctgtagagagagagtcagctaacaattttactttgtcataatagtcagatatggaaagattacccttttgaacagtcgaaagctgggatttgatctgaagaagacgagccttggactgactggaaaattgttgggccaaagcacgccaagcttcgaaggatgattcgtgatgagcaagagaaccaagaatcgtttcggacattgaggagcgtaaccaactgagcagtagctgatcttttcttttccag

SEQ ID NO: 40868 - DNA, 1528 bp, Cannabis sativa
aggagaagatgatggggatgttgtttatggcatagttgatgattcagaccaaagtggggaagatcgatggtgtattgtaggcaagtttctaaccgagagggctattgattttgacgcaatgagacatatgatggcatcgttgttccaacccgggcgtggtatgtatgttaaagaactcgagccaaatttgtatttgtttcaattttatgatgagattgatcttgaaagggttattgaaggaagtccttggacattaaaccaaactcgatttgtttttgaaaggcttcaaaggggacaagatccacgttctgttgttatttctaaattggatatgtgggttcaagtgcactgtttgcaacgcggtttcaaaactgagagaactcttcgtgagttagggaattatattggagcgtttgtgaagacagatccaaagaatttccaaggtatatggcgtgattatctgggagtctgtgttacactagacatcaacgttccattgaagaggagaaagaagctacgtcgtactgctgcagaggaaggattctgggctatcttcaagtatgaatatggtcctacattctattttacgtgcggaatattgggtcattcggataggttctgtcctcagttattcgtagtgcctgctgataaaatagtcaagccttatggggctggtatgcgtgcccagccacgacgacggaaccacttgatcggttcgaaatggctcataactggcgccgaggaagacgactccttcactggtggtgcgactggtccagattcattttcctcaatcaacgttcaaggtcaatcttcttctttaggaggagttatgaccaccaatcaaggaatatcaataggtaagttacctgttattatttcaaatcaattagaagtggggaatagtggaaagtcaaatattcaaggagttaatgttgttgttgatcctattcacgtggggactaatatggaaacaagtgaggcctctcctctacttgtaattgatactaaaagaagaaggacaaatgaggtgggttttaatgggcctgatggagtgggcttgaaaagtagtgacaatatagagattttagtttgtgatgatgatactgaagagggctcaaaaaatgggcttttagtgggtgctggttcccaggcccaccgctcattatgaatatactaagctgcaattgccatgggcttgggaacccacgggcttttcaattcatttcggatcttgttatccataagcggcccaatcttgtttttctttgtgaaacgttatgtcgtaaaaatttggttgaaaagcttagagtggctatcggttttgagggcatgatagctagtgatgctcgtggtcatagtggtggtgttgcgttgttgtggcggtttagtgatgaagttgttttgttgggttattctttgagttatattgatttaaagataaccacgacaagagaagctccttggaggcttatggggttttatggggagcctaatagtgttggaaattattttaccacgatctaga

SEQ ID NO: 40869 - DNA, 2071 bp, Cannabis sativa
tatacgcttccacgattgctttgtgaaagttgtagtattcctatttcccttcaaaacttcttcttccataagtcccacaaaaacctcttcatgtttttgaggccaaatagaagcttcactattatcgataataagcacctcactatctgctcctatcatctactcaatctacatgtaattacaagactaatcctaaaattcctcaaaaataaataaacacaataattaataaataaacacaatgatgtaattttaaggtctccaacagagcaagtatttttattttcaacatttgcaaaaaagctacaactccatagcttggtttagtattattaattactaataagtaataactaaaggtcaagttatgtattttatttaaattttattaattgtttaaagcttgaatagatcatggccacaaaattttcactagtgatgcattcccatcccactaaacactattactagctttttaaaaaagaaattagtacagcattaaacatatcatcattaaaaatatacttttaaaagggaaaaaacaaagcacaatgaaacaattaaaagggaaaaaacaaagcacaatgaaacaattaaaagggaaaaaacaaagcacaatgaaacatcaaactacagtgaagaacatagcattaaacatatcatcatttttttcttaagtgagtcgaatcaaaacctagacatgtcaatcaaataacaacttgtcacttaggaatacatgccttttattaatgaatgtcatgatggagaattagtcaattagtacaacattttatgagtatctgaagaatgcgaactttgttgttatctcttgacactatcatgctaattgctaaatttggaactatcctgcatgatcaatttcatgaataaaatatacagaattaaagaataatattacaaacataaatagaattgtcttctattctcttagttcagtaaattgttctatgaaatataatatgtgaaaatgtacaaagaggtttttctgaaagcacaggaaattaaactcccctaaaagcacagattctgtaataatctcatccccacttactgaaaagttctggacaagaaagaaccaaaaagtagatgatttaatagtacttattaatttaagcttgcattttaattggttagacgcctttaaaaagcatgatgtgattctatattcaacaatgtcaggtttcgatctagctagtttgcctatatatataagagaaatacactagttaaaactatgcaatctaaactaaattcataatatgataataagatatatcattttcaatattattattattattaaaatactcttacctaaggaagctaccttaagacaaacatcatgaaagaactattcataaggagattcagtttacatcataatcatcttattgttatcactcatggttagccaatgtataaaatacactaacaaatgaatcactacataccgagaacatgcctccattcatgagtccaaattttatcttatgtcagtgagatatatacatacataacatataaagtgttctaaaaaaactgatataatggacatttgttctaataaaatggaaatataattggtaacaatattttaatctgaaaaatatctatcagaaggaaatgaatcctgaaaagaagactacatcgaaatgagttggattgaatcggttctcttttggtcaaattatccaattggaagtttcatgaatgttttacttgagaggcaaccaaagtcagagaaatttctcaagaaaaaatcagattatgttaaagagccaattcaaagagatgccctcaaagggctatggaaaaaaaatgatagaattaaaaaaaccaccactaaatcgaattattaccacactatgatatttttctcttgaaactaaactcaccacataacactaagcaagaaacataatcaatatggctagatactacagaaaacaatttatatgggaaaatctagtcatcataaaaatcatacttggaaatgattctaaagactcataatgatcaactttacaaaaattcaaaacgcaaactcatg

SEQ ID NO: 40870 - DNA, 1556 bp, Cannabis sativa
  modified_base (1452)..(1452): a, c, t, g, unknown or other
accaacgctatgtcaacaatttctcctctaggaagattctcaaaggtaaaatatgtgatctctctatccttgattatgttgattttatccatcattttaaagttctaggttggacctcctttatcaacattaatacaccattatatcctagacatgtacaaggtttttgtgcttgcattaaatcttattttgcacctttaggggttaaagggacacttagaggagtaacttttgagcttaatgttgattccctcaatgcattgctaagagtacctaatggtggtatttcacttgaacctaaactttctcttaagaacgatagaaatttaaattttgatgagtgctctaagaatcattgtggtgatgatcccattatcatgagaccaaagagacatcaacttaccttagaggccaaaatacttcataaattaattgtagctaaccttgcccctatgagtggaaatcaagatgagataaattccatagaccaattactcatgcacttcatcatagcaaaaactaaaccaatcaacctataaacccgcaatggtcaagaccctccctttagtttctccttagctaccttttttctcgtttaggaatccctacctcacatgaaaagaaagttaaacccacctctagtgacattttaggatccaaaactttcaaggttgtgggttacacttttactaataatgtatgggttttgacagcaacaagaggacaacgaatgcaaattgacttagaaaatagtgatatgaagaccaagatgatgatattaacttgcccgcaagtgagagtgaagaagaagaagaagtgcatcctcaagcgcctcccatgcctcactttccccatttcaacattgaggagacttttgctcgccttcacacctctgttgccactcaattttaaaccttgagaaatgacatcaactctcaattcaccaacctcaacaatgacatcaacaccatgaggagtgacatggtccatgggattgcaaatgttcaagaatcaatggcacaatggagggcatacatggatcaatttggacattcaccaaactagttttcttgcattttttagcatctttactcatgtttctatcttttagtttctatgaaaaggcttagtgtcttttgactttatgtgtgaggtgttaattttttttttgtgttgttggatgttattttttttgttttttttatgttataagtttgactcttttagtttctaatgcataatatgtgttgctttattttttctgtctttattttgtgaattccttgacaccctttttgacgaatcaaaagggagagaaattctatatgattatttttatggcacaacctcaatttttttttttttgatatctaatcttctaaacttaagtgtaaaattaaggggcagtttacaaaatcatgtacggtaaaatttgttggaattattttaccnggatctagatttactaacaagtttaggaaaccttaaattgggtaaagcagaatataatgactccttccgttcagatctctacccttgattcctttctatagcag

SEQ ID NO: 40871 - DNA, 2826 bp, Cannabis sativa
  modified_base (1951)..(1956): a, c, t, g, unknown or other
atgcacaatggtcttggctttgtccctgtgaaatttcacaattttttgagatgtgtagggtgagattctaagagaacactaacgaatgtaagaaaaaggaaaaaatttgttaaaacttatgctgaaaataagaacattcttactcttacactcattagtgttctcctaaaatctcacactacatatctaaaaaaatcttgaaatttcacagggatgaagacaagagcgttgtgcatcacttttctattggaaacattgagagaaaaagtaattttcaagcaccaacaatcattttaattgaaatagtgaaaatcttaaatttctgatagtggtacccttttgtgaaatgtggctcggacccatctcgaaatatttttcccctctagtcacaatgatttcatactactaagacatgaatatgaagattattttcgcgtttaatttggttaaaatgaccccgtaattaaaaaattgaaaacattctacttttcagggttaattttaacaagtttttgctttctcttacactcgtttgtgttctcttaaaatcttaccctacacatctcaaaaaattatgaaatttgataggcaggaagccaagacaggtgtgcatcactttccaattggacactttgagagaaaaaaatagttttcaagcactaacaatcattttaactgaaatagtaaaaatccacatctctgatagtgttactcctttgttaaatgtggcccggacccatctcagaatattttttttccactaatcacaataaatttttactactaagatgtgaatacgaagattgctttcacgttaaatttggtaaaaatggccccataattaaaaaattaaaaacgttatacttttgagggtaaattttaacaagtttttccttactcttacactcgttagtgctctcttaaaatctcaccctacacatcttgaaaaattgtgaaatttcacaggatgaacccaagagcgttgtgcatcacttttctattggacacattgagagaaaaaaccatcaacaatctttttgattgaattagcaaaaatatcacatttttgatagtggtttccctttgtgaaatgtggccctgacccatcacgaaatatttttctcactagtcacaatgaattcgcactactaagacgtgaaaatgaagattgtttatgcaaaaaaattggttaaaatgatcccctatttaaaaaattaaaaatgttttactttttagggtaaattttaataagtttttccttactcttacacttattagtgttctcttaaaatctcaccctatacatctcgaaaaaagtgaaattttatagggacgaagccaagaccgttgtgtatcccttttctattggaaacaacaagagaaaaagtagtttaaaagcattaacaatcatttaatcaaaatagtgaaaatctcacacttctgatagtggtaccccctttatgaaatgtggcctgaaaccatctaggaatatttttcctcactagtcacaataatttcatactactaatacgtgaatatgaatatggttctcgttaaatttgtttaaaatgaccctacacatctcaaaaaatagtaaaatttcaaaaagatgaagccaagagcgttgtgcaccacttttctattagaaacattgagagagaaaaatagttttcaagcactaacaattatttttatcgaaatagtaaaaatctcacacttttgatagtggtacccctttgtgaaatgtggcccagacccatctcggaaaatttttccctactaaacacaatgatttcattgtactaaaacgtgaatatgaagaattttttctcgttaaattttgttgaaatgacccctaattaaaaaattaaaaaatgttctactttttagggtaaattttatcaaaattttccttagttttaaactcgttagtgttctcttaaaatctcannnnnnacatctcgaaaaatcatgaaatttgacagggatgaagccatgaccgttgtgcatcactttcgttgagagaaaaattatttttcaagcactaacaatcttttacctaaaatagtaaaaatctcacatctctgatagtgttacccctttgttaaatgtggcccggacccatctcagaatatttttttccatttgtcataatgatttgatactactaagacgtgaatatgaagattgttttcatgttaaatttggttaaaatgacctcctaattaaaaaattgaaaacgtactaattttaagggtaaattttaaagaatttttccttactcttacactcattagtgttatcttaaaatctcaccctaaacatctcgaaaaatcttgaaattttataggaatgaagcgaagagcgttgtgcatcacttttctattggaaacattgagagaaaaattagttttcaagcaataacaatcattttaatcaaaatagtgaaaatctcacatagtgaaatgtggctcggacccatctcaaaatttttccatttcatactactaacacatgaatatgaagattgttttcgcatttaatttggttaaaatgacccctaattaaaaaattgataacgttctactttttcagcgtaaaatttaacaagtttttttttactcttacacttattagtgtttatctcaaaaatctcacatttctaaacagtggtaaccctttgtgaaatgtagcccagtcccatctcataatatttttccttactcttacactcattagtgttctcttaaaatctcaccctactcatctcgaaaaaccgtgaaatttcataggaatgaagccaagagtgttgtgcatcacttttct

SEQ ID NO: 40872 - DNA, 1165 bp, Cannabis sativa
aacataaggtttagggtttattcgcttaagtacattgccacataaagtgcctaattcttaaaaataggatccaaagcacaagatattaacatataataataaaatgcgaataattaatgctagttacccaactaattcatatcctaagtatgcaatcattacaatgtgatcccccataactgtcttcatgatctcccatatcctatttcctaggaaaagtattaaatgctcgagatactaagagacaagaaaagatatgtctgcgctgccaggttatgtcacatctaggacgacacgtgggatcagacgcatgtcacccattcgaacgacctatagaccaaataaatccacatacgagtaactattctcatgggaacatgaggcgcaaatatcccaatttatgtagggtgatgtggcactcaatagggtgacacatggagtttattttaagacctggacaaaatatactcgcctaaggttccgtctagaataattcaggcttaaatcaacaaagtccatttcttcagcaggtagtatccgaacaggttctgtacctcataatgttccaagaagaatacatgtatccagtaaagcatcgctatccgcgcaaaaagacacaatatttagagatttcccaaaatattttctttaaatatcaccataattataactaatttagaatctctatatttatgggattatttttatatagtcgaaagattggtgggaattaatattgagtacccgattatttccctattattttgggtaacaaacccttgtatctttcatataaatagtgaagacatttcattctttagggatccaaatttaaacttttcagagtattattacgctgctgaaatacttgtaaactttctcgagaatattaagaaaatcatttggtcagaccttgtgatcttaattattctccaagtaatacaataaaaaggggaataagctattaccataatcacgaagtcaaacctctataaattttttgtgttcttattgcttattattattattttgttagtaattaatcattaaattttatcgccttaaaagactcagtgtcattagctaatatttgtatgttactacccactaaagaaaatatttgtaataaaatttatatggaggaaaaaaatttacaacaaaagaa

SEQ ID NO: 40873 - DNA, 1329 bp, Cannabis sativa
agttacctctgtgatgttgctgatgggagacatgccaggatatagaagctcattaaaaatgacatttcaggctatgaatattctcccatgcttgttttcacacaaatagcctttatgaattggagagtaccccagaaataaacattggtcagacctgaaatctaacttgtgagaattgtaaggtctcaaatgtggccaacaagcacaaccaaagggtttgaggatagagtagtcaggtttggtgttaaacaaacactcatatggacttaaattgtcaagaacaggtgtgggtaacctgttgatagtgaatgtagcacattggaaggcatgccaccaatatgagagatctaagttggcctgtgcaagcaaggtaagtcctgtttcagtaatgtgtcgatgctttcgttcagcacgaccattctgttggtgagtgtgaggacaaggatgggaaaataaaatgccttgatcagcgaggaatctagcaaaaggcttgtactcaccaccaccatcagcttgaacactcttaattggtaacccaaattgtttttccaccatacttttaaattgaatgaaactgtcaaaggcttgggatttcattgtgagaggataaatccatgtaaaacgactaaagtcgtctaaaaagtgaatgtaatatcgaaatccatctttggatggttcatgtgagggaccccataaatcggtgtggatgagttgtaagggctgagtggctctttttgaagatgaggggaaaggaagtctatggcttttgcctttttgacatgcattacaaaattgaaattgcttaagagtaccactgtgtgatagagaaggcaagagtttttgcaatgtagataatgcagggtgccctaatttgcaatgccaaagatttacatcagatggtgtggagacatgaaaaacagaatgctcagtagaaagagatgtacttttattagtggaatcaagattacagtaattgtgtgtaaaatcacactgttgaatacaagtacatttattctgggaactgaacataggtgattcgattgcagaagtggccaaatgacactgcagcacaaatttggaagaggtagaagaatcaccaagaagatagagtccatccctagctttccctttgagtaacacagcccctgttgtcttgtccttaacaaaacaccagtttttatgaaattcaacaaaaacatcattatcttgagtgagtttggaaacacttacaagatttttggtaatagaagggacagtcaagacagcattcatatgtaaaggacaagatttattgtaagatggaactgaaacagaaccagtatgggagat

SEQ ID NO: 40874 - DNA, 1936 bp, Cannabis sativa
ccgaaaatctcggtcaacagttattattactttttttaaaataaataaatttatatatatttatattacaattaacaaaaaataataactactttcaaaaataaataaattagccaaaatatttttttttttaaaatatcactcatcaattaattactcacatttttttttctttttcaaactataatcaatttatatatatatcgtatattcctctaattcttttcactaccatatatatatatataaatatatatatatatctatatcactatacgttattattattattattattattattattattattataaagtctttttttttaacaatttagatgccaaagtatttttttatttaaggtgagatttttttgtgttaataaattgattttctcacctttataattgtttttaatgcacttttctatcataagaaagaatcttatttcatctttccattttatatgtttggaaacttcttgtaagacaagaaattctcttatgaaaaattggctttctatggaaactttgatcatgattatttttccttaatgaattcgattgtgtcttgataagatcagattaagcacactgtttttagcaggtatcaagtccatatacatgatcggacactattttggcaagtttccttttttggtctggtttgttgctacagaacctgtctctgatgttgcaaaacaagattttcgtttaggaaagtttgtacaactatggaatcgactttgtagttgtctctaggatttctatgtactataaatagaacctagagagtagccaatcaattcaactcttctagctttcattttttacatattctcatttgtgaagagagagttctttttgtgagaacctagttgttaatctaggttttagtgttgataaatttattcttatactggtcttagggttggttagaacatcttgattgaacaagagaaaggtcttcgggagaagacttgttcaagccttacttcaagaggaagtaagcactcacacttcaaagacgaagggagttcgttgtttgaaggtggttctgaaatcagattcatgaagtgcattacaaaagattgcagcaaagatttagagggagtctaaacttgtttaagtcaattgtctttgtaattgttgatactttattaattgatttctttctctgggcgtgcctcgtggactaggagtgttcaaaagaacactgataccacgtacaaatctcttgtgtcaagtgattttattttctgcaattatttttatttctgttggttctggtttgtttttgcaaaactgttttctgcagtaacagaattacattctgctattgcagactattacagttaaatatttattagttttctataataattattgacatttgcaaaaacttaattttttaattattattattatttttatcaccttttttttaaataaataaatttatatatatttatatcacaattaacaaaaaagaaataataactattaaaaataaataaataaccaattttttttttcaaatatcactcatcaattaattactcacattttttttctttttcaaactataatcaatatatatatatatatcatatattcctctaatttttttcaccgccatatatatatataatcttcatacctctcactattttgcttattggtatatatacctcttattatcattttttttttaattttatgtgtatagaaaaatagttttccacttctatattatttttttaaagttactttcgttagtattgattttgtattttgtttatacatattataaaagagaagtatgaggtaatgacatggctctctaaaatcactcaaaataactctatctattttctccttaaatatctcatttaaattaataaaataacactttaaaatcacttaaaatagtt

SEQ ID NO: 40875 - DNA, 1861 bp, Cannabis sativa
tttctccaaatatttttccatctttaaacccttcgcctggtactcacctagaacttcattcacaatcaattgcgagtcactatagcatataagaattttgacttttaatactttagctattcttaaaccagcttacagagctttgtactcggctttgttgaatgaagtgttaaatcggaatcttaatgcgtagtgaaatttaaagttgtctggtgagatcattatcactcctgcactcgagccattttcatttgatgctccatccacagataatttccaagttttagtatcgtgcatgacatgtggatcttcttcggagactatccctttaattaggaaatcggccaaagcttgaccaatgattgatgttctcgggtggtaggttatatcaaattgtcctagctcgattcaccattttatcaatcttcctgaagcatcaagctttgataaaacttatcttaatggttcatccgttaagacttttatgggatgtgcttggaaataaggtcgtagtttgcgagatgcatgaatcaagcatagggaaagtttttcaagagagagatatctcgatttcgcccctagtaaccttttactaacatagtaaatgggttgtttttgctttccctcttctcgcaccaaggctgcactaattgcactttctgagacatctaagtaaaggtataaagtttctccagttattggtttggccaaaactggaggtgttgaaaaatgtttctctatgtctttaaaagcttcctcgcattcttctgcccattcgaagttcttattacctcgtaaaacattaaagaatggtagacatttataagttgattttgaaataaatctgtttaatgctgccattcttcctgttaaggcttggactttttttggcttcgtgggtgacgacttctctattaaggccttaattttctctagattttcctcaatgcccctcgcattaactatgaaatctagaaattttactgaggagactctaaaagaacacttcttcaggttgagcttcatattgtactttctaagtatttcaaagcattatgcgaggtcttttgtatgatctttcacattttaccgactttaccaacatttcatcgacatagacttccatatttcttccaatttgcttttcgaacagtccattcactagttgttgatatgttgccccagaattcttcaatctaaagggcatgactttataacaataaagtcccatgttggtcacaaaacttgtatgttcttgatcagggacatgcattttgatctagttatatccagaatatgtgtccgtgaatgtcatcagctcgtgccctgcacttgcacaactggtcgatcttggtagtgggaaacaatcttttggacataccttgtttaagtctaaaaaatcaatacaagttctccaagtgtcatttggcttcgggataagaataggatttgaaatccacgaggggtagaaggccttgcgtatgaaatcattggttaataacctgtccacttcttccttaagtgccccttgtctctcaaagtctaagggtcgtctttttggtctttttgttgggtaatttggatcgatatttaaatgatggaaaatcactttagggttaatccctatcatatctgaatggctccaggaaaattgatcctagtttgccttcaaaaaatttgttaactgctcttttagtttttcatccagatttttcccaataaacacacatttagtgggattgtctgcacctaaaataagttcttccagttcttcaattggttttaactggtttttctcgtctaggactctagggtctagatcctcttcttttctcttgcctattgggttttgtgccctaaa

SEQ ID NO: 40876 - DNA, 1644 bp, Cannabis sativa
tgttaaaatttaccctgaaaaaaagaatatttttaatttttgaaatagggggccattttaaacacatttaatgcgaaataaatctcaatattcacgtctttgtactatgaattcattgtcactagttcaaaataaaattccgagatcgatccgggccaggggtaccactatcggaaatttgcacttttttactatttcaataaaaataattgttagtgcatgaaaattacgttttctgtcaaatagaaaagtaatgcacaacaatatttgatttttccctgtgaaatttcacgaaattaggagaagtgtagggcgacattttaacagaacactaacgaagtgtaagagtaagaaaaaacttgttaaaatttgccctgaaaagaataatattttcaatttttgaataagggggcctttttaaacaatttaatgcgaaacaaatctttatattcacttcttagtagtactaatttattgtgactagtgccaaaaaaattccaagattggtccgggccacatttcacaaaggggtatccctatcgaaaatgtgagatttttattatttcgattaaaatgattgttagtgcatgaaaactactttctctctcaacgtgttaaacagaaaagtgatgcacaacagtctttgttttgtccatacaaaattgcactattttttcgagatgtgtagggtgagattttaacagaacaccaacgagtgtaagggtaatgaaaaaacttattaaaatttaccgagaaaagaagaatatttttatattttgaattaggtgaccaatttaacaaaatttaatgcaaaacaaatcttcatattcacgtcttagtagtacaaattcattgtgactagttccaaaaaaaaatctaagatgggtcgacgccacattttacaaagggataccgccatcggaaatgagagatttttactattttgatgaaaataattgttagtgcatgaaaactacgttttctctcaccgtgtccattggaaaagtgatgcacaacagtcttcccttcgtccctctgaaaattctcgatatttgaagctgtgtagggtgagattttaacagaacactaacgagtgagagtataaggaaagaacttgctaaaatttaccctaaaaagaataatattttcaatttttaaattaaggggccattttaaaaaaatttaatgccaaaccaatcttcatattcacctcttagtagtacgaattctttgagattaggggccacatttacaaaatgtgagattttcactaattcaattaaaaggactttaagtgcatgaaaactaaattttctcccaacgtgtcctatgaaaatgtcatgcacaacagtgttcgcttcgttcctatgaaatttcacgattttttgagatgtgaagggtgagattttagcagaacactaacgagtgtaagagtaatgaaaaaacttgttaaaatttaccctaaaaagaagaatattttcaattttttaattagcaagccattttgaccaaatttattgcaaaaccaatcttcatattcacctcttcatagtacgaattcattatgactagtgccaaaagaaatttcgaaataggtccgggccacatttcacaaaggggtacctgtaatgaccgctttagtaa

SEQ ID NO: 40877 - DNA, 2001 bp, Cannabis sativa
atacaaactggaagtaacctttgcattatgacatgacaatcatgggatttcaatccaacaatattgtcattagttactttttttttcaagttcgaacaaaatctacctggcaatttaacttccttcaaaaatttacaaaacacttgcttatcattagtagtcaacacataaggggcatgggttttagcaatcttttgtgagcatctttgaaatccataaggattgataaattctcatatttttcaaatctaattgtctagcattagtggtgtccttaaacttgtcattatccaagagagtgccaagaatactatcacaaatattcttctcaacatgcataacatcgatgttgtgtttcaactcatttgtactccaatactcaagttcataaaaaatacattttttcctccagttagtatcagtctcacctcttttttttttccccggagctcgttctgatagaccattcacttgttctaatatttcagaacaagtaaatcatgttggcggaagtctcttctcaacatttccatcaaattcacaatcctttctcatacgatgattggatggcaaaaaatgtctatgaccaacataagatgtcttaccaatcactcgaatggaactagtatcctcgttgcatgtaggacaggcattatatccctgtccactccatcctgacaagctattatgggcaagaaaatcattaattgtccaaagaagagctgcgcgcatgttgaacattgagttgcttgtagcatctcttgtttaaacaccatgagtccacaatatgttcagctcacccaccaatggccttaaacatacatccatgtccgtaccaggtgacttcggtccaagaataaggagagtcaacatgaaattgttatcttttatacacatctaaggtggcaaattgtaattcaccaacactacagaccacatactatatacgaaaggctcatgttgccgaaaggattaaatccatcagtagctaagcctaagcgaacattccgaggatctcttgtaaagtcaggatgtatgctatcaaagtctttccacacggcagaatcaacaggatgacgcataacaccattttctctcacacgaccagtacgatgccatactatctctttggttgtatgtcttgaactatataatcttttcaatcgaggagtcaacaaaaagtaactcatcactttatgcgctactctttttccgcttgtgttctcattaatccatctactggtcccgcacaccggacaaaaatctttcgaggcatgctcattgtaaaataagcaacaattgttcttgcatacgtggattgattcgtaccctaatcctaattttcttaatttcttcttcgtcacatagtgtgttgcatgaattttattctccttcggaaatgaaaacttcagcaactttaacaattcattaaagatataatttagtattttttctaaattttttaagtgcatcaactttgctataaagtttaggaaggatatccaatcacaaccaggatacaactctgcctcaatctcctcaaacatgtcatcataatattgacccctcagcatgtcatcatcaacagctctttcgtcatatttataggagggaagaaatcttccattacatcaaccatctcatctccattgacattgatgttagcctcgacaggttcattcggctccccatggtaaatccacctctcataactgctttcaaaaccctttgtaaagatgtggacctccaaagtattcaaaggatgcaatttggtattcttgcatttaacacaaagacaaaaaattcttctctcacaatctttgtgtttagacgcgagtgcaataaagacttggagaccttcctaataacttaaatccttacgatttctcatggtcacccaagtcttattgattgtcatctaccaataaaaaatttacgttgaatgaattataatcaaacttttttgtctgacaaaaattttatgaatttatataaaagttg

SEQ ID NO: 40878 - DNA, 1492 bp, Cannabis sativa
gtaatatccattttcctctatttgtggtgtgccttggttttatgtgctgaaaatgccaattttaagtgttatttttgtctaaatgctagccttggagtaattttttcaacagttgtgtgcttgtgttatcccaccatactttgagtgtctagaatagctaacaccttgagagagtttaagcatctagaattggttagtgtaattcttgaggcgaaatcctagctagctttacaacttgaaaatgatttaggccatttgtggacgattgagcctttcaagctaacctgaaaaattttaattttcaatagtcgcccctaattgagccaaaagcctagtttttcttaacacccatcaaagttaatagacccacacatacacataaatttcattcttcacaacccgaacctaatcgctgaaatttatcaaggacaaaccaaacattagttgggataggaaagagaggataaatctttgcaaaatatggaaaaacaagctcacattagagatgatgatggggtgtgagtgcggggtggtgagagttttgattcacataacactagaatccttctcttgctatatatatagagatgtaaagaaaacacaaaaaaaaaaaaagatataaaaaatatatatatgtacaatcttagtattaaataaaataagagaggaaaaaaaaagagcaagtttaaggctaagtttggggtgtaccacccctaatcaaagaaaaaaaatattgttgcattttttctctttatctagttgattcaaatatatatattatatacatatagcaagagaggtggaattagattgagtgataattgtgggttgagaatgaaattttgggtgagcatttgagagaaaaagaaaagttcttgataaattgaggtaattaggtcatgagcctaagaaatgtcatcttttaccaaacctgaacctaagcctcacattacaagcctattaaagtccttttgatctaggatgtaaagctaagctacattagtggagagggttgcactaattcaacttatggaagcaaactttttaaatttgaggatcgagtgtagttgttatagaaattcaaggtgttggtcggaagtatttgtacaatttatttgattgaactattcttgataagtattaaggacataaatatcatgtaaaactcgattgaaacacacaccttcaaggcatattcactaccatcattacatttccattccacctaactatgagagcaatttcttcaataaacaaagtttgaatgagaaatattctttgttgcaaatgtgttattgttgctgtcattttttttttcttttgttgttcttgttgttttgttctcttttttattatttttcattactcgaggacgagcaatactctaagtttggggtgtgataactctatggtatagggttattttttatgctttaaagttgaaaatattgttaggagagtagtaaagatgtgtttggttgcttaattttaa

SEQ ID NO: 40879 - DNA, 2023 bp, Cannabis sativa
acatcccagagttgagtagttctcagttatagtagtccacctaggaggggtccctagccttgtgcctaggttgatttcgggaattttggaatgtgtgtttggattctaccaacttattttcaactcactatctttcagtattttgtaccatgaaaatatgaagcatccaagtccaagactcaagagttaaaaatacatgaaacaacaacacaaaaatcaacttggacaccttgggtttcactgagcgcctaggttgacaatccaactagggtttcagtttctaggactgtcttagtgcaaataggtcaaattttgtattgggacatgaattagacatgtcgcagacatatttgaggcatcagaattagattctgagcacttttgtttttgatcacctggagcactaggtgccttaggcacccaacgctcaggttgacattctatcaacctggggcacttctaagcatcaactgaagaactatcttgtgcattttctttgtctttatcaaaaatgatgaaacaagtacttttatggaagaaacagactgacttgggagccaaaaagagagcctagcacccaggttgacacttgatgctaacctagtgcccaggttgacattttgtcaacatgggccaattctaaggagttttcttagacaagtcttctgggtatattctttgttttcatcaaagattaagatacaagtgtactcggtaatcaaatacaaccgtctggcagcctaaaattggatctagtgcccatattgacacctggtgctaggcccagcgcctaggttgacattttgtcaacctgggctgtttccaatcatgttttcaaaaaagtgttccgagcatttttttgtcataataaataagaaagataaaaccaaactcggggagaattccaagggcatgaaaattgaacctagtgcccaggttgacctggtgttaggcctatccccccaagttgacaattaacctggtgcgctagttttaatcactcaaatgcaaattctactccaagaattctctccgaaatggtcaaaaatgaggtaggataccctgtcctcaatttcaagaaccttggaagtatcaaaagggattcccaaaagcttgagaaagagcacccaacgccgaggtttacatgtgacctggtgtgctgggttatgtttatccaattctgagtgcatctcgagcgtttttctagtttttcatagtaactaaaagttatgaagtcaaacaagtcaaattcacaacttcatattttcctttttaggcaaagtgacttactcacaaatcgggaattttgagtcttcgaattctacaaaacatctttgaaaactggtgaacaactagaacataaaaaatagctaagtgatgttaaaatatcacttgggcatcaaaaaaaatatatctctagcatgtttcccactcacccagcatctaggttgatgtcatatgtcaacctgggtactggatgtcaacctcggcgcttgtcccagaacaatctttattaaaattaccatagctcactcaatattgatctgattgatgccattcaacttgagtttcaaatctatttcacttgttttctgtcaactgtttgttttcatttttttatcttaaagttgacaatatatcgacattccatcaatatattgtcaacaaatattgtcgacatactatgacaaagtgtcgataaattgtcaaataaattaagttatcatgtcgataatggtcatcactgatcttcctttgcataatatcgacatagcatcgatattctatcgacaaactgtcgataacatctagaaaacctagatttgacagaaaactagatctaccatttcagaccaaaaaacaccagttccaaacaaatacgacagatataacgaaagcaaactacatactattactaatgtctaacaaaatgcttaaaacgcgacttacccattataatgctgaaagattcttgagtgattgggggtgtggtccggttttccaccaccgagagagagagaga

SEQ ID NO: 40880 - DNA, 3123 bp, Cannabis sativa
attatttaagaataatattatatttaactagataatatagttttatcaaataaaactaaatagttaaatactatttaattatacaatttataattattgtaattactaaaaataataatttctattaattaatatttttccttaagaatttatttttcatagaaattaattctcactcaaatttactcatcaagtaaaaccttctcttgtacagtgttgtatagaggtgacttgggaaccatgaacttaaattttaaaactctaataaacacttcattattgtcgatctcattaatagaataatttggttcttatgtaccattaatttattgtgagaagttaatctataacttattatgaatttggatccaactgttagcactcccaaaattaacactataaaggaactaattatcaatccattaggaaagcttggattccattattgtataatatgttttcagccactcatgttattaagctctcaaaatagaagttgtaagaattatcttctctgagaaactttaacgagtgaattgaagaactcaatgaacacaaatggaattcatgtatactcaagattcagactaatctgctaatgatcatcgttgtaatatgaataactctttcatggtaaatgacacgttaatgaaagatattattatgtatcggtttagtcatgcataatcaaattatacacaacatttttattacatgtctatccacatgtgatccgaatcaaaatcacacatatacatagtatttctatattaaagattcctttttactttaatgtactaccaaatagtttcattcatattgtatattttaattctcttgtagatccttacaagattataccttctccatatgaataatttttttttttatatttattaattatccttctataattaattaatttatttatcttataattatatttcatatattttaaaatattatgttagggtttatgctctaaaaaacctataaatttgattattaaataaatagttgaatatttgatatatgtatgaatgttaaattattattaaattatttatattaaatatctaaaaaattctttattcatatatgacattgtggcttgtagttgtacagaatactaaggccacttagctatgaataaaataataaggaacatattaaagttatggaatctttaatcaatggttactagtgcggttcaatgatgctcgttctttggtgtaagtaatctctgttcggattacagatgtagtatgacatcaaagcgaaggtgttgtatattatatagattatatatgacaataatcgagatgaataaagctatctttattaacatgtcgtttatcataaagacgtaattacaatcataacaatgatcaatagtagattggcctgaattctaagttatcatgaaattctattcatgtcattagtttctttgattcacttgttaaagtttcccagagaagatgattcttacaacttctgttttgcgaatctaataatgtggatggctgggaatataatttataattatggaatcctgacattcctaacggatcgaatgctagtttgctttaagtattaattctagatctggaatgttgtgaacaaaatttagatgggatcaaaattatactttcactagtgaattaatggtagtaaaagataaagaagtaattagaaggttacaacggtaatttgaataaaactaattacgaaccaacacatggagggctaatcaatgaaattgattatatcaatagacattgcagtaaaactaagtaaatataattctataattactaagagttcaattctatatttttaatggagtaatcatggaattaataaacaatgattatttggttgatgaaactcaataaataatttagtttactatatcttagaattataggtccatggtttctaaattgccaccttaaaatactaacaagggtagggataaagagtagtgcaatgatgtttagaaaaaattattttgaataggtataatagtaattatttatttttgtaatgaataaatatttttttcaaattaattaataggaaaaaaatccaaaaattttaagacaaaatttatcaagataagatttgttaagattaagttattgggataagagatagcatccttctcttgaaagacaagagtaggcacctagcatgtcttgtccctatggagtttgtttttttaggttaattaatttaattagataaatatttaatttaaaaagtggttacaaatatttcaaggttgttgagatattctctcaagtagttgagagatttcctcataaatattagtaactgaattcggttatagatatttatttatttaaataattaaatatgatttaattaaagggatttaactactataaatggaaagtctgatttcacaaatcaaaacatcactttacactataatttttaaaattaagtgagaaaaagaaaataattttctctctcaacatacaggaagttttgaaagataccctaatagtcttcacgaggtacattaataatgagataatacaaaacccttacgttgcatacttgatttagtaccataaaaccaacaattagtatcaagagcagttccatgaatgtgtatacattaaattatatgtgagttttatgcaattatatatatgtgatatgtatttaaatggatgataattttattgtgaatgtatgagaggtgatgaataatgaattatatggtataattaggtgtagtttttgttgttattattttaaaaaaataatgtatgtaaatttaggggcatagaaattttatgtaatttattttatgaaattattttacgtaaaaattatacccatgtaatgttcattgcatgtgagctcggtttctaaacatgaaacccaaccatgaatatcgaacatcacatgcatgtgagcttgggttcatggaagaatctcagccatggaccatgaaggacaaaaatacatgcatgtgagctcgggttcatggtggaacccgagccatgccaaaccacccaagtggtctcaggttttctgcccttcctcatcctatgtgatgtatacatgcatggcttagccatggac

SEQ ID NO: 40881 - DNA, 1274 bp, Cannabis sativa
aaggaatgtttaaaagccagtaaaatcaaccctaactaaaatttctgctaaaccaactaaaagggcaaaacttttaacataagctaagagtttgaaattcaagacaaattgaaaaacacaatccttcaaattctgcattaaaaatccttaacaaaagcagtttttaacacttctcaaatgagtaaatcaatcacctaattttcataagacctgtaaaaactgtaaaatgtaatctctaatcaaacaaaagaaatgagaatagagaatagagaatctgtataaacaaaacataaagaaaagaagtagaaaatattatgaaaaagaaatctattccataaatatttccagtatgtacaaactataactttaatactacaaaactacttcaatgaataattatgggtgggattttacactacatcatcatctataggagaatcacaaaagcaaaaaactgtattgaaaaaaaataaacacacaaaaatctgtaatggaaataaattaagcactaaactcaaccaaaatactcaccaagaatccctaatcttttatcattttcttatgcagttatgaattagaaaaaaccaattttgagtatcataatttcttacaaaaagaaaaaagttttatctttgtcttttctctgtaataacacgaagaagaagaaaaaaaaatcaaaactcaatttaggcaaaggtaacaacaagagagagagagagagagaggcgtatacattataacaaacctcaaaatctgaaaatttaagcagagtgatccttctgctgctgtgagccttgcctcaaaaacgaatcccctactgagaccatcaccacttccgggcacaccatctatcgatctccaatccagatgatagatcgattgactgagagggaaagaaagggtggaggagaaagggacctggtgagagatagagaaggcggagggtggaggtctttgaatcgccagcggtcttcgaatcaccagaggttttcaaaatttctagggttcacggatgatttgctcatggtctatgaaattttgggtaatatgaacaataagagagtttgtgtcattttgtcacactcgcaacatgtttaccgtcagtttgaaaacgacagagaaaatattcgcgaggcttttaaaacaaagctaatagtatataattttttttcaactttttccttttgccgtcgggtatctaattagcgaaggatagacaactgacgcaaaaaacctattattcatgtcatttttaaaacgacatttacattcat

SEQ ID NO: 40882 - DNA, 1711 bp, Cannabis sativa
  modified_base (27)..(28): a, c, t, g, unknown or other
tatttatttttgttacaatataataanntgcaatactaaaaaaattatgtaacttaattttattattatatatattttttaaaaagaatatgtgataaatatattttataatttttattaactaatttattagatttggcaattttcttaattttttaaaaaagtggacatttactaacttagtttccaaatttagagccattttgcatctcaacccttattggattcaacataatcctatcgagtccaatccaatccaatccaatccaatcatttctaatccaatccaatacaatcctgcgtaccaaacggacccctaggattttagtgttttcaacatacacatacataaacttgtaaatcaaatatctaccatattctacctataggctctttattggactagaattaaattgaatgggcttaaaaatgataatggacctcaaaccataccctcggccgaaatacactaatgggcccaatgggtttaacttttgccattttatttcattaaataaagcaatcttatcttctttctgaaaataccatttatctaatctttttattcaaatattaactttatttatttaataattatcaaaaaaaatatattatttaaatatctttattaattaaaccaacaaagtgtcttaaataacaaacaaatctttttgtctattttcttcccaaaattgcccaaacttagtaaaaattctcaaataagacatattcatatttcataattttaattgacttattaaatcaattaattgaatctacaaggcagtattatttcagataatacagggaccatgtgtttatgtaatcaagctccaaataaatagacctaaaatttaccaagtaattttgtagcttgttaattccttatcactctactatagattactctcaaaacactctatatatcaaatatagatacactatgaattaaccattatttcactctaaataattaatgatcatagacagtttacgtcgagtagggacaaatttactgttttacccttcgatgtattttatccttaaaatacttagtttcttataaatgatattgcagtttactattataattactaaaataagagctcttccatttatattgtttagccaagctctaaggaaactatcatttcacttctaaatagttatagaagctatagatttcatatttatgattaacgctcccactcaattgcactaccaaattcccaacatgtaagtataggctagtcgtacgagtacgctgataatgaacaaatctaagaactcgtatagtacaatgagactaaatagtttgaagcacataatcatgattatttttcactatggagacaacactataatcatgaataactagatgttcaggatttgatagaatatatatattaaacttataatcataaaggtaatcatgccaaccaagcaacataaaatcacttgtgatttttattagtcagtaaataagattaatattgaaatgagttttatttagggtatacaacccgaacatggtgttggtgcaagctgttcgaattttgaatgtattgcaatccatttttggtggtttcatggaggattgtaaaaaccttttattttcttttagtaatgtttctttattttttgtcaaacaatctgctaatcggattgcttactttgtaactaaagcgtttcgtttatatgctagtcgtat

SEQ ID NO: 40883 - DNA, 3072 bp, Cannabis sativa
  modified_base (1774)..(1778): a, c, t, g, unknown or other
tcctaatataaataaacacgatgaataaatttatatgaaaagtacttaaaatacacacatgaaaaaaaaaataaaaccaaaaaataaacaaaacaataacatcgataagaagatggtttattaaaaatacatagatgtaatattttaaatataaaacataaaaaaataattaacgattgaaaataataaacagatttaaattaataataaagagcaaaaaaaatacattaaaaaaaataaacaaaaacaacccattaagtttaacaaaaacatatataaatttttttttaaaaaaaaacactaaaaacaaataaataatattaaaaaacattacaatacgatacacaacaaacataataagaaacactacaaaaaaataaaagaaaaaaaaaacaacagtcctaatataaataaacacatgaaaataaacacgatgaataaatttatatgaaaagtacaatctttccttgatctttgcactgttttttctaatatcatctttatttcccagttagatatttcagcttggccattactttgtggatggtaaggtagagcaattctatggcggacgccatatctcgagaggagtgcttcaaactgtttgttgcagaagtgactcccttcattgcttatgatttctcggggagtaccaaactgagtgaatatattcttttgaagaaagagaagaactgttttaccgtcattagctggtgttgctgcatcttcaacccatttagaaacatagtccaccgccaataagatgtacaaattgttaaaagatgaaggaaaaggacccatgaaatctatcccccacacatcaaacaattccacttccaagattcctgttaaaggcatttcgtttctccttgagatacttcctgttcgctgacaacgatcacatgcctttacaaaactattagcatccttgaaaagtgtaggccaaaagaatccgctctgcaacactttagcagcagttcttgtaccactgaaatgtcccccacatggtaaagcatggcagtgattgagaatagagtacatctcctcttcaagcacacatcttctaattatttgatcaacacagtgcttgtagagaattgactcttcccaatagtaatgttttacctcagaaaagaatttctttaattgttgacgagatagctcaagaggagttatattggcagccaagaagttgacatagtcagcataccaaggtaccataaggttttccctcacactaaagagttgttcatcaggaaattgctcatttatctgcacctctttggtattctggctctcttctaactctagtcttgacagatgatctgccaccagattttcagttcccttcttatcctttatctctatgtcaaactcctggagtagaagcacccaacgaatcaatcttggctttgcatcattcttggtcataatgtatttaattgttaaatgatggtccgtgtagactatcaccttcttctttccaattagatatgggcggaacttatcataagcaaacacaattgccagcatctctttctctatcgtggcataatttagttgagcatcattcagagttctactagaatagtagattgcatgaaacaccctgtcaaccctttgacccaagaccgctccaattgcgtaatcactcgcatcacacatcaactcgaaaggcagctccccatttggtgaagtattggtgctgaaatcaatttctccttcaaaacttggaatgccttcaaacattcttctccaaactcaaaaggaacgnnnnnaacaagtaaattggacaatggtttggagatctttgagaagtctttaataaatcttcggtagaaaccagcatgacccaagaaactccttactcctttcacagaaactggaggaggcaaattctctattgttgacaccttagctttgtccacctcaatatttgcttttgagatcttgtgtcccaaaactattccttctgttaccataaagtgacacttctcccaatttaggaccaagtttgactttttgcatctgattgacaccttttccaaattctcaaggcaatgatcgaatgaggaaccaaagactgagaaatcatccataaagatctcgatgcatgattctattaagtccgaaaagatagccatcatacacctttggaaggtagcaggagcgttacatagtccaaatggcactctcctaaaagcaaaagtaccatagggacatgtgaaagtagtcttttcttgatcttcaggtgctatggctatttgatgatacccaaagtagccatctaagaaacagtaatattcttgcccctccaaccggcctaacatctaatcaatgaagggcaagggaaagtggtcttttcggtttgctttgttgagttttctgtaatcaatacaaatcctccacccagtaactgttcttgtagggattaactcattcttttcattctttaccacaatcatccctcctttcttaggcaccacttgcactgggctgacccacttgctatctgaaataggatatgctacaccagcatctagccactttaccacctcttttctgacaacttctttcattggtggattgagccttcgttgtgcatcaattttcggtttggcgccctcctccattagaattcgatgcataactgtagagggattgattcccttaacatcacccaatgtccatgcaatggccttgttatgtgttcggagcactctgagcaacttatcagtctccacatccgaaagtgaagctgacactatcacgggaagctgcttatcttttcccaagaattcatatcggcgatgactaggaagcaccttcagttctaactcctggaggtttctcaggggatggtgcaagctcttttggtacaacccccagctcttcataatactttctgtttaatggcccataagattcaagccatttggaatactccattacctccttcccttcttgctcagtaaagtcatcttcaattaaactcaattatagaggatcatctatcaaatttttctcattcacaatggtatcaattacatcaacaaagaaacagttatcact

SEQ ID NO: 40884 - DNA, 877 bp, Cannabis sativa
tgggatcaattctttacgagtgcgctcctccccgagagctcgtgcaattgttgatagcctacgaatagagtttaaccgtagctggatatcgtcatttttcagctcatctataagaacagctattgggtaaagcggttcatcaaccatagccattgcaatgcaaagtttatctcacagctctagaaggaccaaaaggaaatcagaagagtcgtaagtaacgtactgtcagcgtaaataccaaaaaacaataattacattaaaattggattatataagatactagaatggttagaaggattaacagaaataaattgtggtctctccggcttaagggcataaatacaaccgtaactgagaaaaagcaccagatcgaaactctaatatctaaagagcctaaaattaaaatgcaagaacgaagaaaatttttggaaataaaattaatatagacaggagaaaataaatcgtgcatctgacatcagtaaccctaagtttctgcgtggtaagagaaaaatgtaaaataaacacctgcccagtttaatttggataatctaagtcattaataagctaaggtgaattgaattcccctccaaaatcgaagaaagaaatgcaaaatcggagaatacagaaactaaacgcaaacattcattaaaaaaaatatattaaaattataagaaaaatttatgtctaagaaattaacttaaatacaaatctaattccattataaatgtaacaattaaatcaaattaaaagaaataaatttttcaaaaagaatgaggagaaaaaaagacatgttcttcatatatcttcaacccaactcagattaccagacaaaaaataaaactcaaattaaaataaactgtcaaacaaaactaagcat

SEQ ID NO: 40885 - DNA, 1564 bp, Cannabis sativa
ttattaataatagaagttataaaactaaattaagtttgaaaaaaattgaaaaactaagaaaataaaaatgatgaaggagaactcatatagacctccacatcatcatgtctgtgctttcctttataacagacattgtggtaaaaaaaaaattagctctttttttttatttcaactaataaattaaataattttaatacaatctctggtttgatacaaataatttattttaatgatagaaaaaccacaaacttcaataatcatcaatttagtagaaaactaaacaaattgatacaaagtcaaatatgatttaaactaaatactttctaaaaatatgaaacactctgaaaataagcatcataattgcattaaccatttttgattaccaaataatgaaaaaaaaaattataaaaataaaatacaagacaaacaaataagcaaataatgaaaattgcacggtaaaataaataagaacaacaaataaatctcttactcatgtcactttttgaaagtttgagcagcataatattaaataacgcattcaacatatagatactaaattgtgaaaacaactctgacaggcaaacaccaaaagcaatatttctacaattttatttgtgttcctctccataaagctctagtgccatgaactctagacattcttgtgtttcacaaattgatagattccaaaagaaaaagaaaaaagaaataataatttataatttttagtaatgagtatcacaaatctatacatacatatctatatatagatattctttgtaattatttttatgtttgatttaataataataattcttttcacattcttataacatatctatatacatattaaagagtaattagtattgcaataaaattgaaacataagtaaatattaatgtgtataggaataaaataataaatgattaaataaaaaactaggaaaaatgagaaagaatgagcaagcaaataaattgaaagaaatgccatataagatgtcatgtcacctctttaaagttttcctttatatatattgataatttgatatagatattgatagtaatatagtaataataatagtgtaagttataataatagactacataatagtgtaagttatagaaatgaaaagacacattaattatttgataatatataaaaaattataaataaattaaaaaaattaaaaaattgagaaaacaaagaagaggatgaaaaactcatacaaattgccacctcaactccttaatgctttcctttatatatatactaggcaacgataccgcgccttgcgcagttatttaaaaactttttatttatgttgtaaaaataaaattatattaaatatattaaaaaaattattagtcaattaatatgttaatgtactataaaaaaatactaaaaattataatcttaatatgttgaaatattatgtcactttatttaattgaattatatagctttcttatttaattttattttcataggacctcacatttaaactaaatattaagtactactatacttattattgtgtaacagttaattatgattacaaatcaaaggt

SEQ ID NO: 40886 - DNA, 2864 bp, Cannabis sativa
agctggtctgaatggttcaagaactaattctggtgacggcaacaatggaggtgccactggtcaacctgccagtcgtcaaccgactctcaatcgaggaagaactagagatcatgatgagttctctcctgtctatttcactcacaatctttcaattcgtttaaatgatcacaacttcctgttgtggaaacaacaggtcttagctgcgattcgtggcaacaggttacaacagtatatcaaagcagatccccctgcaaagtttctttctgatgcagatcgagaatctggtgtgcttaaccctgcctttttggactgggaagtccaagatcagctcctcatgtcctggcttctgtcttcaatgtctgaaaatctcctcacgcgtatggttggatgtgagacatcgaatcagatctggtcaacattggagaagttctttactcttcaagtttctgcaaaaatacttgagtttcgaaccaagcttcagaacttgaagaaaggctcactctctctatctgattacttactcaaagtcaaacatcacgttgatcttcttgcctcagttggagaagtttacacagcaaaagatcatgtcgctgctatctttaagggccttccaagtgaatatgacacctttgtcatatccactaatactagattagaaacatactctgttgcagagattgagtctcttcttctagcctcagaatccagaatcgagaagaccgatcgagagattgagatcagtgctcaagttgcctcacttgacattgataatccagaagctaatgttgccaacttcagaaataactttggtaatttcagacagcaatctccatccccgaggtacaattatccatctcagttctctccttctaatcgaggtggctacagaggtggatacaatcgtggaagtggcaacaacagctcctattctagctttggatctggaatgtatggcagaggtgctggcaggtcagtgaacacagcaaacaaacttcaatgtcagttgtgttttaagcttggtcatactgctatagattgtttctatagattcgataagaacttcactggtacaacaccaaatcaagcttcaagtcagtaccactcctccagttcagcacaggccaatgttgctagcatcaacactgctcaagacaacaattggtaccctgattctggagctacgaatcactgcactccagaccagcaacatctcacccatggagctgaatatgatggaactgagaaactctttgtaggtaatggggcaggtttgtcaatacaacatgttggtcagtcattcttttctacaccttactcatctaagtcatttcaattgaataatctcttgcatgtccctgacattacaaaaaatttgttgagtgtttctaagtttgcaaaggataacaatgttttctttgaatttcatgacaatttttgttttgtcaaggacaaggagactcgttcaactttactgaaggggacacttcagaatggcctgtatttgtttgatgcttcccaactccagtttcattgttcaaaaccttctagtcaaccaagttcgaatctctctttttcacctactggtgtcacagctgaagtcaatacttgttccaattgttctcttaataatttctctcagtattctatttggcataacagacttggacacccatcttctagggttgtccaaactgtgctaagcattgtaatgtgtccttgaataatgtagagagcaataagatttgtactgcctgttgtcttggaaaaatacacaagtttccatttcctaaattctctgaaactgagtatacacaaccacttcagcttgttgtatccgatttatggggtccctcccatactctctcatccaatggctataagtactacatccatttcatggatgtgtactcaagattcacttggttatatcttttgaaaaataaatctgatgcctttaaaatttttcaaaatttcaaagctgaaagtgaactacaattaggcaccaaattaaaggttttacaaacagattggggaggggaatatagaagtttcacaccatttctgaacaagcttggagtcattcatagacatccttgtcccacaacacatgaacaaaatggattagctgagagaaaacatagacatattgtggaaaatggtttaaccttgctagctcaagcatctatgcctcttaagttttgggatgaagcttttagagctgctgtctacattcataataggctacctactcctattttaaataacaagacacctttagaagttctctttaatcaaaaacctgactacctatctcttagaacttttgggtgtgcttgtttcccaaatataaggccctataataaacataaaatggagtttagatctgccccttgcacattcttgggctatagcctaaaccataaagggtataaatgccttgattcaagtggtagaatgtacatatccagggatgttatttttgatgaaaattccttcccttttcataaaatctctactgctactgctttaccaatcaattactctcctgagtttttcacttctggcattattccttcaatcactcatagtgatgcacctgttctaactcctacagattcagttaactcccactcgaatactgaatctgctactccttcagctacatcttctttaccaaatcaagtgtctgaccaacctgcttctattgacactcctttttcacctactgtttctgtttttaacaatatgcaggattcatctaatgtgttgtttgatgtagatgttgctcagaattttgacaatgcagctgtaacatctgttcaatctattcctgtggaaactacacactctgctgcaatacctac

SEQ ID NO: 40887 - DNA, 1524 bp, Cannabis sativa
atgactcggcgggagttgttcgagagacagaagtgtgcacgaggcacacggtcgcgtgaaaaatgagcccattgttactcggatggttggaaggctaaccttaggttagagaagtcaaggtgctgcatgattgttttgctacatgaaaaggtgagcccgtgatagttggtatcagagccgagttcatctcagtgggaggttaacctagttggcctatcctaaagaggatgtaggcgtgtggacgaatcgagatggtctgaatgtagtaacaagatgtcgttgagccagttagttttctgaaggggatcagtatactgagatggagttgagattgggttgcttttttcatgtgaatattggacatcctagagaggagacaatgatggctgcttcgagttaagttcaaagatgccagaaagacaagtaccacatgcaattgtagagaggcgcaacataatgtttgaaactcgttggcataatacaaggttgattgggtagtccatactatatgcttggtatactaggccaagtttgcctgagtgacattgtaagccacaataggcgcttttgttgaaaatgaagcttgttggcaggggtgtggaagtagtgcaggggccatcagattcttgttagtcacgacagtggttgagagttgatgaccgagatggtttaatttgagataggcatggaatgcttcagttggtccatgtgttttctaaagggacgaacatggagaccaagggggcagaggccgcaatcctcaaaggatggttgtacttggaggtgtttgcatgtgagttttatttgatccatatggaagcgccgagagagttgagtggcatgtgttggcttataaaagtgccagagggcgtaagtcacacaaaggcatcaatagagatgcgcagttgtggaatgaatgcatttaagaagccaggagggctgagaagacagagcgtaagcgttgagatggcgctagagtttgagtggaggccagagggtcgtgccagtgagatgtagtagtcatatgagcctgcgaaggtcaagaagggtgctagagtttgcatgaaggccaaagggctgcatcgttaaaacttagtacatcgtgggagccagaagggcgtgatgcaagtgtgaatcagttggatggctgagtggatagtgcatgcatatagaaatcgataggggtgctatatgagatagttgactcaagagtcacatactacgggatgcatttcgagatgcatggtgtgtatgaagagttgggcggtcagacattcacttgtgggcatgttgtcgaggatgccaacatatgaagttggggagagacctcacagctcactcaacagactaggaactcattacaaccatcgagatgggtatcgtggagattgattgttgtcacgatgtaaagtcaaaaagaatcaggacacaggcagtgccagttatctagggtgaaactctgcaggacttaggtactaagataacaccatggcaatgttagcctaaggtgaaagttagcaggac

SEQ ID NO: 40888 - DNA, 2014 bp, Cannabis sativa
gtaagacaattaactttttgtgataataaaatctctaagtagacattgctctattaccttcgcgataagaggactgaactactataattgtggtgttctcatttactttctattcataaattgtttggccgctaccgcttatcaaacagttcagagttgattgcttttcaacgtcaacaaaaaatactaaggatgcatttagaagtaattgtgtaattactaagtattattagggtaataattgtacaatatagtaattacattattttaaaaaacaatacatgttggaatatgaaatagtaattaattatgaattcctaatatcttagttagcaaaatatttaaaacaaaaagtttcgagcaattacattgtatatgattatacccaattaaagactgcaactaagacctctaattacctccaattacgtaattatataattattaggttgaagttacgtgcaatgcacgttcgttcagccggccctgagtttaaatgggccatagacaaaaaaaaaattgtttggcccttattataataaagataaatggtatttttaaaaattattaaaaacgtatattttttaaaatgtattttttttttattttgactcttaaaatgagtgggccttaggcgcgggcctaacctgcctaatgtaattttgagaaataatatataataacagtttgaaaagaaaattaaagactatctaaaattttaaaaattaaatactaagttgttatttataatttaagatgatttgtcactttaattgagagaatagtaaaatatttgtacgttattacttttagtttttttttttgttgaaatttgactctaagtatggactaatcactaatgtaaggtactaaggttttgaataggtgtatggttattttttttaaaataattttaattattataatatgtaatttaatgaaagaaataatgttatgttaaaaaaattaaatgtttttaatataagtcttagaagaaatataataataaattgaaatgaaaagtaaataaagatggttagaacattttaagcaaaatctgtaaaatgtcaactaagcgaattaagtgggataggtgaaattaacggttcctctctttgatgtttaagaggctgttttttgagggcttgatttgattttgaataagcaccaccttcatttttttctctagttatagaaccctaaaattggcagcaactacaaaaagtactcagtactgtgatcataatagtaattatgaaagaagataattaagaataaggggttaaatttgatctacaaatgaacaatggtaacaattacaaaaacgacaatttagtatagtggagcatcttataaaagcaacaatgtttctgtattggtgcccgtgatcttttcctatcaaaggcaatatattgacatattagagatataacagaaatggctatacctatgaaaaacatttgggggtacttgatccttcagagatcaagcttggacaggcacaagtttgaataataggtagtcataatgagttgttattgtaatgattctaattttcataagtaattataatattataagcgaaactcctttgcaaagatgaaagtattgtggtcacaacatatgaagtatataatcatttcactaatcacaaatataatgaaaactttgagcatattccatatattatatgtattgaagagggtacaaagcacatgataatgttttgtaaaaattatatacactctatatataaataaattgtggtattattgcttaaacccccaacaacgtttcaattagttagttagtctttaactaacctaactattaaataggacaacttgcatattcgtccattagcctatataaagagaactactcctctcatttcaaggatgcaagaagaaggagtgaagtcaaacacaagatagagacacaatacagaaagagagagttgttagagtgggaaatggagagagatatctgagaaacagagggctaggattgagaa

SEQ ID NO: 40889 - DNA, 2482 bp, Cannabis sativa
  modified_base (1800)..(1800): a, c, t, g, unknown or other
ttgacgagcatgtcatccatatatacttccatgtttcctccgatctggtctttaaacatcttatttaccaatctttggtatgtggcaccaacatttttaagaccaaacggcatgaatttatagcaatacagacccatatctgttctgaaacttgtatgttcttggtccggtggatgcatttagatttggttgtaccccgaataggtgtccatggagcttaatatttcgtgccctgctgttccatccacaagctgatcgattcttggaagtggaaagtagtctttggggcatgccttgttgaggtctgtgaaatcaatacacactcgccattttttgttcggcttgggtacatgtacgggattagcaacccaagccgggtagaaagcttcaattatgaagttgttattttgtagcttctctacctcttccttcagggctagagctcgctccttgtccaacagtcttcgcttttgttgaactggtcggaagttgggatcaatatttaggacgtgcaaaattactgaaggataaattccgaccatatcctcatgtgaccatgcaaaaatgtccaagtttgctctcaaaaattttatcaatgctgattttatcttgagcaacaaaccttgttcaattttaagctttctggccagaatatttgggtcgatctcaatctcttctagttcttccactggtccaacattgctgctcaggtccccaagtcgaggatcaacatcttcatccctgccttgggaagttccatatttagaaatatttttccccttgtacaaactctagctagaggatacttcctttttagccttacctatggcaaggttataacattcccaagcaacttgttgtctcttagacaccctaccccgttctttgttaggaacttaaggcatgaatgaaatatcggcgtaacaacctttaagtcatacaaagctggtcagcctaacatgacgttaagggctgatggaacgtccaataccaaaaattgtgccgttatagttatgctcgtcggagcttgcccaaaagtgaggggtaggcgaatttgccctagaggcgcaacactttggtcggagaaaccatacacgtgctggagacaggtagttaaatctttcagctagagccccatcttttcatacgtggtcatgaataggatgttggaagaggctccattatctatcatggtttgggccaccatcttattggccatctggacttccacaaccaacgggtcattgtgcggaaatctaatcttgacagaatcttcatcattaaatgttatggtgggctcccctgtccgcaggatcttcagcttcctttcttctacgaccaggactacttcttctttctcgtactgtacttgtcgggcatacctctcccgggctttgtctgaatctttagctatgtgcagacctccaataatgacatgcagatgtccatctactggtggtggtagcaagtcttgattgttattgcccctctgattctgatcggccttgacatacttctgcacgtacggatcatttttccttatcaggaatttgatttcctgcttcacattgttgcattcattggtgtcatggtcgtaattcccatgaaaatgaaaaaaaaatggtcatatctctcttgctgacatattttttgatgggtggcaggcttcttgtaaggggctaatcacagagtagccacatacacactttctatatcttttgtcaagactgtaaatgcagtatacttggtaggattctgtcggggagcttgttccgtcttgccagtgaactttcccttttncccattcccttgcctattattgttgttggaccgtttaccattcgagtttgaattgcttgggtaatgggggagctagacgaatgtcccaatagaaggagcttttgactaactaggtttttgttcaccctctgctcactgaatggcctcttcaagctgaataaaaccttctgcatggtcaagatagtcactcattgagtctactggtccgttcttccttgtatccttccaaagttcgccaaggacttcaatgccccccagtatcgcgaacaactttctgtcttcgattacccgtgcaacctgagtcgcctctgtcatgaatttgctgatgtaggctcgcagaggctcccctggtcttttgtaatatccctataagtctaatagtaaatattagggtttatatttatattatgtgttaatcaggcaataagttggattatgatcctactaatttatttcagcataaaatttaaattttcctataagtgattaaataagagtaatttataaattacggagatttatatagaatgtgtgaatgtaatatgagctatatgtgtaataaaactatttttaggctcggtgaccctgaagacctgattagtggataaataagcgtaatttgttaattacggagatttatttgaaatacgtggatataatatgagttacttgtgaaataaaa

SEQ ID NO: 40890 - DNA, 1712 bp, Cannabis sativa
tggacatggtagcgttcttggaggtagctgacttagctcgggaataagcataagccatcttcagaccggtctgcacagagaaaaaacattagaatttaagacaagtaaagaaggacaaaaggaaactgtcagggaagactcaccctcgtaaactccttcaggactcctcccatcaccagctccagagaaaggtcattatcagctccgtccagctgctcattcaccttagggaccgacatagtcatgtagtggatgagcatatcttggcctctcttagtctttggatgcagtactggaggtggggcaggagcccaaatctgctcaaatccgctcttgaccagctcggatctgccctttgacttctttggcctatccgagctccctccttgagagtctttagacttagttattttcgggccagaagggtccacgacggttggctcctcgaaaagattaataactacttcggctggcctctctcttgacggagttgtctcaccgcccctggacttcttggccgaaggcgataagctcgagctccctcgcactctcttcttcagagctttgagcattttttgagacatgtttggacgaaataaaagcaacatggttagggaaaagcactagaagtatgaaagcataataataaggaaagttaaaggtaagatggagtatcttgcacttcgatagaagcatctgcccgagcaagacctgatgggtcatcatcatctgacgagtctctttgatcctccaggacagctttcccctttccataggagtggatggccgagcaagtagactaggctccctgatctgaatcgtatgtccaataggcatgtgctcggctggacgtttcttcttccttttgagcggagtcacctgctcttcctcaacctcgtcttcctgctcaagatgcccctgagcatactgcttggctcccgcacttcccttcaacttagcttcacgcttgagttgaatgagttcattctcccgatgagctcccacagcccgcccaacactagatttcctcttcttctcattcacaggttggggaataaaatcctttgggtagagctcgtaatccacaaagttgtccccctagatcaacaaagtgatattttgggtagcacccggcagctgagcgattctttgagctctatccctgagagcaagtgtgaagggtgaacggtgatatatagggatctgttggaaccgagtgtaggtggtgcctgtgccatccaccatgtaatactcgtcaataaaattcccaattttaataacggccttgtccctggtgcccgtcaaccacttgaagtctggctgagaaaaatagaagtaccctaacctgccctgcttgggagtagacttgaagtcaaaaaaccagctaacctcatgaggagaaggcataccccactttcgggtggcgtagagaacgaatagggcagacagatacttgatgcccttgggagtgaattgggtcgaacagagacagaagaagtctgccaccttcctaaagtactggtgcaaaggcaacagtgccccttgtttggaatgagtactcaacaaggcacacatccccttcttagggtttgtggctcgattgtttgaggcaggaacttaacagtccagctcgcccagatagccaaactgatccaggtcccgtaggcgtgcctgagtgaccttggacggagggctcacccacctggcaccca

SEQ ID NO: 40891 - DNA, 1456 bp, Cannabis sativa
aataattaaatctttttaccaagcaatagattcacgaaatatacaatctatttaacctaggaaaagtattaatttctatgaagataaaggtaacaaatcaataaatataaagcatataattcatttaacctaggttctatttttcatcacaattaacaatactttgacattactattaatttcaatttatcacaactacttagaattctaaactattaagtgagtagtaattctaagatgattatagaacaatgcaaaaccttaattaagtaatttaataggaaacaaatcaagaacaacattcattaggactaatcaagaattcatattttaaggtttagaaataatccttaacttaagaagaaactactccataatagcaatcataataattatgtctcaagagtttctagggcactgtacaaacacagctagctctgacatgtgttataaggtataaatacgtactactacgtatacttgatgagtcttagctaattgtattaattaatactaaattagtattagacaccattagaggggtaaatacgtgtagggttgaacatttagaccaagtttgatctggacccaaccaacccacttaggcctgacccgtgaaacccgaaactaagtggggcccatcttatggtcggccacttaagctgaattttggccaatttttatcattttttttaatgtcatataatttaatctaaccctaggagaaatcctataaaaggaataagatggttttcattctatccaacgtgtcattctagttttcattctctgtcaaacaactacaaacttgagaactccttctatagaatttttgaatccttctctttctctttctcttcaattttcgagcctcatagtgatagagtacgtgcccacatatagcaagtctagtactcaatcatattgtgtaagactgtgaagaacccaacacctgaaggagaatcaagcttagatcttgataatactctgcgacagaaaggaacacgggttagagatctaagtggaaggagacatttaattatgctgcaatcaatgtaaggtttcttgagttttatatgtgtttaattccattattttagataattcatatttaggatgttaaataacatactggatagtaaatctagctcctagtaaaataatctccaagagctttagggttgtggaacaagctcagctccatatacatgaagaagtccctggctaataaactatatttgaagaagagaatgtgtacttttagaatggatgaagggaaagacttgaggaatcacttagatgaattcaacaaaatcactctcgatctctgcaacagtggagtaaaattagataataagatctagccatcatactattaagttctttgccaatatcttatgagtattttttttgatacaatgcaatatggtaaagaaactcttacaatgtctgaagt

SEQ ID NO: 40892 - DNA, 2362 bp, Cannabis sativa
aattaattaattttttatttctacttaatcaattaattatcaaaagttttaagaaaataaataaataaacaataacaaaaaaattgagggataaacaatgagaaaaaaaattaggactattatgatcctcatttatcttttgttttacttcttaatgtaattacccaattcatcttcttcctattcagttgacaagttgaaatttgtagttcataatctggttaagacttacaaactcagtctaagtgataactctgtatatttaacttttgatattgaactgtgacaatcatattattttcaaatcaacaaaagacaatcataatcataaatactaaattattaaatcgacatggtacataagtttagtagtgtggtaaggaattatgttcaacatgtaatcaatttaaaataacataatatccttataagtcctcaatttcactgataccgtgatgcttaataaatcaaccagtgaaattaaccatacatttattacttaataaataagtcattgtcactaaacatgcttaaaaaattaagccaacaaaatattatttttattaaacaaataaatttattaatcacaacaaaatatgaactacatgctttcaattcaattattctcaagaatataacaaaacataactgaaagcataaacatccaataaaaaattattggcccacaaaaaaactaagtagttcataacatcaacaaaaaattacatacaaatgtattctcaaataatagagaaggaaactcccactaacctaaaggagcaaaagattataggatgcccatataaacatgtttattaaacaaaattgtacttaatcttttggttagatgatctgctattatcgacttggtcatacattattctatcacaatgtctcatttcttgaccaagtctctaacaataagatactttattttcatatatttggaagcactactaatctcattaattattcttcgaaaagaaaaataacattattcttatcacaataaattagtataggagaagaaataaaatcaactagtcgtgtaacaccctgataactaggcgcgctacagtaattttctaattaacgtgccacatttcctaatcaaagagtttttcttgaaaatcgtaccaaattaaaacttttgatttaaactaataaattttataaacttttatatatttatctatataaatcggatcccgtatttgaacttttacaaacattatcaaaatacatttataaacttgtcgcacagcgactacaaaatataatccaagatgtcccgagacctaacactccaagtcgtgtcgtctcgacatgtacaatcactatccaagctcggagctcactcctgttttgctttcgcctttcctttacctacacatgaaagtagcaaatgtgagtcaacaaactcagtaagaaaagcatataacaaataacgtatattaccgacttgtatctaggtgcccatacacctatccagaaggctaatcagatgagtaagaacgttcttcactagggtacaaccactataccacatgcactacgtaccgctactgtacaagtgttagtaaggtttgtcccgtacctcgagtatcactaagtgttataccatatacactccgtacctggccgtagtaatgttggtaacacctactgtactttttaaacatcgtatgctatacattatgcactcagtaccgctaccgtactagtgttggtagtgtacgaatcacaacatgcatgcatatctgtataacgaccataatatgaacaacttttatgactcttcttaattgttttttaagaatatttcgaaacattttgagtttatatatcaaagtatcagattttaaaattattcttgtcagtgacactctaaactcaaaatttgacactctcataaacaagatattcctttgattttaaaattgtcaatgccaatgacaactttaaaagaccattggaataataaaaagtttctaataatctagagtcaaacataatatcaatattatgattggcaaaaagaaaaaaaagaatatcttaattccaaaagtggaagtgaaagtaaatttctcttaaaagtaagaatcaagaaaattaataatttcaagacaatcttagctctaaactgtaattccgtaataaatatgccaacttaagtaacgtcaactttaacataagtgtccactttaagctttgactccctctcacttggcttcttgagttcccttagcccctggttgtgcttgcttcttttcttattttttctctcttttattggactttagttgagaaacatagtgagaatatttattcttctcattttacaacttactttactcagcta

SEQ ID NO: 40893 - DNA, 1691 bp, Cannabis sativa
  modified_base (775)..(779): a, c, t, g, unknown or other
tagagtatacagtaaagtatagttccttactattttggattccatattccttttataaggcttataagacctcatcttaatcaaacatccacaaataaaaaatatttatatgttagactattagtctaaccacaactttagtttataaagagttttaacttatactttacttgatacacagttcaggatttatgttacagtcttaagtgtttctccccaaaacaagtttcatgaggaagaatgaataatcacacttctagccacgtccttagataaatgttgattatacacatctctctcaaatacccttcatgcctaacattttgtattggaagacaaaaatatatttatttagtagttgtgcaaaataatcttaaacattatttattgattctcatacctcccatggtagtgttatccaccacagttagtttcaatgactttagttttcttgcctaattgatttgtcaactatagttttgaaaatttaaaagaaacaacgtctaaagattaatgcccttatgaacaaaataagtttcattagtctaaggacaagatacaattattgatcattccatgaaaccatgagaaaagatccaccaaaatatagcataaattcttagataatgaaactttattttgtcatttcatttctttatgtttgtttgttactctttaacaaaatctaaaatttattaaatcaaggggtcatgaattctattaaaaataagtctttctattctcctttgagagatataaccttaatacttatacnnnnntataatagaattctcatgattcaatttatgttttctcccatgagagaaattataaggtttatttatatgaggaaaatttcaataaatttataaattaaagaactagtagaaccaatattgaaatattagaaaaagattaattttctttaaaattctataaaagaacaagaatcacctaattattcaaaatagaatttaaaaccaaaactcatctaggtgatgatattgtataagtattttccaaatcctaaaaataactagtttttaacaatagtttgaatatccttctagcctcatatgtagatgtttcacttttgcccgtaaagatgaatctttcatcatcatttggcttttagtttcatagataaccttccttagttatacttacataaataatgtcacaaaattttgcttattaagtatatttgggtacaataaattaaatcatttacaaaacacgacatagtaagaaactcattttttttagttatgtctaatgacatacttggaacactttaaccttattattattattattattattttaatccctcttgtaaaagttatagataattccatatctatattttgtactttctttaacagtatttcatatgcaacatcctaaattttatctttatctttatcctttgttgaaacaacatagctaaagaagcataattgtctctttcctttacttaaaaaaatttatctcatttagcatgagaattaactttatgttggtagatacaactaaaacatgcgctaaaaagagaacaaaataaaaaagcttcacaaacgaattcatataacacaaaatttcaaataatggcaaatcccatctcaagataccaaacacaccattaatatcaagtctttggacaataatattaactgtaagcggtactcttg

SEQ ID NO: 40894 - DNA, 1497 bp, Cannabis sativa
gatagggatctggatacgaacctagactcgaacccacacccagacccaggtcgggatcgaaactcgggacctagatccatactgagaccctaacccagaccgagacctagacctgcacctaagaccaaaactcggacctggacctgaacccaaacccagacctagacccagactcggacctacactcaaaccaagactcagaccccaaaaaggcccagacccaaactcgaactcagacattgaatcgaaatcaaaactgggactaggacccaaacccaaacatggacccagatcgggacctaggacccagaccatgacctgcgcctcggaacctagacccaaattcgaacacagtactcagactcaatcttggaccaggactcaaacccagatcctgacctagaccgagattggaaaccgaaacgggactcaaaccctaacctagggcatggaccgggacacgggcatcagaattgggaccgagacccaaggcctaaccctagacccagaccctaacctaggacatggaccgagacctgggacttgggacccgaagtggaactaaactgggacacgagattgtgatccagatctggacttggggcttggacctgacccgcagtcagtgtttggatttgggacccatacctagattcggacccagacctagacctagacctagacccgtaccccagacctgggtccaagtctgagtttgggtttgagtttgggaacttgaatcagactaggaccttagacccagacccggatcgagacgcggatccaaatcaaaactcggatctagactcgagacgcgaacttgaacccagacacaaacatggaccaagaccctaacccaggactcggactgagactggagactcacacctggacctaggactagacctagattggggacctaaactcaaaattagaaccagaatcgggacccaggattgggattgggacccaagacccgaccccagtctcggtcccagacccgaacacggactgagacccaggatctgaatcgaaacgagaccgagacccaagattgggatgcggatcttgacccacgacatagggttggacccaacccgttgtcggtgtctacatcttggaatcgtacaaggaccctaacctagaacaatttctagaccaggaccaaacctagactcggacccgagacccgaaatcagaacaagaaccggaataaggaccttggaacaggaattggacctagacccaaaactagctctagacgcgaacccggaccaagacttgcgccaagacctgcgacccaggacccgagactcgggacctggaccaggtgccagacccgtacaagaacccaaaccctaacccagacccaaactcaaaccatgacccgaacccaaacactgactgaaacctagacccagacccagacccgtactcataccagaactctgacttaaaaccggggacccgaaccaagattaggactgggacccagac

SEQ ID NO: 40895 - DNA, 2333 bp, Cannabis sativa
tcgctgggtataagggagcttatggctccttagcttaggccgcgcgcgaccttttcataaatttaagaccatcttggggaaatttatggccttttaggtagcgctcaaccccttacattgtatcagtggtaattacagcgtatttttggtactagaaagctagtctccttttagagaggcgtctctctcaaagtcttattcaattactcttttccttttaatattttaagagagatgatggtttcgtgaactgacttgacttttctttttgatatttcaagggagatgctggttttgtgaactgactcgaccttttgttttatatgttttaagggagatgatggttccgtgaactgactcgaccttttatttttgatattttaaaggagctaatggttccatgaactgactcaacctttgttttgttttatatgttaagggagatgatggttccgtgaatcgctcgaccttttacttatttaacttttatttgttaccctacacatgatgctttagggctaactttgaagagcatcctcctcattattctgagtgctttctctttcggaactaacttcaggctttcactctcttcttggaccgctagggctagtcgatccctgtagtcataagagttttttttttgctttagcaattttatttgacaagtacaacgagcaagttaggcaaacatatggagagtgatgaatgccatatgtgaagtgaaaatatttcattgataaggaaaatatacgatcgcccgactacacatgttatgttcagagatcaacctaaaagcctcatttaatttagtgaaatgtaccataggtaaacttgccattgctaagagcgcttcctcagatagtgatactttacttcgaggagtatctcagatgtttgatttttaggggtagtagataggaggttccacttgaatgtatcagcttacaagtgttgggaatatcgtctaataaaccctatagtgatttcaggatctccccgatgaacattcactggtacctcatctcaagactctgtttccttcctccatacggatgtatttttttgcctctcgtagaagttgtctaagccatccaactctcttttcaacatatttctccacaacctgcccccagggtatacccctgcggctatggagaacttgagctcatccttggacattttccctactttggtaacctcggtgttgaagtgctggatgtagcttcacaaactttcttctctcccttgcttcacgttggtgatacttgtgacagacacaatgttatcacatgcagtctgatgttgctagaggaattcgtctgaaagttacttcgaagacgtgatcatctccagttctaatcgtgtgaagcatttaccatttatacacgactccttttaatgtgatcacaaattgacaccttcatcttcattagctcattaaatgcgccaagatgttactttgggtcagtgataccattatatggtgtcacctgtggctccttgaagttcggtggtagtggctccatttgaacctctctcgaaaaagaggattcttcataaaactcctcatcatcattcaagtatctccgcgtggcgatggccatcctccggtgtaggtcttgcatttctgcctctaactccttcatcttctcgctcatcctccctcgggggttagtgagaggaactcaggtcttgtgtaacgggagccacatgcgaggtgccccctagtatgagacctcttgggtgaagtctctttctttggctatagggtgtttccctcagtgtaatctcctaatagtgtgtaatcactgcatgttagattatagattagtaaaggcaattaacattaattattgtattttataattttatatgattttatattgttgtgggtcctatttttagaaatgggcattagagttatcatttctcaatctcggagattttattaacctttaagagtattatttatgttaaatatgaactatgtaatttttatgatttttgttcgatgacaaaaaaaaaatgcgatggatgaccgttagagttaaatgggtaagtttaaaacctatttcttagcgggacaaacatttgagatatttagaatgtcgaatttaaatggggttatggttttggaccattctacccctaagcttatagttacttaagttggaagaaaaatggtattttgggaattttgatttatttgttgaggtgggtggttcttaatttaacaactggccacttagttgactcagccttagttattggaagattagattttaatcaattaagaaaaatcgagaaaacaaatggaatttttatccctt

SEQ ID NO: 40896 - DNA, 1193 bp, Cannabis sativa
aaagaccaatttcagtttttaccattttttttttttgaaagaaaagggtaaaatgggaagttcatgtaatcaatggactaaatttgtacaaattaagagagagtataaattttgatatgcggtatattattaagggcaaaaagtgaaatttcccaattagttctatcaaaggagacttatatttgttggtggtctgaccatttccattattgtctgttaacctattatttttattattattatttttatattggaggagggtagttccaaacttggacctctcctctttatgaatagagatgtgaatattagaataatttttattttaagaatagaatcaatgaattaatttaagataaatgaatattttatatttattgaatctagacacaattaatttattgatattctatacattgttacattaccatttatcaaatatttaattttccgatttaattttttgaattaattgtcaaacaattaattgtatgagagactttgatggaaggtcttacctataaaaatatacggtctcggtcctcgagttcactactcattctgtgaaacacattaaatccatctaaagagagtagagagaccttagaagaccgattacccacatcaatcagttttctttgcagatcaaagcttgtgtgagattgaaactcaaagaatcaatagcttgaggtattttgatcctattgtcatatagtttatatatatatattcgtttatttcgtattttatatacacattatattcatatatatatatatatctatgatatatgcatttatatatagttatatatattcgttatatatattttacattagattaataattttatgtgatatgtattgtatacgagtacatatatataaacatgaatgtttagttttgatcccagatttgagtttttatttttcgatgtttgtttcaattcttatatgtatcaatacattcatatagtattggagatctttttaagcatgaaaaactcttcagaaaaataaagagatttcaaaattttctggctatacaattcggacccaaatttttttgctgattttaaagtttttgttttatgtagttttgatggatgaaatatatatctattctatataaagtatacctatataactgaaattcttggtttttgagaattttatgggtgacttttaattttt

SEQ ID NO: 40897 - DNA, 1815 bp, Cannabis sativa
aataataattgcataagaatacgtgtatttgaaaataattgcataaatacactctagtaaattaatacagaatttttttcattaaatacatgcacccatttgttttgtttgaagaggcagattctccttttaaataagaataactttttttccttaatttttgttagtacgtacagatatttaaaaaaaaaaaaaaacctttcaacaagtaaattaaaatattttttattattactttttatgtatttattacttttacaattctctctcatatttttttttatgtgtaggtattttttttttaatatactaataagtttggtctcaaaaattacactattgtaatctatttttaaaaggaaccgatttgatatgtaagaagcatatatttatttattgtccccgaaaaacataactaaaattaatatggtactattttagtcgcttttaatctttaagcaaacggtagtgaagcttaaacaaaattcaatattatcagacaactttataagttattaaaaaatacaagataatacaagaatttatagtaatttatgttattttttgatatgttgaatattattttaaagatttatatcatcacatatgtataatgatacatatgtagttatttatttagcacttgggtattttttttttttgtagtgtatttattttagtgtgttgtatgtagattatatatatatatatatatatatacatatatctcacttttttatatatttttatttttaattttctaattaaactatataaatttttatattccttttaaacttatatgttataaatttcaatatatttttaaaattatttatatgaatacgaaatagtaatttttttttaaaagggacaaaatagtaatttaaacactataaaatattttttttttgtttgcttaacccataaataaattatgtttcaaaataataaatacctatatattattatactaataactttagtggtgactttttatatatatgccaaatggtaattttttatatttgattgcaatttattaatttattaaatatagttaaagttaaatgaaaagttattaaaaaaataatataaatatatcttaaataagtagccaattttataagttactaaaatattttttttcattttatttaaaaatgttactacatagtattttattagtataatatatggtaactttaaatacaatataataaataaatattacaataatttatgataatattattaagtttaaaattttattactttttattaacaaaatataataaagaaacaaacaagttatatttgatattagtagtcttttttcaaagatagaaaaataaatgtttctcatatattaaatagttattttattatttatgtatgtgtaaaattttgaaataaatattttaatgaaaaagtaactaattgatatcttatcgacatcaaaagcaactaaatgattactttttaaaaaactctcaaaaagcgaaaatttttggaaattacgagatttttctaatttttttattttcgataattatttttaatttcggtatgtatgctaacgtggcacatcagtatttgtccaaataatttttttaaaggtatttttataaataaaattaattttaagtatattattaaaaaaccaaaaataaaaaacagtaggtacaactaactagtctgtaaatcactaatttatatatatcatgaactcagtaaaaaagaatagaataatttttactttgaatatatatttataattattattaagaatgtataaaactatattatattaaa

SEQ ID NO: 40898 - DNA, 2525 bp, Cannabis sativa
atactaatacaatacaatacactatacggcgtaccaaacaagccctaatagtcaaatctctcatattcctatcgattatgtttaggattctaccctttaagagcccctttaaccaacctcagaacataacttgtagtaaaaagcttactagtatcatgtatacaatccacaaagtatagacagtagcaaccacaagaacagagatgacatcagaaataatgctctttttctaagaaccaaactaaaataagccaatctaactggagtcacaaagtgcagtcaagccaaattgtacacacactacaccaatacaaactacaatcaaaaaataagtaataattgttaaataattatttaatagagttattttagtttatttatttattttagtcttttatattagttgcctaagactttcttattagttatattctttcacttttgattttacaattgaatgaaactctaatttctctgcatctcttttattttttaattgttattcttctcttcacaaataattatgaataataactctcaagaactttctcacaacaggacataatatcaaattagatgttacaagcaaaaattttatctctagtaaggagattccatttaccgcttgccaaacctatgtttagggataatgaatctataaccaagaatcttagtgtaactcactttctcttagggatcgtttggtatgtcgtattgtattgtattatgttggatcgtattgtattatattgtattagtattatttaatacaataccatgattggtattgacttgtattaataccaaacatggtattcatagcttgaatttgactttgagtacgagaacttgttaccaatttatctttcaatttataacccactcctattcgattcccaataactttatttatagctcgaaattacttgtattttgtaaaacattcatcgctagaatcattttctgttcctgtcatgctggccacctcttcaatcatttgctcctgatcaaataaaatgttagaaacacaatattaccttcattcattcattttaaaaatattataaaataaaaatttgaaacttacatgtagttatctgcatgtcactaacccaagtgtcttctgttcctttttcaatgtggcctttttttcaagcataaatttcatagtctttaaaaaaataggattagtttatgtaatgtgtaaaaaaatttactaatagaaagttaataattttactagcaaattcattatgagtcgttaccatcgactttgtgccttgcgtggacatatacttcatttcctttctatttttcttgttttgattagatcgcgcaataaactttaagctcaaaaataatacaataatttgcttccaactctctgtagtgtagtgatcaggtacaacattgataacttttaaaatcatctggttccccagaataaagtttttgaaagtgagtctgcctgatattctttctctcagaatacattctcttcatctcttgatagagagtttgcatcaccttttcaggctctggatgaccatcaatatcgtacaaatactacaaacaaatagtatttgttaaagaattttgtattcattaaaattaaaattaaaatttgcaacattatacttgttaatttgttttaccttcattttttgtacaattaggtctttaaagtattgaggtacatctttaaaattcaagtagtgtcctggaaacgtcattgtgacttcgacacccatttgacgtacaaaagcttggttctccgtaccaaccactttgcctatcacttcatcaagtgtcagtggtaatggttttcctgcatcctgcctttgttgttcaacagtaaggttagtaacaaggcgacgccccttccttctttgtggtggagctgactcacatgtcgacggtaccctactagggtctagtggatctgtaccaccaccatctccaccatgataagttgatacatcagcttatttttttaaaaaaaaaatatactatttattagtaatagtaacattaatttaaaactaataatgttaacttgaaaaagaaaatattaacttgaaattaataattgtatgtattacaaaataaagtgtctgaaaattaatcatccatatcgatattattaataattaaattatcgttcacatcatcttcacaaaagtcaactaaaatttcatcgtcagattcttcagtagcttcttcttcgtccatgttgttatcctcttcgttaacatgcaaactttgttcagtgtcaatgtcaattggaagttgattaggttgcataattaactctccaagatctacagtaaatataaaatttgatgaggttgtgtcctgaaccaaattaacttcgacattagcgtcatcatccacaatgtcccagatttacttatagtttacattctcgattattttctaatttttccctctcaataaatcatcgagataaaatacttcctttgcttgattagcaagtatgcatggtcatctttaaaccatacacc

SEQ ID NO: 40899 - DNA, 1619 bp, Cannabis sativa
taataataataataatagataaaataaaaaaagatagaaacttatctccaactcgaatacttgaagagagaccttgttcaaactcgttaaatttttgccacctgcaaaaaataaaatcttacataataaactaacataataatatcaccgtacaaaataacacaacaatatataaaaaatactaacaatattaaaacaaaaaaaataacttttttttgagaataagttctgttattataaattcaaagagtcatttacaacaacagaaaatatagtaggaggaatctcccctaaccaaatacaatcagaatccatcgctaacgcctgtttagccaagccatgaccagcttggttagcatctcgacaaacatgagatacacaaacattagggaaattagataacagatttttaacatcaagaactaaatctttaaaagttggaggaccagatgctaagttgctaattgctttgacgagcatcagagaatcagtctcaattcgatcaatatgcaagttcatttgtagaatccattgaagagcattgaacaaagccttagcttccatttcttgaaacctgaaattgcccacaataagcttggaaagagcagccaaaatagcccccttattatcccgaatcactgccccataacccaacttgttgtgtgcagataacacagatgctttgacattcaatttgcacaaaccaggaggtggtgggatccacggagaatgatcaacaaccctatgatctttgaggacaatggagggtgtatgtgaggcttgagtaaaatggctgagggaagccatagaaccagcaaaaatttgagtaggtttcttgcaagatttttgatgaacaacactattcctattcgaccaaatagaccacattaagcatatgatttgttcaagctccaatttggtgtatatagagacaagtgtatcaaaaaatccattctgttagctgctgcaaaatcaaaagaaaattcagagaagcgccaaaccgattagcgtatttgcaactgaacaacgcatgtccaaccgattcccatgcacatgtacataagctacaagagctagaatcaattattttcctctgaaacaaactagcagccattggtatagagtgatggaatactctccaagcaaatatcttaaccttagatggtaactttaaactccaaaaatatttccaccagggcataagattcagaaccagttgtgttttcttgagtggctagggagtaggaaagttgataactggactggacagtatacacaccagaagaggtgtaatgccaaacaaaactatcatcctgagcagcaaaagaaagtgggattttgagaatattatcaacatcaattgttgagaaatcattctgcagtttagtaacattccacactctattttcggttatgtaatcagctacacgagagtcagggaaactagtaaacaatactggtgtgaaccggttttgtgctggaatccacggatccgaagcaattcgaatgttggcacctgatcctacttgcaatcggagacctttaatcaataaatctttaccccagcatatgccttgccttgtcatggaggatgcaccagcagaagaggcacttaaaaa

SEQ ID NO: 40900 - DNA, 2021 bp, Cannabis sativa
atttaaaacgataaatattgtttgtgtgttgatttggatgtgttcatgttagtttatgtgttatttgatgatggtatgtgaattacgaaatttttcatgaagataattttattttctttctaaaaatattttctttttggattccttataaaaaaattaagcaattttggttttaacggaactcgatttcgatacaaattgagaaagtgataaaagtttaaaaaaatcaagtgccatgggtgtcgaagctttgcacgcacgcaccaggagcttcggacaagacacccatacgcgcgataataattgcggttcaaacttcacgatatattataaagtgactaaattttacaatataattttctttgggcaattttcacttttatatttgtaatttaatttatttttaaatatacgctaatataaaaaactaaccacaattatattttgttttctaaaaatatggggttagacttcgactcttctcttttcacgacagctacaatttaatattattaatatttttttttctttctctgccaacaacgtggaaatcgagacagtggaataagattgagagaatttgacattcaatgagattattaatttattactactttaatggtttgttcagtggttgtgtgctttagagagaggaaagaaagatagtagagaaataggagataagtttatttaaccatatatatatatataatggaaacaaattccataaaatagaaacaattagaatttaatttcatatatatatatatataataatggaaaaaattatagaaacaactcacactgaaatagaaacaactagcattatgtgtgtctaaaatggaaataattagtactatgtgagcgtgtgtaaaataaaaacaactagtattgaaaataaaaataatttaaccttgaaatgaaaaaaaaaaaaaagcatttaacctcatattacataaaaaaaataaaaacagctcaaattgaaaatgaaaaacaaaatttaatctcgaaaatggaaacaactagaatttaatctcatatatatgagaaatagaaacaaatatcataaaaaaataaaaacaactcatactgaaagaagaaacaaatcaaaaagataatagaaacaatttaacctcacaatagaaactagtatttaaccacatatatatgtgaaaatagaaataaatgacataaaaaatagaaacagctagatttaaccacatatatatatgtaaaatggaaacaaaaattataaaaaatagaaacaaatcacatagaaaatataaacatcaaaatggaaatatatcacattgaaaatgaaaaataactcaaataaaaaatggaaacaactagcattaagtgtgtgtaaaatggaaacaactagtgttatgtgagtgtgtgcatgaaatgaaaacaactaacattgaaaaacattgaaaatgaaaacaatttaaccccaaaatagaattaacaacaagcatttaccctcatattacataaaaattgaaaacaactcacattgaaaatagaaacaattttcactttaaaatggaaacaactaaaatttaacctcatatatatgtgggaaatagaaacaaatatcataaaaaaaataaaataaactcaaattgaaaatagaaacaagttaaattaaaaatagaaacaagtaatatctaaccatatatatatatgtgaatatgaaaataaataccataaaaaatagaaacaactagaatttaaccacatatatatatataaaatagaaataaatatcataaaaaatggaaacaactcacactgaaaatgggatcaaatcaaattgcaaatagaaataatttaacttaaaaatagaaacaagtagtatttaatcacatatatatatatatgtgaagatagaaataaatatcataaaaaatgaaaaaaattagaatttaacatcatatatttatgagaaatgaaattaaaaattataaaaaatgggaacaaatcacatagaaaatataactcaaaattaaaatgga

SEQ ID NO: 40901 - DNA, 1755 bp, Cannabis sativa
  modified_base (896)..(898): a, c, t, g, unknown or other
tttttttatatatttttaagggccccaaaatttaatccgtcttgggcccatatattttcagggccggccctgctctctcttaaccgtcggcagcgacgaagcagcggtggagacatctcaccggaagtaattgaatttttcctctatactctctaattatatattatatatatatattaatgtgtatgtctgctgttagatttggaaataaatttctttcttcttaatttgaataattttttgtttacaatgtgcttttgattgatttctatgttccattttgattttaattattttttctgaaatattcgtattgcattcaattccattattgaataaaattaacctaaatattaattttttatttaattaaatatgtctagaaaaatacggcaagtctacacacaaaaaataattatctagatatttcataaattaattacctattttctaattaaaatataatatattttattctatttatattaataaaccattaatgaaaaatttacttgatttaagttgctttaaaattaatttcaactttaatctatttttcaaaattttaaaatatctgcatttaaataaataagcgtaattcgaaattaggtgggaaatgattaataaaatatatatttaaaatttgttctaatttaggttgatctaaaattaaatttgcaacttcattataattttctgtctaattaaaattcctgaaaaataactaatatttaagtgtctagaaaaaatcaacttaaatatttattttctatttagtaaaatgtattaaataaaataacaaattattaagtatcttgaataaaatcaacttaattattaattctaatttaatatctacgaaaaatattctaatttataaaattaattaaataatnnnttttcaacttaaatatatttttcttattaattaaatattaaaaaacataattagttactagaaataactatctagaatatatcacattaaactaagtttttttctacaattaattttaaaataatcttataaaaaaaaatcatatattttaaaactaattatgttgctaattcaattctaattaggttaaactaatataattagcctaatacaaccatttaaataaggtaaataggccttcataattgtggtagtttgtgtgagggagggttgggttcagtatgtcgtacccactactatgatcccctaactctcacacaaggcttaaaggggaggaatttaaccattaaataaataattgttattcattgaataagcacaatactaattggacctaaattaaactatcattgtgatattttatttttagcaacctaatttatttaattaattaaacttaaatagacttcatatatacatgttgttataaccaaaatttggctaccatctcagtggaggacacatgtcaagataaagggaatatggatcgatgacatcactttttattgaataactcataattgcgtaaatagcagagtatatttgcaacttactgactgtaaggtcttatgcgaggaaaaaatatataaattgttgcttagtacattaacgagaaaccatatgtcattgaatgcatgtagtgaggcatcaagtacgttacatctgggaagacgaaagcgacgcatgtcgactgtagaaacacttagtatataacgtaaactaagtataacagtcgggttggctcgagacccattaagcgaggttcctatctagctatgggaaggctcattcctata

SEQ ID NO: 40902 - DNA, 1588 bp, Cannabis sativa
  modified_base (1287)..(1287): a, c, t, g, unknown or other
gtgcctaatagttagggtgttacatcactaaaagaaaagataaatcatattttgaaaaaaaagataaaaaatcgcaactctacttgaaaagctatctttatttttgctatctttttttcaaaaaatttctgctgcgatgactgatagtattttggtcataactctctcgatattacttggaattagacgattcaagatgttctagaaagctaagaacgagatctaaaactttcatgctgagctccaagtccagttctacatttaacatcgtccgaatttgcaattaagttccatcttgtaaaatcgagctcgctgtctttcactattttccaccaaaatatgttaaaatccctccaaaatacactaaatgcatgaatagtcattaaaattataacgccctaatctatagggacaccgtgtttgtgatttaattaattattaaaaatcgtgataatatcaaaaacttgactaaattataaaacacactaaaaaaacattataacgacataaaaagcgtgttctgggggatccatgttataaatttttctacaaaagaactatatacgacggtacctcaaaaatataaaaccaaaatacacaatagatgcagcccaaaacaactcttgacaaccaggtatgcaggccgacaaggtcaatatgtgcattgctggagaagactgtcacctcatggttggtctagattttctttgcctttagctgtacaacatagcacccttgagtcccaagaactcagtaagaaaagtaataataacaatcatatagtttattattcgaatactgtcatttacatacaataagcatcaaaccattatacattgttcatatgatgaaatccaaatcactattggcatctgccacgaataaacatcattatacagatatgtaataatacaaaactattataacaataatagaattcatattcatttaatcatataaattatatatatgttacctcataaagtaaccatcttcattacatcacgttgcttaatcaggcaagtcgatgctttaatctgataatcctgtatgtcattgcctaacccggcaagcccatgccatagtcttgcacccatacatcgtataactggatcacctaattaggtgagcctgtgccaaagaccgtcacccatatatcatataattgcatcacctaatcaattgagcctgtaccaaagacctgcacccatatatcatataatagcatcacctaatcaggtgagcctgtgccaaagacctgcaaccatatatcatataattgcatcncctaatcaggtgagcccgtgccacaatctggcaccaatatactgcatcgtctaatcagacgagcctttacctacgcctggtacttatcatatctcactgacacccatacttacgcccagtacgtcgccaggaaaattatatcacctaatcaggtgagctcgtgcctacgcttggtactcatcatatatcactgacgcccgtacttatgccccagtacatcacgaggaaaatcacatcacctaatcaggtgagctcgtacctacactcagtactcatcatatatcactgatgcccgtactta

SEQ ID NO: 40903 - DNA, 1052 bp, Cannabis sativa
ttaattctctcgtactaatacaaaattacatattttctgatatttacataaattattcaatcaataatttaacaatttaaatataatattaataataatgatgataataataataataataataaactattgtatttatttaaattaaaataataaatgtcttacatgcttttaggacacactcttaacattgtaccctatgtaaaaattattttctatgtaacttctttctattattaaataaaaatcaatttcgacttaccaattatattgcttactttatttatttacatgatttttttgtttaatatgtacatctattaatggagtacatataaatatttataattttagagaagttatcatagtgaattataatatgtgttcaaaataaattagtcttaaaattaattactacataagatttatactacctaactaatttacgataaaatctacttacataattagtgttatgttatttctaggacactagtaaatagataagatcacatgtatagtacatttcttacattaaattagaccgatactaactttagttgaaataagtaaatatatcgttgtctaatctaatcatatcatatacttgattgtaggtcaattcaatttgaattttgagtgattagtattttaattgattgtattatttaagtcatttgatttgtttgttactagtttatccatccatacttaaattttgaaaatttgatagtacaattgagtgggagtgttaaagatataaaaatttatggcttctataataagaagtgaaataatgatattctataggtttgttcaggatattaaataatagagatctcatttttgtaattatattttcagaaatatcatttacaaggaacttaacaatattaagaataaaatactatgaagggtaaaataataatttggacccaactcattagtagatcatctatagatgaatgaatgaaaattatggttgtataatgtatgtacattagttgcaaagcattctgtgaattttggagtgcaattatgagtctatagtg

SEQ ID NO: 40904 - DNA, 2208 bp, Cannabis sativa
aataccctacctctaataagtgggtgggaaaaattccgcccattcagttcgaacattattagcggcagaccccgtcactaataataattaaaaaaaaacagttactaccgctaattggtctatatataccccaacagaccctcaactcccatttttcctttttcctctacaaatccctcaccctaatacctccttcttcatttcttcattttcgaccatcagacccccttttcctctcataagcgaccatcagacccttctttttgcgtgcggctactccaaacaggtatggaccaaaacccttcttcctctattccttttatttttgatgcatttttctgtgcgactttttatttgtttttgatttatttttttggcttgtttgtgatttggtaacgcatttatgtgtttctttagatctaatttttctgtgcggctttattaattttttatgattattgattttgcggttgggtgagttgcgttcatctttctttagatctagtttgtctgggaaaaaatttgtgggaaaaaaattaaatgataatagtattaacttttgtatatgcatatttttgaagtgtaatatatttttttgtgtattatatatataacttatttaaatgtatatatctttgtatatatattttatctgtgtatatgtatatttttgatgtgtaatatattttctgtatattatatatacagattatttaaatgtatatataaaatatatatttttttatttatatatatatgtattttgttgtatgttttttttttaaatttatttctataattaaaaagtatttatttttgttatttttagattaatcaaaaagattttttagcaacttcaagaaggtgtacacaaaatttcttttgtgaaatgtatgtttttattaatgtgtatttattttgttttattttagtttttatttgatttaattaattttattgggtattttagtaatattatcatgaaaaagtgagaataatgaaaaaaattaaaaaagtataatcgattataaatttgttttataaagataaatttctaattttaggaattaaataaaaaaaatagtttatattttaataaataatataaattttagaataataatatttatttgaaaaataattaatttatatttatataattttagaaagtaagtttagtaatttgttattttttaaataaattaataaataacttaaatattaaaaattaaaaaagttaaataagaggaatgtttttttttttaacataaattgtaattaaataaataaaacttttatttaagtttttaagaaataatttgttaatataattttatattggtataatattattatcataaaaaattgagaataatgaaaaaatgaaaaggaaaaaaaataagagcgatggatatacatgctaataaaaaatttcataaaattttcttaatactttacaaatcattcaaatttttaattccacatttgttgcctacattatagatggcgacaatcgataagtcttggatcaaaattaaaaatcgtggttgtcatgaatttcggaatggcctacaagcctttttagcaatgtcatcagaatataaggattctgatggaagaattagatgtccttgtgtgagatgtttaaataataggtttgaaaaaatagatagggttagagcacacgtatttgatcgaggttttatgaaaggatatgagaagtggacctatcacacggagccagaggatgttgttgatgatgtagcggttggcgataatgaatttgatgataaaattaatgatccctattctaaaagatttctttccttcgacaatagaggatgtacaaggagtagtagaacaaccaaccactataagccaatattttgatgacttatttgaggaaattgaagttgaattgtatcccagttgtgattggaatttgtctttcaactttttagcaaagctattgcatttaaaggttagaagaaaaatccctaacaacatctttgatgaattgttaaagttgttaaagtttttatttctgaaggaaaataatattccagcaacgtactatgaggcgaaaaatagattgaagaaattaggcttgggttatgagtctatccatgtttgtttatataattattgcttactttataaggagaatgcatctgacagagtgcattagcggcgggatcccgctgctaa

SEQ ID NO: 40905 - DNA, 886 bp, Cannabis sativa
  modified_base (751)..(754): a, c, t, g, unknown or other
tttgaggaaaaactttataatattgccatccgaactactcacatggaagattttataaaattaactaaagagaagaggacagtggagtatacactggaatttgatcgcatatctaagtttgctggcgacttagtaccaacggacttgactcaaaaacaaaagtatatatgtaaggggactgaatgccactatcaattgggacttaaaaattaccactgatcacaatacattatacaagaaagtggttaagagagcattgattgtttaagaggcaaaacaacttgttatcaaagaacaggctactaaggatgtcgtcacggcatcaagccctaatattgatggtagtgcaagtgaggggaccgatggtggtaactcagatcacaagtggaaggctaaagcttccgaaatactgggaagtaacaggaagttttggggaaacagaggcagccgtcaaggtcgcgggtcttcctttaaaacttacccggagtgtcccaaatgtcaaaagcaccattagggtgagtgccggcccaaagtgtgtttctagtgtggtatggtgggccattttattagagattgtccacaatccaagaaagaagaaccaaagaagaacaacaaccggaatccagggcgcttgtacaccatgactcaggctgacgctgatgctagtccatcagtggtgacaggtcagttgtctattaacagttgttcttattcagtattatttaattcgggagctactcattcttatgtnnnnagtagagtaatagagagttttcattaaccactcgatgtgaatgcttcggggtttggaaccctgttaccctcaagagacctaatcgaatctactcggtggattaggtccttgtctaaagtgtataaagacact

SEQ ID NO: 40906 - DNA, 1970 bp, Cannabis sativa
gaggttgatatgtttagagtacatatccaacactaataatgtcagcgaagacttggttggttcaacaacaacattactgccatctctagagtcactttggttgtgggatttgcctaatctaaaaggatggtggagagaggagattgaagttcatcattcttgttttgatgcaaatgcaaatgcaaatgaagataatcactcttccttgccttattatctcccttctctttcaaaattatatatagaagattgtcctaagctgacttgcatgccactttacccacgtttggaaggaggattggaactgaggaagactagttggaagccattagaagagacattcagaatgaggatgatgatgagcagtaacgttggatctgtattcccaacaactccttctttctcacctctctccaaattagaaaggctatctctaagagtcattgatgatctagaatgtcttccagactccttcaagagccttacttctcttatttccttggaaattggtggttgtcctaaattgaaggatttgtgtcctggtattctacatctctcatcacttcaacatctacagattagcaaatgcgtggggttaggggacatgctgattagtgatgattatgactttatgtggcaatccctaaatggaacccttggattattagaactatgtacgttgccaaatatagtgactgttcttcctaagggtatccaacatcttacaagcttacaagaacttcaagtttttttttgtgatagtctaacaacaattccagagtggatccacaacctcaaatcacttgagagactttacttgtggtcctgccccaatctgacatcattccctgaaggaattcgaagcctcaccactttgaacctgttatatattgattcatgtcccatgttattgaagagatgcaaaaggaatacaggtgaagattgggataagatttctcatatagaagacttgaccttaattccagatccaaacaaagaagaagaaaatgaggtaaacacgtcaatctctaatgtttgcttttattttcaaatgaaattaaaatcagagcttataatgtttttcatgatattgcagaatacaaagggatgcaacctcttgaacaagtttaggctacccaatacaagaaatgaaggatagattagatatatcatatattttgcaaatcccttctgcaatatgtacaagtttactgtgtatgcagttacttccttctgatatgatttatatcaaaaacaatttttttttgaaaaaaatagagtaaaatttatgtcattgtttttttttaaaagcattttatatatcaattgttaatgtatacaatctagaaatttttccattagctattttactgaacaaatggagaagaatatgaactttgatatttctattgattgaaaagttttggatgtttccatgatgatgagttcattgttgttttgaataatgtaagttcttcgaattgttttctgaactgggtttttgttaaagatcatgaaaaatatgatttataaatttctgaagcttttactaaattagaagaggaaacaaaaaaaaaaaagggttatgatttatattgcaaataaattcaaaaagaataaaacagagtaaaattgacgggataaataatacatgtttcctcttctgtttaattcaaaatttcgagcctatgacttgattgttaaaatcttcttcattatttctttttggttattgaaagactgaactgtagcatatcaaaattactggaatgttgttggtaatattaaaggattggttgaatgtacataaactagaaatttgtccatgaactgattttactgaacaaatgaggaggagaagaatataagttgatacttgttttgattgaaaagttttgagtgctttcatgatgatgagtgttcgtcttgtcttggttttgaattgttttgtgacctttttgtgtgttaat

SEQ ID NO: 40907 - DNA, 2374 bp, Cannabis sativa
attcctgtaaacattttaaacttgcctatataatgacaaattacacagatataatagttgtttattcatccatcacagagaagcacatgtatttgctgaacctacatcactatggttgaattattaagacattcaaactccactaatcattaataattaatttataacaaaagttaactcaggtgttgcaactcaggtgttgcaattaggttttaggccaaggaaggaacatgtttgctacttccttaacatatctgcacccttcaattgagattgggatttcagcatcctcttccagcatttttaaaatcagaacccgggcatgtgaatcatcatagtctttgtagtgaactttaaatggaccctcatgttcatatagatatgctcgggctataacattgttgatattgtcagagcagagatatactagctgatcaagggccctctattcatcaaaattgtacaggagaggtggctcgttgagagaaacaaactcctcaacataaatttgttatcgaccctcatcctcacgagcgtattgttgtggaacacatgcctaatcagccacctctccttcttcctcttgttgggcaatgtttttcttctatttaagggatttgatttcagcttctaatttatcagtctccttctgttgctgtgctacaatattagaaacttccattttcttcctgccaaatagtttagatgctctggtaaggaacttgcaaatcaatagaaaaaattagctatgcttttttttttggtataactaaggaaacaacatttctcaagtactagcatacctagcagtcctgacatgtccaggatgctatagtgtactaagtgcatgcgttaggatatcgttttggccataaacctgaatttgtccctgagtaagttgctcctctaatgggagcctaatgcaaatattcaagcaattattatataaatcattatatatactctaactctcattagtatagtactcaattaaggactaatatatacttactattttttcggcaatttccttgtcgtaagtagtgacaagtttcgttctcttggtccaagatttgatccacacacgatggtatgggggaacttgaaccttgaggtcctttttctacattattttataacaattaaatgagtatagttatattttgaagcacattattaaaaatcattgattacttaccacatcttcccttacgttcaccattccactcccaactgggatgtttggattggatttttacttaatgttcctttgcaccttactcaattcctacaatgccaaaaaaatacattagatactagtacttagtacttgtatttaagagtttatcttagtacaaatataattagcacttgcaattcaagagttagtcgattttcagcaaatttcaaccaatcagtaaggttaatttctagatgcttctcggggacttctgccagtcgttgctcatatttttcttctaatgcgggcattctgttcttgaaatctttcattaacttcccagcaaggatcaaacaatcatgtttgaaatcatcaggcacgataaaacccatctagtttgaaggaagacaaacacgattagagttaacatctgaattaatcaaaaacaaatcaaaattctcacaaataactgcttccctatatatctttcctaaagtcaatactagcttggagtagtttttgccacagtactgtcctttgtcattcagttctagtgccactctttctccttggtccatcaacttggataattcattcatctgagtacctcctcgtgtaggtatcggcctaggacactctgcttctacgtctgaatctgagtttgaacctgagttagccatatctacaccattaacaaacaaattataaagttagctacataaagaagtaattacgtacataaaaaaagcctaacaagtaatctatacaaaatattaaatacatatacaatcatcatcacaagtaagctcttacaaataagttaccaattagacacgttttcttttctttttttgtttatgttttcctgaatcacaattgaccgttattccctcattgatatcgtttctaatgtattcaacgtcatcttcctcaaggttacgatcaattcccataacttggtcatgaattggtttcccaacaatgaagtcatcgtaacataaatcaacattctcctcatcctcttcattctctaagaagctcctttctggtgtcgataaaacaacaaaccctttatcattagccagatcataactgtaacttgaactgcttggctagccatgatgaatggataattcttgcttcctctcttacttaaatcaaccaaaatataaccaagctcatcagtttttactc

SEQ ID NO: 40908 - DNA, 1293 bp, Cannabis sativa
caggcagtttgagcagtttgatgaacacccctacttcatactctggtttggcatttaatcgcttatttgcttaatcaaaagtcatagttgatttgagccttcaatatgtggtaaatatctcaaagggaatcacaaactaaaataagtttcataaaaaataactaatgtcaaaacgatactaactttaaaaactagtttatcaacattagcagaaaagaaataaaaccagtttcatcaatatcatactaaaaaaaaaaacacaatgaaaaaaatataatctaaaaatgatactaactttaaaaatcagtttcatcaacaataataaaaaaaaaaacataagtaaaaaattgtttcattaacaagataatgaaaaaaaaattataatctaaaaacgatactaactttaaaaattagtttcatcaacactaaaaaaaaaccaattatttcattaaaagagatagaaaaattatcactttcatcaacaacataatgaaaaatacacaatgcctaataaccaaactttaaaatgatactaattttaaaattcaattttgaacatataaattttataccaatacctaataactaaacttctaacttcattctctattttagttaattttttattttggttaacttcattctcgaacttacaatatggaaaaaaaataataaagagaatcagaaactagaaacagagagaaaaaagaaactaaggaaatttaagagacaaaaatacaataaaaaccataaaagaataacaaaagaatagaagagtgagagatatcatatatataaaaaataataaaaatagaggtgggttaatattatatactctaataatcaaataatactccaaacaaatataaaactcactaaaaatattagagtagaaggaaaagatagagaaataaaactcttaaaatgcaaacaaaaaaaccaaaaaaaaaaaattaattgggctagaaataaaaacaatgaaatatgggtttagatattagatttacaaaaatgtggcatatcaaatactatagaagagtgacaaagttataaatgccatattttataaccttagtatcaaatattttcatgtaattttcactagaaagagtatgagaaaaagtgtgaaagcaaaaaaaaaaatcatattttagttaaagttaaaagaaattaattaagttttttttttttataaaatatgattaattaaagaaaaataatatgaaatagttttagtatgaatagtaagaaaatataaaagagagaaaaagaaatataataagtgtttgattt

SEQ ID NO: 40909 - DNA, 1177 bp, Cannabis sativa
tttttcttcctttgaatttgttaattgttattttatttattttaatttattattgtagacataaaataaaaataatttgttttattttgttgatgtgaaaagaaatatatatttttcatatatatatatattaaataatttaatattaaaaaataaacaatccaaaataactgatcaaatctgtattttgcggattggattgaatttgagctattgtacagattggattagatctaaaatccgcacttaatgcgaatcagatgtactataagcaaaataatgcggattgaattatatgaaataagaaattcacaagaaatatagaaactgatcaaataaatatgacatgaacataagataacatgttttgtctcatctaaatcatttcttatgttttggaaagaataagtttttggcaactaaatatgtctaacttaaattatgtaaatcgatcggtttgcttgagttataatatatttttacgaacctaatataaatatcgagttattaatatctaattgtaactcgttcaatgaaaaaaaaaataactcgttcaatgaatttgacgggtttggttggattaacccaattaaaccaatttttatttttatttttattttttcattattgttagtttttagtgttcaaataattgatttgaaaaaataaatttataatatatgtctaagggttatagtttaaataaatgttaaaaaataaatataaattgaataaacattaacttgataaaaaatatttttcaaaaaatagaatagaaaaaatatattcatatataaatttttactaatgctctgaaaaagacattccacttaattaggtgtaagtaaactttatcgatgattatcacgtcaatgtaaatctggtgcactaataaatcgtgggactaaattatttgaagcatataatcacaattacatacaattacattttaatgtgatgacattattgtaattgtgaacaactatacatttggtgtaattatgtataaaatatctgaacaaagcatatgataaggtagatatgatttttgatctttattaaaagtaaataggattactattatcctaaatcttggtcggatgacatggcgtattcttagggtgacacgtaatgtattttcaaaacctggacggaaggaatgattttcaatatatct

SEQ ID NO: 40910 - DNA, 1661 bp, Cannabis sativa
  modified_base (790)..(794): a, c, t, g, unknown or other
ctatattgcatatccccagaaggacgttgagagggttgaatagctcagcatagacctaaccatttctaaaagtgtgtgatttcttatttctacaaatccatttttctatagagtgctaggggcagtatattgcgattcaattccaagttcaattaaataatctttaaactgcatatccatgtactctacacccctatcagtttgcaagatctttaatgtcttacctaattggttttcagccaaagcatgaaattcctaaaacttctcaaacgtttcagatttcttttgcattaggtaaagaaagctatatctagaaaaatcatcaatgaaagtggcaaagtactcaaaacctcttctagcttttacatttagaggtccacaaaaatctaactgcactaaccctagaagttctttggcacgctctccctttgcagagaaagaacatttagtcatttttccttctaggcaagattcaaaaactggtaatttacctaagatgacatttttaatggaccatctttggttaacctacgaagtctatcatagcctatatgacctagtcgtaaatgccatagatatgttttatcattattatcaatctcttttcttttatggtttctaggtttaacaatatttaaaagttcgttattaagcacaatttgtatgtctggtcgtaaaacataaagcccttgttccatggaagcaacacataattgaaatcctttacgagaaatagtacaaatagaactcaaaaagtttaattgctaaaattgtgtttgtaaacatgaannnnnaatcaagtttctactaaaattaagaataaacaaaaaattgtctaaaactaataatttcttttgaaacctgaggcgagcttttcccttagcttggaccgatactaatttgccatttccaactttgagcttcaactcccctagatttagataatcccatgttttaagcagctgcaatgaagaacaaacatggttagtagctctagaatcaacaatacaaatggatttgtcatactctaaaacacatgattcaaaaacaaaatcgttaccttcgtcctaattggctagaagtctaggacatctttcttcctgatcacccttcccatcacaatacgaacatagaagagtacaattgtccattgtttcagtccttgaacttgaagaagcagcattgttagaagcatcattctcaattaccctcttcctctttcgcatgtctgcaaaactggagagaggcctccttccaggaaaaatctgctcataagcacgcaattctgcgttcagcctatctacgccggatgagttaaaattgttgatcatgtaagatacaaaaaatctattatactcaggtggaagactgttgagaatgaattgaacccattcttgttttgataaagcaattcccaacaaatttgctttctggaatttcagattcatcataattaaatgtgacttaatgctcttactaggagacattttcacattatagagttcatttgcaaaggcatgtacaaggtgagagttgagaggaaggtagttcatttagacactacaaatattagtaaacagaaataaatcatttggttcacttaaattcatacacaagttcagaaaataacaagaaagtaaatatgtttgcaaaaataccaa

SEQ ID NO: 40911 - DNA, 1570 bp, Cannabis sativa
ataatatattcttatatttggaatattttaattgactatttaataatatttttattaataataattatattttcataatggaaacattcccttaaaattaatatatggttgctatacaattatgatggccatatatattgaataataaaaaaatttaaaaatattttatctcttattattttaatagtatgaagtctatgaatgatcgtgaatagagaaatagcattgagcataaaatttaaaatttagataaagaattgaaggaaatcagagattgtcttacaacaaaaaggaatacagaaataaatttacaggaaaatattgatgataaaaaaataaaacgaatgaatattggttggaagtatgaggaagaattgtgtacaatagcagaaaataattcatcatcaaaagataatgtgtctcccataaatacttccaaaggagataatgttttctttgaagattttaaactacaaaatacactaagaaataaggacagagatatgttacagtatatatattcaaactccaatgatacccagtaagtgtaatgattattttatattattaattaaatttatttatttttatgtatgcccatttttcatgtataggcaaatgattgtaaggaatagtgacattcatcttttatgattagattttcgataccttggccctggaaaagaagtagaaataacggtaattaatgtaattatattatgaataaggtgtttgatggtttcattatttatattaattttgtttcattatatagtttctgactatggtctctactttattaaccaatgacaagaggaccaaaacttgtggaaaagcaagaagatggtatcttccaagtaacataactgtgagtactaatagttatattgtattcataattatattggaagaaaattataacatgaatatattggattgtgtagaatgagacgctaccctacaacaatctaccactttatcaacgttggaagaaaatgcattattatgatttatacatgagttctcttaataagtgtcacgaggtatgataatattattctttatttaatttttttcttcaataattacaaaataatatggaaattttttagattttcattccactcttattctcgaaatattatattcttgcacgattgttgttgtctatgaaaaaagttgaagtttgggactcacttgctgacaaagatagtccaatagtatattcatctaagattaaggaaatagtaagtagtttaaataatattatggtttttttattttaaataatattatgtttttttaaaaaaaaaaaacaaagataaaacattttttttaaatgtcaaaaccttatacattttaattatcttattatgttgtctttatgtatatgtgtggaattatagctccaaaatcttaattcgggtctcgagagaaacaagccagctaatttcaacttcagtagttttatggttgtgcgtgctaattacgtccccaaacaaccaaatttgtttgactgcagggtattcactatattatttatgattacggcttgtaaagttgatgtgcg

SEQ ID NO: 40912 - DNA, 1923 bp, Cannabis sativa
  modified_base (1488)..(1502): a, c, t, g, unknown or other
taactagatatgagcctaaatgatgataaactttcacagaaaaataaaactattaaagaaaaaagtaagaacacgaaggtttttacgtggttttgcagtcagaattctgaatagtccacgagttaatcttattagacttctgatattgttttagggccttttctcttttttgtccatttttcagtataacttgcctctatttataattacatagtcaggcagttaattacatagttgactgatatctttacagcaattatcccttaaaacacgtaaaataaatgcggttaacatttgaatatcacacagctgtgattggtccgcttttactgggtcaaagtaatcgtgtactaaacacgttataaatcataaggttctgggatgtctcgacaggaactcagtatcaataaccttgatagcgagctagagctttttccatatctttccgacgttgatatgtacacctcgtcgcttctgcgcttgaagatataatgcttcattttgacaatcgcagttcttagtgacaaggggtactttagcagttaacatcatttgaatgtcagcttctgttcgagagaactgactcctcaagactataaatctcattgaaagatgtttgaagttgattagtgaaagtaccagaagtgtgccttcctatagcgagatggacgtctcgttatccgtcacttaggttcttcaagctgttgtacatagttagtataatgtatattatacactaagtgtcttatcaatcattatacctcgcttatgtctcttgatgcgtaatgagattgatgtctcgccttacacatccaatggcatatgacttctcgttaacgtatgagacaacagtttatatacctttatcttgcgtaagatgttacagtcagcgagttgtaggtatactttgttatttctccattaatgagttatttcattttcaagtataattaccgttagattaattaattcctatccttcctaatttgacacatgtcctcttttgaaatgatggtcgaatttcgggtatagcaattatatattatttaattataagatcagattttttaatattagccattttttaaattaaaagataactttatctttttgatttgaaatattatattaaaattatcttatttgataaattcaataattaataaatttgaaattaacctagatattattatagatattctaaccataatatttctaaattcaaaattggttatttagttaaatacttaattgtttataaattgtaagttagaaaaaagatattttacatcattttacttatcagatatttataaataatattttaaatatttaaataacctatatatttttgtagaaatttgaaaaaggcttaatttgagatattttgacatataattaagataattattatttatttattattttattcttaatataataattgcctaaccatatctatttcaaaattggtttattttattattnnnnnnnnnnnnnnntataagattagaaaatgatattaaaaatatcgtttttttttacttattttcaaatcatttatcttattagatatttaatttaatttgataacataattcaattaaacctagatattttaaattagtttcatttttgaatttgaaattttgaaaagatatttaaggttgttttcaacaaccctaaattttcaaaattagttggttatttaaaataataatttaataatattaacatcttatttcacattttttacatgtttgtctatttaattgtttattcaaaaactatttttaacaaaattattatttatttgttgtaaattgttatgattaacttgttgacagatctaatgatatgattttaatcagagtccaattgtcaatagatcctattaataatttgtaacaggaaaattttgta

SEQ ID NO: 40913 - DNA, 1617 bp, Cannabis sativa
aactccataaaagaagaaaaaaaactcatcttaaactaatcctgcaaaattttaatagccgctctctgtctctcttctctcactctattatcaaaagactcaaggtctttttcatatgttgttgaattatttttcttatccaatggtataatatattgttatctggaaaattctcttcgtgattataatttcacactctatgtacaggaaaaaaaaaatgaacaaaactcaccaattgtctagcattattaggcaaaaaaaaaaaaaagagtcaagaatcataaatcattgcctaacaaaaacctataaacgaaatagtgaacatgatcaattttccagccatttggtgttttgttatttggcaaagccttcttcaatccctaatatatatatcttctttctttctttcttttttcagttaattctaatatctttacctatttagataattactggacgtgtgaatagaatttttatgtacttcacccattgatgagcacaatctgtcaatcaaaccaccatcacttgccaagatgagataatattactcaatgaaccatcccatcaggcagactaattcctaaatgaatcacatgaggaaagctgccttctcctctgttatgatatatattattatgattctcatccatacctcaactattaggtataatcacctcaaataaagtcaagtcaagttttcaaatattgtctcactaaagcccaaatcaaccatcaaacaatgcacttaacacaactagttatcatgtaataaaataaagatattaatatcatagatagctagttaaattagtttccttgcatatgcaatttaaatgcctataaaaataaataaataataaaaccaatggaaaaaaaaaaaaatagaagtagatctcccgtcttttagtaataaaaaaaaaatgctaaaaaatttcttaaagtatgaattataaagcgctacacctcaaggtgttaactagtaatgcatcaaatactattactatatttaattatctctatagcattattattaggtaccataattttgacatttgaatcagcgagataattataggttagacatatgtaatataatagttaacatgtgtgtattaactttattaattttcttaaagctttgttatgatattcttaatattgtatgcaggactacttgataattaccgagtcttattttcgctaaaggaattaaaattttcttgattgttcattgatagaggtatgtacaatgacttatttattttgtttaataatattatgaaaattttagaggagtttgaatatgtcagatacctatctatagcgaagtaggttctgagattatattggagtcaaatgggtggaataatatgcatgttagatgagtttgaatattttaaatattcatctgtagtgaagtaggttctgcgattaactgtggtcggatgggtgatgattttgtattttcatttattgtttttatttcttaattgataggtgattttttaaattggtaaatattgtataaacagaggaaactctgccgaaatttttaataattgaactatttttaaataactagtacttaaataaaaaaaaaatagtttaaaaactcga

SEQ ID NO: 40914 - DNA, 1280 bp, Cannabis sativa
atccaccttttggagataactaattctctgccaagtgtaaggttccaaaccctgattcataactatagtgctatctacccaatttactaaaaattctggctgccacataagagtgagtggccctagattcaaataacacagagaagtaagagttgttgatcgagaactagcttgttaccacagaggggttggcttctgcatcagcctgagttaatacgaacacccttactggagcgggtttcgctgtagtcttatgttcttccttcttgagttggaggcaatcccttttatagtgtcctggcataccacactggaagcacccctgccctctacactctcccaagtgatgctttttacaactgggacattcttagtaagtgtatcgggtttcgaagccaccctgacaattgcctcgaccctggttccctcataacctcttgttttagcctgaaccacaagattcagtagccgcctttcttttctggtcagtggtcgagatactatctcccctactaaagcttggtgtaggaggagtaagagccccaccaataacttgagtccttcgagactccagggtgcactccacgacgccctcaccttgcagggcctttcccaccatatcataataggtggtgttgtcatcagtaatgatcattaggtcatgtcttatcttcgcctttcacccgtccaggtatttctcttccttgctaaaatcggttggcacgatttctgaggccaatcttaccaagagatcaaacaaggttgtgtattcagtatcactcatattttccttctgggtcagctgagtgaattctttcctttttcacgcttatggctgccacattgtaatattttgcattgaacatttcctggaacttttcccaggtcattattgtaacatcatcagtcagggacaccatgtcccacaacaccagagcgtcttcttggaacaggaatgtggcgtaggccactctatcattgccaatgatgcccataaattttagaatttgggtaatcacagttagccattgctcgactttcataacatcgggacctccctaaacaactggaggtgcctgcttgcagaacctttcatacaatggttccattcagttcactgcagcgactgatcctacctgcacaataggggtcggagctaccggtatatctggagcagagattacaagagcaccctgctgtctcaggcgtccgatctcttcatcttgttcattaatcctggcttgcatttttgcaaacctattttcccaatcttgggcagc

SEQ ID NO: 40915 - DNA, 1586 bp, Cannabis sativa
gtgacgcgcgttgaagtgtcactatagacttttagagttacgcaatgtgtgtcactaaaacccaattttctagtagtgatagtattttaactaaactttcgtaagtacgcaattagtagaagagaatgagatattatatttgtaatgatttttatagttcttgagagaactttcaaaacaaaaaaaagttgagagaaaaactgttatggattatagtttagtaagaatttttttattatttattcataataataataataatttaaataaaaagatgaccattccaatataccctcagttacaattattattcatctctcttattatttaaattagacaactgctacttaataaatttggacatattatgggtgtgtttaaaaatatttttttaattagttttttttttaaaaaaattaaaaagtgaagatatttttaaaaatcatgttttataaaactatttaacttttctatttttttgaacaagaatctaaattttaaaaaaataatcactttcaattttttttaaatagttctttttatcaatattttggactctgaccccaacttagactttggaaatcgaaccccgacccgacccgaccccagacttggacccgcctccagtcccgacctcaaactcgaattaaataaaatcaaaatatgaaatttacaaaacacacttcactacaagaattgtcacttttgcaggcacatttttgtgctggcaaaagtttagcattgcgctggtaaaatgaaatttacttctgatatgttggaatcaacgttggtattagaatttttgtcagcacaaaatgaaaagcactggcaaaaatgacttttttccagcgcataaatgcactggtaaaagttagattttagtcactgcaaatgtgcgctggtaaaattttaacctttttgccaacacagtttgcgaaatatactggtaaaagttacttttaccaacgcaatagcgactgtactcgtaaaagtgacatttcttgtaatgcttctgttttttgtttttaaaattgaaaaataaaagtagttatagaacatatttttatttttcaaaaataaaattttaaaaccaaaaattttacttttatttttgtgattaaaaaatttgaaaataaaagtattaccaaacgtcacttttatttttcatccatatattgtgtatttggtcttccgccatcacaatttctttttgttgttggttaatttactcctagtctttctctactcccatattttagtagagaagggtcatagcacatggaattttcgaataagattattgcttagacataattaactatttcaactcctaataaggaaaataataattaaataaaatattatttttttttgtaaatttttgataattttatgttcaattttttttaattgtttaatattttttataatatacaaacaacaacaaaaatttaataagaatacaatattaaaacagattttctataaatataattataaaagtgataaaaatatttaaaatttaataattttattgtttttgaatgtttgtgaaataatccaaaataaaaaagaaaaaataaaat

SEQ ID NO: 40916 - DNA, 1773 bp, Cannabis sativa
atatatagctctgaatacaagaggaaaaatctgttacaagaacagagatagttaatacatcaaaacagaaaatcagttcattaactaactcataacaacttgtctaactaatcaattcacacgtgctctgcttaacaatatgcaacttgattctatggacctaattattattacctgtttaatagataaaatttttccagtacttggagaagacttcaaattattgagatcttgttcagcatagcagctcccttgccttatttcctaataaaatgagaaaagatgagtaattttgtagtacaattcatgatccatatatatttgaaataaaattcaataaagcaataggcacacacctaatatctcaatgcaaaatttgaatatatataaatatatatatatttatatatatacagcacatttcaacaaaatttcacgtccctgatgatttgcttctatttttgcctcttcgatcggtaagactacttttatttacttatctaacttttaaaaaaatgtctatttaaataacatttactgaaaattattcgttattgattataattaatcaaaaagatatatatgattacattaagagaaactaattcggatatataacatcaagaaacaattaggagaagctagagaaaagaatagacatatatagataggtgtaggacgaggagggactttaatagtttaatttgctgctaaaacaatcaaataattaattaagcttgttagaaacgtcttcttccccgccaataattttgggtgtgatcatattatgttgttgtaactctgccgtacaatcgacataaggcttatccgagctgcttgtgttaattccctttgcttttatttgacctttcttcatcatctcttacccattttcctttcacatactgtctatatattatatgtaacaatcaatattatatatataaataagatagagtattcagattttgacttggcattttcgaagaccccctatatatatatattaatctagttattcttatcttaatttgcatgttactctgtaaatgtcaaacaacaaaaatataataataaatgtattttctttattctatcaaatgaaaaggtaggcaagcacactctaaggaagcaatactatacgaaatttagtaatattgaagttcttcttattagactattagtcggcccgaggaggaagacgaggacccctacgctcctccaacactgcatccaacctcttcttcttctcccagaagcgagcaagaacctcttcacgcttaggataaaagctgaagttaagattctgaccattggattgccaggccatgaagacgccatcatcaaagcgcttcttgcagtgttgacaagtgactggggccaggagagcatctctcttcgccttggccgcctccttctgagcctgctccttatattcacgaagccccttcacttcaacagttaggttggctgtcgtttgcaaatccgcttgatgcaactccttcagagacttcagcttggcggtcaattcctgcactgcctccttagaatcccgtagttcccgcttcgctatggccatagctgcatccttggccttcattaccttgtccttagctttcagcgcctcttgatggctccgctccataagggcctccttctgctgggcttcctcccggatagctctcttctgtgcctccgactcccggagactcttcatggcctcctccatgcccccaaattcggacatggtgtacccatggtcaatcaaagtct

SEQ ID NO: 40917 - DNA, 2508 bp, Cannabis sativa
atattgaaatacactaatcacattcttttgtggtgcttggcaccttaacgtgccattcaatgttgtcattattaatatatacatatctttattaatttcgattatcattttctttttattttttctttccttgttatgaatgatcattgtattattatttttttattaaatgattttttgtactattattgttatgtgacaccttaaggtgcttaatattatatttatgtagtacccaataattgattagcagttttctaaatcatttattgaattaatttttttttcagtgattgatattaaaatgcattaatgtggtgcttgttacctttatatatcgattaaaattttaatttttttattattatatataagttttcaagaacatctccaatgtgatacgtaaaattgtattatatttggtgggaaaaaaattgtgatatatttacatcaatttttagtattatgctccaaaacacaatcgcaaaacttaaatgtaaactttttttgttttttgttatgaatgattattaattattctcttacatttttttacaaattattttttttatatttgtttataaaataattagtatttttacccctaaactttcaactctacctgatcttgcccctaaagtatacgacttgttaaaaatttttcctaaaatataacagctacataattatgtctattctattaggtttgtatcttttatcgttaaaaattactatttttaccccttaaattttgaccaatataaaatcttgcccccttttattaaaaatattaattttaaaaattataatattctgtcaattttaagaaaaaataataaaaaattattgataaataagataaaaatattaaattaattaaaaaatattaggcttacttaaaaaacctaacttattcctaaaataaatattttcaaattttattttatttataaacacttatcttaaaaaataactccaaaattattgaaaatccaataaataatgtaaataaattaagattttttgaagaaaaaatcaatttgatttatatttataaactcatatctaccatcatgttcaaattgagacggacagtattgtttcagtacaagatattcgaagcaaccaagcaatgaagtccactttcggtcttttaatcaaagactgccaacttttgttacctaccctctcaaatgttaatttatttttcattagacgatcagcaaactgattaatacagtatgttgttagacattctcggtatcaatctgatcgtagcatttctaatacttttatttctggtgaactcttacatcttttgtattcagaatgttaatttattcaatgaagttaatatttcatctcaaaaaaataaactcatatctaaaaaataaagaaaaataattaaaaattcagtaaaaatataaattattttgaaaaaaaattaaaaattaaattaaaaaaaaatattatgtttacttaaacaaatctacatttttggagaaaaaaaaaatatcctcaaacttgttctcgtaaaatttagttcttacaaaaactaatattttaatatattttttttaaataaaaaaataaatatcttttttaaattgcttacttaattttaaaattttaattttttttttaaattttcttaatcatttaaaataattatttttaagatctaaattaattttttaagaattactaaaaaatgttaaagttttctcattttaattttgagggtgtacaatttaatagttgtcaaagtttaagagacaaagttactaatttacaaagacacatcagcatttaaatagaataatgagatgaaatctaacaaaaggactaaatttttgtaaatgtaaaagttcagaagaaattcttaacaagtcgtatattttaagagtaagatcaatactattgtcgaaagtttaaagaataaaattattaattattctttttttaaatcaacttctctgaatttttatataatatttatttatgtcataaaaaagtaaaatacttgtattgatacttaaagataatactattcaaatcactataggtgggatctaatgtatctctctataaagttacaaagcatgaatcaagtaggcaaatctctaatgagagaaagctatagccttagaggcgtgtgagagagaggaggagagagccccttgggcgtgtacaagagagagagagagaggagagattagggtttcaggcttagagtagtttgcaggctaagattaaacttagcatttctaggttagacttaaggcctttatatagaaaagcctgataaaattattaaaaaataaaaaaatatatattaaatttacttaaaaaaaacctaaataattctccaaaaaatattaatattttcaaatttattttatttataaacaaaaatcttaaaaaatcaaaccaaaattattaaaatccaataaataatttaaacaaactaaaaacttttgaaaaaaatggattttttttttttcattt

SEQ ID NO: 40918 - DNA, 1312 bp, Cannabis sativa
gactttgtgagcaccgaattctaactagcggatatagtcaccaagcctcttagtgatgaggtatttagtttcattagaagagagctagacatgaccaatttaaatcaaatataagatttgttagctatggaaattacatacctcttcactcacttatttatacatactcgttccaaatatgatatttatattatttatgtgcatagatgagaagatttcttaatacttgacctatatgaactatacttgctaaaaactcaaaattatatgttattatgtggatttttgttaaactttagacttattttcaaacaagtgaacttgtgaatttttttcatatctgactagcatgtgtgtctatatgtttgaacatgtcaaattaagtgtatttagtgtgcatataggttttctttaactgaaatacgctttgaacaaattttcggtacgctacttgttgattttataggtttttaggcctaaaagagtgtttttttgccaaactttctcatttttcaatatttttcgatttcgtaagttttttacacctcacatttcacatcaataaactactagaaaaggaatttttcaatttcgttatataaaactcatttttggtaaggttttaactttcttggaaatttttgaaaagcttactgtaaatcattaattttcaacatttttaggattttcttgtttgagcatttttgttttgtcatattaaggtgttagaaaagatttgggatcaaatggttggatgaaacatgttttgaagccttttttggaaaaactacctactacaataaacatttaacagattcctgcatacttgacgaaccgattaactggttcgcagtatgtagctatcccaaggtctttttaatcctttcaaactcgtatttctccctataaacccctacctaaatgttttctaaccccaattcagatattctaaccctaaatagaagtcttccatcctcttctctcaaaatcccactctctaaacctaacttttctattctcattcttcatcttcaccatggatgcttcatcattagtgcaacaaagggaacaaaggtccaagacaaggaatgacctcttctcccacggtaaatatacaagaaggttcaatgaagacttctcacaaagggatgttctaaatgataagcaaggtgatctcaaagctcttgagtatgtcaatttcaattctctttttaaacatatgggatggaaaaccttgttagaaattcaaaccactatctatcctaggctagttagagctttttatgcttgcattgaaactcattgtactcca

SEQ ID NO: 40919 - DNA, 2460 bp, Cannabis sativa
  modified_base (2418)..(2431): a, c, t, g, unknown or other
gacttgtctcagtaaatgcagaaagttggggagtagaagtggcagggaagaaaatgccttgtccaggggttcgttttaggtattagaggatcctatgagtagcttaaagatgtggtactctaggacatgttaggaattgggttagatgattcacggcataggtgatatcaggccttgttactgttcgataaatcaatttgcctataaggcttctatagtcagtaggatcgggcaaaggttttcctttatctttgctaagcttgaggttaggttccataggagttgaagcaggcttagcgccaagataccccgtgtcagtaagtaattgaagagtgaatggccgttgagatatggaaattccattcttagttcgaccaatttcaagtccaaggaagaatctgagggttcctatgtctttgagtttgaattgtttatctaagaaaagtttgaaatgcatgattgccatgtcattgttgctagctacgattatgtcatcgacatagattagaatagctagaaaaaagtgtttgtgttttggataaaaagtgagttatctaatagggatctagtgaagcctgcattggtgagggtggtactgatttttttgtaccattgtcgagaggcttgttttaatccatagatgctcttattaagcttgcagaccgaatcgggtggtgcattatatcctggaggtaatttcatatacactgcttcgtggaggtcaccaagcagaaatgcattattgatgtctagttggtgaacattctagttattcatagcaacaagaactaataatattttgagtgtattgaactttcccacaggtgcatatgtttgaaggtaatcaatgtcatgtttttgattgaaccctttggctacaagaggagctttgaattgttcaacctcaccttgttcattgtatttaactttctatacccatttgcatccaatggctttatggccaagggtaattttgtgacagtccacgtgtggtttttttcgagagcctgagtttcaatatccatagcgaggagccaatgtttgaattgagaagcttcactataagatgtaggaataatgtgtgaatatgctgctaaaacagccgctcggaagtgagggctgagtttggcatatgagataaactcctcaatgggataggcagtggagtgagtgttacaaacgtaatccttgagatgggatggtttgtgtaatggacggccagctttagatgtttctgctggggcaggtgggtcgatttctagtgtgatggcagtactcctatcaatatttattgaagaatctggtgtgggaatgacaccagtggtttcaatgtttgaagtaatattggaagttgttgtgtttagtgtgggaatgacactatgagggactaatgtttttggtgtattacctgtagagtgatgctcgacattggttcctggtgtgggaacaacaccagctgatttctgggcatcagaagtggttgaaatgttaggcaccatattgcaagagtcagcagtgattgctgaaggggaaaccgatgtagtagagattgagatttgtgtttcctggttggtttgattaaggtccatgtgagtaggtatgcaatgtttttgaaaagacatatcaatgtcgttgttggaaccttctctaaagaaaggaaacacattttcatggaaaatgacatctcttcaatgatatatttgttttgtttggatgtcaagaagggtgtaggccttcattccatgtgggtatccaataaaaacggatgcacgactttttggagaaaatttatacctgtggaggtaagggtgcaagcatatgctaggcatccaaaaacccgaagatgatcataagttgggggtttggaatgaagtttttcgtatgaagtattgccatgaaatataaaagaaggtgttctattcattaagtatgtggcagtggcaataagatatcgccaataagcaagaggcaaatgagattgaaaacataaagcccgtgcaatgttaagtatgtgttgatgttttcgttcaacaacagagttttgttggggacgttcaacacaagagcggtagtgaattatacatttagaagcataaaaagtagacattgcaagttctttatcattatcagatcgaattgctttaattggggtattgtattgcgtacataccatgttataaaacatgggaaaaaccgtttgtgctttagctttagctttaagcataacatccaagtaaaccgagatgcatcatcgacaattgtgagaaaatgcctatatccttctatactagtgacatggaggggaccctaaatgtccaaatgtattaaatcaaaagcattttcagtgaagttattgtttgagataaatggtagtttcctttgttttgcaagatggtgttgggttttatgcccaaaatnnnnnnnnnnnnnntataatcaaatttacttattaatatagat

SEQ ID NO: 40920 - DNA, 1138 bp, Cannabis sativa
  modified_base (890)..(897): a, c, t, g, unknown or other
tattcaagcatgttggtcgaccgctgggtatgaggacagtcgacaccttacccatgataagagcgtaaggcagagtggtatattttgaacaactgcaaagaggttgagcagtatatcaagtaagtataaattccataaacagtaactgaaaatagttgacttcacctcaaaaattcttaactcaccaagtgcattatattatgtagtgagcacaaggagttgcttcaagcaaggggtgtaggcaatattaaaaatgtgcaagagactgagttcccataatggtttaaaactcgagtaagcattgttgcctctcaatactcataattttgttcttaataacttttgaacttttcttaatttaatacttttcctgaattttagattaatgaactacggttgagcaaccatagtgtagtgtcagatgacttgtatgctattgctaacccagcgaatccaacaatttatttttatcctgggtgcatagtgaacggtattaaatttttgttcaatgaaagggatgataactgcaaaacacaaaatagcggtgttatggtgcccgatgaagatgaacaaaatttttatggcacccttgaaaaaattattgttacttatttaactgagtgttctcttatttatgtgtaagtgatttgacactaatggacgtagaatggataatgatggtgttattaccagtatttacgtcaaccgagagtggtaccaaaatgaaccgttcatacttgcatctcaagcaaaattgatatattacattcctgatatgaagaacagtaaagactggctgattgtaaatgagtacatcccacgaaaagtctaggacttcccggacactgatgaggaacatcctttttacaggaaaataattcagctgaaannnnnnnngttgttcaacttccacagttggatgatgttgactatattcgccttgatgtggacccaactgaagttgcaaacatccatcgtctgaattcacagcctcaatagttagatgatttcattgtcgatgatgacaccgacggtctaaatgcagaagacgataactccttagaattagagagtgacagtgatgataatgttgtatatgtaactgatgatgatgatgatgaattgtaattgtaacagt

SEQ ID NO: 40921 - DNA, 1910 bp, Cannabis sativa
  modified_base (1398)..(1405): a, c, t, g, unknown or other
ttacagtgagtgcaaaatggcctgcctttcttgggaggataggttttattcccttgattgtcattcttgttctgcatatttttgtccttttgaaaggcaaaagccatatcagcattggggttatttactgcagccatgtttcctttatggttttcttcttgaataatgagatgaaaacctcgattgatttcaggagagggtccatgagcagaatgctactgcagacttgagagtaggtattcgtgagccccatgagaaaagatattatatattccatgtgatgaaattcttgaatcttcttaactccaccacatgtacaaccattacaagtacatgtgggtttgtagtttgacagttcctcccaaatggatttcaacttggtgaaatacatcccaaccgattgtgtatcttgcttcagattcatcaatcctttcttcaaattgtaaatatgtggtccatttctttgatggaacctaactttgagatcaacccatatgtttgcagcagattcatcataaagaatgctggaagaaatttccttagaaaccgagtttaagatccaagatataaccatgttgttgttacggacccacgcattatagagaatatgatcagaaatatgaggtttaggaatggatccatcaagaaaacctaacttatttttaacagagatggaaagctgcatagctctactctaagaaacgtaattgtcttgaccagtgagaagctgagagacaagaacgttacctggtttgtctctgtgatgcaagaagtatggattagcaggatcttccatgggattcttttggctgttgattcaaagaaattgattttcatgttgaatcgaagctggagaagtatctacgcctctagcttgttaattcgcagcatcggactgggttgatgtttgatcttcatcagccatgtcgaaaaagaacagaaggaacagaaagaaaagaagaacagagtattaaaaaacatagcacgatactcgtcaccggagaaggtgaacggaaagacagaaattaggatcgattggagaaagtacctctttcccgctctgataccatattgagaaatgaagaaaacaggaaaagtttgtatttcattaaattagagaaaggagaccattacagaatatatatagcttcagggaagcttagaccacacatcaatcaacggtcaactaggcaattagaaaccgttataactaaccgactataactaaagggaataaactaatatacagagagaccaaaggacagtacaaatagtgtatgaaacttaatacgtagtttatttgatttgtagatcccccctttatatagaaagaaagtgtccattaatattacataactgatcaaattagactattattattgttgggttttgtgcccnnnnnnnnactcatttcaatataatcaaatttgctaattaacaaaatatcataaattattttatgttgcatagttcacatgatttatatcatgattatatgtttaatgtataaactcttataaatctaaaacatacaataattcatgattatagtaatgtcatcacagtggaatataattatgattatatgtttcaaagttaatgtcccatgatttgtcagtacactggatatatactaacatgataatcagcgatagagcttacttacaccttagataagtgttatgtcattttcaggacatgacaaagtatgctaggatcggatgtatggagtatacatcgagctggaccgatattgaacttggataagatcataaactttctgttatatctatctaagtcaatatcagttagttgatcttaggtcaatagatcttaatcctaacatggttagattctgcttaaatgtattatctatgtactgaggtttgttcattaaagcttgataggca

SEQ ID NO: 40922 - DNA, 1461 bp, Cannabis sativa
  modified_base (932)..(932): a, c, t, g, unknown or other
ggtaaaatatttccaacaagataatacaaaataactactcaaccatgtcttatttttatcctttagacgatcattgctacttggaaggttgtatctcgcttgatatggattatcctccttgtccatcttcaaaaggaaaagagcaaagtgttggtaagtcgttcacctcaccgcatttctttatttgattcaatattgcgaggtgattatcttgtcaagtgtaacccgaggctattgtatatgtacatttattctacttgagtggatgaatatccacttttttatctatgtattccgagacagatatatgtctcgccaatatcagttcaatagttattattcttatcttggttgagacttatagagccaacgagttttgaatattatctatcattcctttattttataataatgagttattttaatctacatttaatgatataactttattatatcattaaagttgattcatattcttcttgtaggacacgtgtcagcttttgaattgtagctaaattttgggtataacaatagatattagaaattttttaattagtgattagtaaaagtaattattagtaattatttaaagaagaaaagtataaataaaattagataaatcttaaaaaattcacccgcaaaatagaaaaatgacaatattaaaatgatagaataccatgtcacttaccttcacaacaggagcaaacgtatacaagaaatatcacttttgccagcacaaaaatgttctggcaaaagtttggtattgtgctggtaaaatggaatttacttttgatgtgttggcaaaaggggttggtaaatcaatgttggtattagaacttttgccaacacaaaatgaaaagcgctggcaaaaatgacttttttcagcgagtaaatgcgttggtaaaagttagattttagccactataaatgtncgctggtaaaactttgaccttttcaccaactgagtttgcgaaatacgctggtaaaagtaacatttcttgttgtatgtacactttaatatactaggaccatggcccctcccacaatatattatatgtgcttaagtttatagaataacagagtttttttttttgataatttgtatatggtgatcttgtttgacaaaatcaaacacaaacgatgaatatgatatgttttataaggaaatacttttatttatttacttctataaaaatctatttgtttccttttataatttgtagtatgatatgttttaagacatttattttattttttaataatattaatttactttgcaagttaggcttaattgtctataaagtgtaatataaataccacaaataattactaaaatcactacaacaaattaaaattttaggggcgacaaatttagaggcgacaaaaattcacctctaataatagggttattagcggagacaacattgtgtcgctccttaaggaatatgagttttttttttt

SEQ ID NO: 40923 - DNA, 2272 bp, Cannabis sativa
  modified_base (383)..(393): a, c, t, g, unknown or other
  modified_base (827)..(828): a, c, t, g, unknown or other
ctatctttggtgtttagaaatactgttcttaggaccatatctcccacaaagaatttccgagccttcaattgtttatattgaagtaccgtgctactttttgcagatgggccatcaactttaagttttatgtggtgcgcttttcttcgatttcatcaagtgattcggcaaggagtacatgatttgcatcattgttgtacgtcaatcttctgtgggatggcggctcgagttctacgggcagcataacttcatatccatatgccatggcaaatggggtttgtctggttgccgttttttcagttgttcgatatgaccatagaacttcacgaagttcttccggccaatttctattggcatcttcgagtcttttctttagtgtatccttnnnnnnnnnnntgactgcttcaacttgaccattaacttgaggatgtgtcatataccatggttcgcacaaaaatcagtgaagcattggatgtcaagccacttgccgttatccgaaactattttgtaaggcaatccgaaccggcagattctgttcttcacaacaaagtcttgaactttcttagatgcaatggttgcgagtggttcggcttttgtttatttagtgaagtaatcaaccactaccactgcatattgcactcctccattgcctttgggtaattgttcgatcaggtgcattccccaaatggcgaagagccacgggctttgcatctgagttaactcgttgggcggagctcaaggtatcttcgaaaatctctagcatttgtcacatttcttaacataggcctttgaatctttaatcattgtcgaccagaaataaccttgccttnnaattttcttagataaactctacctaacggcatgatttccatagaatccatcgtgcacttcaaatagaagtcgtgtagcttcttcttgagtaacacatctatgcaacgacattgagaatcctcttctgtacataattccctctactatgatataccgtgttgccttcctcctcatctttcgagctcattctgataatttgggggttctccagtgttgaggtaggccgctattagtatcatccagtttggggaagtatcaattatttcgatctcttccctgtcagtgatgctaggctcttcaacgaactagataggaaccaaattcgtcttatcactcacgttactgcttgccagtcgagctaacgcgtctgcagttgtgttttcttccgttggaatttgtctgagaccgtagcttttgaactatgtgagcaggtcatgtattttgctcaggaatgctatcatcttttctccccgagcctcgtattctccagatacatggtttaccaccagctgtgaatcactacagatttcaatgtgttcaactctcatctcccaggctaattttaggccgacaatgaaagcttcgtactcggcttcgttattatatgccttgaatccgaattttattgcagcgtgcaggtgttgccccccaggcgtgacaagggtgattcctgcaccagaaagttgatttgtatccgacccgtccacatgtagtttccaagtcagcttgtcttcactgttgcttgggtgagggttttgcatcgactcggggttattttctagtatgctttctttttttcctgtgcattctaccacaaagtctgctagggcatggcctttgattcctgttcagggttggaaggtaatttcgtactgacccaactccactacccacttgagtaaccgttcagaggcgtctggcgtttgcaatatttggcataatggttggtcagtgtatacccaaacaggatgagcttgaaagtagggccttaactttcttgttgctagaatcaggcagtaagcgagtttctctatcaatgggtaccggccttcggcctcaacaagtcttttactgatgtaatagatagggtgttgtatgttgttttcctctctgatcagcacgacactcacagcgtgctccgtgaaagccaagtatgtcgctagttcttctccatctagaggtgtcaaaagtagaggctttgcgagttgcattttttgctcctaaaaagctttttcacattcctccatccattcgaatttcttttttcctcgcaggatgttgacgaatgggacacacttgtctgttgattttgaaacaaatctgttcagtgcggcgatccaaccagataaactttgcacttccttggttcttgttggagacttcatatccaggagggcttgaatcttctctggattggcttcaattccttaggcattgacaatga

SEQ ID NO: 40924 - DNA, 2235 bp, Cannabis sativa
cggctcaaaatcatccatcccaacaagaagttgatgtagcattttcttcgtatacccttcccattgatgttgtgtagaaccaacaacattcattttatcaatgaatatgaggcaaagtacctcataccagaatttcagccgtggccgcttctttccagccgctatcatgatgccaaccaccacttgatcccttactacattgctccaataactgttgtgcgagtgaaaaatagagagaaaatcattcagaaaattgtaagggcatggaagagaagtttttgatttaccgctgtcaaaataaaagccatcccaaattttcttctctctcattaacacctctgtcaaaatgggatgagattaaaaaagttgctgtagcgatttcatctctaccatcagatttgaagtccaaaaaaacacctggaaaatattcttctgccatggatgaaccgaagaagaagtgatgacattcaagaagcaaggtactgtgtaggaaaagctcacgtgaggattctcttcaagtaatacttgcttttgttttgtactgtccagccccaaaagaatagataaatgagtttctcctgggtcccatgtcaccagcccattacatgggtattctttgcttaagtgggcccaattaataatgtaattaaatgaattgggcttgtggtttatctgatgtgatattattgctctagtgaaagaagaaaacattaaggccagatttaaaaagtatcccaatggattgggcctaacctgatagggttggaaggaacaatttgataattttgaattctccaatcgtcttctacagtacgccgtcatcaaacaactcgcaccaggtacgggttccttggtgatcagcaagctagactcctccttgaccatcgtcggccaatgaaagttatctgctgtatagcgtgtcttctccggcaccgatggacttcttacactctcaaacgaaatatgctggagctccatgtcgtggtgtatggatggtagcatgcgcgacaccacacccaaatcagaaattgtcgttgctttgttattaacgacttcgctagcttgttggtcgtgctttccgcgatcaaagagtttgtaagccaccattggcagtagcggtggagtgcttcttgtccaagacgcatcaccaagccgaccttgatgaattttgggtgggaggatctggctcgagttctcattgtaccacactggtatcgtccccagtttcggcagattgctcttcatctccggcaatataagcttggtcgttggaatgaattgatagcttggtgtattctctgcttctttttcacagagcatctccgattggaagccatgatgtgatcttctgatttccaccgttttcgttggagaaatgagtagatcaattggttgttcgttgcctctccgtacgatatcttcttcgtcttcatctccatcttcaccatcgaccccaaccatatcttcagaaattattgttggttgttcgacaaacagattgtttccgttcttcaactccttcagtgtggtactttgattttgaaacctcacttgtccttcaacgaagaatgctttggctatgactttagggagtgttcttagcttacattcacacaccttcctcttcacggcaatgttcttcgcagcttcgaatagctcgggcgatgctacagaaggcagagaatcttcatttacgagctccgattgtataactgcctgccgtttgtgttttagaagctgtcgagtctagcaaaggctcgtttgtgttctaatattgctatttctatctttccatcaccttcaacctccgtttctattgctgaaggagatcccgaagttaggttcgacgcgtggcaatttcggattccttcttggttgcgaacccgaacagattgcacagcttggtggatccactgagatcgttgtcctctgatcttgttgtgacatgacttcggagatcgcgggagaggcgaagtaaccttacttgcccaagaagtacttgatccaaaagcgaggcaaggtcctccagtgtattaaattcagaaggataatcataagactccgatctccattgatcctctagtttctccattcgagtcgtaggcgtctaccggaatggctcgctctgataccaattgataagtcccgagaactccacactcaagaacacaataaaacagtagcaaaagtaggaatagaacagtagcaaaacaatagaaaatgtatattgaatgt

SEQ ID NO: 40925 - DNA, 1065 bp, Cannabis sativa
actaaacagattgtaaagggttttatttagggcacaaaaacccaacaaatattatctccacaatcaaggtaaacagtgatgtattggcttagagtgactttgatattactagaatcagtcctcgagtcgacaccttcctaataataggatatctggactcaatgcccaatagtctcttgtttacgtaatatattggaagttgtaactttccttcttttcgcactaatgggatacttacgggatgatcacactactaggtttagaaacaacagttctccgtcaactggtttggacagtattagagccttcactaaatgttcttttaattgttggaaggttgtttcacattctgttgtccattcaaaatttttatttcctcgaagtacgttgaagaatggtatgcacttatctgtggatttggagacgaatatgctaagtgctgctattcttcctgtcaacttttggatatctttgtgcttcttgggtgaaagcatgtctacaagagctttgattttattcaaatttgcctcgatccttcgagaaagactatgaaacctaggaatttccctgaagaaactccaaaagtgcatttctttaggtttagcctcatttcgtactcccgaataatggcaaaggcctcttctagatcttggtagtggctttcggttgtcttcaaatttaccagcatgtcatcgacgtaaaccttcatattcttccctaggacattcttgaacatcttgttcatcattcgttggtaagtggctccggtatttttcaacccaaatggcatgaccttgtaacagtacattcatttgtcagtttggaaactggtgtgcacctgatcagccatgttcatttttatttagttatagtcagagtatgcgtccatgaaggtcaacagctgaaacctcgaagtagttacgaccatctgatcaatgtgcagaagcaaaaaacaatctttaggacagaccttgtttaggtctgtcaagtcaatacacatcctccatgtcctgttaggctttgggaccaaaaccagattggcaagccatacgggatatagagctt

SEQ ID NO: 40926 - DNA, 1640 bp, Cannabis sativa
  modified_base (447)..(447): a, c, t, g, unknown or other
agccactatgtgatttcaaaagcgaacactaagctataaacttttgttacatgtaagaccaagtgtgtctaaaccacttgctcacaagattaacttcttaaagttactctttttgttccacatgcatactatagacaacaccccaagaaagaacccatgcaaagtctgtgaaacttggtgaatagcaagtgaccaagagacttgcctgcatggttgcttctgggacacccataccgtacaatgcatcgatctgacacaaaaacttatgtagagaaatttaaatgcttagaataagctactaaacctgcctctaagtcgtccaggcatactttggcttgacatagtaaattcggacccttacacgtcaaggccataagaagatagaaaggacaatcatatgtctgtcatagatggctttaaggctaaataatagtagtgttcaaaaanagaaggcctataggccaaagcaagaacatgaaagccttgaggtcagatatgagatcaatttgcatgcatgaggccaaggccctgctaaaaccatatagccggaaaagaactggatacagctcttataggggccacgtaccgggctattaagagttccttacaggttccaatccatgttgagtcttaagtttaacattcgacaataatagactcaccattaagcttcatatggagtttccaaggaaaccacttgtgagactaatgttgtatatgcctacagagtttaattcttgtcgaattcaaaagatacagaaaactagctacccacttggaaccaaggcccatgccggctaaggttctcaagccttgaaatagttggccagggtcccatgactcaaccaagaactggccagggtcaccaaacccatccatcaataggcaaactttatagggtaacaccctaaagctagccaagtcccaagattaagccttagggccggctaggtcttaagcaagacctcctaggccagccaaggtaagttttgaatcccaatgtgtattttttctttcaaaactcgaatatgtatctcgtattctttatgactcaaacagttaagaatcatagaataggccaaaattgaatcttttctatcaaaaagtcacacattatacattttaaagctgtcgtgaggatcaatataccaaagagattacaaactaacatgagaatcaaaaagtttccaaaagcttaaaaagcttgaaacttgttaatggcaggtacaaagaggagatatccaaaaatagaagatgagatgtatataaagagagaagatcaaagatccaaaagcatgtcctgcaaaaagacaacacttggctgggcaaggctgctcaacaatgactactacaaataagacgacagctagaaagttcctattcgtcttgatgtttgaaaagggagttgtggggaaaatgttaaatcaaatttcttccacctcacgtggcatgtccacatcagccaaagatagagtacatgtggagtacaatcctgccagtagcagaacaaggcctccatgcaagatatattaaaacaatcaagtagcaactgaatggagtgaagagagccctcaaggagctataccaacgtccctggccgtctaagaaaagcctataggctggccagggtgaacctatag

SEQ ID NO: 40927 - DNA, 1284 bp, Cannabis sativa
  modified_base (492)..(498): a, c, t, g, unknown or other
  modified_base (782)..(782): a, c, t, g, unknown or other
tcaaatatgaaatattttatgtttataaataaaagcgacattatagtttttccgcattttaacgcttgtaactaaattagtaaattatgaaaaaagttcgggcgttacattatggaactcgaaaaggtatcaacacctcaagtagggtagaattcatctaaataggagatgaccaatgcactaacaaattttgaaattatgggctctacgggcctatgaagaagaacgtgacctcataaatatttctgacctactcaggaacaggctcttgggggaatcaccatgaaaatgtgtggatggtttagtgtctagagcttggcacatgtagaagtaagggcacaccttccactccaaagttacttcacatgcttctgtgcgaaagcgggtataacatgttgggaatattttatcaagatctagatttactaacaagtatgttgaaataacatcctaaatatgaatatctataaaataatgaaattaaacacatannnnnnnagaaaaccttacattgattgcaccagaatataataactcattctgctcagatctctatcccttattcctttctgtcgcagagtattatcaagatttgagcctggatcactttttctccttcaggttggttattaccactgtcttctgcactatgattgagtacttgactttctatgtgtaggcatgacactctatcactatggacgaattcatgaagaacaatgaaggagggttcgaaaactgtatagaagatgtctctcatctactagttgtcagagaatganaactaggtttggtttggttgaagtgaatagttggatgagatgagagcattatgagtgatcaaatatgcatttgaaactcatatatatgtattacattattgtgatgaatgcatcgtaactcataaatttcatatatcgtaagagtaccattgttttcaaaaaaagaagataccatgcaatcgtactcgtcagagtaaagtggagcattgcagccgtcgccgtgcctaaccatttttgtcatcgtcgtaagacgaaattcccaaaaatcttatatcacacccaaaaaatataatacaatgtaactactacacatatatataaaaaaataaaattatacctcaatggaagctgataaagacaacaaaacttgtcggagtaatattttctgatctcacccctggcaaaaaacacacaacaaagatctaattttaacctcaaaaccctacaaattttgctaatgttgatgtgatttttgattcgaataatgaagattggaaaaaaa

SEQ ID NO: 40928 - DNA, 1093 bp, Cannabis sativa
acattccctggttgccgatgaagttagggctgagcatcggtcggtttggtcagtttttttctatataaaaatcctgaattcagtttttggtctggattggtgcaatccgaaaagcgaccaaccaatccataacctatcttaaaactgaccgttttgaaccacggtttggtcggtttaaactctccaaactaaactttttttttttttaaaaaaaaaaaagatgattcattttattctataaacacattattttatattttacaactataaacatacaaattaattgttcaaaaactaattatcttattcttttaactttattattaataaaataagaatatattattattatatattattagtaactacaatacataaagcaaaaaaatacttaataaattaatatatatgtataacggtcggtttccgtttttttggtcagcttattacccaaaaaaaaaatttaccgtttaatagtgcttttaacctttagcggtttttttggttttcgattctgttggttttggttccaacggtgttcggtaggtcggtttgagcagttttttttttttttttttttcagttttttgaattttatgctcacccctagatgaagtcacacagtgcaaccgactgcaaatcctctccagataacgtgatctgggtacgcagtgttatgaatccttggggcactagtattgtgattatatcacgtttatcttagagtttcacaaattcaacaaccatccattttagcgatttagggatcaaatccatgacctttttcgagaatagttcatcttcttcatcatgaccgccttgtggagaaagcatgggagccttccccttcaacgtatcacgtcttgaaggtggttaagcgagtgggccctatacaaaacacacaataatatatcaaatttgatccaaattcttcgaaatttcggtagtataacggctgtaatttaatgccccaaatttttttaaacatgcttatataatgactaataacacatatataatagttgtttattcatccatcccaccgcaacacatatattcgcaaaacctactttactgtaacaccctaactatc

SEQ ID NO: 40929 - DNA, 1088 bp, Cannabis sativa
ataataaaataattaatgatatcatttaattactatataccaaacttaatatgtttaaatttagctttctataagaacctatataataaaaatataacaaaatacatacagacctaaaaaacacttaaatcaaaaatttataaacatgggcataaacatctaaaattcctaatctttaaagaaaaaaaatacaaaaattaatagaacaaaaacctaaattcaaatctaagtaataaaatgtcttaaacttaacaaaaaatttatacatcaaaaaagaaattataaaaccagatcttaaacatagacaagcaatatgatattgtaatttctcatccatcacttcacttgaatttagtcctaatcatcacactaatataaaaattaaaaccacaatgtcagatatatatataaacaaaacccataaatcttattgtcaacgagtcccataaacccataaatcttttaagaaaaaatatacaaaatatttaatctgactatgttcgttgatgatgatggctcttggacaatggtaacctgtcgttggggaagaagaccggagacggaggtttgcgtgaggctcgggccgagaaccagagggagagaatgaaccatcatgtttgaagtcatcctctgtcgatagatgcaaacgaagaggctgaggtctattggccactggtcaccatttgggtttctgcgagcactagggtggccatctttgcctggcagtgtcgtcgtgcaagggaagagagagattttttggggtagaagagggttgttgatggctagagccagctgtggctttccatcgctgcaccaaaaaaacataggggagacaaagagatagagatcgggaggatgagacagagagaggaaatttaagattgtttgtaagaaaaagtcaagtgggaatggaattagggtttcaacacattctttttataccatatttatttttttattttatttttctcttatttcctttaataaataaattaatagaaaaaaaaacctatagctagaatacggtgcgtgtccagcccatttggtacatgtcctcaattttattttattttttaaaattttatatt

SEQ ID NO: 40930 - DNA, 1328 bp, Cannabis sativa
ttgttagttcagcatagaagatggtcttttatgataacttgaaatcaagagtactttgttcattgtggatgtcttttattttcttgtgcaaagttacagagtttctttactttcatatctcagaaaaaatatagcattgtattaatagtggttttcatggtgtcccaaaccagtaaaaattatatattatgttacgcattaattatgttattcattgagtaaatgaaccgaatggaaactaattttttttttaagatttttttattgaaattattaatttatcgaacatttattgagattttacaaatggtgactggtgagattttaattcatggttttcatttatttaagtctcggcctcttcctaactctgctggatcctctgtttgtcggagcagccccgcttcgtttggcttcgggggtatcaagggcgatgatggaggtattgtctcgcttcgatttgtttctaaattaaaatgtgctttcgtttcgatttcaagcgtttattattcaggagaactggaataaaaaaaagaatggaaatgagcaagttttggggaacaattttggactgaacgtgaatcagttatatatatataattttttgcttttctgtttttatcaatttgagattatagagtggactgagtttagttcagttcgttttggtttctattgtccattcgtgctttgaatgataccaaaaaaaggaaaatttgtagataagtaactgtaggctgaacccagataaccaaatgatgaaatttcctattgcattcgttcttttttgttttgtttgttttcccaaacagtacctggaagagttcgagtggccataagattgcgtccccgaaatgctgaagagttggcagcagatgcagattttgctgactgtgtagaactgcagccggaggtactttcagttttgttgtttctcactcattgtcgtttgtaaatttcacgatgctaataacaatagcactttaaagtctctcttaatggtcagttgggcctatgttctggttgattgtggtccattgttgatttttggcttgtttgttgtatttcagctaaaacggctgaaactcaggaaaaacaattgggattcagacacgtacgaatttgatgaggtgcttactgaatttgcatcccaaaagcgagtatacgaagttgttgctaagcctgtagtggagatttgttaactctttctaaatttgcaacattacgtagaatttattataaatgtttattgtcgagttatacaaagttattctcaattctcatgacattcacttattttgcatattgtgggcaactcaattttctgc

SEQ ID NO: 40931 - DNA, 1439 bp, Cannabis sativa
aaaatttattttttctgattttaatttttttaatattttaagttatcttttaaatatttatattataagtattaggtggattaatgaaattttgccacgtgtacatttatgtacattgtaacagtctactttgacacttaatagagtaaaatagacagaagcactacagagcaaaacgattgtcgagtctagaaagtttagccataattttttgagtaagaggttatcctaaatttaataaaatgtatatacattaaatattatcaagtctatattttatttttcttaaaatgtgaaaataaattattaaattaaaaaataagatataattgaataattaaataattattgacaaaaatctaagttgcatgcaattaaatattaaatttaaatttataacttatataattgaagacaatttgatggtatcaaattgatcaatttgagttcaaaatacttaatatatatgatttcaaaatagaaaatatgagataaatattattaaaattacatggtaccaaatttataattggatgtacaaagtaccacgtttattacacaatatccatattcaaaataaagtaatgaaaaaatataatgaaattaataaaaaataatgaatcaatatttgtaatatattgtttactaaaattgcttgaaaatagataataatttatcttgtttactttatcagaaaaagtaatcagaatgcttaaattgactaaattatctttttgagttaaattatagtatatgataattattttgtaagacatattttaaaggataaaattgtcattataaatttaatattaaaaaataaaataaaatccgttaccctgaatgatattccttaaaaaattagtagaaaaaattcttcttttcctttctctcttatttaattaagcttccctttccaaaatttaataaattaaataaacaggaaatgattctcataccattgattcgcattgcttacaagtaaacaaatgaataaaaaccttttatttattttagagaaatgagaaaatgttcttttaattattgaattttttcttattatgttttttttttaattgatcaaagattacatatataatcttggtgtcaactgttaaatatatctattacctttgtcagcaggtacatggattatatgtatccatcttaataacatttattaactctttaggcttgataatttcaaaataataataaaaaaaactatttctatttctttccctaaaaacttatggtaagaatatataaacttttgaataaaggtataaataaacattgttcaagttgctctgttattgtaaatgactttatcatttaatttatgataacaagtttatttcctaaaaaaaaaaacattgttcaagtttagtaatttgtttgtagcattcagattgctcccacatcttttttctctttgt

SEQ ID NO: 40932 - DNA, 1552 bp, Cannabis sativa
  modified_base (46)..(58): a, c, t, g, unknown or other
  modified_base (994)..(998): a, c, t, g, unknown or other
caaggtgtaagcatacctatcactgattaccatgccagtctaaatnnnnnnnnnnnnnaaatcagggaattaaactttccaacatattagcaagattatattctactatgctgacaacactataatcattaatagaaacatatgttctggacttaatagaatttataatcgtaaaataaatcatatgaaccatgcaacataaattgttatttctgatctttattaaatagtaaatccaattatattgaaatgggttttatatagggcacaaaacccaacatatatatcatgtcctctctcacttttctagtccaacaactttggacatggtgtaatttttttctagtccaacaatattagactagaaaactccccaaaacttttttatgtccaacattaatttttttagacttgaaaaaaggacattaaaaggtttttattgtagtagtgtacgttgccccagcgttcttcagttcaaacggcatgactttataacagtagagtcccacgttggttacaaagcttgtatgttcttgagttgggacatacatttttatctggttatatccagagtatgcgtccataaatgacataagctcgtgctcaatagttgcatccactaactggtcgatcctgagaagtggaaaacaatctttagggcatgccttatacagatcggagaagtcaatacaagttctcaaagtttctttgggcttcgggacgagaacaggattggctatccacgagggatagaacacctcgtgtataaagttgtttgctaacaacttgtcaacctcctgttttagtgcctcttgcctctcagaatccaaggggctccttttctgtctttttggttggtttttggatcaacattcaagtgatggcagataatattatgatcgatccctatcatatctccatgggtccaggcaaactaatcttggttcgccttcaaaaatcttattagcagctatttgagctgctcgtccaggtnnnnnccaatgtatacacattttgtgggattttcttggtcgagaataacctcttccaattcttcaattggttttagcaggtttctttcatcttgaactcggggatcaagatctttgtctttcttctcgttttcttcccccaaggtcgtcatcaactaatgatcgacttttctatgttgttactctaagcgatagcaatcgcgagccagcatctggtcaccacgcactactcccacgccgtctggtgtttggaatttcaaggataagtgtttgatcgaactgactgcccctagttcgattagtgctggacgacccaacaatatgttgtaagccgaggccaggtcaatagctaagaaatcttgcataacagtagcagttaaaggtgcctcgcctatggttaatgcaacatcaattataccaaggctagcgatgctgtctccggtgactccacaaaggtttactatacaaggccttaacttggctttttcgagcctcattttctttagagtttccttataaaggatatttaccgagctcccattgtttattaacactctctt

SEQ ID NO: 40933 - DNA, 2397 bp, Cannabis sativa
  modified_base (842)..(853): a, c, t, g, unknown or other
  modified_base (2358)..(2365): a, c, t, g, unknown or other
tctaattgaagggataaaactcaaaggaagacccagatgttaaacacaaattggaagttatatgtagatggggcttcaaatgagaatgggttgggggtaggagtcataataatgtcgcctgacaacttcagattccactacgcattaagattccaatttgatacttcgaataatgaggcagaatataaggccttgttggcaagtttgagaatggctgaggcattgaaggtcaaaaatcttatgtgctttagcgactcacaattgattgtaaatcaagtcttgggagaataccaaccaaaaggcttaaaaatagcaaaatatttagagaaggtttggaaaaacttggaaaagtttattatttaaaattgaacaaattccaagagaacaaaactctaatgtcgatgcgttagcaaaactggcatcccaatacaatctcgacaagttgaatttggtaccaattgaggtcttaagcgacccgagtatatgtgaagaggaagaagttgagatgatagatgttcacaactggatgacacctatagtcaagtatctactcaacggagaacttcctgcagacaagaccgaggcacgtaaactcttgtattcaatacctcgctatacaatagttgagggaaaattatacaaaaggggttattccatgcctctcttacggtgtgtgctaccgacagaagccaatgaaataattaaaggaaaggaattaatgaaggcttatgtggaggccatacgagttggcaaagcctatcaaagaaaattattcgacaagtatactacttgccaacaattaataaggacacacttgaatttgttaagagatgcgacaaatnnnnnnnnnnnncacatatacctcgcgtaccaccaatagagttgagaatgatgaccttgccatacccatttgcaatatggggcattgacctgatggtggcattacccacagggcgaggaggagcgaaatacacagtggtagcagtcgacttcttcataaagtggacagaagtggaacctctaatttccataacttgcaaaaaagttctcgacattgttattaaaaacatcatttgcaggtttggaatcccaatcagaatagtatctgacaatggaactcaacttgatggtgagctgttcactgagttttgtgcgaggaataaaattattaaaagcttctcatcaagtatcaagacctcaagcaaatagacaagtagaagttgttaataagaccttaaaagatactatcaaaaagatgttggacgctgctaaaggaaaatgggtagatgagctaccacaagtgctttgagcccatagaataacagagaaaatagcaacgggacacactccattttcattggcattcagctcgaaagcaatgttaccactagaggttaacattgcgacccacatgcatgaattttataatcatgaagaaaactaagaacttctgaatatgtccttggatctacttgaagaaagacgtaatgagtcgcaaataaccaatacaacttatcaacattgaatcacgagatattttaacaaaagagtctgaaaaagactttttgaagttaatttggtgttaagacgtgtatttgaaaatacgcgagatccagctattggagagtttaacccaaactgggaaggtccttatgttattgaagctgtcgtgagaaccggggtttacaagttagcttggcttaacggctcgctagtaaagaactacttgaacatttgcgaccttattaccagtaaatttaatatgtaaatgttgtatttatctctataaaaattaatgcttattatgaataaagttaaagtttgttcgcgtaattataaagtttattttctttaaaattacttgggagcatatatatttgtataataactagaatccacctagaaatgtatactgtattgcaaacccaaaaaactaaaaaaaatttcataagggaaaggataattgattaaaattgtctattaacaatataaagtcaagaaattgaaaaactttttctttaagaagaaaaatcaaaacaacagttgtaagtaagattaactcataaaacaacaataagctatatgcgagctgaatacttaacggctcacatcaggtataacaccctaactagcataggcatgttaacgtgattttttaaacgtactgtgcagctcgttgctgatcaacgaggtttatggaaatcgtgattaattaaaatttgctttttaattaaaacttatatattacatgcaaaatagttcgggatcccgattatataaatgctttacaaaagtttactagtcatttacaaacatatttgtcgcctagcgactaaccacaaaagccctgatgtcccnnnnnnnntacgctccaggcctaactgcctcgacatgtac

SEQ ID NO: 40934 - DNA, 1410 bp, Cannabis sativa
cgagtcacccgaagatcaattttctaccaacaaggatcgggagcaggtgggaacacctaaaataacaatttgagaagtgaaattaatcacttaagacaattggatccatcaagctctagcaatttgtgtgatctaccccatgtcaacgcacaaattctgctagctaggcagagaagtgtgggcaaccaggccctacccagcttagggctagccgaccatgtataagtaccagactcggggatggttggccttgagtatactctctcccaagatacagccaaccaagctctagccaatttgaggctgcaactcaatcaaagaaggataatcaaccaggcccctacaccaatagatccttctgtgcaagcacagatggataaaatacgagacatgatctagggcctagctggtctaaaaccttcagaacttgagctggacaggtcaaggggatatccattcccggcatacatcaatgcctttcctttgcccaaattcaagatgacaacttggaagatgtacacggagaaagaaaatcccctagtacacctgaagtactttgagatccaaattgatctccaataagtatctgaagatgtgcgatgccaaatcttctcggcaactctagctaaaatagcccaataattgtatttcaagctggcccccagaagacttaactcttgggaagaattctcctgagaattttgtattcaattctctacttcaagataaattcctgcccgaatagaggatcttgtcgaaataaagcaaaaacaagatgaacctttgaaggactacattcaatagttcatagctgaggccaccaaggtcaaaggcctacaaaagaaggtcgatatacgactgtactcggaggcatcctaccagttactgacttttggaaatatatcaggaggatctcaatgaacaatatggaaaagtttcttcagtgagatgatgccttcataaagttagaagaagctatccgaaaagccttgacaagagggcgggatgatgacaaacaaacacaaggcctcatagcgccccaagcactgccgactagcacagatgacctctgttgattctcaaacaatgagaatggtggaggcaagtgcaacaacgacgactctgaccaacataatggaaaaagaaggaaattcaacaattcccttatgccatgaagcccaaggaagaaggaggggaagagtgcaagcttcactctcctaccaaaactcccaaagcaaatcatgcccagacgtcccaacagggacagtcagcagccgaagggctggcctccatctcttgccaggtgcacagataggtgctagcaattcagcccaaacctccggtgctagggctcgtcattggtagaccccatattacaggcgagactagcaaagttaaggagcgctatgc

SEQ ID NO: 40935 - DNA, 2184 bp, Cannabis sativa
  modified_base (1026)..(1041): a, c, t, g, unknown or other
ccacttggccaacttgtgggcatcacctagcttgtaacgtgccatcttggcatgcacgttaaattctcttccacttcaacatcttgataccctcatcgacggactacaggaaaatcttcctgatctcgactcctaagcttactccaagcttcattcgaatcctaaatctgcacttgttcctctatctctgtagaaccaccctcttagtgacgatctccgttgcccactcttggacttgatcaaagaacctgtgccactattgctattcagaatcagccatggagtagtggctccacccttgaatacttccaccaacatgaactcctctgagtccctcacaatgtccctctagtcaaccaagtagctcttgcaacattgactccgaagctaacacatccttttatagtagctcactcaccaattttccaatacatattccttttgacaaggactaagtatggtgcacccctcggggtgagatttgcaaaccaactgtacccaacgacacctatagaacacgcttccactaaagtcaagtccctccagaaacttcacatgccaactccattgcacactatcttctgatggaaatctagcaagacactcctatcgcaaggttaaatttgatgctctcacctagacgaggctcgccagcaaattgcacccaatgcagcactaagtgcactcttatagataatctctttgcgaagtactcaacatattggccctcccgccctaccgcacacccacggcttcatgcaaaaggcccctctgacccactacatacgtgctcctctgagtttctttcatgaggtcaatgatctaacaatcacccaaaaccataaatttgccctctggctcctcctcgtgttggctctctaacactatgccacaagtccatctcccaaaattaatcatgtatcctcttgacgactcgctaaattttgacaaacttgataacacaaagtcttactcttaagacttgaagtcataccactccactatctcccattggcatatgctctnnnnnnnnnnnnnnnnacagtgtcccatacaacaccagtgttcccataaacataaagcacgcccataacatgtcgcaaactagctcagtcttgatcttagccgacgcccatcaataatgtctgtctacaacttgcaataatcatgcaagtcttcccagtgaacaacccatctcttgtattatttccctctggattcacacaccaaaactaaacaagtaccttgattcttcaaagatatgaattagtgggatcccccccttcaacttgggaaaaacctctctcttagaggaatacctttaaaggtatcgctcgcaagctaactacatactcacatatggtccctccattccaaatgtcactttgatgaagatgttaaactaataccttagtcattttgagtcttcgcccctcggcatttcaatgttaccttagtaccttactcctactgactttcgccttagacaaacattgacatggtgttatcttagtacctatgtcttgtagactttcaccctagataactggcactgcctgtgtcctgagtcttcttgactttacatcctaaacaaaatccatctccatgatactcatcttgatgcttgtgatgaatctctagtctgatgagtgaaccgtaatggtctctcccccacttcatctgatggcatcctcgacaacatggccacatgcgaattcttgactgcccaactcttcatgcacaccatgccatctaaaagtgcatcccgcaggatgtgactctcgagttaactatatcatatagcacccctatcaatttctatatgcatgcaatgtccactaaaccatccaattgattctcacttgaatcacgcccttccaggctcccttgatactaagttccaattatgcagccctctggctttcatgcaaactctagcccccttcttgactttcacaggctcagatgcttttgttgcaccatgtcgccatgtcgccacgcatgttaggaagccctctagacaagccaccaactagttacatacattagacctctgtctctttccaacatggtgcataagtcgcttgtgcgtatgcaaactagcccactaatgactacccgtgtcatctcgtgttgagactcgtggccaaggcgcaccacaacgtctcttggaggttcaggttg

SEQ ID NO: 40936 - DNA, 1308 bp, Cannabis sativa
  modified_base (466)..(466): a, c, t, g, unknown or other
tgcctcgagacgaagagacgcccaatcacaactatggaggttttggagcttggagccagacccatctcatatccggagccatggttccccttcaaaattacttcataaattttctagtttttgttgggcttgcgccttaccaactcattccctaagcatatcgcctgctttcaggcctatttttttatgtagcccgaggcggggcatcaactagcctagtcgaaatttatatttttacgaacttgtgtttgtccagaagaaaggtgataaattttaagacgattttttcacactccgggcgcatcctggaaatgagggtccggtcccttacaatttccaaaagaatgttatggagtaccgtcaccgatttttcttctgttccggctttcaagtagtggaacgcccagaactgctcactgagtgggtcaggattcccccgatgcaccgcaccgctcctacccaactnttccttcagcacgccaaggtcttttccacatatgacaaaaacggtcttaatgtgggggacttggtcacaacggtgaactgcaggaaggctaagctcatcacagagggccaatcggtgggcgacttcaacctctcaaagatcctttgtcccaacattcgcacccctgatgccgaaaaggtactctgggcggacattatcgcctcagcggaggaccgataccaaaagtatctctttaggagggaacaagagctagcttacattaaggctcaaaccgctaccgggaggactctccgggtagaggctggcaaagaccgagtgccgtctcggcccaagttgctgctcccggttcccaacactagggctcctgatgctagcaccccaggatctggtaagtcacccttagttattcattgtgtcccttctgctcaagattattctcgatgtagacctatagagtttgatgaacgtctccttggatttaagatgcctcctacccgatggggtgatcatgccaagggcttttatttttcaaacctaggtcatttttaaggccggtctcggatggggtctgggcctcccgcacatatccttttggatcattcagcctatctgtcttccaggtggttttctccttggatagctttcttggggatgatgaagctagtattgtagtgcaggactttgctagggctgaattagattccctgggtaggattagttttactgctttgtccttgtgcgcataatttcttgtgatcattttgacacttgtttgtttgtttcctaaaaccgctaggccaatggacgagcttttggcaacccttgcccagacttacagtccc

SEQ ID NO: 40937 - DNA, 1272 bp, Cannabis sativa
ggaaatatgaattaatgaataataaagcgtaatttattaattacggagattgtattggaatatgtgggtatcgtagataccataatttgaataaaataatttttgggcttgacaattgtaaaatttgacggggaggttagaaatatcacgacaataaatgatgaattaaattggaattataccggattagtttaaaattttcagttgtcggttttgtggaatagttagaaaatgaccaaaatgcccttaggttatgatttaagcttaagagattttggttgagggtaaaatagtcttttcccaagttttacttattttgttttaatggtttctaggctgattaaagggttagtatgatggggttatattaaataattatagtgaatgaggattaataaaaaaaatagagaaaaatcacatatacttgcttctctctctccttcccttcgagccctagaagccagctgaggtattagggatttttcatctcaattcaaggttttgctagctgaattaacaaagtttagagattgatgaagcattaaggtaactattcagtagttatatttgatttcttaggttttaagttgagttttggtggggttttcatatgaattcgggttgtggttgatgattgagttcagagtatatttgtgagtttaatttaaggttgtttaagtatatttgtgatattcttgtgagctgttatgtttgaatttggaagaattgagtttatgaactcaaggttcactcaagcatggtgatttcattatcttgttgtattattgcgttttgatgcttgctacatgttatttttatgataataaactgctctggaggtgttgatcaggtttgaaaaagtttggggaaaggaaccctagatttcttggtctgccaaaatcggtcgactggttggttctggtgtaccagaaccggtcgactggatgctaataggggaaattttttgggttttccttaggatttggttttggctcggggttgtatccagtatctattttaggttatttatgtgtagtatggcatgttatggggtgttggagattttgattaaagtatttatcaagagttgttgtcgtgacataggacccgggattgtcaagcgttgattccagttagacgggatgtacgctaaacttctggactgagataagaaaagtattaaacaccgtatatggttaacgttatgattgttacagtcttgattatgatcaagatcccgttatgtatttgttgtgactcgattatgatcga

SEQ ID NO: 40938 - DNA, 1696 bp, Cannabis sativa
ggacttcttcggtctctgcccaccctagttcactcctaagggcattgagtatttgtctgccctcttcgtcctctgtgcttcccaaggatggggtactccttctcctcacaaagttgcttggttcttcgatttgaagtccacccccaaacaagataggtcggcgtacttctatttctctcaaccaggcttcaagtggttgaccggcacggatgacaaggccatcaacaaaatagagcattttgctgatgagtacttcgtggtaaaggatgtgagcattacccggactcggtttcagcagattctgacatataaccgtcctcccctcactcttgctcttagggatagagctcaaaaacttgttcggttgccaggggaagaccgcaatattatccagttgacctctgatgataatcttgtgaggtacaggctttatcccaaggactttactcctaagtccgtggcggggaagaagaggaaatctgatgctgtccggaccgaatgaactcatccagagaatgagttgattcaactgaagcatgaagctaagttgaagggaggttccaaggccaagcaatatgctcaagagccattggatcctgaagatgaaggtgaggaagagcaggtgactccactgaagaggaagaagaaactcccgacctcgcccaagccttttgaacatgcaattcgcataagggagcccatttcacctgctcggccatctcctcccgtgttcggaaaagggaaagctatcatgtctgagataagaacgatgtcaggtgatgatggacttctgagtcttgtgcaaggtggtcaccttgcattttactttatcttgctcttgagcttcttgattttcatgccatgtgtttctgatggctgtcttgtaaccatactggttttgttctgtgcagacatgtctcggcagatgatagatgttctgaggaagagaatgggcgaaagctctagcgcctctcctccggccaagaagtctaagggcggtaaggggtcttcttcaaaggaaaagagacctttcgaggaggttattgatctttccgaggagctgactgctgcaaactcctctgcccttaaagctgccatgtcaaaggagtctagaccaccaaagtctgggtctgaattggtcaggagtgatcctgaacgggtgcaggcaccaactccacctttgctagtgcttccaaaggccaaaaagggcaaggagatgctggcccattacatgaaccggctggttgcagaggtcagtgagcaactggctggtgttgacaatcactcttatttgtatgtgctggtgggcggagtcttgaaggagttcaccaaggtatgtgttttttatacttccttttaattttccacacatagattaatatgataaagtttttcctctgtgcagggaggtctaaagttggcctacacttactcctgggctaagtctactgcttccaagaatgtggctttgtttgacaccttgaaggtgaaggcggacttggccaagaaggaagctgaagaagcgagggcgaaagctggagctgttcagttggagttgggcgaagccaagaagaagttgtttgccgctgagaagaaaataaccgtgttaactaaggatctcgaggttgctgaccattttgaggagaccatcaagattttatctgctgaggtaaacagtcttccagatgagaggact

SEQ ID NO: 40939 - DNA, 1745 bp, Cannabis sativa
aaattctttatgggagatatggtcctaagaagggtatttttgaacaccaaagacagtatggcaggtgtgctcggaccaaattggaaaggaccatatcaagcggttgaagttctaaatcaggggcatacaaatcgagaaactatgacgaaaagatgaaacttgttctagtaccaaggtattggaatggggaacacttcaaaaaatacaaccagtaaaagtacgaggtcggatgaccaaatcaagtacgaaataaaaaaaacatttactcttaagtgaatggctttctaggcggacaacgcccaaaggttcggataaaattatcaagtactcacgtcagatgaccaccattgaaagtaagatttttttttctgcaatttgttttgtttatgctaagctaaagatcagatcagatcaggataatagctttgatgtaggttactactgtaacagacatttttttctcgaccaataaatgaatagaaatgtttatttaaattcaaattgagtcgagttcattagcatgctacaaatttaccatccagtgcgtacaaaaggtttggtcgtacccaaaaccccgaacagacaaaaaagaatacttagaaaaaaaaaatgtgaccaagagtcaaaagtctgctcggtcacttaggggcacctatacctatacaaagcattttgtaaagaacaaaaacaaaacgaacacaattgcatgatgattataaacaagggatgaaattcatttaataacaaaagcattcaaacccaggattaaaggctgtccggtcaaccagttgttcaaaaaatgaaaaatatattccaagtttaaataccgcttggccggtcatcttgccttaaaagaaggcctattggccaaacagacataaaaaatatagtaaaaagaaagcaattaaatagccagagtcctaggatccttgtacgggtcagctagatttgaaggggtcggaggatcattgtcatgagcagaaggagcctcaacattctaatcggtaggagaagtggaagtggccgcctcgagatccccgtaggctgcctgagcagcgcagtatatgagaaacatgtgtttggaagcgcccaagtaatcatagtttgccttgggattggccttccaaaagtcataaagttttcgagaccaactgtctctaaggcattcaccttctccccgagcctcgccacctcggacttctggttctcaacctcagtcttgagttcctcttccttggccttcttctcatcctccagccagcggagaagagtccgaagaccctctctttcatcttggagactagtaacatcctgagacaaatcagcctcgagttgctcggttgatggcgcctcctgcagatccttggtcaactcagcaactctggtcttaactgctagaagtttcttattgacctcacctagctctatccgcacgaccccatgttgaacctgcacatcctcggcatccttcttggccaagcccacttccgttcgcattgtgttggaaatggcaaggtttttagcagtagctgacttagctcgggaatagtgtgacgataattataaacactacgaaagtatacgcagtcaagtagtagctcagagaattggattaactactactaaactatacctataattctatttggcaattcgaaaattattatgatttaaagtaattcacaaaacttaataacacaatttaaagttaagcaagatgagatgatagggaggagaatcctgtt

SEQ ID NO: 40940 - DNA, 1356 bp, Cannabis sativa
actaacaggggaaccataaaagcaagtaaaatgccatatattatcattaatatttacaatatagtcaatatgattagaagaagagtttataacactaatattaatatcattatcccacaaaagaagaaaccccccaccaaaatactgtcttgggacttcaaaaccagacacaaaacctaaaggctgcctaaacttatccacagagagagccttcagcctggtctccatcaaaaaaagaacattaggccgatgattcttgaccaattgggagagacgattgaatgctcgaggactccccaaaccttgagcattccaactcataaagctcatttttctgggcgggtgtaatctgcatcacccgcctgttcaaatgtttcaacagaagagacaccatcagattcagactcaccagcacgagctcgcttgagcatggaacgcaaagaaccaccaatttgagcttgaaaaggctgaaaacatggcctttttacaccagaagcacaagccagccctttccctttaacttgcggatcaagccgcaatgcctcctcaatagcagcctgggaaacggcctcagcatgtccaaaatccaaacttggtattgctgcagccaatgaatgagcagcatggaccatatcgggggtaacagaggcaggagtgtcactgacaatagtggagtcagtgacaacaggttgacttgcagagagatttgggttcattggggtgggaatcataacactagaagatctcccaggagcactcaagctagagagagaggccatttgagaattaagcagtgaggtaaaaccaacagaatgagcaaagaaagggttgtttggttgaccctcatgaggaaagtcagtaatatcaagatcagctatggtaatagctggagcatgagggtactcaaaaggcaaaggtttctcagataatttctctttgccacaaagtaatctatcatagggacagtgtggtgggacaatggactcatcacatttttgcaaataagcatgacaatacttcttagtatggtcaagcttgccacagtagaagcaaaaatcaggtaaacgctcgtacttaaaatctagccacttagtgaactctctacccattttaatgaaaaaaatattaattcccctcctaataggtttgttaacatccaacagatatctagccctaagataaggcccagtcccatccttaagagtagtgctatccacttaaatcaaatcccctaccccagtggctataagcttggctaaatcataggatttacatctaaaggggatcccatacacctgcacccagaagggcacataatgcagctggtcaggggtaataggaaaggaagtatcaggg

SEQ ID NO: 40941 - DNA, 1686 bp, Cannabis sativa
ttctttgaatactcgctattctaattagagtatttgctttttctattttatttttctaatatttgcacacattttggtattgtctaaattcttcctatagcagtgtttaattaattttacattttgtacatgatcatatatgttttatatcatacatataaatttctaatagatgcatcatattcttaccactataaaagctaaaagcaaaattattcaagtggagttagatattcaaatctccataaaagtcgtacccaccttgtttggttagaaacttttgattgcatttgatcatgaatgaatatatataggtctatttcaaaagaaagcaagtactctgatgggtctttatgatgtggcatcccggtgaaataaaataatacttacaaccatcttttctaaatcctcgacaagacaaccaagagtcaccatctcgtgacaacaacttgcttgcctctctttgatagtttccctaatgacacatctatcagttacgaaattaggggcatgtgttataatgcgaattttttgcctagaaactcgagatgagtctcctataaaattgacatgtggatccaatcctcaagggatagatgagctgctaattaatgactctacgagagttgacctcgcttgaaccaaacttgcgagatgatacgaccttgacaaggtctaatcgcatgctatgctttgcatagtgtaagacaagtaggaccgagagggatttatacaagtcgagcatatataaaaaatatatgcgatgactaagtagccttcctctgtgactaagtacagatcgcctctttaagaaacaattggtccaaatgataaaacgtttttgatgactcgacagggacacgcatatctcatgtcgtcgacacacaagatgtttgtcaatgcgactcagatagaacgtaggcatgctagtcatgttaggctgattagcccttttatgaatatagaacgcacctaaagcccacgagcttgtgcgagaatatgaacagacaacgcaccctataggtcgcataagttgcttcatttatagaacgaattaaactgttctttatttattcttgttgtttattgtaaaacggttctatagtcaatcagtgatgtataactagaaggatatacttgctttttatataaaggtgtgatccaagatgaataaactaagcaaaaatcacttgcaacagtagactaagcagaccgtgatctgactgaaccactatatttctctgtgttcattttatttttccagttgttctattatcttgataattttctttgaatactcgctattctaagtagagtattcattgtttctcttatatttatttattattcgcatacgttctagtattgtttaaattctttctacaatattattttattaagtttacatttttgtatatcattatatatgtttcatatcataaatataaatttttaatagatgcatcatatttttaccagtgacttatcaaaaaaaaatatattcttaccactgtaaaagctaaaagcaaaattattcaaagtggagttagatattcaaatctccataaaagccgtacccacctcgtttggttagaaatttttcattgcatttgatcatgaatgggtatctatatataggtctattgcaaaagatcacacgcatatatatatagatactatatatat

SEQ ID NO: 40942 - DNA, 1395 bp, Cannabis sativa
tttctacttaatttccttacctcaatgtggagtcttagccttgattgcaatagtggcccttgagaaccaataactggcttatgagaaacctagactttatactcattaattagaacatattacagtggtatatatacgaaaccttaatcttgaatctaagaacccaaaattatagaatgctataccttaattagcttccaatgagatctagttgagcactagaacttgaacgtagaatttgatagatggtgatgcaagtatgatgaaagaaagatgtatatacatatatttatgagaggctggctgtgatagttatgagaggagttgatggcggatggtagtaatagttttgagaaggtgatggtggcgtggctatagtggtgttggtggtaaattggttgatgctgaaactagctaaagaatgctagagtttccaacttaaaacaactaatgaggaagaaatggtaaatggtggttcgactatgaatttagtatgaactagagtgagtagtttgagttactttctatgatgaaacacaaaggttccatctatatataggcctaaaaactaaccacccacatgagtagccgtaaatgctagattcaaaatttgaattctaattgttaaaatgtataatggagcagtcataatatgacacatggtttccaagactcatccttggtgctctcttggttgaagcttcaataaaatatgctagagaaatttgaaacaaaagtgttacgcgtatacaactcatcaacttatcttttactaagtctctttgttttgaattttaaatttgctcccttaaaagtctccaatgcacacgttcaaagaagtaaagtgcttaactaactctatgcatggtaattccactaatctattttagctccatctttttctaacttgaaaccaattcaacctattgacacgtttgttacttgttactaatgctacttctattattattaatccttatgcctctcttatcaatatatttatatatattattattattcttatacctatatactacataaaaaaaaactacacctacgccccaattatatatgctatattgctacctcaaaataagacatattaataataataaccaatattcacttactaatacatgaaatctaaatagctataataaccttataataataataattaggaaaaaggatattaatagtaaatgacaataagtcacttcctaattctatatgtccgacatgtacatagtgactaagcaaaaaggctcattaaaagaagtccaaattaataataacgtaattctcacaatttacaaaaataccatatttaatgctatcactatttccacattaaggtatctagactaactaaatattttggtcattacaatctac

SEQ ID NO: 40943 - DNA, 2232 bp, Cannabis sativa
tcatgcatatattaaaatgttcaattattattcataatcagaaatatctttacaagtttttcagggcataaaccataacaatctcccacttgtcctaaaaaaaattgggcatctatcttaatcccatattagttatatgacccataaaatatttcactggtagcatctttgtgaatagatctaccaggttatgctctgacataatcttcaagaccgtcatatcacctctctctattatatctcttagtagatggtactttctctcaatatgtttgcttctcttgtggcttattggtgttgggatttatgccatataagcaagtaattaatggataatatattatagaatatatgaaatgtagttgtatgataaatgaatatattaattatagaagtataattaataaatatcaaaaaaaaaattattcatttagagatggtagaaccttgtaaggtcatacaagagaattaagattatacaatatgaataaaataagtcagtagtgtattaaagtaaagggatccttaatatggaactactaattatggtttactaaatattatactctactgtgtgtggttttgatttgaatcacatacgtggatggcatgtagtaaaggtgtcgtgtataatttaattatagatgactagactgatatgtaataatatctttcattaacatgttatttaccaaaaaaataattattcatatcacattgatggtcattggtaggtctctctgaatcctgagtattcatgaactcatgtttgtgttcattaggttttttaattcacccgttaatatttcttagagaagatgattcttacaacttctgttaggaaatctaatagcatgagtggttgggaacatgatctacaataatggaatccaagctaacctaatggattgaatattagttcccttatagtgttagttttaggagtgcgaccaattgaatctaaatctataataagttatagattaactattcacattgaattaatgatacataaggagttcaagagataattagaagggtaaatcgatatttttgagaaactttaattatgaactagtaattggaggacaatctacttgtaatgattatataaatggactactagtaagaattttgtaaatataattttatattgtcaaagagtgcaattctatatttatagtggagtaataattgaattaataagttggattattttattgatgagacttaatagtaatcaagtgtttattagagctttaaaatataggttcatggttcccagatcacctctatacaatactgtacaagggaagatataatttgtaagatgaattgagaaataattcatttttaagacaaataattcttgagggcaaaatagtaattttgtataaattattattttgtataattatgtcaattatgagttgaataattaaaatagaatttaactacttagttttatttgataaaactatattaattagttacatataatattattgttaaataatattataagagagaagcttattattttagtagaaaataataattatttaattcaagttaaataagaaattaatgagaattaattaattatcttattcaaaagaaaaaacaaaattgagaaattaattatgggctctaaaatatggtccgcctatagacccacacttgtaggtaaaatataaggcctaatgaattttattttgattattttattaattaaataaattaaaataaaataaagattatttttttaattatttgaattcaatattttattagataagatatttaaaattaaagataatataaataaaaagttaactgaatttagttattcagttactgatattatatttgaacttaaattttaaattaaatataatatattcttttcattttaaaggattaaaatataaaattatgaataattatatatgtgatatataggtaatacacaaaaaataatatagttaataagacagaaaatataaagaaaattttatacataattttaaattttcttgctctatatatattgaattctctctcttctagttattgagaattttatcctcatctcataatcataatgtctcataagttgagtacacgctgtgatagaaattcttcttcttatcatatctataagcccactcttattctgtgtgttgagactgatttagaagactatgctgtgaagtcttcatcattgttcat

SEQ ID NO: 40944 - DNA, 1278 bp, Cannabis sativa
tggccaccttggccttcactcgtcttgtgggctaatctgaaggtcccccaggaagacctctcagcctggaaagcatatctgcaaaaagaaagtagaaaagtcagaaagcaatcataaacattcaatacaagataagagtatggtattatcaactatcaaataccatcttcatcagaagaggaactattagagtcctcaacaactaccttgcccttacctttagatgcaggaacagggcgagtaggtcccttagaagcttggcctctaggcctaatctagaatgaaacatcatcaattggaccctcactggcctggttccagcagagagccctttccttcttctccagattctacacgctgcaagataaagggacctcatcatctccaaccgagactttggcaactccagaagtaggacgatataagtcatacttctagaaattggccacactggtcaacagagttatatttctttactctgctaggagagacaggatatgatttgccctatcccttatttgcaaagtaaggatagagggtatgaagatttgcattagtcagaatttgtagtgcccaatcctacggaggccatatctaacgaagttttaaattctaaaggctcataactattcctggtacctttaaaatactaatctgtattattgtgacactatcttgaaaacctaattatgaataattaggagttagtatatattatgggttaattagagagtgatgagcaggattatgatcctactaatttaattcagcgtaaattataaattttgccataagtggattaacaagcataatctattaattatagaaatttatttgtaatatgtaagtattgtgtgaattatttgtataataaaaatatttcatattttgtgatcttggagacccgatcggaggttaaaaataccacaatgggtttagttgaaaattttgatgagattattgagataagttaattatagaattattagaatattttaggatactcaggtttgacaaaataccctagggttagaaatttctgaggggctaagaaacgataagtaatgctttattgttaattgttataattattataattattattattattgttgttgttgtttttgttaaaattttcaacttatatatatatggaatacttcttaatggctattacccattgatgggtaataaacaaatttaactataaacattaattttaaaaatattaaaccattagattttagctcgatagtgaataataaaagagaaatttga

SEQ ID NO: 40945 - DNA, 2228 bp, Cannabis sativa
tagtaagctatgtctctataatattcattgtgaaacaaaagacataagctagaataagcacaggaaaatagtaatgacatataaactcacttataacttgagcttgaactcacacgcacactatttaaaagagtctttttgtaatcattctagttgtacgcctcgagaacatgttcctccacaatttcccaccaacaatcaacaaacaaaccattcacatcaactgatttaagtacccttaacagcttttgtaagccatctggatcaactggttcacacttcatattaacaaccaaaagtaaagaaaaatttagaagaaatttaattataagtgaacttaaaagtacccggaaaaaaattaatatccaaactaaataagtacatgtatccacaaagtaaccacagtataacaaagttctatttcaaatgatataataaaagatgaaaccattttatacccaagaataaaactaagcacatccaaaaggcaaactctgttacaatagaaaaaaaatgcatacataccttattaattgacaaaatagtctagcctgacaggacaggacactcggcaccaaactgagtcgaacaaggtattcatgaattgtcaatgaatgtatttactctgtacaaagcttctggctttttacactatatgtctcacatatggatttttcacttcatataaaacttatgattttttcactatatatgaaaagtaatgaaacaaagaaaatcaactactactacaaaccaacctagtatatttttaaaaagataatacttgaagagttttagaggtcatacagagataaatttcttgtaatctgagcagggtacattaactatatggatattagaaaaagagaacaaacacaagtgaacacaatcaatctcatagtgctaaaactcttacaaatcaagaagaaaaacataatcaaacactattattatacatgtaccaacaacatgaaatttctaacacacaacaaaaattatacaaaagaaaagtagagccaagtagatggaaaattaaaattctgttaccaataaatttgtcagcataaattttatgtagcatactcttgtttaaatgatctttgatctcacttcactattactatttgaatcttaaccttcaagatccaagacaatgatttaagtctacaagatgaattattaacacccaaaataataaattatataaccataagtttattaatagctatgagaacatgaatatgtacaaatccatctgaagtagtgtaattgaacgtatctcctaaatgaaattccatattatctggtatcgctacaatcacaataaaaatatacacataacaaattaaaaagcacatcaattgtatgaacaacataaagactaatgagcaataaaattacatggtttgaaacaaatatttgaataggggaggtagcattgacgaatctcctaccgacagttgcaaaacacaattgctctaaaacctgctactttggaatcttctcctcgatcatacaggtatccaaaacaaataaaaaatagggaaagtatattggtgtatccaaaaatcattcggattgaaaaattcaaaagtatttaataacacgtaactgggagcaatggacacagccatggcattatttactctctatagcagaatccaatcaaaattaattcatcttttgacttgctactggttgcttctgtgtcttgaaagaaggaaactataaagagttgcttcgagaaaattttagggtttatttgattatattcgatttgtatcgaatttctttgaagaatcgcttcatcacaaaaccccactatacaaatcattgagtctggcgataaacttgtactatctacatgactttcgataaaatcgttaaaaaaaatacttaatattattaatcttatttatttgaaaatattaaagtaataaaataattataattaattaaactaacagttttgttaactttagcggagaattttttttttgtaataaggagttaacggagaaaattaaaagcaccgttaaactaagaaaagaagttaagatagttacttttaatatataaagactaggtaatatagtcgctctttgcgcggctgttaatttaattttttagagtattataataaatagttacttaaaaatataattataatatatagtaaaattattaatatattatcttatttcatattattattaataatttattta

SEQ ID NO: 40946 - DNA, 1362 bp, Cannabis sativa
ggcattactctcagcacacacctccagttctgtcgtgtgacaatcaaagtgcccaatctcttgcattaaatcctgtctttcacacaagaacaaagcatatagagcttgatgtccattacatctgagatcaaattgctcagaacaagctacaagtctgctatatacctactcaagatcagactacagatttattcactaagcccttgtcttcccctagatttcagtttctatgtaacaagatatacttagagcattccaagtatagcttgagggggtgttagtgaaggtagttaggtagttaggaattagttatttcactgtacacgttagttatttgtgagctcttttttcctaagtgtattctgttagttgtattaagcttggtccgtatatatataaaacttcagagagtctgtgattttaacacagctcatttcatcaatctcaagtgtaatacatcaaaatataaatattaatttttatatttacatatttagttttatgcattttttttaaagttatcaacaaagtaaaatcgtaaactttatttataaatattcataaaattatgtagttatattttttttgcaattttttttataaataatattcatttacttgtatattaatgaaaattgctcccaaaaaaaaaaacactagcaaaaacattttatgttatttgcccccattggaataatattctgacattgtggaactctagtgtataccattccagtattacttcacacttcccaacccaacatttaagatttttcaattaagagaaaaaagaatgtaacatgtcatttacttttcttaatgaaaaaaaaagtttcatgacaccactactagcttctgaccaagagaaaacgttacacatcaccttctttacaagaagatatgcctatacagcaaaaatgaataacagaatagtgacattccaagtactagaaaacatctacatatgtcaactatgtgaattatcaaaagccttcaagagacattcttcaatgtacaaacacattcatgtggttacttcttccccttccaccaaccgcacctgtaaatagtagaaattaaacccatcaaaatctacataattagatctatatacaaacagatcattaatgataaaaggtccttccaatcaaccatatgataaaacattgttctttaaactctaaatattttctcaactgacagctggatcataatcttcttaacgaaacatgtaacaatgtaatttgatgatgattagagtcaactcataacacctaaacagcacaacagtttctgtctgaattaaagataagagcctatatggaaaagaaagaataacacattgttgagaatggatcatta

SEQ ID NO: 40947 - DNA, 1113 bp, Cannabis sativa
  modified_base (361)..(364): a, c, t, g, unknown or other
  modified_base (591)..(594): a, c, t, g, unknown or other
tagttcgggagaatttttaacggccaaaaaagttcaaggggcacaatttagtacatgttaaagttcgggaggaaaaattactaattagcctttaaaatatgcatcaaatgtaccaaggaatgaatttagaataagaatgaatggacaaggaatggaaagagaatgaaaaagaatctaagattgaatctttattagtttaatttttaattatttaaataaatttgaaatagaagcccatgtaagcaagttaccctttcaaaagtttgaaaagtcaaaaaaataagttaaacctagtcagcgattctcaactatttgggaggaataaaaatatgggaatgagaatgggaataggaataggaannnnatggaataaaatttaaaatgcatacaaaaaattgataaaaaaatcattaatttttttttcttgttacattggaatggtcattcctttctttttaaaatggaatagctattccaccaaaatgatggaaagagtattccattggaattctattccaatactttaaaatgcaaccaaacaaaggaatggaataaaaaattgttttctttccattccattccatttcattnnnnccaaccaaacgccacctaagagttaaaagtaagagtttcatcgatagatatattttatgggttctattttaaccgaacccatatttaaatatacatatatatatattcatacacttatatatatatatttaaatacacatgtatatacatactcacccatatatacatacatacacatatatatatacaaaagtacacatacaagctcatatatatccacaaaacacttgtacatatatatatattctaactatacacatatataaacaaaattaaacctaaattaatatatacaaaattaaacctaaattaatatacacaaataaaaattagaagttatcttgattaaaagtgagaaattcagaagtggaattggaggctcggttaggagtggcttgaggtgcaggcggtggttagagttatatttcattttttttatttgtctaaaaaattaattagagagggggagagagattgagggtaatgagagagagagagagggggggggggggggggggg

SEQ ID NO: 40948 - DNA, 1825 bp, Cannabis sativa
  modified_base (549)..(552): a, c, t, g, unknown or other
gtaaaataatttccaacattagcatggttgccccccaagtgactaagtaggttcacctcttaatcccttgttaagtaatcagggttttcacataggaactgttattgtcacgggtttgccactataatttcatacactcttgaccttaaaggcttgcaatttgattcaataacaatcatacaagctacgtcgttatatgaaaaataacttgcaattttttcttgatgaatgaaatcggcaaacatgccttattacatcaaaagtgggcaattcgtgccttaatattatcaaactttattggtaggtatgatgaccagctatggaaatacactttgcgggtacaccaactaacctaagtcattactgaaaagcaacttatattggtagtaattttgtaggtgcgttccgtttcaatggaaagtctctagtactagctttgtgttggcaccgtaacatgctaacttgtatattccatgtgggatgatcataactactccatacttggcggtaagtcaccctttagcgggatgatgggttatcatacccatnnnnaaggacaaggggaatgtcgcacgtggctgaagattgtatcaattaggaggacatagtcatttacgatgatgctttgtttaactttttttgttaataaagttgtatccaccattatcttcgttggccctctttccattgttaaagccatttttattattactcccctgaccctgggagccttggccactagtgcttgcttcgttcttgtttcccttagcttggttgaggcctttggcgttccacttagcctttgaccaactatggaaatacactttgcgggtacaccaactaaccttttagtgattcgccgggcctttgtttgatggcaactaagtcacccaactctgcaggtatctgtcggactgaagagaattgagtatagaataacccttcaaactcatcccaagaagtgattctccctggaggtagcttagtaaaccattgttttgccgtgtcagtgagggttgcagggaagattcgacacctgaggtcattcctgattccttgaaggtccatttggattttgaaattctcaacatgtgttaaggggttttcactacccgtgtacttgcaagtgggcattttgaattttgctggaatggggaggtcattgatcacttaggagaaggcagaccctctcctcctttctagctccaagtcggtgaattctagtgcagtaaggtccttgaccaatcgggttaaattgtccaaccgagcccggatcactggatctgtggctgtttggggttgagcaacattaactccagcattcacttggtctctttgagctggctcaggtggatttactatgttggaaccgtagttttccctatttctgttgagggtatcccaaaggtctctaccccctcgggggcctacacattcaaatactgaaccagttgttggccttccttctgcattttgactgtcagcccttccatcaatcgggggtggtacttggtcacctctacccctttagggtggattctcaggttgatactgcctattaggggcatacgaccctccagcttgataaccctgttgggattttattccctaaataaaatccatttcaatgtaatctaatttgtcatcaatagaagattagaagtcatttatgtttacatgtaattttcatgtttatggtttaatgtgtacaaaaatttttaattccagaacatatagttgctcacaattacagtgatatcaacacagtggaagataattgtgattatatgcttcaaaagataatgtcccttgattcatcagtgca

SEQ ID NO: 40949 - DNA, 1490 bp, Cannabis sativa
gataaacttagctaccctagagtgctcattgaggtgtccatacaccaggagttcccacataccatttattttgaaaatgagcatggaatgaatgtgtcggttacagtctcttacgaatggaaaccaattctttgcaagaattgtaaaggaatgggccatgagacaattgagtgtaggaagaaagacaagatacagcaagaatgggtgatgaaaagggatgcaaggaagccagctgtggttgctgttattgacaaagagaaaacggaggacttccaaccagtcactaaaggctggaaagtcaggggaaaagaaccaccaaagcagacagtgatcattaattccttcaatgttcttgagcaagaaggagaaggacatgaagatatggtagcagaaggaattataacagatggaatgcaagagagtaatacaagagaggggggaggaccctctcttgccaatggatagaatcatttgttggaatgttcgggggataaacagccagcaaaagcaaatgaatgttaagcaatttattgcaattcaaaaagctggtcttcttggtcttcttgagacgagggttaagcctccaaaacttggagacttataccgaagaacgttcttaggatggtgttttacatcaaatttagcttggcataaaagagggagaataatcattgcttggaatccacttcttttcaatactagtatcatcaaatgtactagtccattgatacatcttcatgttgaaacggtaaataaaaggtataagttctttactacctttgtttatggtttcaatgatgaaaatgggaggaagattctttggaatgatttacgtagtattgctactcagaaaccatggatagtatttggtgattttaatgatatactctacaaagaaaaaagaattggggatagagctaaggttgacaactccacgacctttttagactgtgtaagtgactgccaattatcagatgtaaagagtagtggttgcttttttacttggaataataaacaacaatcaaaagatagaatctattccaagattgatagagttatggctaatcaatcttggatggatctatttgaaaggggtgaagtagtgtttcttacagagggagcctttgatcatactcgggcagtactgaatatttatcctgatttcccaagtggcaaaaaaccttttaaatactttcgtatgtggacttctcatccaagttatcatatggaacttaagaggatttgggaacaaagatgtttcaagttgtgtcaaaacttaaagttttgaaagtattctttagagaactgaataaagaacactattcagacattcaagcagcaaagaaaaaggcaaggcaagatctcgagaatgtgtaaagtctactacaccagcaacctttaaatgtgcagctggaagctcaagaacaagaagtaagagaacagtttgttaagattcataaagattattgttcctgttgggttttatgccc

SEQ ID NO: 40950 - DNA, 1281 bp, Cannabis sativa
gcagcagtcgttgttccatccgaacttgcactaccatgtaagttcttgtttctacttgaccatatagcccacattgtgcatataataagctcaaaatcaagttgggaatgcaaagtcgaaaggtggaaaaggtaatcaccattggacatttgttgtgcttgtcgaaaatcgaaagagaagccagtgttttcccaccccgatttagcgtgcttgcaagagaataaggcatgcccaatggattcccatgcattggtacacattaaacaggcaggggatcaatcaatcactttcctcctatgtaaggcagcggcagttggaagtgcattgtgcataactttccacgcaaatattttgatctttgatggaagagacaaattccaaaaagttttccaccacgtactatggaggttcgaggatgaagattgatcttgctcatccaaagtggcagctagatggaaactggatttgacagtatagatccccgaagtggtatgatgccatattaatctgtcattcgagggaaagaaactcaatggaattgagagaattttttctgtatcgaggtggctaaaatatgaagtgagaagctcgatgttccactcccttttttccataattaaggcagccacattcaaagatggagggcctgtgtaattgatcggagaaaaatccgtatgtcctagtatccacttgtcaaatccgcattgaatatggtaaccattaccgaccttgtatgtaaggcctttgagcagcaattcgcgtccccaatgaatgctttgctaattgtaagagatgagagttaccaagtcgagcctttaaaaagctgttatttgagaaatatctactttttaagagtctactcagtaaagatgttggcatgtcaaatattccccaagcttgttttgcaagtagagcttggttgtaatgtacaaaagaacgaaatcccatgccaccctcaaatttagacttacaaagcaatttccaccgtaaataaataaaaaaaacatactacaatcaaatatgtaaataaactgtacaaaatatatttatttattatatatatatttaccaaaactatatacattatatatacacatatataaataatatatatattttttatatgtatagaatacacagacaatatttcatatttcaaaaatatacccaaataaaatatatatatatacaaaataacaaaaattaatatgtatacacatataaataaaaggacagagcaaataaccaaaatctaacccacaaatttttcccacaaatttt

SEQ ID NO: 40951 - DNA, 1874 bp, Cannabis sativa
  modified_base (254)..(263): a, c, t, g, unknown or other
atagggaagagaatcatgttgttttgtttacccaattgttaatgcctaaatgctatccttttcttgatgtgaatgatagattatacaattcaacctaactcttttcaaatctcttaggttctaaatcaaaggttctctaattaatctcttaattagaatcacatgtaatcatcattaagcaataatgtaagtgtcacataggttatgcaaatactctcatttcacatagaacctagattatccaattttagcannnnnnnnnntcacttttcagattttgaattaagatcatagaacatgtaaaaggagatcaagcttacacatggaattaaaaacaaatatagataatttcacaaatcaagattgaaggaatgggaattaacattaactaggtaaaactttaaacaacattcatcatcctccctaaatgggaaattagttcataaaaataaaataaacatccatgattaaatctgaaacaaaaatagacataaaggaaaataaagagtgaaagaaagaaactagatggtgcttttgctccgggtcttcaagatcgcttcctctcctccttcattcacttttcgggctgatttctgatgcctttggcaatctgagtcgagtcccttatataggaatgaaggttgtgcctccaattgaaaaagtatcagaattaggtccaaaatcccgtattttgtgcctggtcgcgacccacttaatggctggtcgcgaccacaggcaaaactcaaaaaacagggtttctaccaaaattctcaagtcccgaccatagtcgcgaccagaacaaagggtcgcgacaaggccttgttctggtcgcgactactgattcagttttggcagatttagccgatttttcaccagattgtcccgtcttttcgccaattgactaattttgaaccccaatgcaccagaaacctgaaacaaagaaaatcaagcgtaaaactgctccaaaaaggtgcaatatttgagaaaatgcttattaatgtgacccggaacttaggctaaaaatagcgcaacaaaatttccccaaactagatcctcacccgtcctcgagtaagactaaaaattactatcaactacgctatcaaataatcataatactgctacctcaagttccgtttccttccatttctcaaactagaattttaattccacaaacaataacaattaatttagatgctcatcttatcacacaatgcataaacacaaaatggcctcacaattgaaacaatgttataatagtcttactctttccaatcattccacaatccgatagccaatatgcttccatgcttacctctctccactaatgttgacaacatcctttcggaatcaataggtcttgcaagataaaattttcgggcttaagtatttggtactgagaaaaaaaacatctggtgaaagatatcataagcacctttataacccacaagcttcccaaaaattaaaatttcccgaagtgttcccataactaaccatgattgagagaccaatttttttttttcattctcccaacatcactgaaatttttaatatatttttcatttcagacacatttaactttcttttttttttcaagtgatgttgagtttacaaaatattttttttttcttttcttttacctttctcaatcttgcaagttttctttcttctatcctctcacacactatgtatttcgctcccccaaactaattgtaaagcttatgatattattgaaaatgtagtgaggacaaaattaacagtgtggatacatcttttggttcaatatgtgaagaaacaaaacaggtttaggctcaaaaaggggtaactagggatattcatttcatggtacgcttgaaaggctcaaactatccaaacaa

SEQ ID NO: 40952 - DNA, 989 bp, Cannabis sativa
tgagtttgtgtatgttcttgagataattgattttttgtgatttttttttggagataagttgagtttttggagttgtttatgttttatgttagttttgtttttcagtgttattgatgaattgttaataggttatcgatatgatatcgattaaaaatcaaataggtagttgatagttttagctcaattgggttttcaattttcttcagtgttatcggtattttatctattatttgtcgatgattttgtattggattgtggttgttaattaaatttttagaagtcttgagtttttcgataggatatcgaaattttatttatggtttaccaataatttttcttgtgttatgattttttaagaattttgactttgtcgataattttgcttgtgttttgagttttacgaattttgagtttgtcgataggatatcaacatcgtattgataatttttcttgtgttttgatattttatagttttgagttttttgataggatatcgacattttgtctatggtttatctataattttgcttgtattttaattttatcaagaattttgagttttttgataggatgtcgaaattttatcgataattttgctttggctttgatttattttaacagtttttagtttgttgatatgatatcaacatcttatctatggtttattgataatttatattacgtttgattttttaagaattttaagtttatcgatggtttatctatggtctatcgattattttttgatggtgtgcttactatggtcttttctttatcttttttttagatggctcgaaaattatagttccagcatctgaccattttaccggtcgtgtgacatatagaggtagcagtgcatttaggaagatcaagaataagtctaacgaatacaaattgaatgacacgacgaaggcaagtcctttcgatcatttttggaaggtcggacctctcacattctcttcggtgttatttcaccaattaatgttgca

SEQ ID NO: 40953 - DNA, 2776 bp, Cannabis sativa
  modified_base (53)..(53): a, c, t, g, unknown or other
aatctaagttttaagttaaaaattaaaatgtccaaactttaaatacaaaatantttaactaataaatgtaatttatataatataagatatacacttttattagaaatatataaatctgtttaattcagtttattcgggttaattgagcggtttagaataatttataaaccacccaatatattcattaggcggtttagattttcattgtattatttcgggttgtattttttgtcggtttattcggtttagtttgggcgatttattcgagttgggtggtttgtaaattttattgaacacccctaacagcagtagagaactcacaactaaaaataagtgttcatgactctccaattcagcgcaacaaactggcaatttatgttctctaaagcaatgtgaaacttgtaaaacatgtctcttgtgagcaaattactatgcacaacctgccacattataaacctatgctttgtaagcaacattttgctccaaatagcttgcttgtaagggaacaccacctgctgaagttgatcattatagagtataaagtagagaatttacctttcctcgcagcagccaacaatttatccttgctaaacttcatcctcaaatggcaaagctttctccaataccaactagtatccatcttgagctcatagtcccaaaaatcttctcccttaaggtaaattgtattcacccatttcgctcaaagaatatcatgcttttccataagagcccaaatgaattttcctagaatggctttattccaattagacccattcttaaagccgagcccaccataagccttagcaagacaaacggtgtcccaagaggcaagatgaatcttacttctatctcctttaaatccccacaagaaacccctacacaacttctcaacctccttaataatactttgaggaatgatgaaaatgctcatccaataattccttagccccaagagaacagattgaatcagttgagtccgcctcgcaaaagaaaggttttgagctgtccaagttagcaaacgagctttaatatttttaaggatgacatcacaatcctctcttttccatttggttggcctcaaaggaaccccaaggcatcttagaggaaatgagccttcagagaattgaagaatgtccaacattttggctttctctgttgctttgacacccccaaaaaacacctgagacttggcttcattagaggttagccttgtaacctccgcaaatttagtgagagcctctttaagatgtgtaaccgcagctggagtatacttgcaaaaaaggatacgatcgtccgaaaaacaaaggctaatcaagtttagagttttacacattggatgatacctgaaagtcttcttggaagcctctaaataaagccttcgggtaagataatccatgattagcacaaacagtaaaggtgacatcgaatccccctttctgagccccttccttcctttaaaatgtccttgcactcttccattcatcatcaatgaatacgatgtaccctttaagcaagtcattatccatagaacgaatctagaaggaaaatttaaagctacaagcaactcctcaatgaagccccaatcaatagtatcataagctttactcaaatctatcttgattgcacatctaagagacacccccttcttgccatagctcttgattaaatcctggaagatcaaaatattgtgagctatcgatctattcttgatgaaagccccttgattttgcgggaccgaatcaggaagcacctcagctaatcttttacatattaacttggttatcatttatagatcgttgagcagcaggcaataggtctatagtcaatttctttttgaggaatttccaccttaggcaccaaggaaatcatagtctcattaaattgaactggtatagctctcgtactaaagaaactcttgactgctaggcaaacttcagtacctatttcagaccaaagaactttaaaaatttctgaattaaatccatctgggccaggactcttattgctcgggatactgaataaagcagccttgatttctttgttgctgaacggtttaatcaacattagttgttgttcattgttcagcctattccccattcttacacaatcaagatcaagcctcttagtgacactgctatcactccccatataacctttaaaatgattaataaaatgatcaaccaccaaaggatagctttcaaccaaattaccttggttatccacaaagctggctattcaattctcctccctccttttcttgaggcacacatagaaataagagttattatcatctccctttttaatccaagtgaccttgctcctttgaaccaaaaaacttcacagcagtttctcttgggcatgaaatctagttgatgccatttttttcgcctctaaaaactcagcagaaccagaatgttcttgagttttatgcttagccttttgaagctcatctttagcaacttgatactccacctccatgctgcccatctggtgtttattaaatactttcaaaacatgtttaactcggcaaagcttcaaataaagccccaataaaccaaaataaattcactggttttttccaactctccataaccagatttttaaaatctttgtgttcagcctagtaattgtagaacttgaaagttttaattcctatgtccaccatgatagccaaagaaactaaaatcagacaatggtctgaaatcgtctcccattgaaaattagcttgagaagttgggaacaagtcaagccaatcctcattcttgaacacatgatc

SEQ ID NO: 40954 - DNA, 2347 bp, Cannabis sativa
tacaaaaaataaaaaatattgatcacaaattaatataatcaaagcaacacacaataaacaataataatctaaaaacaaaatataggtgtgaaaacaagttttaaacctcattacagaactctcaaaacccgttaaacaagtttcaaacctgtgaaccttatgaaaccagttgtgaccctataaaaaattataaaaaaacttgtgaaatcataacaaaaccaatttttgcaatatcaacataatagacttaaatcacttagcataatgccaattaggccaaggacccttagagcagcaaaacttaaccagagacaagtaaacaaaactaataaattttacacaagcaaaccagccctttgaaacacataaactaataaatttcacaaccaaaaatacaaactcagtttctttctatctaacaacatgaacaaaattgttcttgttgttctacaaccacaactaggatatacagtaaataacagattaatataaaattatgattgattatataattaacacaatcatagtatacaaccaagttaaaagcttgttctcttaattagtttcgccctacaaataagaccaaattacaaattaaaaatgtcataacaatgacaacaaattaaaaccaatgtatacacaataagtgtcagaaaaatcttaaatttaaatcaattctgttcaattcaactgtgttatctctatttttgcaaaaaaaaaaaactcaaaattgcaaaccctattaaacccttcaacattttcgagagcaaccaaactataaattaaaaaaaaattgaagaacaagaaagaaatgcatactgtagcagtgtatcataccataagatcactgcaatgtatcaaacccatccatctccgatgagtcttctttgcaagaaactagtttttgaggattaatgaaaaaatacattacattccaaatatgatttaagtaattataatagacgactatggataaaaaaatacagggtttttaaccatattttagttattaattattaaattataaaacacgtaaaaatatatgtaactatattatacttgaatcttttcaatataatacccaattatcatgtaaagactaaaaattaatataccaagtaacataaactattatcattatataaaagaatctgcgtaaataatttgtctcttatatcaactcttttattactatattcaaagcaaaattgagtatacccaaaattagatctttgcagacgatctaattttggtaggtagggcgaatttggacgaagctaaagggttgtggcagtgtttggagaatttatgcgattggtcaggtcaaagaattaataagctaaaaacatccatcttcttcagcggtaacacgagcaatggtatgaaaaggggtatcaagtaggctctagggcttaactgtgtgatgggtaacataaattacctaagccttccgctgtttacaacatgccaaaatgatgctaatttcaattttattctggataacctggtaaagaaattgcatgggtggaaattaaaatagctttctaaggtaggtcgtgctactttgatcaaatctgtagggcttgccttgccagtttatacgatgcagacgacaaagctctctaaaaaacttgcctccaaagttgatgggatggtaagagatttttggtgggactgtgagcaaggtaatcgagggatctgccttaaggcctgggatcaattgtggttacccaaatctcatggtggtctaggttttagaaaatccttagagatgaaccaagccctattggccaaatggggttgggatcttctcaatgaggagcaatcattatgttgtaaggtgcttagtgccaaataccttcggggtagacagtttttcgaatgtacggtcaggagttctgactcctagttttagaggaatgtggtgcatacaaaagagatcttgaagaaaggggcttgcacacttattgctaacgggagggatataagcatttggaatgacccttggattatccatgggagagatttctaccctaggcccaaacacaattctcggggggagcttgaacttgtggcggatttacttttacctgatgggaattgggacatctgcaagcttaatgatctctttgacagggaaacagttgacagtatcttaaagggcagtaaaccgaatggtcagggtacggatagatgggtctggacaaaagactgtagtggtgtgttctcaactaagttggcctaccttacccaagccttgggacgggcttccttgtgtaatgttgctccggccatgtggaacaaactatggaattcaaaaatcttggagcgtcacaaagtcctttgg

SEQ ID NO: 40955 - DNA, 1502 bp, Cannabis sativa
ttattgtggattttaagttattttgaaagatgttcttttaaaattactaatttatctaaaaataaatttaatttaatataacatataattcatatacaacgtacgcagcacgtaaaaaaactttactagtatatattaaaagatatgaaaatagtataggattttagtgatgggatcaatgctatgaattgattgaaatcaatcattaatctatatatataaaggagaagagtgaagcggtgacatatcactctaaaattatgtttctctactctccttagttctctcatttttaatagcataaatttataaattatattttactataattttaataaatcaattaaaaactctaatatctaactttaaatcttcaaaatttttaaaatcatcaatcatcatcaatatatataaaggaaaagagtaaagcggtgacatgccactctaaaattattctaaaactatttttctctactttccttaattctctaatttttaatagcataaatctataaattatattttactattattttaataaatcaattaaaaactcaaatatctaactttaaatctcctacaattttttaaatatatataactttaaacttatatattgattgttccttccaattctctctcacgtgttttcatcttctttttctttttgtttttttatgaagattattttatataaataaatatatatatatctctctcactatttcttcatcttctttttttctttttattttttttttcttttgtttttaatgaagattctccatctatctttaatcttatttatttttttctctttattcttttatttgctttaagtttaaataactattaatttttgatgtatacatgacatcttgatagtaacataaatagtaagacctcgattttaaatatttttttataatttgaagacatataaacttcttttttatgttgacaactttactatcatcgatatcttcgaattattcatgatttactcattagtatgaattatttgatgtaaaaaaaaattcatgaaaagtgatgaaaagaatattgtaactttttttcctcattctcatatgatacccctattcttcattatatatatttctatcactctttatatatttatttttagtattttgtttttcgaaaaaattattttaaatcaaactttatatatatgtataaatatatatatgttttttttttttaaaaaaaatgataactttaatttatgatttataaccgttgatattatgttttaattatataattataattataatttattttaaatgtatatatgcttatgatttgttttaattatatatataatttttgttctttcttacctatttatagaccatgcttcaatatttttatctatttttctcttaactagaaaacaaatcgcgcttcacgtgtggtcatattctgtttagtaataataaaattaatgaaattaaatatatattgtaacaccctaacta

SEQ ID NO: 40956 - DNA, 957 bp, Cannabis sativa
gtcatatagcactaggcctatggctcaggttgacatatggtcaacctttgatgtttccaatcaagctctgaaaagtgttcttggcattttttatgtcataaaaagattcaagaaaactcaggaaaaatccacaaagacgaggccctagaagtatagcccaacgcccaagttggcgtagttattttaacaaactagacggacgagtctctcatttccacagaagaacaacatctttgagaattggggagcaattttcccactaagcgatgtcaaaatatcacttagacatccaaaattacatccttaggatgttttcctactcatccaccatccaggttgacgtcatatgtcaacttgagcgttgggatgccaacctggatgctagatgtcaacttggatgcttgatgtcaaccttggcactgggtatcagccaaggcgttgggtgtcaactagggcactgggtcatgactcactcactcaatattgatctgattcacgcgaataaactttaattttgaagctaattcaacgctctatcaagtcttgtctcacacttcaattaaaattctgaagttatcggccccaaaattctctcctgagggagttatgaaaataagcgccagcttacccagagcgggtcctaccattgagacctaggctccaaaaattgatgatcaacatctgaaggaaacttcaacgtaagatcatcatttacaatcaaaaatagctaacctatattttttcattattttattcctattttcaagggtctgtttcagctataaaagaagagctcccttagtttgttattcatatttagaaaactatccacaatgttagattttattttgtacttatttatcatgcttttatgataataaatttgtatttttgtgtcatgcctttgtaattttcgtgttgtgtcgtgtttatgcacatattttttgtagcctcttt

SEQ ID NO: 40957 - DNA, 1831 bp, Cannabis sativa
tgatggttacaaaaaaaatataactattgaaatctctttcatatatatatatatatcttatcttactattataaatatggttaattggtgtgatagttgatgaccaatttatccattttaaaatcctactattaccaatattgctcacaagttcaagtctatttcttgcctatatcctgacacataaaagataaaagatgagctggacatgcaattgtaaagtggaattggaaggggataaagatctgtatactctaatttagtcattattataagagggataccaattaaaataaagtcggtcaatgcaaagatttctattgttcttatccattatgtctctgtttatatgtttcagtcatgttataaaagctacaaatgaataaaacgatctatcaatgaatatagttgagatcattagataatttatcattgttgatgtaattattataagagacaacacccaataaaatgatctaactattaaatcttattattattatctcaaacattactaattaagtatccgtagtaacattatttataagtaacatcttgtaaataattactgatagagcataattattgagtatatattagtagtatttagcattttttagacgtgtcactttatattagttagtattaattctctttaaaagttattatattaaattatatgagacttactacataattatattaatagtgattgacacgtaagagagtataaattactacgagaaattacacctactagaggatggataacaaaagttactgttattgaaaaacttattccacgtctctctcgcaatggagtattgtaccaacgtgtaattcttactgatattgaggtatatttattacaactcataaatctatataaactatataaattaaatttaaattttgtttcagctacaaaatataagattattaattaattatctataaaatctttacaaaagatattttcttaaatcactttgtgtatttttgattcattataaattgaaaaatcgtatacaagctattttgtatggcaatgcaatcaatcatttcagagatacaccttaaatgtttcacaagtctatttaaattccaatgcttatataaagccagtacaagaagagtttagaattgttgacaatcaatttgaatggagcatcaacacttctacatcaattgaggaaataactgaagaaaactaatggaactttgaagatctctacaacttgtattatcttgatcaactagatgcctacattgatacaaaaacttctgttggtaatatttatataattttaatttttatgatcataattattgtcaaattactaatgatatttctttcaatgttaattacagatattgttgcagttgtattaagtgctgatccacacaaggcctggacctgcaaatattcaagaattcctccttgttgatcaaaggtctaaaactaatatgttttatattttcaaaaattactgcatatgttatgttaatatttaacaaaatatatttgtgcagcttgcaaccaaaaactttaactatgtgggacgaactaactgagaccgttggaaaagcaatatgtgaaattcttccacaaaatcctattataataagaacatgcctgaaagttgttttacacaatggttagatttatttcaactaattatttagtattattaaaagtcatgttataatatattttttaaataattcaataggtatatctttatcatccaagcaacaaagttcatttattatcaaccttacgaacattccacaaataaatgagctccgtcaatggtaaactaatttatac

SEQ ID NO: 40958 - DNA, 1347 bp, Cannabis sativa
cgatttaaaattacttgtatttcaaaaaactctaaatagatagttcacagtgccgaaaataaaatttaaacagttacttactacgcgtataaaaaaaacagtcgcatgtgcaataaaatatttaaacctaatttttcgacatagcaaattattcagaattttctaaaaatttacaggtactcttaaataattataatatacatgatcatgaaaaagtggactaaaaaaatttaaaaggagtgtaccgatatgtccctatctatttcaccatttgaaaaaaaaaaattagactaatttttttcatgatcatgtatgttatagttattaacatgccaaaaacacgattcaaacaaccagttgcacatgtgattcttttattgtataggcgtgtaaaatacaatgtttgaacactgctttctatattgtaaattagtttgaattttttaaaattttacaggatgtcttaaatacttatagcgtacactactataaaaaataaactaaaaaattctcataaataccaaaaaaataaaggttcatagaagcacccctttttttttctttataatttcatattaaatttgttttacttattagttgaattattaaatcagttaatacctaatttataagatcttaggatagctattagagtttgagagtaaattttaggatcttattttgtattttaatttttaaactcagataaattagttaataattagggtgattttacaatacacacttttaaaagggatgcattgatacaccatttacttattttggcattcagaagaatattttagtcttcttttttatatttatgtacgttataattatttaagatatcttacaaaattttgagaaaatcaaaataatttataatatataaagttgtgttcaaataatctttttcacatgtgtataaaataaagtagtcatgcgtgtaactcactatttgaacctatttttcgacgtgttaaatttatttgaatttttcaaaattttaccagatgtcataaataactaacgtacatgactatgagaaaaaatttgactaaaaaaatatttcagataacaaaatatatagaagtttggtttgggcttccacaaacggaggcttgggtccagttttagacgttgattaccttctggttatgccacgtgtctttccttcgaaaacacgaataacagcaataagcactactggtgctctttagtaaatctatatatatatatatgatatatgatactatataaatgtatgagtctacagaatttccgttttcctgttttaacttttattgattgtttttatggctaattagtaattttttcccccgaact

SEQ ID NO: 40959 - DNA, 1342 bp, Cannabis sativa
  modified_base (42)..(48): a, c, t, g, unknown or other
  modified_base (173)..(178): a, c, t, g, unknown or other
  modified_base (1301)..(1310): a, c, t, g, unknown or other
ttatgatttgttattatgaatatgtatatggtacttagaatnnnnnnnatggacacaatatgagtttgtgaactgttatgtagataatggttgttttgacttgtatatattgtatgttgtattcatatattgtacgctgtatgttgtaagttgtatgctaacgtctcaggtannnnnngggaccatggtggggtatgatacagggtaaggccgtcgaatgtagagataccctaccctgcatttttctgagtcgtgtatgaaattgttatggtgggctatgatatgggataaggccgttgaatgtagatataccttactctacatttgtctgattcgtgtatgtcattgttatggtaaggtatgatacatgtagagataccttattccatagcaatggtaggactaaatgtgtccaggttattgtagggctaagttaggcccaggttgtatatgtagtggctacgatacgtcacattatggtaaagacatgatttgattgaaataattattatatgttattgctatgattgtgctatgaatatggtgtgagggttgtgatctttacatatatgtaatggtttcatttagcataaatatatggtatatgatataactttccatatctagagttatttaaattacagttatgagctaaggtatataatattgctaaactggatacataaatgttgtaaagaattgtattattgtgaatttcaagatatgtgtagtgtattgaatgctattatatgttaagcatttccttattgggcttttagctcacccccttactttccccctacaggtaatagacagggaacattgaatgtaagtttgatgagcagggtcagatctggtatgtatactgcaaggggctatggacgagcaaacggtctagaacgccggtggagccttgttttattttttttatagtaaagtaatctgagctcagtgggatgttacgaatttatttttttttaaaaaaaaatgcactcaactacttattttgttattgatatgaatgatcattcacatttttgcatatttattgtaaaacccactgtgtatttccaaaaagctttgaatctttttaagtaatgcatcaaaattagtattttgtaaaataaggcaaaatattagggcgttacaaatggtatcagagccttgacctagccagaagtgtggtcgacaagaacgtcagaccccttaagggggtgattgtgacagtcagtagtcccgtaagggaatatactaggtaagctttgcaatcccacattgcctagggaaggtcaagtgggatnnnnnnnnnnctgtgtaggtatgggactacccagttgaagag

SEQ ID NO: 40960 - DNA, 1518 bp, Cannabis sativa
  modified_base (1151)..(1151): a, c, t, g, unknown or other
agctaataactaggctctaagctaaatcacataataatgattacgtccgagtccgactttggcaaataaacccaagcgattggactaaatggtagagggctgggttcagtaaaatcgttacccactactaaatggccccctatctatcatatagacccaacagtcaagtatatctgaaaaagtgtaaaaaaaaagtttcaatatcatatggagtgatgataaaaatttgaataatatgttgctctaaccccagttgcgtctagtttattttgtgattcacagatgaaagaaagattgatatatttgaataataccattgtaaaagaagaatctgattctgatgaatttgaaatctgtgaggagtgcccgactgagtcttacaagtttatgtatgaaaagtgaatacaagttacttctgaaaataaaacattatcaaaaataaatagacaattctctcatcaaactaaattttttgaattgaaaattaaagaatatgagactggattttgtttaaaaggtcaagaaattattctattaaagaaggaacttgaaaatttcaagaaaaatattcaaatacttaatcctagatcttctatgaggaagtttagaatgcaggttaaagaagttttgctcgtcttggatcaaatattactgaaaaatctaaaaaaataaaatttataaaatttagtgttttagcaaatttacctgctgctacaaattcaagatttgttgttgcaacaatgtcgtctgcagaagcaaagtctatagtaagttcaaaaatgtaagataacaggtaagaaggtttgttccaatttgacatttttgtggcattaaggggcatattaagcctaaataatttatcataaaaaaatatgttcaaaataaattattgaagcaatttgaaaatttttcaaaagaaacatagtgcttcaaataaaagtggattgaaaaaaaaaatgtctagttggtttttttgataaaagtgctgcttcgcaactgtggtattttgatagtggttaatctaggtacatatgacaggtgacaatgattttttagtgaatatgagacaaatgcaatgtggtgaggtcacatttggtaatggtttagcaggaaatatcattggtatgggaactctcaattttaaagggttnccaaggttgaaaaatattatgcttgttgacggactaaaatctaatttacttagcattaattaaatttgtgatcaatgacatgccttcaattttgacaatgatcattgttttgctcttaacaatgataaataatgcactatgcaagggtttagatatgttgataattgttatacgctcatatctattcttacttgtcattctacatgtgataatactagtgctataaatatttctaaaaatcttattcaatattttgatacaaaacacattgatacgaggcatcattttttagggaacttgttgacaactaaacattgcagttgaaatatgttgatactgaaaaacaattggctgatattttcactaa

SEQ ID NO: 40961 - DNA, 1608 bp, Cannabis sativa
ttagggcataaagcccaacagtgtgggggatagatttcattgggtccttaccaacgggaaagggagaggtaaagtatgccatagtggccgtagactacttcaaaaaattgatggaggtcgagcctatgaagaccataactgctaagaaagcattagactttgttatcaaaaacatcgtgtgtcgtgacggcttgcctcataaaatagtcttagacaatgagaagcagtttgactgcgaagaattcacaaacttctacaaccaacacaaagtcgttaaaagctgctccgcgattgcaaggctgcaaacaaatggacaggaagaagccatcaacaaaatagtaaaggtcaccctaaagaaaaagttgttggcttgcaagaacaattgccctgaagaactcccacgagtattatgggcctatcggaccaccctaagaaccacaaccagacactccctattttgaatggtgtacgggtgggaagctatggtcccggtggaaaccttgttcccatcccacaaaagggcgacatatgatccggcaacgaacaaagccttgttacaagaagcgctagatcaaacagacgagctctgggatgagtctcaggtacgaatggcagcttaccaaagaaaggtggttaaatacttcaatgccaaggtcaaagatagaaagttcaccattggcgaactagtcctaagacgggtctttccagccactcaagaatccgaagtgggggtacttgggctaaattgtgaagaaccgtacaaaattgaggataaaattggctctaggacctataagctaagaagaatggacggaaccgcagtgcttagggcctggaatgctgaccacctctgcaaatactatcaatagttaaaagcgaagtttatattctataaaagatcctgtgccggtcaaatgtatgcaacctcttatgtaatttttaaagactaagtgacctcaaaatttcttttcacgtcacttagggggttattaaggcatatcctatgggtaaaaaacaagataaatataaacaggagaaacataggaaaagtaaaaggttaaatagattcaaagacacacaaattgttcaagagacaagaaaatccaaaaaagaaaggggcctgaggccgggccataaaatgtctccccttaaaaggaaatagaattgttctataagaaaggggatggataaaataaacatgcaaattatttagtcaacccggagaggaagacggggacccctgcgttcctttaaaacggccttaagtttcttgttcttctcccggaaacgggccaatacttcctcaggattaggatagaaagggagacgaggttggaagttgttagctttctagcacatgaacacaccgtcatcaaaatgcttcagacattgttaacaagtaactggggccagcatggcatccctcttttctttagcttcttctttgcaagcctgctccctagactcacggagctcctttacttcaacagtcatgctagttgttgtttccaaatcagttcggtgcagctcctccaatgattttagcttgacagctagttcttgaacttcttccctggaatctcaaagatccctcctcgttgcagcaac

SEQ ID NO: 40962 - DNA, 1154 bp, Cannabis sativa
gtactggactaggacctaagaccgtgggagtggactaggagccaaacctggacttaaactagaatcgaaccaggacccgaacccagatccagatccaaaactagacacacacaaggatagggacctcgatctagatccaaatgtagaccgagacccaatactcgaacctgaacccgaatttggacctagacctagactaaaacgtaagacttgaccatgtggacatggaccgaggacaaaaaccaaatattatgagagaataaaggaataacaagtaataaacaataagaacaacagatttttacgtggttcagtcgttaatgatccttagtccacgagtcaatattatgagcctctttgggcggatagtgtttgattagagagtattacagtatgaaacggttgcatagaagaagttactacttagatttagaagtgtgacggcacatgaaaagtctctctctacccttcgaaagaacgaggatatttaaaggcacacatggggtaaagggcataccctttacctaccttgggttttgtcctccacatgctactaaggtctacactacaaaaggacaatctaaccatccactggggaaactttcttcatcgtgcggtgtagagcaattgatgaggaccttcgtacaaccttggacacgtgtcgtctaaaggtctctactttacaaaatagtctctacccatgctgttgagcaaaagtgtgctcgaaggtgtgtacacgcattatcatgatccggtacaagggacaatatttgatcatgtgtccgagaaaggtgtagccgtctatggagcgcaattttgtaaggagctaacgtgttcaatgtcttccagaacctgcactgctttttaggtttccttagtggaggatgctgctcctagaatccattacctcttactgccttctcggttcgggagtcatttcttttaattctcttagatgtgttgtgtagaaaccgtgtccccactttggttgtgtcacgtctttgattaaggaaaacttggataacacttattattacatattattaattatattaactttatcattacttattacttataagtaatgataaaattagtgataagtaataacaaatatgtttaattagcctgaaccctaaaccctaaaacctcaa

SEQ ID NO: 40963 - DNA, 2496 bp, Cannabis sativa
  modified_base (2283)..(2286): a, c, t, g, unknown or other
tattttggtgacatttttaaaaaaattctaatttgatttgagatatcttatattgttgaggttgaaatttggccaacactcgtttgctaaattggcgaaaagagaaatgtgtttaagtaaatagaaagacacaaaaaatttatagtagtttacttctcatgtcgcgacggtaatgaatctacgtctacttcaagattttatttttcatgagatttacaaaaaaaaaaaactggctaaggcaatgcctctaatttctagagaagaaaagtaaagaaatatgtttagaccttatgagaacttagaagaatttgaaaaaggagctagaggagctctcctttggaaggagatcttataaaaacattagtaaaacaatacaaaaaatatgaaaaaaatttactttggattgatcttggtcattgaggatgatctaacagtgaaaattgactcttgatgaaaatcgttaattttttcgaagcttgaatctcatccgtcgaatcgtttttaggcaatttgtggaaaaaattgcacttgtcttgagcacaaaatttggacttgaaatcttcagaattgcgatatgggtgtgagatatgacttgatagatctttgaaatagctttgaaacacaagttgaatcgcgtcaatcgacgtccaggttgacaacccagcgcctaggttgataacctagtgcccaagttgatatctagcgcccaaattgacatcctagcttcaacctagaccctgggtaagtgaaaaaacatcccaaagttgtattttttgaagcctaagtgatatgttgacatcaattagccattttcttagttttgataaagttgttcaccatttctcagagatgtcgcgttttggtgaaatcgggtagactcgaaactcctagattttgcccatattccaccttgttgaaagggtaaaatatcaaagtgtgaatttgacctgtcacaaatcatagctctcgtttactaaaaaaaatatttggatggtcgatatggaatcagcttatgataagcagaacccagtgaactaggccacatgtcaacttgggtgatgggtgcttcttgagtgacttcccaaacctcgttttgatacttatacggcatttgagattacgaacgatgtctcctaccccgtttttaactaaaaataagacgaatgctcgaagcgaaatttgtgttgaggggcagaaacatgataactaggttgcatgtcaacctggacggagggcccaatgcccatgtcaacgtgggtgctggggccctttgttggctcccaaaggatctcgtttgctccccgagatcacttgtatcttccttattctaaaaataaaaaaaagatgcccgaaacacttttcgggaaaaatgactggaaatagcttaggttgacaaaatgtcaacctgggtgttggcccaacaccaatcctactgggcgttggatctatatttttgcttttggttggttctgtttcattcttggaaacacccatatccagttatttgtcaaaacagagaatatgcctagaagacttctcggaaaatctgattgaaaataactcatgttgacaaaatgtcaacctaggcattgggaaacacctaggtcaacctggatactgggcctagcacctaggtcaacttgggcgctgggtctcagttctggctcccaaataactctgtttgttccctaaaagcatcaaaatcttaattattgacaaaaatggagaattcgcccagaagacttcttttgaattgctaatggaaattgcctaggttgacaaagtgtcaacctaggccctgggcccagcgcctaggtcaacctgggggctggatccccattttggcctgcaagttaattcgtttctttctcgaaagcacttgattcttcattttagatggagaagaataaaatgctcgagataatttgtgattggaagcgccttaggttgacaatgtgtcaacttgggcgctgggtgcactaggttcccaacgggcctagtgcctcaggtactaaaaaataaaagtgttctgattcagattcctcaaatatgtttgtgaaaggtcttattcatgtcaaagtataaagtttgagctatttacactaagacggacccaaaaaatgaatcacttcaacttgggcgctgggtgaaaaccctatgcgcctaggttgactttctggggtgtagtttggtatcttttagtttccaagccttggacttgattcttttgtgttgagaatcacggggttccatcttaaaaccaattggcaatgagtggagtannnnatgttcttatatatgactcaattctctactatttatttcatgtgggacaatgtccacaatattcccccttaagatggtggctattttttcgctcaccaatcttgaaccgtattagagtggacacggtcagtatctgtataggtacggatcggataggatcacttgcccgcaagggatatggctctaataccatgttgagaatcatggggt

SEQ ID NO: 40964 - DNA, 1475 bp, Cannabis sativa
gtgttgctctgtaatttgtactctataattgccttgtattcattcactttgtctataaaaggaaatagaatccatcaacatcatttgagctgatttcatcaaataccatatctgttagtaattttactaaagactctctccaacaaacttactcaacacctgttgaagcttgccttggtgctccaaaccacaccatcattagttcagtaataacgttgattaattagcttaaaacatgggagagtgccctgcgaaaaattactattttcaatgtaactttttaatcacaatataattttttttataaataaatataatttttagtcacaacaaaagttacttagagcatctctaatagtatcctcctttaaggatggtcaaaatttacatatcatcaaaaagtataatattttattttatctatcttccacattatttttgtcacccttacttttaaaaacactccaatatatagcactcttttaaaatactataattatgatctcacacattattatttaatatatatcataatttttagctataataactttttagcttctattttttattaaaaaatgaataatatcaatgctacaatatagaatccatgcaaatttctagaatgacatcattttttctctaatggtacaacatttttaatattttgtcgcataatttgtccatttcactaagcattctctaaagttttactattgaaaatgctcttatgactaaaacataatatttagatagaaattattactaatttagttttagtcacatcaaatattgtgactaaaaatacatttaatcacaacaatttatgatttttgtaactaatacttttagccacaaatcttttaatcacgacacgataataataatttaaaattagccacattttttttagttataaattttattgtagctaaaactaagggtggaggtatgttaatgactatagaggccatgacccccctaagattatagtggcctacttatatatgtaatttttattttaattaatgtgttatcttagtatgtaatatatggtagtccaattaaagttaaataattattttaaaaaaaatataagaaatagttgaatatattaaataatatgtcagatacgtacctactttatttactatagatatattctctaaaagaataacttgttttcgtttttttctaagttattttttttttcattaatagtaacttagcaagacacacacatttttttttttattttttttaacaataaaaaaaagtagaaactaaaaaattttaaagacctttaaaatagataattaagtaatattattctcttcttcctctctcatagatatttaggtattacgaatcttttcttcttcactcattcatatctattacataagcgcaatgactaactaaaagctgctcaagctacaaatattgctcatttacttgagattgatgaactagaa

SEQ ID NO: 40965 - DNA, 2958 bp, Cannabis sativa
  modified_base (802)..(817): a, c, t, g, unknown or other
  modified_base (908)..(913): a, c, t, g, unknown or other
  modified_base (1283)..(1286): a, c, t, g, unknown or other
  modified_base (2668)..(2670): a, c, t, g, unknown or other
atcttctctccttcagtttggttgattcttcacaatcttccacactatgattgagtacttgacttgatatgaatggacatgtactctatcactaatggctcaaaattaatgaagaacaataagaaggaattttaaaatacaaagaaggaagctcttaattttctagttgtctaataaggaataaaaactaggttattttaattggatgaaaatgagagccatcttattccttttatagtatttcaactaggatttaggatttaaattatatggaattaaaaagataaaataatggctaaaatttgcttaaatggccacccatacatagtgggcctcactagtaacaattttttttttaattttattcaataatttatctttcctttcactaatgtcatatttttttttaaaaattgcttaaatagcaacccgtatatgtactctatcactaatggcttgaaattaatgaagaacaataggaaggaatttcgaaatacaaagaaggaggctctcaattttttagttgtctgacaaagaataaaaaactagattattttatttggatgagaatgagaactatcttattctttttatagtattttaactagggttaaggatttaaattatatgaaatgaaaaaaaataaaataatggctaaaaatttcttaagtggccggccatacatagtgggtctcacttgttataattttgccattttattcaataatttatcttttctttcactaatgccatattttttaattttaatcctataaatgtcaaaaatatttatttaataatnnnnnnnnnnnnnnnnataaaattaccatttaacttatttattaatttgaccttacaaagtctcttaattaacaaataaaccctaaaacctattttcttcacaattnnnnnnttgcttagtgaaaattcataactaagacataatctaatttagaattataattgattaattaaaccaattaactgagtctacaactagtattatctgaactagtgtggggaccatgggtctatataatcaagcttctagtaagtagatctagaatttaccaaataaattctctaacttattaatttctcatgactccactatagatttaaaattacactcttaattatatagaatgatctatatgtttcaagatagaggtacgctattaattatccattgttataatccaaataatcaaagaacctctatagatgatctacatcgagtaggaacaaatttactgttctacccttcatgtattttatccttnnnncacttagctacctataaatgagatttcaataaactaatataattattgaaatgaggcctcaatcatttatctctattaagctaagctcaaaagaaatcatcatctcacatctaaatactacggaagctatagatttcatatcaatggttagcgcttccactcaattatactactatgttcttgagatacaagtattgggccgatctaatcggtcagctttaacaaacaacttaaagaacacacataatacattcaagccagaacctaaccatttcacgattaagttctattgacctaagaagtgatattgacttagatagatataaaggtaagtttatatctatctaagccatagatatattattctggttgtggtcttttgatgacttaggtctagttacaacaaagagttcttaaaataatccaagtggattctggtcacagaatagaaaactcataatctatacattaacatacagtttggatccattgttagaaaatggatattatcaacttgtgaaagttatactgtagtgtccaatgtattttggaaactaaaatttaaaatttctatttggaatctaaaaatttacagtcaaaaacttaaatttataccaaattaataattctttcttggaccgccactgccaatctaactctaagttgagttgcctttagtaagcatatacaagaaggagattttctaagatcgaggatgtatatgaattttgggataaaatatctgaaatatagtcatctgcgccactcatttttatagaagaaaatagagtgacatcataagcatgtgatttataaaccttctgtccaatgatatactttctatgaaatttttatataaaaaagctaagaggaaaaataaaggataattttgattaaaataagaatccaacgatgctccgtttaggtgagagtcaaagttattcttattttataaactccttcattgtttcatattataaacactattctaagttgtcatctttagggataagtcaactagatgttgcatttacaaataattatccttcgagatctaacactattttgttgtctaacggatgacaatctttaggatgtcctgcttaaaataacaaaccaagttagaccaacaataaagactcaaattttttactacaataattaataatagaaaaaataatgaaggttcaatataaattcatacacaattcagaaattatcaagcatttagcaagtaataaagacatgtgaaaatataaaacaatcatatcttaaataatttccaaggtttcaaactagatgatataagtgtcctgtttaggtgagagtcaaatatatatatatatatatatatatcagttgaatagagttgtcagctcatnnnaaatggacaccattttagcaaccttttattattcgatcgaaatgagaatcaaccatcctcatatttaggcgagggtcaacatcattctatttcataagcttttaccattgtttaatactttataagccctactcttagtagtcactattgtggtgatcgttactaagaataaaagacttacaataatacttatctatcgagattttatgacgttaaattgctaatgaatgaacatctattagggatgaatctcattaaaataaaaactatgtagaaccaacaatggag

SEQ ID NO: 40966 - DNA, 1796 bp, Cannabis sativa
ggttcggttctgaggtcccgtgtttgagtatcgggtcccggtctaggtcccagtctgagttctagtcctagtccaagttcacatctcggtcctagtctgggtctaagtccgagtcctgatctatgtccgggtctgagtcttgagtttgagtccgagttttggtacgagtcaaggtgtgggtccaagtctaggtctgggtttgggtctaggcccagttttcagtccgtgtctgtgtccgggtcttggtctgggtctgggtttgggtctatgttcgagttctgtttcgagaatgggttctggtccaagtctcgggtcacgggtcctaggtcccaggtcttggcgtaagtctgggtccgcgtttgggcctgggtcctagtattgatcccagtttgggtccgggtttgtgttcggttctgtgtctttatccggttttggatcaaggtccaattcctgttctagggtccttattctggttctttttcctattttggatctcggagtccgagtttgggtttggttcctggtctacaaattattccaagttcaggtcttgaaacaattgcaagatctagacaccaactacgagtcgggtccaagcccaaggtcgttggtcaagatccggatcccaatcttgggtcccggtctcatttccattcggatcctgggtcccagtctatgtccgtgtccaggtctgggaccgagaccggggttgggtctttggtctcagtcctagtcttgagtcttgattctggttctaattttgagtttgggtgcccaatctaggtctgggtcctgggtgcaggtttgagtctatcatcccgttccgggccctgggttcgagtctaggtccaagtccgtgtctcggttcgagttcgtgtcccgagtccggatcaaagtttttattcagattcgcgtcctgatctgggtctgcgtcccaatccgggtttgggtctaggtcctagtcagattctagttcccagattcaaacccagactcggactcagaccctggtctggggtacgggtctgggtctgggccagggtcttggtccgactccgggtctgggtttaagtccggatatgggtcctagatccaaacactgactacgggtcaagtccaagccctaggtctagatcaggatcacagtctcgagtcctagtctagttccacttggggtcccaggtcctggtctgggtcctaggtcaaggtccgggtccaagttcatatcctgggtctcagtcccagttctgatgcccgtgtctcaggtctaggtctgagtcctaggtctgagtcctagtccaggacccgatcggggttcaagtattggtccgagtctagattcgggttacgatatcggtctgggtccagatcaaggttcgagtctagttccaagttcaggtccaagtccgaagttttgatctaggtctgggttccgaggttcaggtcaaggtgccccatccaggtctgggtcataggtcctagtctgggtccatgttcttgtttgggtcctagtctcattttcaatttccattcagtgtttgggttcgggtttgggtttgagtctgggtcatggtctgagtcctggtctaagttttggtttgggtttgagtctaggtacaaatctcggtgtgggtctgtgttcgggtccaggtctaggtttgggtctcaggtgcgggtctaggtcttgttctagtacaaggtctctgtttggatctaggtcccgagttttgatctcggtctgggtttgagtccaggtttgtattcggatacctatctaggtccaagtttgggtttgg

SEQ ID NO: 40967 - DNA, 1021 bp, Cannabis sativa
gagggctaaatatcttaaggggaaggagttccttaatcacagtttcaagagctcagattcttggttttggaaaagtgtggtccgtgctaatgtgattttacgaaagggtgcctgtaggctcattgctgatggtcaagatactcgtatatggaaggacccctggatacctcatggtaaagatttttttccgaaacctgtcggttccgttcgtaacgaggacgctaaggtggcagagctcttacttcctaatgggatgtgggacattcataagcttaatgctctctttgatcgcgaaacggttaccgctattttaaaagggggtcatccctctgctcaaggtttggatagatgggtgtggactttggaacggagtggccagttctcgtgtaagtctgcctacctagcacaagccttggagagagcccctccatgcgaggttgctccttctctctggaataaactctggaatagtaaaattcttgagagacataagatgctttggtggtgtattttatccaaggctcttcctcttagggctgtgattcatagtagattccccattgaggatactaattgccccctttgtgggagaggggaggaaacttttgaacatttgtttctcacgtgtgaggtggcttttcacttatggaaatcttctccttggggcatttatccggtttgtaatacaggcattcggccctgggactgggtaaaattcatttgggaccttaagcacaagggagtaaacggggatgatgtttttctttatgcttcgatcactgttgacaccatctggaggatccgtaatgacaaggtacacaacaattgtcctgttgatgttaacagatgtattgactctatttgtatctcttatgcagattttcatgctaccattttccctcctcctagtccataccaaccacaggactgggagccccctcctcttgattggattaaacttaactgtgatgtcaaagtggggctggatagcatgtgctcagcagttgtggccagggatcac

SEQ ID NO: 40968 - DNA, 934 bp, Cannabis sativa
cgatattgctcaaaattggacaatccaagatattctggaaagataaaaaaagagatctagaactttaatgttttgactttctccaaaattcggtcaaaacatagtctaatttaggcttgaagtttcaactttattttcgtgcacaattttctctattttataaatcatgtttttgtgagatttgaccaatttatacattctaagtgtcaaaacctaaaattaaagaaaacaagcataattctattccaaaaagtgacagtgaagaagaaaattaactcttaaaataacataaataataggctaaaatatcctaatagtattttcccttatagatcataggactactgactgtcacaatcatgcccccttacaaggatcaattttctcatcgaccgcacttctttgtaggtaaagtcaaggctctgataccattttgtaaagtccctgcttcaagcctccgttgggcccttacacccacaaaatttttgatcttatataggagtacgtcactctggctacttcctcgaatgatgactgaccttacaaatcaatatgagtgtttccattgtgctttttcctcactcgcacgcttcctggaaaaacttcccatgacgtcacccatcctgaaattaccccaggttaatcacactaaattgtagagttctttcatgatgggctacaagaaaataagatgaccttgttggtataggtagtaccaatcaatccatttaaacactcttcaactgtgtagtcccttacctacacaatctcggaaacatcactctttaccttctctaggcgatgtgggattgcacaacttacccaatattttctcttatagatacgagaatattgactgtcacaatcaccccccttacgagattcgacatacttatcgaccacacttccaactaggtcaaggctctgataccat

SEQ ID NO: 40969 - DNA, 3424 bp, Cannabis sativa
aatttgggaaggtttaagtgcaagttgaattgatagttgaaagggtttagccgcaaaagactatatttatatacaaagcgaggagactaaatgaaaaactactaaatacaaataggaaactactaaatagaatttattttattttttacaattaatattctaacactctccctcaagttagatcatagatgttaatcatgctcagcttgttacaaagataatcaacccgcacctcataaaagattttgtaaaaatatctcctaattgttctccggtgttcatatatcttgtagagatcaagccttgttaaattttctcacgaacacaatgacaatcaatcttaatgtgcttagttcgctcgtggaacacgaaatttaaggcaatatgaattgtaacttgattatcacaccacaattttgttggagcagaagtcttaaacccgaattcaatcaaaagctgctaaattcatattacctcacacacagactatgtcatagctctatattttgattcaacattggatctagacacaacattttgtttcttactcttctaagatatcaaattgcctccaacaaatacacaatatcctgaagtggatcgtctatctaccttgaagcctgcccaatctgcatcagagaaacaatctgggtatgcctatgattcttgtaaactatgcctcgtcaagtaacataaaatttgttctaatgctttccaatgatgaattgttggagaagacataaactgactaatgccaaaacaatctagctttcgagatgctagtctctccaattacaacctttcgagagggctgcctattctcttatatttctaagctccccaaaaatgaaataaaagaacaatctagctctcgagatgctagtatctccaattacaacctttcgagagggctgcctattcacttatatttctaagctccccagaaatgaatccctcccccttatttataggcggataacataaaatagtgttagctaggaagtactaaaaataagacaaaacaaccttttaaaataagagtcaactagataaaaataaaagccctctatcctaccttatgtgtccttttattatatccaacatgtataggaggcttatcatgtatcttaggctaacagattttttgtattttgtaatagattggtagaatgagaagggggctttgaaagagcatgaataagatagtataaaaatgagcctcgaagaatgaggggagatgatgatattctaattgggcctaggatctttggagagtgatgagtctcttgagtgctcgatgggaagagttcattcctcttggaaatggtacaccaatttataattttcatcccaaattctatatcagagtacatcactgtagtctgcttagacttgtgcatctatgtttacataatttgaaaagataaaatacaagatatagcatgtgaagcatcaaacagacatcataccttcatttgtgtaatttcgtgttccattttcttgtttttatcaagaagaagagactccattttgctcatctcttccccgctagtagcaacttcccaatcttctgcctcaattgaattataacctactgcctggataaataacatttttttgttaaacagggattgatgtcggaaatatttgtgtgagttgtcatgaatcaagagtaatgatgagatctcaatgcaaacaagaagaaaatgaaccagccacaacaaaaacaatacctatactatcacaaaagaatttaaatcaaaaaacattcattcattatggcatagcagacaaagttcatacgtttttctaaaacatgaccttataactaagttaagggaatgattctcaagagtgatgaaactgaatagctaagttagctagtattattatctaatgaatttttaaaagcaccacattgcaccatcagccgttatgttaacataaatatgccaaataacttctctaaggcgaacatagatatgccaaaataataattataattataacttatgaatgttaagaacggtacctgcaagatcttcacttttttacgcaaatcatcaaccaacttttctgttggccttgcctgaatttctttcttcatctcctcaagggctacttcctttattcataagaaagacaaaataaatggagacacaaagaaatcaatcagtaacttgtagagcatttcaagatagtattgtgaatgacagtttgctgaataggaatcaatgaatatatataaacaagtaaatgactacacaaaacatcaagacattcccatattcaatcatttcacaagatacggtgtatacttaatagagaatgagaaacacacaatagggaataataaaaatataccaaatgactaataactaatgaaacagtaattgaaatagggtgtcaatggataagtttgtatttctcgtatcaagaaaatacagtaatgatccaaatattcgagagcttgacctctccatacaattcccctcctcccctctctcccttaaccccaaatattgcaaccaaaacagtacagagtacattctcacacctctacatgaaacatctactctcaccactatgatagacctcttcaaaaatatacaaacgtgtggaggaagaatagaggtaaggaagttaagtgacagctgtattgctgactcataggagagagattgagaatatgttttctatactattgtttttgtaataaaacggttgaggagtttgtgtgggactttttatgcagaaattgggtgggaaaatgggagagggcaggctctcgaacaacatggtgtgattctcttactgattgtaattgttctttgctataaacaccaaaactcttgctggagataacttgaacttttcagtagagtttctcttaatttcttctactattctcgagtggggccagtctaggacaagtggtcccttcctctttttcaaaaaaaaaaaaaattcttctacaattcttctacctctgtttttagttcaattcatatcaacaaggaaatatatcaagtggtaccagagtagttgaagtccgggagtatggcataaaaaaaaaacatagaagctgtggaggagagattaacagtggttcaagaagaatggtagaaggggcttgaatgctcaagggaggagctgactgatcacaagattaaagaatattgctcagggactacccaagttggagcaacaggtagaggaattacagaaaacacaagggaaatacaaataacctggaatacatggtttttaagctgcagcagcttgtaaacggtatccagtcgagttcctccaaggcaaaggatgtggtgcccaaagttcaaatacataagccacatggaaggtcgacgtcgatggagacttcaaatccgacacgaatcagtggacagcagaattcgagtgagaa

SEQ ID NO: 40970 - DNA, 1760 bp, Cannabis sativa
agagagatatttaccgtgatagtttgttggaggatcaaaacgattgagaaacaagtattggggatgcgatcacgaacaaagatctcaattacactttattttatacctgtgtaaaatagattttttgaacattactttttatattataaattattctaaatttttcaaaattttgtaagaagacttaaataattataacatatacgattgtggaaaaaattaaactaattttttttttggatacccatttcaagagtgcattgtagaagcaccctatatattatagagtatttctacaatgcaccctactaaaatagatgtattgatgcaacccctaactattttggcatctataaaaagtttttagtctaatttttttttagtcgtgtacgttataataattatttaagatattctgcaaaattttgaaagattcagaataatttacaatataaaaatcaatgttcaaaatgtctactccaaacccgtataaaataaaattaaaaaaaaaaaaaaaaaatcatgcgtgcaactgactctttgaaccttatttttggcatgttaaaattttttcaaattttttaagattttacaaaatatcttaaataactacaacgtataacagataaagatatatcgatacaccctttttaagtagtgcattataaattttcttataatatatataaaattataattaacaatgttatttgctaactaaataaatctaattaatatagttaaatacttatttggtgtattgtggtatcttatgctcaatcaatgaccttgtaatttaaaaccgtacatatatattaatttgtaagtgtaattttggatacattatttttattaacttcttattacatttgaaacatgagaatcctcaacttcttattaaaatttattagtcaattttcgtatttaaaaatatatgaagatttttttaaaaaaaaaaaaaaaaattataacggtgttcgttataattacaatattatttttataattttttgaaaattttcgaatagtttataataatgttgaaaataagtttgaaattttttaaatacgcgtggtagattgaaatattaaaaattttatttttaatattgtaaactatttagaataaataatattataagtataataaaaatccttatacaaaaaaaaaaaatatttcgattatatgacttcaaacgtaaaaattaactaaaaatttataataaatatcttaaccaggacagatctttgaaacatattacaaacatccttatctctcccaccattcatttccttctactctcttccatccatctctcctccacaccaaaaattccaacacacaaacacaaccttacaaaactaattatttcaaaaacaaaaaataaaagaaatagacaaatgacaaattgtagaagcaatcaaaaacatgaataaataattatctttacttccacaattcattttttacaaaaatatatatatatatttttttattttcactttaataaaatttagcacattctttcatattaattattaaaatatattataatttaatttatatttatttcggcatttaaaaaagaattttagtatattttttatttatgattacttatattacaagtttttaaaattacttataatttttttataaaattataaataatttacaatgctaaaaataaaattgaatttattaccttgcaaaaaaaaaaaaaaaattgaaagaaattacatattaattagtaaaagac

SEQ ID NO: 40971 - DNA, 1219 bp, Cannabis sativa
agattataaagctctcctaaataccaaaacagattatataatatttatacttttcaattttcaatgacatcattgctgccttacccatataataaaaaccaataaaaatatatgaggaagactaattaacaaagaactactaagatagggaaaatttcttgtagtgagtgttaaaaataaggttgaaatagttatttaccacccatataaaaaaatagtcatacacacaacacaatatttgaactttattttcgacattgtaatttattctaatttttttgaaaatttacatataattttaaataattataacatgatcataaacaaaaattagattataaagttctcctgaatatcaaaagagattatataatattatactttcaatttccaaaaacaacattgctaccttatccaaataataaaaaccaataaaaatatatgaggaagacaaggaagaatggtatcgtccgtcacgtaaagaaatgccttcatcaactattgagtattgtttttctaagaaaaaaaacctattgattattgaccatgtaaatgtaatttgtcaattaggggtggacaacatctaatttaatttaattgaactaaatcaatccaatctaatttaattataaaaaattaaataattacatttggattgaattggatattaattaaaagttagattctaattggattagatcgattattggatgttattcttaaaataccgatccaaatcaattatatttatatatatttaaaatattatttatatttatttatatataataaaaaataaatatttcaattatatatttttagtgagtttttttgtgttgaatttgtaatatttagttgtttaatttgtatatttgtttttatgatattttgttctattttattacttggtaatcttgttgttttacttattttaaatttttagttatattacacttaaataaattgtgatatttaatttttatgtatttttcttcatatttttatgttaatattaaaaattaaatgtgtaattggatatcgaattgaaaaatctatcaaatctaattaataattgaattgaactttaaattacaactaaattgaatcgtatgataattttccgattacaattaataatttaattggatgagtattagattagatactcacattttatatattatgaaaatttggggtggcgccttgataagaatgagag

SEQ ID NO: 40972 - DNA, 1449 bp, Cannabis sativa
gcgcaccagaacatgtaaagaagtttctggtgcggcattacaaaatgggcagctggtgtcgataggtacatggcgaactctaagctgaaaacgagtgggaaggcaattggttgagactctccataagaaattaagaactttcggaggcaatttcaattgccaaagttgtttccaaaaaccagaatttgaagccatttcgttagcaccttttaaatcttgctgaagcttataggcgctcttgacggtgaatagaccatgatcttctttcgtccaaaaccatgagtcactgctgttgccattagagggaggaattttccaaattaattcttggtctctctcggtcagaacatccatgattacctcttcatcccattcgttttcatcaatcttcataagggacttcacaagagcaccagcaagtgcaggatgtctagactccacaaagggattcatatcgtcaaccaaccaaggatctaagagcacactagttgtggagccatcaccaactagctttcgaacacccgcccgaactagaccttgtgcttctaatacactacgccaaatgtagcttgggttagacccaagtgtagccgtgagataagaaccagaaggaaagtatcgtgctttaaaaatttgtttcattaggctattacctcccgttagaagacgccacccttgtttggcaagtaaagctagattaaagtctctaaaatcacgaaagcccaaaccaccattaactttatgagtcgagagcttgtcatatctcatccaatgaatacctttgtttgaagatgttctccaccagaattgactgatagaccgctcaatgtcattacaaataccaacaggtattagaaaaacattcatggtgtaggccgggagagcttgaaccactgacttaataagcacctccttgcccgctctagacaaaaacttgttatcccaagtatgaatcctcttctggactttgtcctttaagtaaccaaagacaacatttttatttcttcccaccgtacttggtaaacccaaatacttgctgtgctcagccgcttcctgaattcccatcctatgacagattacctgtctagtagacgaggatgtgtttgtgctgaagaagactgaggacttgtcgaaattgactctctgaccagtagccattgcaaatagttgaagcagttgaagcacacgagttacttccccattcgtggacttacaaaagagaaggctatcgtcagcaaacaacatatgcgacaccaaaggagcaccgttagcaactttaattccatgaatccaccttttttcctcaaaccttctgatgatagctgagaagctttcagcgcacacaagaaacagataaggagaaatagggtctccttgtctcaagcccctggttgggataattggccctatattatgccctgaagaaacaatattatactgtaccgagga

SEQ ID NO: 40973 - DNA, 1105 bp, Cannabis sativa
gcataaaacccaacagttctttattcagatttctaaagaaaaccttcaaagctttaagttttgacactacttgaaacatatttgtgcctgccatcttttgttcccagatcttcttaacttccatatgataacttggatgagaagtccacataaggaagtatttaaacggttttttgccacttgggaaatcagtataagtatttagtacttccggagtatgatcaaaagctccttctgtaagaaacacagcttcagccctttcaaataggtccatccaagattgattagccatgaccctatcaatcttggaatagattctgtcttttgattgttgtttattattccaagtaaagaaacaaccactactctttaaatctgataattgacagtcactcacacaatctaaaaaggccgtggagtttccaatcttagctctatccccaattatttcttctttaaagagaatatcattaaaatcaccaaaaactatccatggatcctgaacagtaatactacgtaaatcattctaaagaatcttcctcccattttcatcattgaaaccataaacaaaagtggtaaagaacttataccttttatttaccgtttcaatatgaagatgtatcaattgactagtacatttgatgatactagtattgaaaagaagcaaattccaagcaatgattattctccctcctttatgccaagctgaatttgttgtaaaacaccaccctaaaaacattctttggtataagtctccaagctttggaggcttaaccctagtctcaaggagaccaacaagaccagccttttgaattgcaataaattgcttaacattcatttgcttttgctggttgttgatcccccataagttccaacatatgattctatccattggcaagagagggttctcccccctctcttgtattacactcttgcattccatctgttgtaactccatctgctaccatatcttcttgcccttctccttcttgctcaagagccttgaaggaatttacaatcactgtctgctttggtggctctttccccttattattaattctaatttaatactaggaaaaagattcttcatttaagttggtccaaa

SEQ ID NO: 40974 - DNA, 1198 bp, Cannabis sativa
  modified_base (747)..(748): a, c, t, g, unknown or other
tttttttattatttttaaaattttgattctcaattaaaaaattgaaaagtaaaaatatttttgtagaacatgtttttgaaaccattttcactttttcaattttaaaaatagaagactgattaaaaaaatgttaccaaacgccactatattaattcaactgaagtgcaaaatttttgaaaaaaaattaagtttgagcagtaattaatcatgagttaagcaaacaaatcataagagtctatcatttttctagaattataactatcacacaatcaagaatttcatcatcaataaaattattttccacaagaccatgcataagacatcaaagttgaaaaactgagtttttgcaaatattaataaatattacagaaatatcataaatataaaaccgtaaacgtctgcagcagcagcatgtatttctgttactgcagaaaccagttttgcagacacaaaccagaactggtataatataaaaataattacagaaaattaaatcacttgacacaagaaatctgtacgtggtatcagtgttctttcaaacactactagtccacggggccacgcccggagaataaaatcaattagtaaagtatcaaagattataaaaacaattgacttaaacaaatttagactccctctagtgatttgtcgcaaccctttgtaatccaccttgctaatttgatctcgaaaatagaccaagtagggaagtcccttcagctattgatgtgtgcttacttcctcccgaannaaggcttaaacaaatcttctcccgaagatatattctcacttcttcccgaaatgagacttggaaaagtattctcccgatcagactcacacttgttcaaagcttctcttcaacttattctatgaatagtatgagatcataataagaaaaccaaaacttaattgaacactctaggtttttacaaataaaatactcttcttacaaagaaagatatgaaaatatgagaacagaagagataaaatcgtttggctgctctctaggtcctatttatcgaacatagaaatcctagagacagccacaaaaatgatttcccagctgtacaaaactttcttaaaaaattcatgatttgcagcatgagggacagattctgtcgcagcaaatcagaccacaaaaggaaactttccaaattgaaccaagatcacgaatttagacttcaaacatgtcaaataaagt

SEQ ID NO: 40975 - DNA, 1858 bp, Cannabis sativa
  modified_base (47)..(57): a, c, t, g, unknown or other
  modified_base (366)..(370): a, c, t, g, unknown or other
  modified_base (458)..(468): a, c, t, g, unknown or other
  modified_base (1466)..(1470): a, c, t, g, unknown or other
  modified_base (1573)..(1591): a, c, t, g, unknown or other
  modified_base (1800)..(1814): a, c, t, g, unknown or other
atatatttatcatattttaatctatacttattatattataaaataannnnnnnnnnnccactagattaaaatgtgtgacatacttgtaattagggttgagcatcggttagttagtcggtttttttctatataaaaatctaaaatttagtttttcggtctggattggtgcaatcagaaaactgaccgaccaatccagaacttattttaaaaccgaccgttttgaaccgcgatttggttgttttaaaccgcccaaaccaaacttttttttttttaaaaaaaatcaaatttattctataaatacattattttacattctacaactacaaacataaaaattaattgttcaaaaactaattatcttattcnnnnnactttaatattaataaaaaaaatgatatattatttttatatattattagtaactataatacatagaaaaaaaaacttaataaattaannnnnnnnnnnatgtataacggtcggtttcagtttttttgattatacaaaaaaaaaaaaaaaaccgactgttgaatggcaattttttcggttttcggtttcgtcggtttcggttccaacgatgttcggtaggtcggtttgaacagtttgttcggttttctggattttatgatcactcctacttgtaacatttatttaatcaatcaacatattatatcaaaatataacattctcccactttgattgaataaatacacagtttcaaagtagtcttgcttaggtgcagtaggtaaaatatctttcgacttgaattataccttagtttaattaccacaaagttttgatgaaattttggttgtcgtaatattgaatcactatttgtttagtaaaaactgatgataagacacacacctttgttaatgctcacttgagaccgcatgtctagctcttgcaccgttagtggccatgtgcaaaatttcaattcttggactctctagtgaataactcccaattctcataagaggcgacaccacctctagcccatatttgtggagtaccactctttagatacttcttaagtttaagtgagttttcttaagcttaagctccattaaaaaacctttcagctttaaccctcaaatttcccgacaagtactcatccatagatgggacaattgagtaccacattcactctattaacttgttattacctattgaacttaagactagatttttactagtgttaagataggttaccatcgatgaggaaaatgttagtttcattatcactcataaaattctcaataacaatattaaattttatagataaatatattacatataattgtaagtgtataaccataaatctaaagaatacctttattaatcaaaagagaagaagccaaatagtgaaagcgtaccttaatccatagatagtgataatcttaatcaatcttctagagataatatttgtggtgattttgggtaatgatcttccaagaaaacaagannnnnggttttctaattttctctcttgatgggaaaagatgagaatagaaattggctcttgtttcacgaggaccactaccaatttataacctcatagctaggttataannnnnnnnnnnnnnnnnnntagcccctcaataaattagaaatatctctttgggtatctacacatttagcccatgacactttaatatccaatgacccacaattactaaaatgatcaatttatttgggtcaaactttatatagcaatatacataaatactgtaacgccctaatgctaaggcacgctacaatattttttcaattgcagcgcaatctttgctaatcaaagannnnnnnnnnnnnnngtgtcaaattaaaacttttgtaataaatattaaactttataatt

SEQ ID NO: 40976 - DNA, 1292 bp, Cannabis sativa
cctgtacccgaagagttagaccccaccagaacttattcatcatgacctcaatttgatcaatgagtgaattagatagttgaaaacaactcatggcataagttggtatcgactgtgcaactgcctttaacaacacctctttaccaccaattgagaaaagttgttcttgccaagaggaaagaaatttccaaagcttgtccttaatatcagcaaacaacaattttttatcccttcctgagtaagatggcaaccccaaatatctttcatgacatggctgtatgggcatagccatgatgtgttgaaagtgcaattgaatatgctgagaagtgtttgatgagaaggagagaactgactttgctgcatttaatctatgtcccgaggcactacagtaggtgtttaaggaccttcgtatggcttcagcaaatcgggtgttagctttgcatagaactagactgtcatccgtgaagaataggtgagaaattgcaggagctccacgagcaacacgcaaaccagataagttgccagattcttcttcaaattgaaacaatctagagagacattcagcacatattatgaacaaatatggggataaagggtctccttggcgtatgcctcgagttggtaacacttccccatgggacgaaccatttatgagaaaagagtacgaaacaatagatacgcagcggtagatcatatccactatcgtgtggtggaaacccatagtagtcatcatttcttggatgaaatgccattccaccctatcgaatgccttactcatatctaatttaatggctgagtaaccttctttacctcttttcaaatgtttaagcgaatggattaactcaaaagccaccaatacattatctgttatcaatcttgatgagagaaaagcacttcgtgactcagagataactggcaaaaattaggtgttttgcaaaaataaattatttatttttacaataataattataatatgttactgtaaaaatgtgcaataacgagttagttacttgctcatacagaaacagtactttttgctgaacatacagaaacagtacttggaacagtaaataattgcagaaattaaaaatcacacgaacgaattttacgtagtagcagtattatttcatttgataatagtccacgaaaccacgcttagaaaatgaaaatttaattagtaaagtattaaaaaattacaaatacaattgacttatataaagtttgaatctctttaaacctttatccaatattttgcaatctctctatagtgcatataagagcaagagtattttagt

SEQ ID NO: 40977 - DNA, 1661 bp, Cannabis sativa
agatcagttaaggagggttggagaagacaatgacagaacaagctttggattgtgggtatatggcttttgattgtgggttgggatgggttttaggtatgaaaactttgaacaataaaattaaaaaaactgaaagaaaattgaaacgaaaatgaaaattaaaatgaaaaaaaaaagagaaggaaagatgataggtgtcaatcacgatcaaatcatgcatggggtatgcaagatgtgtaagtggtattttaataaataaaaaaaatattaaaggcaaaattgttgcccaaagcatgtggtggtaattttgtaataaaaaagccaatttgtatttttcatgtaaaaatttaaaaattatatttttctattattattttttttttacctaatccatatatttaaaaagaatatctttctataaaaaaataataaaatagaaaaagtgtttatattttcactattgtgaagcagatattaaaaaatattttttttattattattttttaactaaaatataagatatttctaaaataatgaaaaatattacagtcaaactaaaatataattaaaaataattttcgattattattattattattttgtatataaataacattaactattttttaataaaaaatgatgttgcttattaaataacataaaaaagaaataacttattatacaactaaaaatatacataattaaaataaaaattaggaatctattctagataaaatatggctatgtaacaaaatttttggtttaatgatattttttggttttctatgttaactttaacagaatatactattatttaacaaaatattctttattaaatttctaatattgttatacatattttttttaaaaaaaaaagaaaattaccccatatactatttcttaacttttttttaaacttacggtttgggttgctacagtaatttctctggtggcttttatgtaggttgctatgtggatttttgttgtaatttagattgctcagttagttgctataggagtttctgtgtagaatttcataaaaatgtcagaaaaaaaattattttgaagtgtaaaaatgaaaaatccccaaataaaaattatgtagatattttatataaagaaatttaaatttaaatttaaaattcttattattaaatttataagattataatatatattcaaagataaaaattatatcgatattttttatatatatataaaaaatttaaatttaaaatactttaaatattgtagatatttttaactacattttatacatacaaaatgtgtatatataattacatctaaagtacacactaatgtagccgtaatagctaaaaaaaattctcaaagatcaaaatttcaatttttttaaaaaaatatattacctaattaaaaaatgtatacatgtagatatgtttaactacatttttaattttgttggtttaactatgaattaaaataacagataactccgctcaattgggtacacatcgattcacatatctcacttgagttttatcgtacatataaaattcacatatatatataattaatacatccaaatgacacgtcaatgtagccgcaataactaaaaaaaaatttaaagatcaaaatctcaaatcccattttaaaaattaatatatatatattacctaattaaa

SEQ ID NO: 40978 - DNA, 2048 bp, Cannabis sativa
aaccagtactatgcccgtactgccaaaccgacacaatagttgtgccgctatgatagtgccaattaatactctctacagtgaatatcactcttaactagtacgatgcatgtactaccaaaccaacacaatggttgtgtcgctatgatatcacctaaaacatatacaatcacaaacacaacatgcatatataatatgttttatgctaatcttaccttatttatgtgttcaggtgtgccagttagcctgagtggaacaatagctcgacactttacagggccctaagtcacaatatacaaaactctgatgagagacacgctaatacacttttcggggacttaaaatcaaaattagaaatatctctatcgatggataacatgataataccctaagtatcacaaaaacaggaaaaactagggttcaccaaaaagtcccaaccggtagaccggttccccaaccgaaatttcagttcgatgggatttcctggggaccaactggtcgaccggttgctataggttcccctaaatcggtcgactggttcagtgtaggaaccacaaaaaatgctccccacaccacaattcaaccccaaactctctaaaaacttccagaatacctgcttatgccataatagacccaaaccaagttatagaattcaacaataacctcacaaaattaaaacaccattaaagacttaggatgagcactctaaactccaatttgcacaaaccacacctaaagcctaccaattcaacttaaaacaacccttagaaacctaaactaacttcagaattcaaaattaaacaagcttcatcaacacaacaccctattacccaaatcttacactaaaagttaacttgagcttaagaaaaatcaaagagaaagaggctagaatcatctaccttggattgatttgctcaaatctattagaactacacaaaaatgagctgaaaactccaaaccctcattggtttctttggtgttcgaaagagaaagagaggcttgtagagaaatctaggtttttctatgctttgtttatttaataaataaaaagaatcaattaactaattaacttataaaatctgaataataatgtccactaaagacaaaactcctctagtaaaagaccattatgccccttatcataaaataaaaagcttagtaacatctaagggtaatttggtcatttctaaaccccgacaatttctcgatacttccaatgcctaacaatgatgccccgctaataatattctaaatcatataaaatgtgactctctaatgacctaacgtcgtattccactgctaccaaacacaaatacaaaaaataggaaactcacacatagcataattaatacatattgaattataataagtcttcacaaatgtgtaaatcataattaataattcaatctcataattaaaccatgattatttaataatccaatacattaagcattcagaatcaaggtaacattagtaataattgcatatatatacatgttagtgtgcatattagctgtcagaataacatatcagggtatcagtgaggtgtacatagagttgtaccgaaatgctcagaaatatatattaagcaaataagtagctattagattaatatatcaggatattggggaagtgtacatagagttgcactgagatatcaacaaatatatgttaggcttcaagatagtatgaactaattgctactacattagtacgactagagtactgagtataggctgaattcgcggttatcatacttttatcgagaatgtttccgatccagttataagatcgttatttggtgtatgggcacctagttacggtaaattacgatctggatatatgtttatgtttatacttttcttactgagtcagtcgactcacaattattatgtgtatgtgcaggtaagagctagaaatgaactggaacaagtctaaaactggatgaagattgtaaatatcaagacgattagacctagagagttcaggatctttgagacagtttaggctcactttttgttgatcattgggcaacaacttatgtattatat

SEQ ID NO: 40979 - DNA, 1386 bp, Cannabis sativa
  modified_base (1356)..(1361): a, c, t, g, unknown or other
aaatgagagagaaactttctatttgtaccttttttctgattttttttacaatgtctttattagtgtcgatttataaccgagaccaaatgatcttttagtctcggttatgaactgacacctatactcaatctatatatattttaattttttagtcttggttatacttttagtgccggtctactaaccgacacttatagttattataggtgttagttataaactgagaccaaagagtttgggtggtctttagtgttagtttttttaaaaaaatgtctctcaaaccaatacaaaaatctattttgtagtagtgttagttacaaatatttatttaaatattataatataattagttaatattttgaataaataaatattttatttaattaaatttttaatattattttatagattataatcaatatatcttgatataattctaaatctatatatacatagatttaaaaacctaatttgtatattttattttctctcctgaaattagtttttgcttatgtgctgaactctattattttgtatattctatcaacccacgctaatccttatttgtggtggtagatttggaagataacagtgtgaccattcttggatataatgtatgaaaagaaagcaaagaatcttaatagttcatcaagaattatttttctcttttatctttttcgtttgctgatttaatatatatacatatgagggatccttgaatggaacaatgataatcatattaaaatgtttttgatgtatacctaatttagtacccaaaaactaacaaaatatgcatcaacctccatggagccatcacagcccaagcaaaacaaacatcgtttgaacacacaacaagccatcagaagcacaatatcgccattggtctaggccatctgcaagagaaaccccacacttagtgttaggaggagtgttcatcaaactccccacaccgcacaaattgtctgcactataccacattgcacaaaaaattcagtttgaaattctttgcagtgctgttgcgatttgtacatcgacaaatcgcgcggtgtggtgcattttgcagttttgaatttaataattgcagtttaaaccgcaccgcattatatattacaaacatactaatttttatactataatttatcttttgtatgtatgaacaactcatatacttacaaagtccaaatcatataattaaacttaaagaatatccatataaattattctcattttttttaacttcttattgttaacatattattattgatataaataatataatttatatatttttggagattcttttaccaggatctagatttactaccatgtatgttatttaacattctaaatatgaannnnnnaaacaatgtaatttaaacacatata

SEQ ID NO: 40980 - DNA, 1356 bp, Cannabis sativa
aattgaaattttggtacaaacagtacattatgaagagtaattgcagagtttattttgacagttccaattaattgaatttggaaagtatcaccattaggaagagtgactgaattgtgtgttgtggacttggtgatatgtgaaaaacatctaatattgcaacatacatggtgagtggcaccactatctataacccaagacatgggaggttgtcgatttgtgttacctgtgaagttgttgattgttggaccttctggtgttgaagcatcagtagtggttgaagttgttgtgtcaacatggatattagttcttggcactgagctgatgttaagtgggaactcgatgtgtctcctgagggaagagagatgctgagagtttgtgggggatttctgttattggaaacagtttctggtttctttccattgttgtgggtgtcattgtttcttggttttccataaccaggtggaaaaccatgtagaaagtaacatttgtctttataatgaccaggcttttggcagtgagtgcaatggggtctgggcctcttattttttgaattctggtttacagcagggttgggattctggtctgttgcagcagggatatttgtgtttgttgcagcagtgatagggggtgttaatctattgccaagagttctttgtctttcttggtgaatgaccatagaaaagactttgtttaggggggggggggcaaggatcgattaacaggatctgatcacgagtggcaaggtaggtttcattcaatcccttaaggaattgcaaaacctgatcgtgattgatgtggttttgtgcgtgtgttgctgttgcacaagtgcaattaattcttgggcgaacttgattgatttcatcccacatagcagttaatttggtaaaatatgcactcactgtatcatcaccttaattaaggtaagtcaaggtttcatttagctcaaagattcttgggccattttcttggttgaatctgttatttagaacagtccacatctcggcagcagtgtcgagatacataatgctactcttaatttcaggtgacaccgaatgaagaatccatgacattactaattgattgcatctaatccaagaactgtaaagtgaatcatgaagagggggttgaggtaaagtaccttccaagaatggagttttgtttctggcacgaatggaaatcttgaagtctctcttccatggttggaagttgcgatcagtgtgaattggtgtagcaagaaccagtccttgatgatcagcattactcagatagtatggagaacgaatgtccttgtaggggggtcgatcgatggaggtggatcgagaaatagggagttgatcttgttgatgattgattgtg

SEQ ID NO: 40981 - DNA, 2602 bp, Cannabis sativa
  modified_base (74)..(88): a, c, t, g, unknown or other
  modified_base (1065)..(1066): a, c, t, g, unknown or other
  modified_base (1902)..(1902): a, c, t, g, unknown or other
acaactctatgtatactattactgctatcaatgtaatctaacaggaaataacaacatgtacgctaaacatgtannnnnnnnnnnnnnntattatactaatcttacctcaattgagaattcaggtgtggcggtccacctgactggaacaactgctcgacaaattataggccctcaaatcgcatcgataataacacacataagtgactcgctaaatcacaaccgggactaaggtttaaaaccaaaaccctatctactgcaacttaatatggtaatatcccaaactaggagggaataaaccaactagaaaccagaaactgacacgaaacgacaagctgaaaaaccggtattccccctgctgcaaaatccgggtaaccggttttacccagaaaacaacaaaaaattcataccctaaccaaatcgtttcgaaactcaatcaaaccttccagacctgcatatcactactacaaatatcaaaattctcgacggtcctaaaaataatttttttcgaggaccgtcgctaaaaaaattaagtaactatttaaaaccgtcaggaaaaatttagtattgtcgatggtttaaaatcgtagtaaacaaaataggtgactttttttaatacaatgcgattttttaatggacccttataggcgaccgtttaaaaccgtcgcccatactataggcgaccgtttaaaatcgtcgcctataagggtccaattaaataatcatcacctacttcttgccacatttcccatgtgcccacctgctttttttctatttcccacatgcccacctatatcttctcacatatttcttctccatttcccacaccctaaaacgaaaatcttaactcccaaaaaccccacccacgcctccacaccattgccctcctctctcgccaccttcctccctctctcgatctccctttcttcttgtctctctcatccatcgatctccacccaaccctcctcccgtcgatctccctctactcatcgtcgcatacatcggaccaccaccacctcctgtccgtctctttctctctttctaagctcggtataaatacatttattnntttatatacttttttatttattatgtatatttattttgttattgtataaatttaatgtgttttaaagttagttgttattgtaacaaaatgaattagttgttttattttaatttaggtaaaatgataaagctaatggaggaaaaaaaatgggggaaaatatagattttattttaatggaagaaaaaccgtcacctatacccagttaaaggcaacaattttaaaccgtcgggaaacccacattagcgacggttttgaaccatctcctattatgcccgttttacgacgatcgtataggcaacggttatagaaactgactggaatactttaaacggctatttaaaaacgtcgggaaaacccatttttgtactagtgtattataccccaataaactatttccaagcaacaaaacaacaatcaaagcccagaatatattttcaccattaaagcttcaatcttgagttctaaaactcaaagcttgctaaaaccgtcgaaaactgacacgaaactacaagctgaaaaactggatttcctccctgtagaaaaatccgggaactggttttgtaagcattgtaaaaccggttaatcggttttacccagaaaaccaacaaaaattcataccctaaccaaatcgtttccaaactcagtcaaaccttctagacctgcatattatgccccaataaactatttccaagcaataaaacaacaatcaaagcccatagttaattttcaccattaaagcttcaatcttgagttctaaaactcaaagcttgctaaaaccttcaaacaactactaattcatgcttaactcaacataataaatcatattctaactacanaaacatgattcaaacaccaacaataatcacaacagctaccaactcaaaatcatgcaaaatccatttcttaaaattcaagaaaacctaactagaaattgctagaaacttaccttcgcttggattcacactaaatcttgcttcaacttgcttgaattgggaagaaaaaaccagaacctaaatggttctctagtgtttgaaaagagagagagagcttgagagaaaagtttgctttcttttgaattttcttatttttggaaaataaatgagataacacttattttattaaatatttcagctaattaaactttaaagatcagattactcatcaacataaagtccactaaaggacaaaaatacaaatgggcaaaaagaccatttttctcttccacagtcacaaaatggcactaaggaggtattttgggaaattctaaaatcccgactattcccaacattcctaatgtcaaaaatattgtcccgttaaactaaaaatactaacatgtgattctaatagccatacaccgtgttgaactcgcttttagccaacgacaacgagtctatttgataagcgataaatgatttataataacaaatatattataaagcaataaagagacaaaggaattttatagaggttcagccccgagcagtttggtaatagcctaatcctcgttacttgtattgacttaagatcaaggagaaa

SEQ ID NO: 40982 - DNA, 1152 bp, Cannabis sativa
  modified_base (39)..(64): a, c, t, g, unknown or other
gtgtttaattttagtgttttagagatattcatatttagnnnnnnnnnnnnnnnnnnnnnnnnnnaaatctagatcctggtaaatattccctgcaacatatttaggatgttaattcaagatacttgtagtaaatctagatcctgttaaaatatttttaacaactggccttaaagtcatggtaatgatttactttcatgtaatatggatttaaaacgatgaatattatttttgtgttgattttggatatgttcatgttggtttatgtgctatttgatgaatgtatgtaatttacaaaaattttccatgaaaataatcctatttccattctaaagataatttatttggattctttatgaaaaattaagcaattttggtttttacggaactcgattccaataaaaaaattgagaaagatatagaggtttgaaaaattgggtcaattgggtgtcgagggtggtgcaccatcgcaccagaccctcagagaagacgctggtccgcgcgtgtaatcagacatgttttgtctgaattcctcagtcaggactgccttcagacacgcatccctcgcccatggagaccctacatgcgccgagatttctcggcatgacaccctgcaaactccatccctgtgtgcgcgtatgggctgtttgcagccttcttgggctacacgtgcagccacctgggcagcaatacccaaaatccattttttgtggattttttccacaaatttctttccaatttcaaaccctaaaaatcaaaataaaatattatttttaatatttaaacttaaatatcaaatttataatatttaatttatttaatggattattattaatttctgatattttgaggtttaaatttaaaaattaattattttattttttatttatggtcagattttaaaattttgttaatttcattaatatttatgtattatttaattatcaggttagatattttaatattaggtatattttaaattaaaagatagcattatctttttaatttgaaatattatatttaatttacctcataagataaattaaataattaataaatttgaaattgacctcaatattttttatagatattctaaccataatattttcaaattcaaaataggttattttataaaatatttaattgtttataaat

SEQ ID NO: 40983 - DNA, 1683 bp, Cannabis sativa
  modified_base (28)..(41): a, c, t, g, unknown or other
  modified_base (535)..(537): a, c, t, g, unknown or other
aagtctgataactcatctctctctctcnnnnnnnnnnnnnntctctctctctctctctcatatgcccactactcttctcatacttaagatttgccaactctgattcctacacaatgtaacctttagagagctattttatatcccatcactatagtgttctgagtagtattatctcttagtatcaatacaactaaaatgggagtaggtcattacccgctgactaagggagtcgaacctctataaaattatgcgttcatttactttgttgttcttattatgtaacatgtggctagcatcaacattaaatatgactccactgtcggttggccaaatctaaggtcaatagtttccttaaaattcttagctaaaaattataattttaaaataatttttcttatttaatgtgacagttagagccccgtgatttggggaaagattggtaactgtacaatcccacattgcttagggaggatcatttgtgatgattttgagattgtgtaggtatgagactacatagttgaagatgacttaaatnnnttgattggtactacctatatctacaaggtagatctattttttttggtagcctatcacgaaagaactccacggttaagcatgcttgacctggggtaatttcaagatgagtgacttataggaaagctttcctaagaagcgtgtgagtgaggagaaagcatgctggaaacactcatgttggtctgtagggtcagtcatcattccatgaagcaactagagtgacgtactcgtgtataagagccatcattcagtgggtgtaaggcccaatgaaggcttgaagcggggacattacaaatagtattagagccttgacctagttggaagtgtggtcgataaggacgttggattcgtaaagaggaggggtgattattgttgtgacagttagagccccgtcgtgatatgaaggggaaatactgggaactgtataatcccacatcgcccggggagggtcatgtgtgatgattctgagattgtgtaggtatgggactacatagatgaagatgacttaaatggattgattgacattacctatatcaacaaggacatcttgttttttagtagcccaacatgaaagaactccacgactaagcgtgcttgacctggggtaattttaggatgagtgacctctagggaagttttcttaagaagcatgtgggtgaggataaaacatgctggaaacactcgtattggtctgtagggccagtcttataacattccatgaagcagccagaatgaagtactcgtgtataagagctattattctgtgggtgtaaggcccaatagaggcttgaagtggggacatcacatttaaaatttaattatatatatatatatattttttaatagtttgtattattattgtttaggctaattaggatttttgctccgtaaactttgacgtgtaccaaaccatgtctctcaaacttttctttcaggtcattaaaaatttctcccaaactagtgagattgttggatttaaggacttcagtcaaatttttttcaattttaccaagccaacgattgttaatgtactaaatcatgcctcttgaagtttgatatcaagcaaatagtgcccccaaactttgacacgtaccaaattgtgcatcctaaactttcatccacgcccgatttctattagtaaaattgaac

SEQ ID NO: 40984 - DNA, 1665 bp, Cannabis sativa
tatggttgaaaaatatagagcatataatggtaaaactcaaactttctaccattttcttcttcgccaaaaaacttaagctttctcaaacctccacttgagctttctgaatccgtgcatgccatccctatctttgacattcttcctgcaaatttactcagacttgcttttccactcccagtgctcgaaaaacttatcccgccgaccgtcacgtctccattcgtagaagtttccagcatccagcttttcgaattcatacagtaagtatatcattctccctttgcttttatttgggttacgatttgtcatacattccagtacttcattcggtttaataattagggttcatatttcctgggcgatttttagggtttagacatagtttaggtttgtcatattccttaagcctctcgtttgataaatttcatctcgaagttgggattgtctttcttttgtagagatgttccaaccttgttcagaaatttattctccagaatctatagcaccggtatatcccaaacatatagcctgcccatataaaccatgaaatttcgaacctatgtccaaattggaaataaatgatgctaggattagagaccattcgattaagtcaaactaagaagagactgccagtcgttataggcgattctcgcaagaaattttcaagggcaaacatcactttttgcgagacgcgacctggcctgaacccacgattttatcttctattccactcgcaagaccaatgtttttacccaacgtcacagttgcttttgaaccaagtaaccttgagtttgaaatcatgtctcctaagccccgcaaatcaaagaccccttaggaccccaatgttaccttcgaggtagaacttatcgagtccaaggttaggtctattgtggcctacattggtggcatcctacagtctcgcagcattaagaagcagaaagggtgcattataaggtctgtggcacctggggaattaagttgttttcccccagaaaaaataatacacgaagagtgtagtggtcccagcaagagtaactcttcaggtcttggagcttggagccttgagcatatcaaggctagagcgatccttcccctcaaggattactttaaggaatactacaactacctcagggttgccccattccaactaaaccccacctcacataggatcctcatgagccctcaaggttccatatcacatcttaggctgggaatgccctactcctttggagatagcctacttttattccgtcaaagtcgttcctgcgagaaagaacgttgcgggaggcttctattatcttggggcctatactggtgaccgcaagctcatagttagttttcccaataagacagattttaaagaggacttcttctggacaacggctttatctccaataaacacaactgccttccgaatatatcatatgtaagttcctttccttgcgaagtcattcatattaacttgtagtttctaaagtggcttactgaatttttatctgtttgtagcggttcctaggagaccagttcctacgccaaagatagtcaagcgtcaaaagaccttactgagcctaccatacgggttgcgagctgcaggtttctttttaaacaagcagaatctgaagaacgttggcctccttgctgcggacgagtatacttgcgattctaaac

SEQ ID NO: 40985 - DNA, 3857 bp, Cannabis sativa
agtaggagttgctaaaccatgtagtcgatctgtcaaaacaaagtatagacttttgggacatgttatggtgtggaagttggaaaagccactatacaaggaatccaactattgttttgtggaagttcacattgctatcttgcttacttgcagtcaataaattatctagtccctgaaagtattgcaaaataactatacttaaaaagcaatatataatctgttctttttatatgtttgtatttatagtttctatgtcataacaaataatcattttatagtgtgacaaatggacataatcttttcaagtaaagttcttgatttggttggactttttctgcattggagactcaaatatctattaagtgctattttctcactcttgtatgaacattgcttttaggttgtcttaacaaatgatttcctaagataattcaaatctgtatgcgtttgcactaaacagacattgaagtgcctagtcaatttgtagtactatccaaacttatctcatcttttatttttcttttcaaaaaaaaaaaactcatattctatttgaacgactcaacagattcttgttagttattgctgctcttcttccttggctccaagacttattaattaacgagattgggtttctctacgaaatggcaagcacttcatcattaatttctgcagcttcaagaaggtacttggtttgcttcttctatgtaatcacttgaaacttttgcaatagttaattgattatggataaatagttctattcattagcagctttgaaaaatatttcaggctagagggaaaggtagctcttataacaggggcggccagtggtattggcgaatgtacagctaaagtcttcgctcaccatggagctaaagtagtcatagcagacatccagaacgaacttggccacttagtcagccaatccataggccaaaacaattgtatatttgtccactgtgatgtcacagacgaatcccaaatcaagaatgatgtggacaaagcagtggagacctatggaaaatttgacataatgctcaacaatgctggggtaatagatgaagaaaagcctcgaattatagacaatgagaaggctaattttgagcgcgtcatgagtgtgaacgtaactggtgtcttccttggcataaagcacgctgctcgggttatgatccctgcaaaaagaggcagcatcataacgacagtgagtgcaagctcatacatcgctggtgtcaactcacacgcctacacatgctcaaagcacgctgtggtaggccttacaaaaaatgcagctgttgagttgggacactttggtatcagagttaactgcttgtcaccttatggcgtggccacgcctatggctaaggccacttgtaagcttgatgacgaggagctcgagaatttgttgaactcggctgcgaacttaaagcatgtgacgctcaaggcagaggatgttgctaatgcttctctattcttagccagtgaagagggaaggtacgtgagtgtacataaccttatcatcgatggaggtttcaatattgttaatgtttctttcgaaatgtttcaattccctgataaagatcaaccttgaaaaatgataaatgctttcagtaataatatatggagaatttaaaattttggtactagtgaaattgaatattgcatggtaagcattgctatttgttatatttactcttgtattgtttgttttgtatttttgcttgaaatggttctattactttccatatttgctgtcgttttttattaatgtcgttttcacttttatgtgttgattttaaagtgatgtggatattattgttgtgtttagtagagggatttgggaattcacaaatttattgaaaaatgaaaatcaattatgtgggttctacataaatttggaagtaagaaattatgaggttggaaggtgtgatgtgaaatattggcttgaatatcttctcaaataaataattaaatataaaaatgcaagatttctctagagccttcaggatgcatgctctctgttttccctccaatacccaaactgggtttttggtccacccaaatcggttttgtggtggtatctggtacctcttttggggttttaatcctcatcatttctttttttccttcattaattacaacactaatggtcctgacgaatattatcttcaaaatctttcttcagaccaaaatttctatagcatttattatcttctagcctctcgtttagctcttaagttgcatttgcatttattatcttctcttttcttctaccaagtatctaactatcaaatcaccagatatctcttaaatccaatttccttcattaaggtggcggcgaggagaatcgaaagagttgatgatgcttgggagaatggagtaatcatgatatctacccaggttagaggccaagctatgaccagaggcaagccaagaggtactcttcatagcctattttattccttatataaagatagatttaggtcaatttggttttcaccatttttcttctgtactttctctctctgtgtaattgttctgggttttagttctacgatggatgctcttaatcctttcccttctcactctttagcccttacccctgatgaaaacactgtttatacccttgctgatgtccctgatgattccactaataatatcaatcttctcttaaaactgttcactgtcaaacactatagtcgaccctccttgatcaaaactctatctcaagtctggacctctcagtgtaggtttcctgtagttgtctctgaacactctgatgggctctttctggtcacttttggttgtgagggtgataagaggagaattcttgatggacagccatggcattttgcccagagtctcaccatttttgctgctcctgatgcctcttttcccattactcctgatcagcttcactatgttcctttctgggttcaggtgtatggtattcctttccgttgtaagtcctttgatttagccaaaatcattgcttcgggtttggggtgatctaatccaagtggataataccactgtaaaggaggggactgggccctatcttcgtatcagactgcttattgatgccaacaagcctattaggcgaggcattaatgttcgtttctttaagatgggtagggaatttatcaaatgtctggattttaagtatgaaaggctgcctgattattgcctttattgtggcaaacttgatcataccagaaagtattgccatgcataccttcagaagtgtgatgaatctattaccccacctccttgtccttatgatctccctcttagggggaaagaaaaacctactgaaaagcaatctccttttcaatatcctcatcctccagctatcaccatcaatgacatggatcttactgactttcctcatggaaatcaattccctaatccttttctgaactatctatttagttttactcctttgctgaactctaatgtaacttcggtcactggtctgactggttcttgtcaatcctataatgtcatgatccctactccagtgaatcccaattactctttgggattttctatgacgggttcatctttgtttgtactgttgcatactgactctgttgttgtcaatgataccccgggttttacaaaccctgaactgacctctgttgctcgctctcttgctgaagctttgccctccttgatcctcaactcatgtcaggcctcccctgcctctgtggtggaaaccccattgcctgattctcaggtgcgaggtaaaggtttggcgtgtgcttctggggtcaaaaggcctacttttcaagcatgtcaagctagtgtaggtggttcaatgcgctcgatgcttaagcgagccagagctggtgatgttgatgtta

SEQ ID NO: 40986 - DNA, 1612 bp, Cannabis sativa
cagcttccatcaacatggagttcccatgttagttctttgggattttgttgttactcttgctctcgcttcttctctggctcttgcttttctcctgagtcttgagggtgaagagttgagtcagtgcactcaaccacaaagtcagcaagggcttgaccctttatggttgttcttggttggtatgtgatctcgaactggccaagcttaatggcccatttgagtagtcagcttgatgcttcaggtttctgcaaaacttgtcacagtggttgattggtgtacacctttatggggtgttcttagaagtagggccttatctttctggaagccaagagcaagttgtaagtcatcttctccatgagtgggtatcgactttcagcatcaattagccttttaatgatgtagtatacagggtgttgtacaccgtcttcttctgttgtgaggacaatactcacaccatgctctgtcactactaggtacatgcctagctcttcattggttcggccaattgtttctttggctcctagaatgcatttttgccttcctttgtccactcaaattttttgttgcctctaagaattttgaagaagggtacacatttgtctgtagacttggacacaaatcttcttaatgcagcaatgcgtcctattaggctctggacttccttgatagttatgggaaacttcaagtccaaaaagggttggatcttgtctcggtttgcttctattctcctggcgttgactatgaagctaaggaattttcctgagcttacgctaaaaggtcatttaagggggttcagctacatgttgcagctgcgaaggactttgaagcactcacataggtcctccacatgcccccagcctttttggacttgacaagcatgtcatccacatacacctccatgttgtggccgatgatatttgtgaaaatcatgttcactagcctttgatacgtggcccctgctttttttcagcccaaagcgcacgactttgtagcagtataggcctaggtctaacatgaagctagtgtgctcctgatctggtggatgtatctttatttgattgtaaccttagtatgcatccatgaaactcaagatttcatggccagctgtggcatctaccagctggtcaattatggggagtgcaaagcagtcttttggacatgctttgttgaggttggtgaagtcaatgcagactctccacttcttgttgggtttaggtaacagtactgggttggatacccactgaggatagaatgcctctattatgaagtcattggctctcagccttttcacctcatctttgaatgcttgggcatgctccttgtccagcaaatgtctcttttgctgaacaagctggatgcttggatcaatgttgaatgcatgggtcatcacggaagggtctattctgaccatgtctccatgtaaccatgcgaaatggtccaggtttgctcttagaaattctatcaagattgacttgatttctagagtcaaacctttatggatcttcagtattcttgttggaaaagtggaatcaacctccacttcttccaactcttctacaggtccgaagcttcttgtaggatcccaaaagcaaggatctatgtttgtgtccccacc

SEQ ID NO: 40987 - DNA, 1021 bp, Cannabis sativa
ataggaagtggacaagttactagtgaatgactttatacgcgatgtgttttatccctcgtggatagccaatcctgttctcgtccaaaaacctaatggaacttggagaacttttattgatttttctgatctgaacaaggcgtgcccaaaagactgtttcccactacccaggattgaccaattagtggatgcaactaaggggcacgagcttatgtcatttatggatgcatattttggatataaccaaataaaaaagcatgtcccatatcaggaacatacgagcttcgtaaccaacatgggactctacagttacaagatcatgccatttgggttaaagaatgctggggcaacatgtcagcgattggtgaatgaaatgtgcgcaaatcagatcaaacggatcatggaagtttagattgatgatatgttagtaaagtcagtgaaaagtgtgaataataccacagacctcgcggaatgctttaagatattaaagaagtataatatgaaactaaacccaaaaaagtgttcctttagagtttccttaggaaaaattttgggactcatagtcaacgcgaggggtatcgaagcaaacccagaaaaaatcaaggcattgatagacatgccatcacaaacagagcgtaaggaagtacaagccctaacaggaaggatggctgcactcaacagattaatctcgaggtcaactgataagtgtttcccattctttaatgtattgcgaggcaataagaaatttgagtggacagaagagtgtgaagaggcctttcagaacatcaaaaggcatctagcgacgcctctagtgttggcaaaaccaataactagagaaacgctactcctctatctagctatctgggaaggtgcgattagtgcagctataatacgagaagagggtaagcaccaacaacctatttactatgtcagtaaaaggttactatgggcagagtctagatatccccctcttgaaaatattgttttgtgcttagtccacacgtctcgcaagctacgtctgtac

SEQ ID NO: 40988 - DNA, 2361 bp, Cannabis sativa
  modified_base (986)..(992): a, c, t, g, unknown or other
tcggtctcggccaatccctgacggattcaatcttccttggatccaccttgattccatctttacagacaatgtatccaagaaaagacacttgacatagccaaaatttatacttcttcaatttggcatacaatttatgttctcacagtcggtatagaaccatccgaagatgttgctcgtgctcctgttctggttgagagtacacaaggatgtcgtcgataaaaacaattacacaaatatcgagaaaatccttgaattccctattcattagatccataaaagttgggggagctttggttagtccaaaagacataaccagaatttcatagtgcccgtaccttgtgcaaaaatccgtctttagaatgtcctcctctcagattctcaactaacgatagcccaatcgaagatcaatctttgagaagaccattttcccctaaaactcattgaaaagatcatcgatcctaggtaaatgacacttgctcttgatagtcaatttatttaattcctgatagtcgatacatatccgtaaagatccgtctttcttcttaacaaaaaatacaggacctccacagggtgacacagtaggccatgtaaaccccaagtcaagcaacccctgaagctgaattttcaattctttaagttctaccagagccattctgtaaagtgccttagaaattgaatttgctccaggtaccaaatcaataatgaaatcaatttctctctgcgctggtaaacccaaaagttcatcaggaaaaacatctaaaaactcccgaacaaccctgatttcctatggccgaactgtctcatcccgtgtggtatccaataccacgaccagaaaccctaaacatccgtcttttaacaattctctagctattaatactgaaatcattggaactgggatccctgaaccgatcccacaaaaacaaatggttcctcgcctaggggtgggaagatcgccatcttccatttacagtcaatactagctgagnnnnnnnataagaaatccattccaagtataatatcataatcagctaaatccatttctattaagtcagcactaaactccctatcctcaatcctgatctgcataaacctagtccaccttttggagatgactaattctccacgaggcagtagggttccaaaccctttatcataactatcatgcagtctatccaacatactaaaaattctagttgccatataagagtgaatggccctagagtcaaacaatacagaaaaataagagtttttgacagagacctgacctataacaactgaggggctaacctctacatttgcatgagttagagcaagcacccttgctggagcgggtttcgtagctgtcttctgttcttctttcttatgatgtgggcaatctcttttgtaatgtcctagaaacctacactgtaaacacccttgccctttacactcacccagatgatgctttttacaactgggacactctgggtaagtgtatcgggttttagaaccaacctgacggttgcctcgaccttggttccctcagaaccttttattctgacctgagccactaggtgcagtaggcgcctttcatttttgatcagtggtcaaaccactacaacccctaccataaccagaggtaggaggagtaggagccccaccaacaacctgagtcgctcgagactcctcagtgcactccactacgctctcagctcgtagtgcctttcccaccatgtcatcataagtggtgttgtcctcagtagtgatcatatggtcatgctttatttttggattcaagccattcagatacttttaatccttactgaaatcagttggcacaattctcgaagccaatcttgccaatcgatcaaactgagttgtgtattcagtaacactcatattctcctttgggtcaactgagtaaattcttttatttttgcacttctaacagcttcgttgtaatactttgcgttgaacaactcctgaaacttttcccatgtcatagtagtaacatcacacgtcagggacaccatgtcctaccaaactagggcatcttcttgaaactggaatgtggcacaggccactctgtcattgccggtgatgcccatgaaatttaagattcttgtaataaccgtcacccactgctcggattacatcaggacctcccaaaaaaactagaggtgcagcttgtagatactttcatatagtggttccatttggttcactagaaccaccggtcctacctgcacagcaggagcaggagccgcctacatttttggagcaggcattactggagcaccttgctacccaggcgtctgatttcttcctcttgcttgttgattttggcttgcattgccacgtacctaatttcccattcctagg

SEQ ID NO: 40989 - DNA, 1933 bp, Cannabis sativa
ttttcaattttttttagtttttttttttcttgttgctgtgtttttcatatgatgttttgtgttttaaatttttcccccttgttcttttaggttatcaccgattctgattttgaggatgaagtccctaatttggaagtgaagcctaaagttaaatccaaggtatgtttaccttgaattttttcattttcttaagtttaaaatttttaatcaccctttgttttctttttgtttttgttttacctgtttataatgactgttttatgttttgtctcattttttgtgtatttcttttatgtatttttgttgatgttgtttttgtgttgtttttcagttgttttttggttttgtttatgctattaaacagtttgtagcattgttagttttttagtgttttattgccttgttctcaacagttatttaaatgtttgttttcagttgttttcatgttgcttaatttaatttcacggttgacaattactattgtaatttcattttctgcatagtgttgttaatatgttgcttggaagttgctcatctttttttttttttttttgaaaaaggggaaactttattcaaaaagactagcaatacaaacaaaggcaaaaagccaaacaaaaaaccagcagctgccgaaccagaaaaaaggcagcagccacccaaactaccaacttttaattacatttaaaaaatacatattcttcctacaatcctcaaacggacccttacccaataacctcaactgaacagttttacgaacatctaaactaactcttctaggggcggcacaacaaagataaacaacacagcagtttctattcttccaaattgagtacattgtcgctgctatgacagtattcagcaaccgcaactgaggctgctggttcagatttttgcaccagttcagcagctccaagtttgatctaggccaagagaagcagcccaaccactccatgacagcacctataacctgtttagtgaatatacagttgaaaaaaaggtgttcgtgcgtctcaacttcagcttcacaaacaggacagaggtcattttgaattgaaatgaatcggccaagataatcccgagtcagcaattgggcgtttaaaatctgccaaaaaacaaatctatgtttcggcactatgagtttatcccagctagctttagcatattcagccttagccacttcaatagataaattatagaaccttttggcactaaacttacctcctttgactgcttgacaaagtctagcttcatccatggtatctcttatgttcaaaatcttcttgaagtaccaacaatcatcatacttcatggtatagctccatatgtcctgagtcctcagataaactgaattaatccatttaacccatagacaatcttgtttaccagcaagagcccacaaattttttgccaaaagggctttattccactttttcccctctcgaaacccaattccaccaaggtttttgggaagacacaccttttcccaagaagctcgatgaagtttacttctattccccgaggatccccacaaaaagtctcgacaactcttgtcaatagctgctgttatcttagaggggatgataaaaattcccatccaataattccttatcccaagcaaaaccgaatggataagttgagctcgtcccgcaaaggagaggtttctactcggccaacaattgaggttcttgttgagcttgtctaaaataacaccacagtcttcagccttccatttggtaggcctgaggttgaccccaaggtacttaaggggaaatcccccttcttctatcttcacacattccaaaatcttgatgtggactccaacttggaccttgggacctggactctgacttgaccccagactcaaaccacagccccaaccctagacctggatgtggaacctactttaataaaaaaaaatgaaaatgaaaataaa

SEQ ID NO: 40990 - DNA, 3320 bp, Cannabis sativa
aaaatgagttatggaagcctctctttttataggtaaatgaggcccacaaaaataagggaaaataaaataagatgtttttgaccgttgatgatgatctaacggtgcaaattatctcttgacggtgatggccattttttggagcctgacaagtccaactgcgggttacctagagcttactttcgtaactctcttggggaggaaatgtgacaatgatagctttagaattacgattggagtgtgagacatgacttaatagaccattgaattagcatcaaaactcaagttaaattgtgtcaatcgaatcaatattgagtgtgttattatttttttactgaaggcagttcatgacctaatgtctaggttgatatctagcgttcaggttgacatgccagtacccaagttgacatatggcatcaacctagatgctaggtaagtgtaaaaatgtccaatggatgtactttaagatgcctaagtgatgttttgacatcacttagtcagtttctatattctggaacagctggtcaccaattcttggagatgttgctattctgcggaaatgagagactcaaaactctttatttccgagtgatctaaaaatgagaaatgcaaagttgtgaatttgacttctttgactttattaatctttgtgttggaatttatgccctaaaagcaagtaattattggataatatataaaagaatatatgaaataaaagtataagataaataattcattaattataagagtataattattaaatatctaaaaattattaaatatctaaaaattatatctaaaaattctttatatctaaaaattctttattcaaaaattctttattcatatagagaatttataatattttaaggatgtacaaaagaattaatatttatgatatgaataaaataattcggaagtttattatgtgattttgatttagatcacatatgtggatgacatgttgaatgggtactgtgtataattcgattacacatgactagaccgatatgtaataaacatctttcattgacgtgtcatttaccatgaaagagttattcatatcacaatgatgatcattagtagatcaacctgtatacatgactcctatttgtgttcattaagttttttgattcactcattatagtttcttagagaagatgattcttaaaacttttgttttggagcttaataatatgagtggctaggaacatgttatacaatagtagaatctaagctttcctagcagatcgaatattagttcccttatagtgttagtcttgagagtgattacagttgaatccaaatctataataagttatagattaactgttcacatataattaatggtacataaggaataaagagataattattagaagggtaaaatggtattttgaccaactctaattctgaactaataattggagggcaaactgcttatcttgattatatcaatggactgcaagtaaaaattctgtgaatataattctatattgtcaaaaagtataattccatttttatagtggagtaataatggaattaataaactggattattctattgatgagattgataataatcaagtgtttattagagcttcaaaatataggtccatggtccccaagtctcctctatgcaacactgtacaggagaatattttatttgatgaataaagttagagtgagaagtaatttctattgacctcgcttctagcgaacgacagtgagtcaaaaataaagcgattaactaagataagtaaaagaaagcaaaaacagtaaaataaattgaacacagtaaaataaacagtaagtatggttatagcctactccccttgtatttgtatcgacttgagagagggaatgaagtgttcttcctcttaaaagctcttacaattgatctctgagtaactttctctcttagatcacttttttctctcttgaatgtatttctgcatcaattttcttgatccccttcatagtgagactaggccactattgatagggacttcatacatgaataatagtttcctttttgcctataatgagtaaaataggaaactatattaattctataattacaatgcaagaaataggaaactaaaatgtgttgcctttattttctgacccaatccggtaattatagggattgtcttcgcattctagaaacaacgagattgatctctagaattgccatctttcatgcttcgcttagcataaacatgtatgcatcttggtcgaacatcttctcagccatccttctcggacgtctgagtcttatatatgttaagtagtcatttatgggctgctagggatactttaccatgcccatgtatcaaaaaggtggggcacatgtcaacgatccttattgtcacatcaaggtgcaaaaaataggataacatttgcccccaagtctgcgcgggaccttcctggtcggacgtggacttcactcagcctagagtcttgttcggatgggtgacgcatgtccttgatgtcggatggtgatctaatgtgactctgactaggggtctctgcaatatctgtccatttaatgctaattgatggttgtacctcgaatcaaggttcgatacttgagtgtgcttgacggttacacttcctgcaatgagtgcgtaatgtatacttttggggagaaactcaaaaaattcgaattttaaaatgattaattcctttttcggattgcttatatataaataagatcaaggactcctagtaattcttttagctgttttaattcttaaacaccagagcaaaggatttctagccaaatttcctccaaaattcttcaagaagatcataggaaaacctttgacgataccatacgaggagagcaagaaagcttcaaatcagtgagtaaattcttcatttctttcttttacacatttgcaatgaaatgcatgtataatttttgaattttttgctatgaatctcgcctgttcttgaactattctaggttatcatagaatacctaggtttaggacttggaaatctcatttatgtttaactataacatctgattatctgactacgcttcgaaattaatcttacaatgttcatttccactagtccataagattttagtgaaaattagaatccaattcaaagttttgaacttctgggattgaaaattctatttttggttgaaacctttgcttttaattttcaatcgaatgtggtcggtatgtacaatctgtttttcattcgtcaggctgaccaactctaactttcttatcccctaccttttgtagatggaaattacggtgcccaacctatcaaacactgaagtacaaggtggcctcggtgtct

SEQ ID NO: 40991 - DNA, 2061 bp, Cannabis sativa
ttcacagaactcagtgaataatttgccgtcaaactgagttccattgtaagatactattttaatgggcattccaaatctacaaattatgttcttgacaacaaaatcgataacttttttgtatgttatggaaactagaggttcgacctctgtccactgtatatgaagaaatcaactgctactaccgcgtactttgctcctcctcgccttgtgggtaatgacccaattaggtcaattccccatattgtaaataggtatggcgaggtcatcattcttaattctgttggtggtatgtgaggcatacgtgaaaatctctagcatttatcgcatctcttgacaaattcatgtgtgtctttgtttatcgttggccaataatatccttcatggataatcttctttgataaactttgccaacctgcatgatctccacaaaatccttcgtgaatttccttgattatctcgtttgcttctgttggcaatacacaccgtacgagaggcattaaataagctctcttatacaattttccttcgactactgtatagcgaggtactgcatacaagagttttcgtgccttcttttttgtctgtaggaagttctccgctaagtagatatcttagtatgggtgtcatccatgtaggcgaggcatctatcatctcaactttttccttttcacatatacttggatcgcttaacacttccaccggtaccagatttaaattatcaagctcattctgcgaggccaactttgacagtgcatccacatttgacttgtgttctcttagaatttgttcaatcttaaaataataaaaattctccaagttctttcaaactttctccaaatattttgccatctttaaacccttcacctggtactcgcctagaacttgattcacaatcaactgggagtcaccaaagcatataagatttttgactttcaatgcttcagcaattcttaaaccagccaacaaagctttgtactcgggctcattgtttgaagtttcaaattggaatcttaatgtgtagtgaaatttaatgttttctggtgagatcattatcactcctgcacctgagccattttcatttgatgctccatccacatataatttccaagtttttgtatcgtgcttgataagtggatcttcttcggagactatcccttcaattaggaaatcggccaaagcttgacctttgattgatgttctcgggttgtaggttatatcgaactgccccagctcgattgaccattttatcaatcttctcgaagcatcaagttttgataaaacttgtctcaatggttgatccgttaagacttttatgggatgtacttggaaataaggccgtagtttgcaagatgtatgaattaagcatagtgcaagtttttcaagagggggatatctcgactctggcccaagtaatcttttactaacatagtaaaaaggttgttggtgatttctctcttctcgcaccaaggttgcactgattgcactctctgagacagctaagtaatggtataaaatttctccagctattggtttggccaaaactggaggtgttgataaatgtttctttatgcctttagaagcttcctcacattcttctgtccattcaaacttcttattgcctcgtaaaacattaaagaatggtagacacttatcggttgattttgaaataaatctgctcaatgctgccattcttcctgttaaggcttagacttcgtttcgcttcgtgggtgacgacatctctattaaggccttaattttgtctagatttgcgtcaatgcccctagcattaactatgaaacctagaaattttcccaaggagactccaaaagaacacttcttcgggttgagcttcatattatactttttgagtatttcaaaacattcttcgagatgttttgtatggtcttcacattttactgactttaccaacatatcatcgacatagacttccatattttttccaatttgcttttcgaacatcccattcattaattgctgatatgttgccccaggattctttaaaccaaacgacatgactttataacaataaagtcccatgtt

SEQ ID NO: 40992 - DNA, 1750 bp, Cannabis sativa
  modified_base (820)..(824): a, c, t, g, unknown or other
ttctattttatttttagttttagttatattatatttgatgagacatacatctatttctggtgacttttctggcgacggtgactttttcggtgatttctgacaataataatttttccgactactttttcggcgccggtgacttttctagaaaactttatttacaaatatgagatttctactttttcttaaaaaaatatgtataaatgtaaaaaaaaaataaataaaaaaaaccataatcccatagtattatttaattatgtcataaaaaagtaaactagaccctcaattcccatatttataaaaatttcccaatattttaaattaagtataattgggctttggtacaacgataagggttctttgagtgggtgtgacctaagcacaagaatataatcaattaattataggtttgagatgcaaaatgactctaaatttagaaagtaagttagtaaatgtctcttttaaaaaaaataagaaaatgaccaaatataataaattaacccataaaaattataaaaatacatttactatatattatttttttttttaaaaaatgtataataattaaattaagttatataagttttttagtatcgcatattattatattgtaacaaaaacgaataaatatagggtaaatactattttggacccgttgttttgcaaaagttactaaaagttactaatgttactaattggacttaattggactctctatttcgtctatttcgttaatttcgttaaatgacaaaatagaccatgtatttccaaaattgtacaaataggaccctgaattgattttttatcaaaataaaacttnnnnntaatttgatctagagatgttatgataaaactggttatattttctgtatatgttcgtattagaaattttcttaaagttgattatattaaaaactaaaattgttaaaaattaagcttaggttcctattttcaccattttgcataccacatggtccaaaatagtatttacccataaatatattagactattgaatatatacaatagtatttgatatattgtatcactaaaaattaatataccatagtaataaaattatatatataccacaaaaaattataataatactaaattaatactcaaaaaatatataccatgctaacaaaattatatatactacttttaaaatatgtatacatactagaaaatttatatataacaaaatagaaattaaatatcatcttaaataaacaatatactatagacaacaaaaaccatataccatacaccaatatatatacatacaataaaaataaaataaaattatataatattattgaaataaaattgtatatattatattaataaaattatatatcaactttatatataataaaatagaaactaagtattagttaaaataaaaaaattattcaaataattaaaatatatacatgtagcatgccaattaaaatgtatataaataattatcatacaattaaaatatataaatatatataattattaaatatatatgtagcatacaaataatattatatacattcattaaaataattgtattatgctaacaaattatataccacgttatacatagcaaaataaaaaaaataaatatcatctaagaataataatataccatacaacaaattgtacaaccaaatttatatactaaaaacctacaacaactcataagaaattaaaaaaatcgacataactttcaaataatttttttttttaataaaactaata

SEQ ID NO: 40993 - DNA, 2068 bp, Cannabis sativa
aaataataaatagttaaacctactcaatattaaatgtttttttttttcaaattactattatatattttttttttaaattttatataactaagtgtacgtgcattgcacgtaacttcaagtatttataagacatatttatagtggttttgttctcatagtagggaagtttctacaataataaatttaatggtgataaatagatgagtaaataataaaagctaatattttaactacactagattatttgtaaatttattttttaataatattttttaaaaaaaattatttaataaatcaatcaaaaaataaattagtctatttactctctctctctctcacctttctctttctagtttcttccattgaagcacttgtatggcttagcctcaattctcaaatatattatccacatgcaaattattgcccagatttccgttcgaagctcccacaattttcccattcactgaccataaaatggcttgctagggatatactaggctaaagaaccataaatcagatgaagagagcttaagtaagaagtcactaacacttctcttgtgtctatgaatatgatcaaactaaattcaagtcaactaacatgtatggatttgctccaacaaaagtttattgtgtttcttttgtttcttacgaatatatatacctagctccactccactccactcctggtcttgagttcggggtgttatggctaaaagctcttagtttgaatactctgttctgcttcgaagtaatctgattcttcacatctaatctgtaacaccctttaactcatttttctcttctaatcattttcttacctcaaaaaactcaatgagttgcagtgcaataatattgcctacaaatgcgcgtgttggattcagattcagtcccacaaaagtattagggaaagaatgatgtggtcgaccctatcatggccacagtaaatttttgggcctttgaaccttgggatttacctagtatgtgtgctatttcttcatttttaatgttgtttttctttatttttacgtcaatacatattcatttttatgtggttttggtttctgggtttgttgggatttctgataaatcaatgatcgagtccaatgatcaggtatagaagaaagaagtaacgaatggaaaaagaaccacatgtcaaataaaaacctcccaattaattttttttttccaaaaaaaatcaacctttgtcattggagaggagacttttatagttctaagaattggctttaatataatgtaaacaagcacataatagttaaaatatactttccaaagtcatactatagaaattctctataaggatatttacaaaaatatggaaaaaaaaagttttgatatatatatatatatatctatagcatagaaacttaattacactaaatatgataaattaaaaaaaaaattaaaatatgtaaaaatatcattatatataaagaggaatgccataaaaagattttaaatttgtgtttttttttttaaaaaaaaataaaacacttaaataaataaaagaataatctcaactgtagatgttatttttttttttacagaaattaaagctgtttttttttttgtttttatttttttttattaaaaactaattatttcattaaaagcataaaaaaaaaaaccaaatttcatcaacatcatcctaaaaaaaataatataacaaattataatctaaaaatgataaaactttaaaaaccagtttcatcaatattaaaataaactaataatttcattaaaagaataaaataaatagtttcattaacaagatactaaaaaaaaattataatctaaaaatgatactaactttaaaaaccagtttcttcaatagtaaaaagaaattgattatttcattaaaagaggcaacaaaaaaaaaaaaaaatagtttcatcaacataatgaaaaatacacaatgtctaataataaaacttttacaagtgatactaaatttaaaaaccagtttcgaacatataaattttatatcaatacctgataaccaaacttctaacttcattctctattgtgacatttaattttttatttgctt

SEQ ID NO: 40994 - DNA, 3598 bp, Cannabis sativa
  modified_base (2234)..(2237): a, c, t, g, unknown or other
  modified_base (2633)..(2633): a, c, t, g, unknown or other
  modified_base (3546)..(3546): a, c, t, g, unknown or other
gatatgatagggatcgaccctaacattatctgccatcatttaaatgttgatcaaaactacccagcgaagaggtagaaaaggagacccccagattccgagagacaaggggcactaaaacaagaagtggacaagttgttagtcaatgactttatacgagaggttttttatctcttgtggatagccaaacctgttctcgtcccaaaggctaacagaacttggagaacttgtattgatttttcttatttgaataaggcgtgcccaaaagattgttttccactacccaggatcgaccaattagtggatgcaattgcagggcacgagcttatgtcatttatggatgcatattcttgatataaccagataaaaatgcatgttcaagatcaagagcatacaagcttcgtaaccaatatgggactctattgttttaaagtcatgtcgtttgggctgaagaatgctagggcaacatatcagcgactggtgaacaaaatgttcacaaaccagatagggcggaacatggaggtctatgtcgatgatatgttggtaaaataaataaaaagtggggatcataccgcagacctcgcggaatgcttcaaaatattagagaagtataacatgaagttaaacccaaaaaaaatgttcctttggagtctccttaagaaattttttgggattcatagtcaacacaaggggtatcgaagcgaatcccgagaaaatcaaggcattgatagacatgccatcaccaacaaagtctaatgaagtacaagctttgacaggaaggatagctgcacttaacagagtcattttgaagtcaactaataaatgtgtgccattcttcaacgtattgcgaggcaacaagaagttcgagtggacaaacaagtgtgaagaggccttttagaacataaaaaggcatctagcgacgcctccagttttggcaaaaccaataacagaagagacactacttctctattcggctatctcgaaagatgcaattagtgcagctatagtaagagaagagggtaagcaccaacaacctatttactacataagtaaaaggttactaggggtagaatctagatatccccctctagaaaaactcgctttgtgcctagtccacgcgtctcataagctacaactgtacttccaggcacaccccataaaagtgttaacccattatcccttgagacaagttttatcaaaaccagatgcttctggaagattgataaaatggtcaattgaactggggcagtttgacataacttaccaccctcaaatatccatcaagggccaagccttggccgacttcttaatagaaggtataactctagaagaaattctgcctgaacaccaagaagcgaaaacttggaagttatacgtagatggtgcatccaacaagcaaggttcgggtgcatgggtaatattaatatcaccagaaggctttaagtttcactatgctttgagattttaatttgacgcatcaaataacgaggccgagtatgaagccttgattgctggcttaaagatagctgaagcgttgatagtcaaaaacctcaattgccatagtgattcgcaactgtttgtgaaccaggttctcggggaataccaggccaaaggcttaaaaatggcaaagtatttagagaaggtttggaagaacttggaaagatttgattactttaaaatcgaacaaattctgagagaacaaaactccaacgtcgatgccttggcaaaactggcctcgcagagcgacttggatgaattgaacttagttccagtggagatgctaagcgagccaagtatatgtgaaatggaagacgtagagatgatagacagctctcctacatggatgactcctattatcaattatctactcaacggacaacttccaaatgacaaaaacgaggtgcgaaaactattgtattcagtgcctcgctacataataattgaaagtaaaatgtatagaagagggtactcaatgcctctactttggtgtgttctccctacagaagcgaatgaaatcattagaaaaattcatgaaggattctgtggggaccatgcaggttggcaaagtctatctaaaaagatcactagacaaggatattactggccaacgatcaataaggacacccatgagtttgttaagaaatgtgataagtttcagaggttttcacatacacctcacgtgccgccaacagaactaagaatgatgacctcgccctacccatttgctatgtggggannnnacctaattagggcattacccactgggcattaccctctcgtttccataacctacaacaaagtcctcgactttgtcgtcaaaaacattgtctgtaggttcagaattcccatgaagatagtattcgataatggaacccaatttgatggcgacttgttcattgagttctgcgagaggaacaaaattatcaagggcttctcgccaatatccaggtctcatgcgaatggacaagtggaagttgttaacaaaaccttaaaggatgttatcgagaagaagttagaccctgccaaaggcaggtgggtcgacgagctacctcaagtactctgggctcacagaactacctagaagacgtcaacgggacacactcctttctcgctagcatttggttcggaagcaatgntgcctgttcaagtgaacatatcgactcacagaagagagttttataatcaagaaaaaaactaggaacttttaaaattgtccttggatctacttgatgaaaaacgatttgagtggtaaatcaccaacgcagcatatcaacatcgagtaacaagatatttgaacaaaagagtcaagaaaagactattcaatgttggagacttggtgctaaggcgagtatttgcaaatacagagatgcatctgcaggagtgttcaacccgaactgggagggtccatatgtcatcgaagtagtaattggaactggagtttacaaattggctcgactcaatggctcgctaacaaagaactactagaacgtggaccatttgcgaccctactaccaataaataaatgatgtaactaacattgctaatgttaaattttaacttcagttatgaataaagagaatcatttctatcatttaagtaattacaaaattttactctttaaaattacttaaggggcatttatgtatgattaaccagaattcatctggaaatacaaggtacaatgcaaacccaccatttcaaaaattaaaaaaaaaattaaatttaaaggttctcgactaaacctctttgacgacagaggggtcgaactgttataacttcctgaccaaacctttttgatgagagatgggtcgaattcttataacatcttgatcaaacttttttgacgaagaagggatcaaacaactattatttttgattaaaaacctatctaacgggaaagaaactcaaaagttataaatgagatataactcataactcgcgtataaagctgaatattaacggtttgtgcgagctaggaaagtgctaaacgagacatcaagacgtcttgataaaattacttgcacctaaaaaatggatagataacctaantattcatacgagcaaatctaaaatatacaaagtgataaaatcattaaaagta

SEQ ID NO: 40995 - DNA, 2973 bp, Cannabis sativa
  modified_base (1251)..(1272): a, c, t, g, unknown or other
ttcacttacaaaatttaaatttttgtttccaaaacacatttttaaaaaacacaatttttgaatcacaaaccaatcaaacctataaatttttagaaaattatatatagttgacaatatgaatataatattcaaatattttattgtatatatgattcttttttcatatacgcgactgtgtgtggtaaataatatttttaactttattttcgatattataattatttaatttttttaaaaaatttacaaatagtcttaaataattgcaacatatacaatcataaaaataataaaatatgagtagtcctaaaaaaaactacaatatcttgaaattaaggctcaaatattttattgcacatgtgattattttttcacttacgcgcaataaataattatttgaatcttatttttggttctaaacggttaagtacctaagaagttttttaaatataatttacttaaatataatttaagtattaataccgtcaaaaaataaacttatctatttataagcaaccgagagttaaacttatgtatttatgtagcaaattactctaaaaataaataataagtatataatattaatatcccctctttatgtttcaataaattctctatttatttcagtatctaatatatttatttagtttaattttatttatcatgagtatgtactttgtaatttttaaggatcatttacaaattcttagaaaattttatatagttaacaatacgaaaataatattcaaatattttattgtatatatgattctttttttcatatacgcgactgtgtgtggtaaataatttttttaactttattttcgatactataaatcatttaaattttttaaaaaatttacaagtagtcttaaataattgcaacatatacaatcataaaaataataaaatatgagtagtcctaaaaaaaaactacaatatcttgaaattaaggctcaaatattttattgcacatgtgattattttttcacttacgcgcaataaataactatttgaatcttattttttgtactataaagtattttaaattttttaaaaatttataaataatcttaaataattacaatatactaaatcataaaaaaaatgaccaaattttttcttagatgtcaaaagagcaggcaatttaccaaaacattcatatagaagatgtagtataataattagtagggtgaatactattttggactttatgttttgcaaaagttactaattggaccttctgttttgttnnnnnnnnnnnnnnnnnnnnnnttttctaaaattgtacaaataggagaactgattttttaatcaaaataaaacttaataataatctgatctatagattttatgacaaaactagttatatttttttttgtatctgttcgtgttagaaattgtcttaaaattgattatattaaaaaataaaattgttgaaaattgagctcatcattctggaaaatataagacccattttgtcatttaacaaaatagagggtccaattgataatttttcaaaacacagagtccataatggtatttaccctaattagtaaatacattttttttttgacagatgaaagttatttttcttccattatttattggaaaaattacagaaaatgctatttttgatatattttttttattttttacattcattttttttttatgtatatttttacaacattttataaagatacaagaaaacaataagaaaaccacacgaaagtatcaggaaaataatattaaaaaacataaaaaataacacacaaataacaaaaaatcaacaacaaaataataagagcacaacataaaaatacatcacaagattgtattttatgtaagtataatcacaaaaacggtaaaaatgaataaaattccgtacaatcgtattttttgttgtttttgtttttcttttttaaaagaaattctcttatttatttgacattattttttgtgaaaattgcattatatacccattttactctatttattttaattttacttttatttttataatctttaagatatactaacttttatagatgatgtcttcattatgccccttaagttaatgtaaaatatatactaaacttaaagtaaagggtgatagtatatttgataatctactcaaaaacaataggtattttttaatgaaatataatgtaatagtatttttgattaataattataaactctacttatcccttactttttttcaagaaaacctttccccctattagttcatattctgctgtatagggcccggcccgtctttgcatggaatatgagggtgtctatcatgagtcattcttgggccattgatggaaagaggagtgtatcgcgatacactcacaaatcataacattggttaaaagacataaattttccaaaacaatcaatcttaccaatcttattatcacatttttcttttataaatgaacatattttcttacaaggtaatcttctatgtgtatttttcactttgacaagttaataattaaaacttagttcgtgtttagttttgctaatcacagtagaattataatatttgaccatgatttaaatattatattaaatttgaaacaaaaaataaacaaatactatatttgttattgtgctccaatatacaatagtatttatgttgcaaattatgacaaaaaaatataatcaataaattaaatatttaaataataattaatgataatattataattaaaaatatacattaaagtttatcgttagtgataaatgacaaagctgcaattataaaaattacatttgttgtgtacttaatttgacacaatttttagcatgagtcaagtttagcgcaagatttagtatacaattagatgcgtttttaaatatttaggagcctttccattttttttttaaatgtgatcttgatcacattaagacattctggagaagatttcaacaatcagtgtcggaacctcttcaaaccagcat

SEQ ID NO: 40996 - DNA, 1867 bp, Cannabis sativa
  modified_base (1111)..(1114): a, c, t, g, unknown or other
attgtaaatttacatgtacatctaatgtatataaaagattgactttgtctaagaaaaacaattgtagtaaataaaaagttaattagtaccaaatctctatttcggattgaatataaaccaagaaaaaacaaattatatagatagcatacaatatgtatagtgttagaataatatgaaatgaatctaaaggtatgaacaatcctataaatatggaataatgaatatatatatatatatatatatatattgaacatatatgtaaaagaaaagattgagattatattgttagaaattttatatgaaatatataattgtgtatatgaaaatgaatatgtacacgatataattaaaggattgaaatactattatttattaaatctttgagttttaatcccacacaagttttgaatccgcaaaaaaaaaaaaaaaagtgattagtgtgggtattcgggattctaagctctctactctctttagatagatttattgtgttttcacaaaacgagtagtgagctcagggactgagactctatatttatataggtgagattttccatcaaggtacattaattgtcaaaatattttaacaattaattagaaaattaaattgagaaatgaattaattggtgaatcaaaaactgacaaaatgtaaaatatttatatttattaaataattgatttagaatcaattgtaatgaacaagaaatatacatacacccaaaaatcaattaaataattttatatttaatataaaaatattataatattcttccacttactcaatatgtaagcccaatgttccttattacttaataaacatatgaattataccaataagtccttattatatttcgagtattatctttcatgtattatgatatatttattacataaccatgtacttaatgtggaaatttacttaagcgaaaaacctcatgtttcttttggtcctctaataataattttctcaaatgaaaaggtacacgtaaatatgagaaaagatcaaaattagagtttcttgaatatttttagttgtacagccaaaaattgcattattgataattatatcccatatttacgttatgatccttgaatttgtgttacggcatgnnnntagtcaaggatatgcgatcacccaatttattatagctagcgtgcttaatgaccacttatcacgccttttatggctaaatacttaatatcgatatgctagcttcaactagaactgttatagttcttatccataaatactgtagctaaatttatcgcaaaattttcttaatgacctaaaatataattttgaactctaggcctaatataaaaatctataatacatcatacgagatgtatcctcaaaacaataaatgaaattgacttctataatagaaatgacaattaagattcttcacgatacaatttactagtaatcttaggatgtaatcacatgataatttacgtgaatcaatataacagtgaaattggattgtaagtggttaactatatttttcagagtatcaattcatttcaataaagtatgcatgaatgtatgtatctcaagaaagatatttcatcactttgtataaagtggtcttaaattaagttattctgatactactttatattcttaaaacaaatgcaatacaaagtcttattcagactcttaggcatacattaggcttccaaaaatagaaacaaagggatattcttaatttattctcattataggaaagctttctttagcattcccaactcgaaatctcctggttcggatggattcaattctggatttttcaaagtgacgtgggctgatattgggaaggatatttgcaaggccaattctgatttttttgtcacaagtaatatgcct

SEQ ID NO: 40997 - DNA, 2226 bp, Cannabis sativa
gtttttacgatttcggggccctgagcgttcgggggcccgaggcgcacgcctagccagcctaccctcaggatcgtccctgtttgtggtggatgtacaacaaacaactatagagagtagatcgcaaatttaaaactttaggaagaggagaaatttacattcaaggtgacatctctagattccaatactcatggatacaacagcaactatgtggagcatcactcaaggagaagaggttaggaaagcctcacttagggacgagagacaaatgagacacaactaagaccaaaatgatgtatcttaaagaatttcatggcacgacaaggatgatacatgtatttgagaagtgttgggattagaaaatgctcatgcaacataaatggattcaagacacgatgtaagcaaaggatactataatcaacttatgatttactttatggataatagtataagtatgtcgaagtatcgtcataagaagaaatgattaagaggaaaaaaaaatcacaaagagtgctgattttggtcaaaagaggtggtttgacaatagaatgaaaatagacctgtcaaaagtaaaagtcatcaagagctgagaatttttgacaaatattgaacgttttcttgacccaaagggactagtaacagaatttcctggaaggactttcctaagctgaataagacaataaccaacatcttgcaaacaaataacgttcgcctcactagaagtggagaacttagaggaaaagagtaagaaaattattgataatttggttacactcgaacatggaataaaatgcttaaatagagtgcagaagtaatttacgaagtacgaatcaaagagcttgaccaaataattataaatagtgagtctctagtagcgaatcagatataagtgtgggtataggaggtatagtagtgatggacagagtaaggtctgttctacaaggttttctaattatgtctatagtatcattaccctgataactttgctaattaatatattatgtgattgtatggtcaacctattgttaaaggtcaaaaagaaggaaatagttgagatatgataacccatggtggggtttaactcatcttaaagagttattagtgcgcctacgatattttaacacatatatagtatagtcttagttaaaaataaataatcagcactggaatatgagtttgtttcgaagagttggaggtattggcagggcaatttagaaagcaggaatttttacaaattaaagaggctttcaatcatgtttcaattaaagagactcaagatacaatgcacaaatatggttggagcaatagatgatatcataagtatgaaatattgtgtcacctgggaagacaggtatgaaggaagaaatactcactgcacataatgacacacttctattactgctacaggaataagcttgaccactacaacaacaagttgtcaattcaaatgcatgaaagaaaaaaaaaatattatggaaaacaagctaatttcaaggttaagcttgattgaaagtaataacagaagatcaggcaacaaaggtgggattagcagtgaagagacaatagagtggtataagaatcaagaggttgcacaaggaatcaaagaatatactattcaaaaaaaaatggaaggaagaacaagtgcaacgaacatacaacagaaagaagctaagaatttatatctcatgttcattagtggtagaatggatcattaaaagtatataaagaattttaaaagggtttgagtgttgattttcccgtgtcatgggaacatgtatctatagatgataggataacaactacgaagttataggtggcaccgtgactctatggtgggaattaagtagaaaattaagctttctatatgtaataacatttaaccaaagaatgtgaataattaaagagaagtttgcataaggtcttctaacctactatttgttgtttgttattttttttaatttttttttttttgtattacataatgtgttctcaagtgacatttaaagatgttcaaaggagaataaatagttttactcttaatggcatgtaaggatgttcataagagaaagaaaacttttataatattacgagcatgcaattgtaggagcatgttttgttattaagtatattagaataacaattcttaagtaaaggagtatattaaatgtgttataattttatcgataagacaaacgttacatacatgactattgggttcatgtggtagaa

SEQ ID NO: 40998 - DNA, 927 bp, Cannabis sativa
aggcagtagggttccaaaccccttatcataactatcatacgacctacccaatttatcaaaaaatttggccgccacatatgaatgagtggccccataatcaaataacacagagagataagatttgttaactgagagttgacctgaaacaactaaggggctgacttctgcattagcctgagtaagagtaaagacccttgctgaaacgggctttgttgctgtcttctgttcttctttcttgagttgtgggcaatccctcttatagtgaccaggcaaaccacactgaaaacatcctcaccctttacactcacccagatgatgctccttacaattgggacattccaggtaagtgtgtcaagtttcataaccaccctgtcggttacctcgaccctggttccctcgaaacctcttgttctgatttgggccactgggtgcaaatgttgcctttcttttctgggtagtggtcgagtcactaccactccttccataaccagaggtaggaagagtggtggctccaccaataacctatgtccctcgggactcttagatgcactctatatccttaactcgtagtgcttttcccaccatatcagcataggtgatgttatcatcggttgtgatcatcaggtcgtgtttaattttggaattcaatccatcaagagatacttttctaaaaaatcggttgtggcacaattcccaaagccaacctaggcaatctatcgaattgagttgtgtactcggtaacattcatattctctttctgagtcagctgggtaaattcttttctttcttcttcgcactacaaactgcctcgttgtaataatctgcattgaaaaattcttggaaccattcccaggtaatggtagtgacatcccaagtcagggccaccatatcctacaaaactagggcatcctcctgaaattagaatgt

SEQ ID NO: 40999 - DNA, 2741 bp, Cannabis sativa
  modified_base (154)..(163): a, c, t, g, unknown or other
  modified_base (893)..(898): a, c, t, g, unknown or other
aaaatagataaaaatggttgagaaaaatgtgttaacgcaaattttcgttagccaaatttgagcctcattatagtgattccacacagaaaaataaaagctatagaaataaatatatgaacacaaggttcttaacgtggttttgcagttaaaattnnnnnnnnnncacgagtcaatcttattcaaatttttgattctttttcaggaactctctcgtatctccgtcccttttttcatcttgtctgccactatttataattacatagtggcagtaaattacaaaatttgactgtaatctttacagccattattccctcaaatcatgggatttgattaaaaattatgctatgtaaatgtgctttttatttagaatccacacagctgtgagtatccaacttttattgggccgagatgaatgcataattaaagatatttggtaagccttatctcatgcggatgcctcgctaggaatggatccgagttaactttgatggcgagttgtgcctcgtcacatgacttctgagattaatattgctttaattctgataactacattttctggtgtcgagatgatctttctcgcatgcatgccatcttccaacgaaatagacgtgtcgctgtctgtcatcttgattcaccaaactgtttatacttagtttgtataccatttattatacgctaagtgtttttatcgttatcgttcctcttccacacgacgaggttgaagcctcgtcatgcacacttgaactcacatggtttctcgtcgatacataagttagcagtttgtacgtttctatctagcagaagactgttcagccagccgagttataaacatactctgcaaattgtgtttctaacgagttgttcaattccaagtatacttacgattgcgtgtnnnnnntcttcgttcttcccagctcgacacgtgtcttcctctaatgtgctcaccgaattttggggataacaattgccccttaaaaagttcttttttaataaaaagagctttttaatgactacaaagtgtatttctgtcatgttccctttttttttttgaaaagacgcatgtcctctgattttggcggttgtgcggtttcgaggtacatcagatttaaatgaccatctcttccacttctgctttgaatcatgtccgtaggatcaaatatttctctgattgaacgaagcagcaatcataagtataatgtaagagaaaaggaaccacctttgcattattttctccattttagaaagtttaaaaaaactcaaggatcaccaagaagtttgtccagggacttgcataccatctctgtccttgacctttttcctgcgagtttcttccaacttcatcctctcaaagtgatccttgcttcgttcgaagatttacagacagagtaacaagtcattgcctcaagccctaacttcaaacagtaagttgctttcttctttctcatgtttgttacattgtgtggatttgttacttagtttgattgtattgttttcatctcatctggttttggtagtttttaggatttagactgtgtctaggttcatactagggttcaggcaatatgtaggttgttttaagatctccaactcattaccttcgggtttgataaaattctctcaagggatcgcgactgcgtttttgcttgcagcaatgtcccactctggttcaagaattaatcatccagaagttttagagtttgagttccctatagaatcagccatcccgtataaacgtaacccttcaaaacccacctccaaattagagttgaacgatgctagggttagggaacacatagtgagaacccaataacaggaagatactgctagtcgctataggcgtttcttgcaagaaatctccaaaggcaaacgccgattcttgcgagaagcagcctggccagaaccatctaccgtgtcctttattcatgtggcaaagcccttgtttttagccaatgtcacgattgcttttgaaccaggtgacttggatttttaaattattcctcccaagccacgtacatcaaagactccctaggaccccaatgtcacctttgaggctgagttgataaaaacgaaggtgcggtctatctctggctacacgggcgagatgctgaagacctgcgacatcaaaattgggcaatcatgccaagttagatcggtatgggagggtgagttcagttgtcaccccctgcgcgttttgcaagcagtaactcggagactagtagtgagactagtaccagcaaatcgactggtatgggcgcttggagccttgaacatatcagtgcagggccacgcttcctcttcgagactacttcaaggactacataaatcacattggagttgcccattctagttgaatcccatctcctacaagatcctcgctagtttgaaagtcttatacaaaatttttaactgggggtgccccacactagtagagattgcgtatctttactcagttaaggccgttccgtcaaggaagaacgccctaggggcctttttctatctcggtactcatcctaacaagcctaaaattattgtagacttgccaaataaagtatccttctagaacagcttcttctggatgtctggtctttcccccatcggcacaaccacattttgcaaacttcgtaagtgtttgttcttttcttgctcatttacatcaatttttgtttttcaagtttatgaccaatgttttgtctgttatgacagctctcttgacgaggcctacttgttggaaattattttac

SEQ ID NO: 41000 - DNA, 1588 bp, Cannabis sativa
  modified_base (1528)..(1528): a, c, t, g, unknown or other
aaaatatttaattaaattaatcttatgtatacaactagaggcttaaaatatacaaatttgcacattaatcaacaagccttagtccatgagtcacttttatttagtagtgtattacttataataatctcacaagtacatagagtgtattttcgtatattcgcccgagcaaaagtacgtaagagaattcaacccctaatccatgagattagtggggtatttatagtagttggagaactacattagggttttcccttttccctctattagggagtttacaactgaataatgtccatgggctcgctcatgaagtccagtccatgaaggatacaacctgctgactaagcaaatcgggcttgagttgatcaggtcaaaaccgtatccaactataatggaagaatattttgaaataattgccctacacttgttatgggaagtttcctctttaatcacaatatatatgatattattttccaatctgacagatgctgtttccttatttataggaggaaacaaattgagaaatcggaagaatctttcgagcatgatgcatccttccccctctaggctcacaactccagagttgtctttcgggctctatctgtagaacgcggaaggtatcccgagtacagaaccaagataactcccagaaggacatattaagatgggcttggcccactttaccattgatgagggtcccactgatgggtctgggatgctgacattgtaaagaccgcttagctttaatctggaaattggcagataattaggattttaattatgaaaattatttattagtattgaattaattatttatgatgatttatttgaattcagaatgcatttttacgtcacatatagaaatttcataattttgtgtattttgtgcccgacaatattgaaacgtggtgtatggctattagaatcacatcttagtattcttagtatagcgcgacgataatttagacattgagaatgtcgggaatagtcaggattttagaatttcctaaaatacccctaagtaccccttttatgttgtttagtgtgggaggggtaaaatggtcattttgccccattagccttttgtctttttgtgagtttgcctatgttaataaatgtgatttttattaactaatatagctgatatattttctaaataaaacaaaaatgtatttactcatttatcaaaataagaaaaaattgaaaaaagaaagctttctctcaacacactctctctctctctttcgattttaccttgaggcaggtagggcttgctgaaatttgtcctccattcaagttagtttcagctggatttaagtgttataaagtgctaggtaaactcttgtctttactctcttaagtttcttaaatttttagaagtggatcatgcatgtttttgtgtttttggtggttattcttgctgttagggtttgatacagttttcagaagttattatatgtttagaaatgttgttttgagcatgatttaagggatgttagtaagttttatcaagttttgagttttagaactnaaacttggagctttaatggtgaaaattgattttgagctttgattgttgttctatcacttg

SEQ ID NO: 41001 - DNA, 2823 bp, Cannabis sativa
attgagatctaatcaataatggcaacctgaacgagatgcttgagaggagtgttatttttggtctctcggttagtttctttaccttctcattctacttttcctttcaaccctaaaaaatacttatgcatttttgtttattggttttcagcaaaccttcatctcttttgtcgcccaacgtcggggtctcgataggatgagaaaactggagagcaagatttagaagaccattgggtagcgtgaagccgtggccaagaaatggaatgaggctcagtcagagatctctcacctaaacaaagaggtcgagtaggtgaagagggctaacaaagctgaacttgaggcagctcaaaaggaggccaaagacaagtctgagctgtaccaaaaactctaggaagatctcagtgcaaccaccgcaaagctcgagggggtcgtggccaacaccaaagagcgatgcaatgccattgccaagggctccatctatcgagattggatggcgaatccaaaaatggatttgagtttcctgggaaagggaatcgaggaagtccttgcctactgctagcaagccaagaaagcagaggaggaggccgaggcagcacgagaagaagaagaagaaccatccaagtctcctactatgtacgcttggttttttaattattttttgtaggaaaatggccatatggccgagacaatagttttccctttgttgcccttaaagacaaatttgcatagttggatggccaactttgcttttattttatcttttatttattgcctcgtatttttgcattcgaacttaatatgtttgcttacttgtgtttttactcacaatttaaacaattatactttgatcaaacttaaaatactttaaggctttcaatggctcttattttcctttgatatagtttaaatagttagtaatctactatgtgcgcgagcaaatattatctgttatgctttcgatttgcgagtagttatcagttctctacttcgcgtaaacagttataatttatttttagacaaactgaaacatactttaaataattcatctcgtgaatcactttatatatttttgattgcttgtatgaatagttaagccttctattcacaccttagattaagtattttctcaaggcatcttggtgcctcgtgttaatacattcctataaaatgcgagtcgttaaacattcagcttcacatgtagcttatcattgtttgtatgagttaaatctcatttacaactgctacttttgacttcgcatcgtccatagatgactccaatcaaccacttaaaaaactttgaattttttttttaaaaaatggggttttttttttacaacatattatgtatttccacataatttccagttgataatagacatatatatatgcccctcaagtaattttaaagaataaaactttgtaattacttggagaataattcaactttattaataattgaagttctaaatattacatcagattatagagattacttagtttactggtagtagggccgcaaatgctcaacattccagtggttctttattagcgagacgttaagctgagctaatttataaatatcggtttccactattgcttcgatcacataaaacccttcccagtttgggttaaatactcctccaaatgcatctctcgtgtttgcaaatactcgccttagcaccaagtcaccaactttaaaaagccttttcttgaatctctcgttaatatatcttgtcactcagtgttggtatgctacattagtaatttgcgactcagtacatttttccttaagtagatccaaggtaaatttcaagagttcttagttttcttcttgattatagaaatctcgtctgtgggtcgcaatattgacttctactggaagcattgcctccaagccgaatgccaacaagaatggagtatgccctattgctgttttctcagtcgttctgtgagcccaaagtaattgtggtagttcatcgacccatctaccttttgcagcgtccaactttttttttttgatagtatccttcaaggtcttattaacaacttctacttgcccattcgcttgaggccttgatactgacgagaagctcttaaaaatcttgttcctctcgcagaactcattgaataactcaccatcaaactgagtttcgttatcggatactatcttaattggtattccaaacctacaaattatgttcttaactacaaagtcgacaactttcttgcaggttatggaaacaagaggctatacatattattgagttttattatctcttcaccaatgtaatcaaaagactaaaacatatatagagaaagagagtgaggtttgaggttgaagagggttttaaaatgacctttttcttaatttttctttttcttttttggattttgggactactatgagggagctctttttaggggagtcagtgagtgagtaaagatttattttttcctattttctctcattactttatttggaaaattgggaaaatgccctctctaaaacaaacttaaaccccagttttggtcatgcaatttcactctttatataaatacataaaaggttttttattagcttaaatgcaattttactagttactagttacttgttataatttgtccaaaaattaaactaccttttttcttttgaaaacttagatagtttgttaaataacaaatatataactaactttttttgtttctaaaataattagtttagtattgtgtgtatttgaagtttgttcttttaggagtgacgatttaatattggatctgtaactattaggtctttagaacttatttcaagcttagaaatatgattgg

SEQ ID NO: 41002 - DNA, 1053 bp, Cannabis sativa
tcttcgtggtggtatgcagatttttgttaagacccttactgggaagacaataaccttggaggttgagagctccgacacaattgacaatgtcaaagcaaaaatccaagacaaggagggtatcccaccagaccagcagagacttatctttgccggtaagcaactcgaggatgggaggactcttgctgattacaatattcaaaaggaatctactctccacttggttctccgtcttcgtggtggtatgcagattttcgtaaagacccttacaggaaagacaataaccttggaggttgagagctccgacactattgacaatgtcaaagcaaagatccaagacaaggaaggtatcccaccagatcagcagagacttatctttgccggtaagcaactcgaggatggaaggacacttgctgactacaatattcagaaagagtccacccttcatcttgtgcttcgtctccgtggtggaatgcaaatttttgtgaagacccttacaggaaagaccatcaccctcgaggttgaaagctcggatacaatcgacaatgttaaggcaaaaattcaagacaaggaaggaatcccccctgaccaacagaggttgatttttgctgggaagcaattggaggatggcaggactcttgcggattacaacatccagaaagagtcgacccttcaccttgtgctgcgtctgaggggtggcatgcagatctttgtgaagacattgactgggaagaccatcactttggaggtggagagctccgataccattgataatgtcaaggcgaaaattcaagacaaagagggcatcccaccagaccagcagaggttgatttttgctgggaaacaattggaagatggaaggactttggctgattacaacattcaaaaggagtctactcttcaccttgttctccgtcttcgtggtggcttttaaatccatttcccaattatgaatgcattttatttttctgtttatggtttactactatggaactgcttttatgttttagtacggtttatggttttaaaaacttttatatatgacggtttatggtt

SEQ ID NO: 41003 - DNA, 1296 bp, Cannabis sativa
aaatattcaagttaaataataaaaaaaatcaattgtaatcaagttaccttgattccgtctatcgtacaatgctcccgttgatgacttttgaactaaaatttctaacatgggtctctgagacagtcagttggggcatgatgatcatttcatgattctcgaataggcgggactgcagcatcaaagttgggaataactcttcccacaatgtcaagtgactcttcaattcattcgggaaaatcgaaccaaggctcgagtcaaatatactcaacatccaacgatcaaggtcttcctctaatgtcacccaatactttgcactattgaataagagggtcatatatattctcttcttattcttcctactgtccaagtattgggcatcatcccctcgaatcaaatctaatatgccatcatcccactgatagttagtgtggtcatcacccgcagcttcccatcgaccaataactcctgaagggaaaatgtgaggcatgatgagacgtctatttgggtacacctccggataaaagtgttgtcgcctcctcatcaaatgaaataccgcatccaaatgctaaaacatgaaaattaaatatgtcaaagattaaataaaaaaaagtcagataaagtctttaaaaaccaaagaagtaaaaagtcttaaacacttacatcgtctccaagccatgtcttcggagtatgtagttggaggaaccaagctaaattgtgtctatcggagaaacactctctcgggtacttgttcccaatctggtcgagaacctaactgtgaaaagtcgacagcagctttcgatcaacgactctaagtgggtccacattcattagtgttttcgatgccatggacttcttcttcattttagtgtactcatcaaaccacataggttgttttctcttcctccggttctccactagttctggagctgtctctctaacacctgtatctcagaatcctgagtatccccgatgctggtgatcttcgtgttgtcaggtgtacagaacaaatcatcatcatctagtctataatcatttgggagaatgatttcattttctggtgactgaggctcttcttgtggttgtggttgtggttgtggctgtgtatttggtgtcggcctattaggatcttgcaggagtctcattatggtcttcaactgcccataatcactgtctttcctcttaacagaggggtctgaccttccttcaaaacaatatgctccctctccacagcctctaaccttgccaaaatggcagggcatactggttcgcgaccctctgaggtgctgggaatagatg

SEQ ID NO: 41004 - DNA, 1617 bp, Cannabis sativa
gatttcatcacttaacttagtgtgtcgccttaagggttgacgtcacactaaaatacatcactttctcttatcttagacaagggatcaaccttgggcaacagtatagagacataccttccttagggggacaaaaacaaagcaatctcgaagccagtctatactccctcagtgttgaccagtaatggaggtcgtaggttacattgacatgtactccttctcccactcactatttttggttaatgtatttgttttattaattcccagaattaatacatattaaccactttaataattatgattaatttatttataataatgcctcaaattataaataaatttcccgtcataatcattaaatctgaattaactctttaattcattatttgaaacaatttttaatcaataggttaatttttaattaccaagtaaattctaaattaatcttagccagtttacatgctttggtttcaaaaactataaatataaacacataggacaatcctaatatatcatgtttctaatatgagatgcatgataacaaaaaactgtgtaggatttctatgtatggcatgttgttcactaatgcatgagcatgttattaatcaactattaattaacatttatttgaaagcaataaataaaaaatgatgatggattgagtatttctaattttacaacctttgaaattagaagataaattacaaaactaatctttaccggtgtaggggtatttttgtaattttatgggatcttcgtagttcgtaagcctaaaaattaattaaaaaaatgtaattgattattattaaattaactattcatttaatataccatttttctatcccaaattttatccacctgatgtggtatgtccacgtaagccaaagacagagtatatgtggaatacaaccttgccaataacaagacagggtatccatacaaggtatggcaaagtcgtcaagcaacaaccgaaaggagtgaagcgagccatcaaggagttgtaccaacatgtctagtcagccaagagaagcctataggccgaccagagtgaggttgtatggttggccaggatctgggcataagctggccagccaaaaagtgacttctaaccaagggagtttcgtttgaccaagggaacctaacctctacaagggaaagttgtacaaagatgtcctccactttccaaaggttgccgtccacatccaaaggctggcctcctcttggtaaagctaacaagaatatgacgtgcaggatcccagcaggcacatgaccttccaagtcctagtgagagcatggccgaccataccatattctgtagtgtatggccagccaagaatgacctggtagaattctctgtacagtctgatacatggattgcaagctacctgcaaattgggcccttatcggcctaacaaactggattgaaatatctactttcaaggggcaatttagccttttgtatttaatcaatatattatgtaaatatcaatttaatttttcaattagggtttcggctctcctatataaaggccttaactctaacctagaaaactaaatctaattctaacctccaaatcactctaagtctaaaacctttatctctcttctctctctctctct

SEQ ID NO: 41005 - DNA, 2234 bp, Cannabis sativa
cgccaatcctctcctgcctcttccaaccctttctccgacatatcgaattacctcgcccttcgattgttccagttttgctcctcgttttctcctgatttcttccatgactcgtttacttacacccgactcctcctcattctgtcgaagtccaccgacgccgactgcttcgaccaagttcgctctatcctcgtcgatatggagcgttctggcgtgcgtggaaaaatctccaccgtcgatgtctcctccaccgtgccctgtgcaaagcccatcgtcgtctcctccattactgcgtgcgaccgagagaaagagatgaaactttgagatgtgcggctgtaagaaagagagatgtgcggctgtgagagatgtgttttgaataaggttttttaaattagggttagaaccttttctatatatatataccctaattaatgatattattatttatttatttaaaataaagtaaatttgatatatatatatatatatttttaaaaatttgatataatatttaattttatcccaattaatgattttattatttatttacttaaaataaaataaaagataatacaatatttaatttcatcctaattaataattttatttttttaattatttaaaataaaataaaacatgatacaatatttaatttcctctcaattgatgattttttatatataatttatttactaatatttgaaagcattattcttttatatattctttatttactaaataccaattaacttcttaaaagtataatattttttttttggagataattaaaaaaaatattatttatatattattttttatatataatttatttactaatatttgaaagcattattcttttaataaaaataatattattttttattatagaaaaaaaaaattactgacattattaaatgtggttcaatttaatcagttaaattatttttacaaacgtgattatgttataatttagtgacactttaaatattattaaaattataactatttataaattatattaaatgtcactaatacatataaatgctaacaatttttaaaaaatgtaatcaaataaaatgtcatttttttctttcaaaaataatatttttaggaaaataccattaaaatttaaaataccagtattatgaaaaaaaatttatgactaaattcaaaataattctacaatagtattttataatgttctatttatacactttttcatttttcttttcgtttaaaattgctgaattttttttgttaatcttttaattaaatacaaatcttgttaatctttttttttttttttaatttaaaactttttttatacaaaaaaaaaaacattttctaacactaataatatttccaacagttataaactgttgggaatacttagtattcccagcagttatatataaagcgttgggaatactagtattcccaacgctttataactgttgggaatactaagtattcccaacggttctccactgtcggcattaactgttttcttttaaaaaaattcatttagtattgcccacagttctccaatgttgccattagtttttcccaacggtttctttacttcggttctaaaccgttgggacaaatcttctcttaccttttctaacggttttcataattgccccccttattaaccattgggaaaagccatttttgtagtagtggcgggctatgggtaccaaactgaaattcagtacagctttctatccttagactgatggacagttcgaaaggatgattcaaatattggatgatatgttatgagcttgtgtaatggattttgagggctcctggagtaagtatctaccactattacaattctcatacaataaaagttattaaagtacaatagggatggctccctatgaattgttatatggcagaaagtgtagatctcccattcacttggatgaaacaggagagatgaaatatttgggtccggaatcagtgcaatggactaatgaagcaatagaaatgattaaggccggaatgcttgcctctcagagtaggaaaaagagttatacagatccaaaacgcagaaatgtagagtttcaggtaggagatcatgtgttcctacggtgtctccgatgaataggatcaaatgttttgggaaaagaggcaaattatgccctaggtttataggaactttcaagattctccaaaaggttggacaagtggcataccgtttagctttgcctccagctctttttgcagtt

SEQ ID NO: 41006 - DNA, 1442 bp, Cannabis sativa
  modified_base (783)..(789): a, c, t, g, unknown or other
  modified_base (929)..(931): a, c, t, g, unknown or other
aggagtactcaacaaattcaagaacaagaatgttcaaagagaagtcaaaactcaagaagtttgaaattttctcgagttagggcaaaaaatttcatgaaggttagaataagaaagacgaaagacagacattacgcagctcaaaaaacaagcattatgtgctgtaaaatcgcatgaagccatgacaaagaagaatcacagaagtttctaaacctagggtttcctggatattttctacagcaaagtcgaaggtgtattcgaaatataaacatgcaaaaataagcataaagggaatcgaaaacttactcaagagtcagatatctgggttcgagcaacgtcaattcaacaagcacctttgatgaaggcacttcagcaactttgaagccaagagaccctcttttcgttctgaacttgcttagcaaagaaaggtggtgacaatgagtttatgtgccaatgttggttgatatttataggcaagtcacggaaagaggtaaccatctcaaaggaacttcacacgactcagttttcctccttaaaagcgaatataggaaatcaaaaataatcaagtgcaaccgtcagccgttgagagagaaaattggatttcgaaatattaattgtcagagcatttattagtcaaaaacttaacggacgcccagtcagcctcacatcgagtctcggatgttcgcgctagacacgtgtccccatccaaaggcaaaagcagcttggatgaagtctacacgcaacttcggaagtcccgtaaagagttgggggcaaatgttatcccannnnnnncactctgacgtggcatcgcataaatggtgacacgtggaatccacttggagcatctcctcgggaagcatagtccgagcaggatgtctcgctagcatgcccagagcaaaggtttcaacgatccgcgcagagcaatcaacacnnngcgaattcagctttcgcatcgtgactcatcaacgaaatccctataacttggggatcataccacagaactatggcatacacacgatcccacgatcccacgatcagtgtattcattatcaatcccacgatctttgtacctagcattgatcacacgatctttctgtttatacacaatgtaacgagaggggaaacacttcctctccaagcttactagccctataaatagtgatgtatgttcactgggcaaaaggtcgcaaacagattaattgagactataccctaaagatattatctaagaattatgtattcagagatactgttggaagagctataagaaaaggaaccattctccttgttcttaagtcaatacaaataacatgtgttatcccaattttacacttttacgtgcatcatgagaatggtgacaggtggagtccacttggaacacctgctcgggaagacaggctgagcaggatgcctcgctggcatgcccagagcaagatattcagcga

SEQ ID NO: 41007 - DNA, 2510 bp, Cannabis sativa
tgagttctgctggagccatcctatacggagctttagaaatcggttcagctccaagtgccaaatcaatcacaaagtcaatttctcgtagtggcggtaaccccgacaactcctcaggaaatacgccaataaaatctttaacaactctgactacctcaggctcaaatgttttgggtctgctggagtcaatcacaaccgctaaaaatcctacacatccattgtgtagtagatccttagcccttactattgaaataaccgagatttgagacccctgaaccgatccaacataaacaaatggatcttcaccttctggttgaaaagtcaccattttctgcttgcagtctatactggccgaatacttggacaaaaaatccatcccaagtatgatgtcaaactctgttaattcctgctctatgagctcagcactcaactccctatcttcgatcctaactaacatagacctaatgcgcctattggagataaccaactccccgctaggcaatagggttccaaaccctcattcaagaaaatcacatggcctacccaaaagatcgattactcatgtagccacatatgagtgtgtagctcccgaatcaaataagacagtataaaaggtgttgttgataggaagctgacctgtcaccacagaaggactggctgcagcatcagcttgagtgatggtaaacacccgagcaggtgcgagctttgcctctggctttgctcttctttctttgcctgagggcaatctttcttgaaataccctaccatgctgcactgaaagcatgtcttccagttgcactatccaggatgatgtttcttacaacgtgggcacttagggtaagagtaaccctaacgtccacctctgccttggtttccatggaatcgcttgctttgccccaagtcaccagatgccggggtaacttttctcttctgatcagtggtagaatcaccacaatccctaccataagcaggagtaggaagagtgggggttccaccaacactcggagtcacatggggctcctgaagaaacttaatcgcaccttcagctcgtagagctttctcaaccatcttcgcatacgatgttgcctcattagtagtgatcaccaaatcatgtctaatcttcacattcaaaccagcaagatatttttctttcttactgaagtctattggtacgatacccgaggcgagcttggccaaacggtcaaactttgtggtatattcagtaactgacatcccctcagtttacaccaactcagtgaattctttccgcttagcactgcggattgcttcattgtaatacttagcgttgaataactctcaaaactcctcgcaggtcgttacagtgacatcccaggtgaggaacaccaattcccaccacactagggcatcttcctggaactcaaatgtggcgcaggtcacccgatcatttccaaccacccccatgaaattcaaaatttgctcaatcacagtgagccactgctcaaccttcatcacatatgaacctcccaaaaacactagaggtgcttgcttacagaacttttcgtataacgactctatacagttgctagcaataggttgttttgctggcaccgctggagctacaagggcctgagcttgttgtggaggcactgcaggaggaccctgctaccttaatctcggaatttcttcttcttgttggcggattcgatcttgcatctccgcaaacctctactcccaatccggaggagcttgtggtggaattacaggacggccaccctgaactctgccatggccacggccgcgaccacggggattctggggaatttgatttccctgaccgccttcggtctcaaccatattaccctgatttcttgtattttgctgggcgtccatttaataggacttagcctgcgaacccataagccaaataggttagacatcgataataaaatttaacaccgctcttatggattttaaggcaacgcattaaaataaacaactataaactaatatgcttcctaacatgctttgatattcaaataaatactaaacaagtacgggcaaactgaaaagtgagccgaactttctttgatgaagattgtacatgtcttgtcgagcttcggtagacaaacgtggcggctctgataccgaaatggtaacgccctaatgctaaggcacgctacattgatttttcaattatagtgttatctttgctatcaaagaacttactcaaaaattgtgtcaaattaaaaacttttatactaaatattaaatttataactttacataatcattcaagtaccgagatcccgattttaaactttaatacaaaatacacaaaatacataaccaggtcgcacaacgactacaaaataataatcgcagatgtctcaagaccgaacactccaagtggtaccgccatgacatgtacaacctcatctcatcctaggctcactcctgttcagctttcgcctttcctttacctaagcatataacatatcatataatatcgacttgtatcaaggtgcccatac

SEQ ID NO: 41008 - DNA, 2409 bp, Cannabis sativa
  modified_base (98)..(98): a, c, t, g, unknown or other
  modified_base (1077)..(1099): a, c, t, g, unknown or other
aattgataacatgaaccaaataacacacaaatgaatgaaaaatatttctatttctttagtgatattgaataatagagattacattgaaatggagtttnatttagggcataaaaccccacaggtttttcctgagcttttttcacgaaggctcttaatgaaagcaccaaactgttaacacagatttttgttaagtatattaaagcataaatcgtgatggatttgcacagaaaataatagcagtaaagaaaaaataaagagcataaagattttttaggtggttttgcagttaaaattctgcatagtccataagtctatcttattagatatctctgatacaatttgttatacccaaaaattggctggaggacatgtgtcaaggaaaatggaatgtgaatcgatacaatatctttttatggaataactaattaattgtgtaagtgttagagtatatttgtaacctgctaattgtaaggtcttaggcgaggaatcattgtatgaacttgcacttagtgtattaatgagaaaccatatgttgctaaaggagaatagcgaggcaccatagaaaagtaagacataccttagcttacaataagcaaaccaagtataaaagtcaaatcggttcgaagaacaagaatgcgagatgaccatctcgctacaaggaaacttcctatagcttcctccaactaataggagcgaggctcataaccctggcaagtcagaagatttctgtatacccgcgatcgacgtaagacatatcttgttgacctcagaaagaagaatggttccagctcactattgggatcactacaatcaagtttctgtcgagacatctccagattcaacaattaaagacgtgtttaagacacgatattcttgacccagtaaaagtgggaagatcacagctatatgattttccaaatcatacaccgcatttacattttgtgatgtaatcagatcccacgattttagggatactgcagttattaatagtggcaaacaatctcaaaacaggagacaaaaaaactcttatgaaagaggccttaaaaaatactcatctgaataagattgactcgtggnnnnnnnnnnnnnnnnnnnnnnnaaccacgtaaaaaaccctgtgttcgtatattgtttttctatagcttttattttttcagtgttgaattatcatcgtgaggctcaaatttggttaacgaaaatcttcgttaacagtttggtgctctcattgagagcctctatgaaaaagctcagaaaaagccttcccttcttttaaagaaacaccttccactttatggctaaaattccagagaatattaacaccccacatgacgaaactaaccatcgttctggaaaagagcccatgggctctagaagatctaataattcgcagtctagaaggaccactcgttccaggagggctcaacctgaggatggtccccgtgctcgaaccacacgtccccagagaactcaacctgatgtttgtcctagtacgcggacaacgggctcgaggagaacttagcgtgggaatggtcagaatcctggaggagggatgaagagctcaaccgtggaggtgcccaatctgtgggagaaagaacttatgaaatggaaagccgccgcttgagacgccgtctggaagaggcgcagtatcaaaacgatgagttagaacgagaggcagcatcggccagggcggcgcagggacgaatgctcaaaatcaacctgaacctagagtgagaagaccacgaggcagacctcgtggctcacgaaccaggagataggaaaaggcccaggaagaattcctaaccttaaaacttccaatgtgtgaaagggaggatagcctaagatccccctacttgtcttggattgcattggttgcaggctagccagtcaacccaggaaaaatgagacaccccctgagaatcaggatgaacagccagagaggagacaatcagaaactaataaatgagaaatccttcatgaaaatgaggaagatcttggaactcatccgggagaaaggagatcacctgttaggaatcactagcattcttcccaaacccatagagcgaggactcgtacataccctgatgggggaaatacgacaaatcactctcaggaggaaagaacagagcataaagaagcaagtgtgactttaaggcgattcagaacgcatagtcgatcaagtcgaaagggagagagtactaaacaagctaatgatcgagaaagtatgggaacaagtaaatccgcgagccacttaaaggcaaagtctatgagtaggacgcggtctatgagtaagacgagatctgccaccaattactcccagccagatctgcgagagcacttgaatctgaagaaacctgatcttcgtcaacaacttggtccaaagcaagaggatccaatccaattgcggataaa

SEQ ID NO: 41009 - DNA, 1301 bp, Cannabis sativa
tggtaaaataatccccaacaaaacattgatgtccacataaggctactcttggtgtaaaaatttgcccccaattgaactttatacttgtgtgaggttgacttaatgacttgaactaagcccgtttctctcgaaactatcagttggacatcaattttgacaatcttggacaattgtttctgttcttcaagaattttgactgagagtaggatcttgaatctccattacctgttgatagtggatttcaaaattttaagttgatgacaccttgagtgatttccttcgattttgagacacttatgaaatgtgtcaacattgtactataaacacttactctgatctttggttgttgtcttagcattggctctcttataacagtgtctatttatgtgaaaattgatctagtctttgtcttctcttaagttgtagtcttgttcatctccttggtttgatagcaaaggaggccttcatcaactccttagctttacaatataggaggccttcaacatccccttggctttgcagcgaaggaggccttcatcattttctcaactttacagcgaggaggtcttcatcatttcctcagcttcatagcggaggaggtcttcattatcttctcggctttacagtggaagaggtcttcattatctcatcgactttacagcggaagaggtcttcttagtgactgttatcctattttttgcaccttgacgtggcaataggaatagatgagacgtatcccatatttctaatacctgggcgaaggaaagtattcctagcagcccaattatggtcagtcaacatctataacactcggaccaccaagcagggtggtcaagaagatgtctgaccaagatgcagacatgtttatgctaagcaaagcatgaaagatgaaaattccggagatcaatctcgttgtttccagagcacgaagacaatccctataattacgggattgagtcagagaataaaggcaacacatcttagtttcctatttcttgaattgtatttatagaattaatatagtttcatattttactcatataggcaaaagggaaaccattattcatgtattaagtccctataaatagtggcctaatttggccatgaaaagggatcgagaaaattacttcagaaatacattcaagagagaaatttactcagagatcaattgtaaaagcttttgagaggaagaatacttcattccttctctcaagtcaatacaaatataaggggagtaggctatttccatactttcggggccaaaccattttaaaatatggtgttcatgtttttgctttctt

SEQ ID NO: 41010 - DNA, 1164 bp, Cannabis sativa
atacatatgaaggctactgaaaggatccttcaatatgtcaagaatttccatggtcaaggtttattcttctccgctacatcagagattcaacttaaagcttatacgaatgcagattggggagcttgtcctgatactagaagatccactacgggattttttatttttcttggacaatctctgatttcttggaagagtaaaaaagcaacatgtggtttctagatcctcagctgaagccgagtatagagctatggcaaacacctcttgtgagcttgtttggctgctgtctattttgaaggaattaaaaatcgaacacaaaggtcctgccttgctctactgtgacaataaagcagctcaatacattgctgcgaacccaatttttcatgagagaaccaaacatatagagattgattgcgatttggtaagggaaaaggtgcatgaaggagttattaaaacaagtcatgttggtactaaagatcaggttgctgatatatttaccaagacactttttcctaccccaattcaatggtttcaaggacaagatggggcttattagcattagctccccatcttgagggggagtgttaaaataggcttgttattttccttttggatttagtttttactgtttttactgccactagttttatggcatatttgagttgtattctgttatgttagttacagttggttagttgtcttcttgtaactaactttgtaactaattgcctattgtaatcttcttgagcttgagctatataaagctcactcccttctttgattcattaatgagaaattcgttctgttttcttcttctctttctttctggttttatattttctggtttgtaataagataggaggaaaacaaaataagttcattataaagttactctttattattcttgaagtttatatagaaaaattatcttacaaaaataaattagtaattttacatttgtgctgttctatgaaagtttttttttcgaaattggaggaaatttttttgatgggctccatttaaaaaaaattcaacactttccatattttttttttatgaataaattgggagtcacaaaaaatttgattattatttagggataatttcgcaaatacacaaaaacaacaaaaaattataaaaatacggtttcacagaattttaaacatt

SEQ ID NO: 41011 - DNA, 1145 bp, Cannabis sativa
  modified_base (280)..(290): a, c, t, g, unknown or other
aatttacttggtaaatttcagatttacttattggaagcttgattatataggcacatggttcccacactagttgagataatattggcttgtagactcagttaatttgtttttattaataaatcaaaattataaattagactatgtcttatttgtaaattttcactaaggatgagcttaattgagaagaaaagaagttttagagtttatttattaattaagagactttataaggtctaattaataaatacgctaaatgtcaattttatttgataattaattnnnnnnnnnnnataattagatttgacatttaaaaaggtttaaagttaaaatatggcatttacgaaaaaaaaaaaagataagttgttgaaataaaatggcaaaattgtaactagtgaggtccacaatagtggcaagtcacttaagtattttttagccatttatttatctttttttattccatataatttaaacctaaccctggatgaaagcctataaatagaacatgatagactcataacctaagaactcaactcttcataagtctactctgttagaaaatagaaaagagaggctcctctcttaattttcgagttctcctctttttctctctctaaattcaaagcccatagtgatagagtacatttttcactcatatcaagtcagtactcaatcatagtgtggaagattgtaaggaattccaacatcttaaggagatccaggctcgaatcttgttattactctgcaacagaaaggaacaagagttagagatttaagcggaatgagccatattattctactgccactagtataaggttttttataactttatatgtgtttaattcattggtttaggaaattcatgtttaaggtgttaaatcaacatacttgttagttactctacatcatggtaaaataacttccaagaactggtatcagagttatggtaatgatatacttttatgaaatatagatttaaaatgatgattttgatgatttggatgtgttcatgttggtttatgtgcttaattgatgaatatttgtgaattataaatttttgacaaaaaatatttttattttcgtattgagagtattttttctggaaagtagatgaaaaattcatgaatttagaattttacaaaactcaa

SEQ ID NO: 41012 - DNA, 1774 bp, Cannabis sativa
  modified_base (212)..(219): a, c, t, g, unknown or other
  modified_base (289)..(289): a, c, t, g, unknown or other
  modified_base (612)..(617): a, c, t, g, unknown or other
  modified_base (856)..(857): a, c, t, g, unknown or other
gtgcttgacatggggtaatttcagaataggtgatctccgggtgatctcctggggtgatctcctgggaagttttttctcaagaagctttctcaagaagcgtgcgagtgaggacaaagcatgttgaaaataattatgttggtcagtagggtcagtcatcattctatgaagcagtcaaagtgaagtaccggtgtataagagccattagtccgtgnnnnnnnnggcccaatggaggcttgaagcggagatgttacattaattaacaataattatttatttaaaggttaaattnctctcttttgggtcttgtgtgagacttagggggccatagtagtgagtacgacataatgaacccaaccctccctcacatgaaccacccgaactatgaagggtcatttcccgtatttaaataatcatattaggttaattatattagtttagcttaattaaaattgattagtaatataattaattttataataaatgaaattaatttttcattaggttattttaaaattaatttagaaaaaacacttagtttaataaaataaattctagatagttatttatagtaactaaattatgtttttttttaatatttaattaattagaaannnnnntttaagttgaaaattaattaattttagaccaattaataattaagttgatttattcaagatacttaattatttgcttataattttaatacatttaataaaaaattaatctttaagttgattttattcaagacacttaaatattatatatttttcaagaaatttagttagacagaaaattatatttaagttaaaaattttaatttgagaacaactgaaattagaataattttcaaaatatnntttattttattaatcattttctcattaaattttgaaatgcatttaattagtaaatgtagatattttgaaacattaaaaaatagattaaagttgaaaattaattatttaatgaattttaaattaacttaaatcaagtaaatttttcattaatggtttattaaaataaatagactaaaatatatcatatatattttcattagaaactaagtaatcagttaatgaaatatctagatggttattttagtagacatttggtatttgtctaaatatatttaattaaatagaaaattaatattaaagttgattttattcaagatacttaaatattggatatttttcttaagaaatttaattaaatagaaaaattatatttgtgttgaaaattaatttataaattaattttagatcaacataaattagaataattttttaggatttcttttattttagaataattttattttagatcgattttaattggattttgaaagtgtcatctaataactgattcaatccaattagaattgaacaatttaaatccaattcaatcataattagatatttaattttttataattcgattggattggtacagtagattggtttggaaatttcccatcccatttaattattatattgcagaaagattttttaacaaatagcatattttaaggagaattttcaaagactttttataaatattttattgatagttttacagcctaaaattttaatttacaaaaatatgattttaaagttttcaaattataaaaatatacttttctcaataaaaagtaataaatcaactaaaaaataatgagaaatcaacctcacaacaactataaattaactataaaataacaaaaaataattagaaaaataatctcataacgataatacaactagaaataaactat

SEQ ID NO: 41013 - DNA, 2007 bp, Cannabis sativa
aaatatttgaatatgagacagaggcagtggatggagcttgtcaaggattgtaattgtgaaatcttttaccgtctcgggaaggccaatatggcggtagatgccctaagaaggttgggtcgtgggctagtatctagcatgattatgatttcacctcagctagcagatgacatggtcaaatcaggtattgagtttattgtgggaaaacttaataattttatgttacaatcagatttgttaaaaaaactcaaaaatgcatagctagctaatccttaattggtaaaaattcgagaagaagttttatcgggtcaagttaaagacttcatagtgttaggtaatgggatgttgttgtaaaaaaccaaagtttgtgttccaaacattgtgggacttaagaatgaaattctcatggaagctcacaccactccttattcattgcatcctagcactaccaaaatgtattaggatttaaaatccttttattggtagtgcgggatgaagaaggatgtggtaaaatttgagttaataatcgttaaaaaaacaactataaactgaaaaatatttaagtacaacataactgttagaagttgtgtcctgataagtggatcagttagttagatattcttgttcctagttttcagttgtatatccaactgtcataactgccttcttgacagttatgacagttggtaccctttagtacttaagtccttctataaatagccttagcttttgttgcttttaattcatagaaaagaatacttttctcagcttgtaatacttacagattattcaataaaatagtaattcgttcaactctgttttcttctggttgtgcttgatctgtgagatactttcgtgcatgttctattggagttcctgtgtgtgtgtatgtatgaatacagattaatacttgccgtttccaataggtggtatcagagcttggagatcaagaacctgaagatcaagattcttgaagatcgatccaagaagcaatgggaaacaccaagtttgacatcgagaaatttactgggaaaaatgattttgggatatggcatgttaagatgagggctctgcttgttcaacaaggtctgcaagttgcacttcttggagaaagaaatttaccagacgaattaactccaaaagaaaggataaacatccttgagaaggctcacagtactcttattttgagacttcgagacaaattcctaagagaagtgtcaaaggaagaatctgcagctggggtatggttgaaactagagagtttatacatgacaaaatcattggccaacatgttgttcttgaagcagaagttgtattcattcaagatggcagcaggaaagaatattgaagatcatcttgatgatttcaataaggtgatactcgatttggagaatataggaatcacaatcgaggatgaagatcaagcaatcattgtgctgaattctcttcccacagaaagttatgaacattttgtggataccatgatgtatggtaaggattccttgacattagaggaagttcaaaatgcattaatgtcaaaggaattaaagagaagaacagaacaacaagaagaaggtgctggagatgggttgttgatcagacgtaaaactccaaagaaggaaagtaagggtcagaacaattcgagtaaaggcaaccataattcaaagttcaagaagagatgctttgtatgtaacaagactactcatctaagaaaagattgccctgtcctaaagaactacaactccaagaaagatggtgacgctgatgtagtttcggatggagaaggcactgatggatatgacagtgctagtgtcctaacaatttccaagaatgggtcagaaggtgcctggataatcgattcaggatgttctttccatatttgtccagataaaaaccagttttcgagctatgccacagtcaaaactggtaccgtaaaacttggagataatcgatcttgcccagtcttgggaattggtactgtcatgctaaatctagaagggggaaatgtta

SEQ ID NO: 41014 - DNA, 1362 bp, Cannabis sativa
tatttttaataatgaaatctttagtacacgggaagttttctcaatatctctcaataatgttaatgttcgagtttttaaaaatgatattttttttctgtatcttttttttttaaaacaattcaaataaatatgtgaaagataatattccaaacattcatatactagattttatataatatatatactagattaaagttatatgcacgtatacttagttaatttattttcaaatataatatattattatttttaataattataataaatagtcacatatagtaaaaaaaaaaatattattataaaagtagaaaccataatagtaattaaaaaaattactgtttaaaattttataaaagaaaatacattaataatataaaagaaaattaaaagaaacatggcctaaaatttaaaaaaaaaaatattaattattatttaaaattcaaataataacaataacaatccattcaaccttttatttgaaggcataaacagacaaaataaatttgttctaaaacaaaatggcatattggcagtacaaagaaaatcagctggctcttacaagcccccaatacataaaattataaagagagtacttgaattcctgtaatgaattataaggttatggcaaggcactatgaagagcaaaaatgctaaggtaattatatatatgtgatcccaaaataattttatgaggtagtaagagatttgaatgggcagaagaatgcgagaaagcttttaaaggcataaagaaacatttatttttggccaaaccaataaccagagaaactttatacctttatttagctatctcgaaacatggattcagtacagccttagtgcgagaagagggaaaacaccaccaacctgtttactatgtcagtaaaaggttactaggggcatgatcaagatatctccctcttgaaaaatttgcaatatgcctgattcatgcatctcacaaattacgaccatatttccaggcacatccaatcaaagtcctaacagatcaaccattaagacaagttttatcaaaacctgatgctttagaagattgataaaattgtcaatcgagcgtggacaatttgatgtaacctatcacctgagagcatcaattaaggccaagctttggccgattttctaattgaaggagtaaacttaaaagaagacccagctggtgaacacgatacaaaaacttggaggttaaatgtagatggggcttcaaatgagaacggctcgggagcaggggtcataatgatgttgcccgacaacttcaaattccactacacgtttagatttcaatttgatactttgaacaacgaggcagaatatgaggccttgttggctggattgagaatagctgagaca

SEQ ID NO: 41015 - DNA, 1117 bp, Cannabis sativa
tctttaattctatcatttttttttattaaataataagtctttcattagaattattaagtatttaattttttatttttttaaaaataagtatttaattttttattaatattaattaatatcacaaatttttagctttttaaattttattttttttaaaaaaaaaaatctctcatatttatatgccttttttttagttttttaaaattaaaatatttatttaataactaacttataaatatatactatatactataaatatcattttaatttcatagtataagttttctttttttctctcattttttttcgttcttatgtcataccatcaatcaacatctttaggtaaaagtttggttaattattttttctttattctgtcttttctttttggcgcatcaatagtttgcaatcttcgattagttgtttttatgagtacttaattttcaattttttttaccttatgtatgttttctctaaacaactatacttatctttctatgatcaatttgtggtactttttttctaaaatgaatacacataacacacatctttctttcatttaattttcattattatagaagattaagtggtgtaatcgtattacatatgatattgcattatgacacgggcttgtctgattaggcaatgtaaatgtatgagcatatctatttttgtgcatatggttagttatattacctattgttgaatgttatggtataatcatcttatgataatgaaatgtataattagttgtttgatgtatccttctttattgcttttcttttagagtctatgtgacgcatgggtgctttgtggtgcaggtaagggcaaggaaaagttatagcagccatgagatgagagtcttctccagcaatgcacatattgacctcaccaatcttcgtgttgggctgctagaagttattttgggttgtatctattgttttatgtttttgtgttgtcgttgtatatagttcttttgtaaaactttttataattgggatcctcataacaccttttcactgtcgttataatatctattttcagtgttttattttagtcaagtttttattattctcacagtttttaataattaattaatatattagtattaaactag

SEQ ID NO: 41016 - DNA, 1428 bp, Cannabis sativa
agctgacactatcactggaagcttcttgtcttctcccaaaaactcataccgtagatgattaggaagcaccttcagttctaactctggtggtttctctatagatggcacaagtcctttggcaccaccccaactcttcataatacttcctattcaatggcttataggagtcaagccatttggcatatcccactgcctccattctttcttgctcagtcaactcatcctcggttaagctcaattctaaaggatcttctatcaactttttcttctctgcaatggtatcaatcagatcaacaaagaaaccgttatcacttgcctttggaaaagtcatcgccttaagtacattaaagaccacttcttccccttacactcgcagcttcaattcaccttctgaacatcaatcaatgctgggccagtttccaagaatggtctcccaagagtaattgggatattgctatctttttccatgtcaagaacaataaaatcagctgggaagatgaacttatcaacttttactaacacatcctccatgactccccttggatgagctagtgatcgatcagccaattgcaaggttactgtagttggctttgcctcacccaactgtaattttctgaaaaaccgacagaggcattaagttaatgctggctcccaagtcacacaatgcatttatcccttctattctcccaatggtacaaggaatggtgaaactcccaggatctctgagtttgggagggagtttcttctgcaatatggcgctacaaccctcagtcaatgccattatttcatagtcttcaatttttcttttctttaacaagatctccttcataaacttcacatagctaggcatctgttccaaggcttctgcaaaaggaatgttgatgtgtaactttttaaagacctctagaaatttcaaaaacttcttgtctaagttggtctttcggagtctctgcaggtacgggatcttcacatggtgatctatactgactggttgagaagcttgttttggtgcgagactctcagtagtcttcttttccgttgatatcggtgccagttgatcctgaatctcttcttccactggttgtcccccatcaggcccttcatacttcttcccgttgctcagggtaattgccttgcagttttcttttggattgacctctgttgtactaggcaagttcccctgaggatgggttgctatttgagttgccaactgccccatctgagtctgtaagtctttaatggatgatctagtctctgtcataaactgtagcaataaatctgtgtgaagactagaactcccactagagccttgtttctgtgatttttgttggctttgcgttcggttctaatttctttgctgatagaacccttgttgttgctggttaaaatcactatttcttcggccccctccttgattggacccaaagt

SEQ ID NO: 41017 - DNA, 1184 bp, Cannabis sativa
gtcactaaattttaattcccaaactcggtaagtctacaataccttttaaaggagtcctttggtagactctatctgttttagcacaaaaaaaaatttatatttaatttttttcatgatagtttatgttatagttatttataagtaaatttttaaaaaattatgagcaatttaaaatgctgagtttaatatttacatattatgttgtaggcgcaactgacaactgtttaaactttattttcagcattgtaaagtagtattccgtattttcaaaaaatttacaagtaagcaatcataaataaaaaagttagactaattttttttatatgccaaaataaatagagggtcaaccattactacagaaattttcaaaattattttcccgaacttgtaatttttccaagagtgggatggtaggtaaaacataagaaagggtatactaaatatgaaaaggactgcagcaatgaactattattaatggtcatagaaaatcaaatcatgactactttcagcaattatttgattagggccctactccaggctgcattatgaagataacattagacaattattacaacattttctttttgctgctaatagggacaaagaccatactaattaagacccttttggttgagccttaatttggccatatcttcccaccagaggctacacaccacacaaaaaataaaaccatttaatggttctcactccattcaaaattacttaatcatcatcataactactagactagtccttcactttttaaagttatctctctcaattatgggatcaaactttttacatcatatccaaaactctccggtttaaaatgattttcgaatcttgaattttaatttatataattatgagaatatcaccaaacaattttaaaaaagtatatattgtttggctggaattctatgcttctgagttctgactccatcttataaaaggcaaatcctttctattaagctttacccgagcatgataatcctggtagggtaatatggttttataacaaccttgttttgttactcaaatttgtggcatttgtatatatatgttgttactgaaataaattatttactataaattagggtgactattcaatggttacattttaattgtaattatatagttagatttttctttgacctgtaatagcaggttactaataggtagac

SEQ ID NO: 41018 - DNA, 1193 bp, Cannabis sativa
actggcgtaatgccgagttggagcatgaaatagttgccgtaaaggccacgctgggagattgtaacaaaaaacaacctgaccttgagaaaaaagatttacgaggcaaacctcgtggctcacaagtcaaggggcaggagataacccagggatatgctcagagctctcaggagatgcaacctgaggaaactgaggaaaacctaagggtacagcctgggatacgtagaacatcgaacgaaaatcgccaacccactattcaggcccataagaatgaaactcgtgcaaacccttgtaggaagaaaaaagtgagtcaaaccttgagaggaagggcagggtccggccacaatcatgacgagagtgatctacgagagcatctgaacctgaaaaagcatgacctctgtcaacgactagattcaagacaaaaggattcattccatttgcgaatgagcgggttggagaataagtccagagtacatcaaatcacgaaacccaggagacagatggagcacgatactcttggaaaacttgattcggaaacctcgtgatcaatgaaaaaagatgattccaaaaggctacctaataacaagaaacccaacaagtatatccctctttataccgaatacaacgagctcaatgaaactcgggaaaagatctacctcacacacgtacaagaagctgtttttggtgagccaagacctatgaaacatgcgaggtgcaagagggatccaagtaagcggtgtgaataccatggtgatatacagcgcagaaaccaactttatcgcaccgttctacagtctcgatttctttctcggcaagtttctcagcaagcttctcctcaaactcatcagcttggactctgaaggccttctcagcttccttctttgttgtctctgcttcctccttcactttctcagcttcctgcttgaggcgagtaatcttctgttgggcgttatcttgttgctcactcacatccttgcattgggataatttatgagtctcgccctccaaatactcaagccgctcagagagtagtcaattggaagcaaaagaaccaaaggaagcctggagaattgcaaacagatgagtataaaagagatataaaagatagtataattatattaacaaagccgacgtaccatgaagtgacagtccaaggtccttgaaagcatctcctttgggctcctaagattgagaaa

SEQ ID NO: 41019 - DNA, 2537 bp, Cannabis sativa
tatatataataaaaataataataaaaggaggagtagagtgaatatagaaaatatgttgtcataatagatgagatggatcgaaagaaaagagaatagtataaagttggtttagtttagagtatactcatttttgtttagctccataaatattaattcattcagctaatatattatatcattttttttttaaaaaaaattatattaatatatatctgatattattataactaattatttactttttataaagaataaattatattaaatttttaaatggtatatagaagatatgaagaatgtgaggtataatgtaatataaatgtgtaaaacaaataaaaaaaaagttaattttttgtaaaatattttgaataatagattaaataattaagttgatgtgagtgttttttttggaaaatagtattactatttaatagcattgctatatattgacgttcaaaaaatattttataaaatttattatattaaattatgttagatcaatatttgtataatttaaatttcggcatttctcatcggagaagtcaggcaaaatttgcccaattgggctacactctccacttctacgtaccatcatttcattcaaatcaaatttggagaactaagacaattttacctttttttttttagctttttctttccagtaaaatactaacaatagagttaagcatatcaatataaatatcaattttaaaaatattaaataattaaattttaattgaatttaaaattttaattacttatttaaactaaattaaaatgttaattaatttaattaaatattagatatattagatttttggacaccctatacaagttacaacactcaatcctatccaattagatatttaaaaataatatccaatctaattcgatcataattaaatatccaatatttagcagtttgttaaaattggatcgatcggttctcgttagatttgatcgatttatgcacacccttgtatataaacgaggaacttacaaaaatattataaaatgaaggaaaatttacaaaaatactgagacacaaagatttttatatttttattataccaagttaacaaaatattgtgttaaaattttaaaattacaaaaaatactatgttttagtaaaaaaaaaaaaacaactaaaagagttgaaaaaaaccctagaacaacttgacaaacaacatgaaaataactataaaaccacaaaaagataactgcaaagcaacagaaaaataaaaaaaacattgacttaattgcaataagtaaaacaatatcaactactcaatatgtttttccagtacaattttttttacttagttttgacaacttaatttatctttttgtactattacatttttttttcatgaaatttgttggtacaacttttttttttctctttttcattttgagttagtgattgttaaaatgataatttattttttaaaaattaaataaatagttacattaataatagaaataataaaatcttatgattttttttttttttgaaagaaaaatcttatgattttaaaaggggtatataatataataagtaatataatatctactactgcatatcatgtcaatttaaaaaaataaaataaaaaatcttatcattatattttaaaaaatgtgtcaaaaaaataaattaaatgtatgtatctacatctaccaaacaacacacgtacaacaaaaaaaaatcatcaggaataagttaaaaatatacaccataaaaaatactcataaaaaataattgttcaacaaaaaaaaattatgaaaaccacttaaaaataacataaaatagcaaaataaatgcacatatatacaacaaaaatattgtgtagaataatctgaaagtatacacgattaaaaatgcacataaactaaacaacaattttactaaaaaacaacagaaaaaactataaacacttaaacaacaacataaaaataactataaaataacaaaaaaaacagttataaattaacagaaaaataacaagacattaatcttgttaaaatatttgaattatccataaatttactctaaataaactaagtgtatatattatttttattaatcatgtaaaagataaaaaaaatatatgatgagtgctcttaatttttttgtaagaaagagaaagaatgttaaaaaatatatgaaaaaaacaaaagtaaaaaaaaaatagtaaagattaaaagaaattaattaatattttttttataaaatgtgattataatttgaaatagttagagtgagaatagtaagaaaatgaaaaagaaaaaaaataaatgtttgtattttattttaaaaaaaataataataaaataaaatttgtgagtacaaaagtgttaaaaaatgagatacaaaaatgtatatatacttatatatatatatatatatacaaagataaaaaaataaaaaaaaaaaatagtttaaaaataaagagagagaattgaaaaaaaaatgaaaaagaaaaatggagggtgaagagaaaagagaaataaataaaaaataaacagttgacttaaaa

SEQ ID NO: 41020 - DNA, 1237 bp, Cannabis sativa
agtttgaaaccagattgtggatatctggtgtacaatgatttgttgccccggagtccggataccagttggtatcattttgtcctgaagtgtgagccagatttgcctgaggagagggagcagagggattcgattgcactccagtaaagcttttatcaaatctataaaaacaatccaccacagtatgcccaattttgagacaaagttgacattggggtctgttggatgagttgctcgatctgcctcctctattgaagcctcctcgatgaacctgagtgagatgagggacattgtattgaggagctccataaccattagccctgggatgatacagaaaagcacttcgattggaaggagaaccccttgctgcagaatactggggagagaaggttccgaattgcagaggaggtctcgaaggataattggctctgctgaatcgattttgatatgcaagattgacttcaggttgttgctcaggttcagaagtggcaagattggctacaatttcaggttcgtgttctgtcttttcgattcttgattcagaggcaagcaataaggcctcaatttctccgactgaatatccttcgattctagtatttgtcgaaatgacaaaggtgtcatagttgctgggaagtcctttgaaaatagctgctatgtggtcacgatcactgaggacttcaccaacggaggcgaggagatcaacgtgctgtttaactttcagcagatagtcgttgagggatagtgtccctttctttaagttctgaagcttggtcttgaattccaagatttttgaggaaactttcagtgtgaaatgtttctccaaattggcccagatttgacgagcagtgtggcacccaaccattcgagtgagaagactctcagtcatagacgatagcagccatgaaactaacaattgatcttgcacatcccaatcaagaaattcagggttgtaggttgaagaagcacgatcggcgtcactgagaaattgcggtggaggagcttcatcttgaatgaatttgagcaagcgatttccacgaatcgcagcaagaacctgctgtttccaaagaagaaaattgtgatcattcaatttcacagaaagattatgagtaaaatgaacaggagagaactcatcggcatctctggttcgacttctctgcagattgggatgtgtattcgtcgagtttccaagattcgaaggattggctgggttttgagctgccacagtcgccatgttcgccgt

SEQ ID NO: 41021 - DNA, 985 bp, Cannabis sativa
  modified_base (551)..(551): a, c, t, g, unknown or other
aatacaagagcaaaccaagacagtggaggaactggttctacaaatacatgacaaaccattcaaccaacaatctgatattgaaggacaagattcaaatgatgattactgtcagtataaaattgcccccaacatgtttgccatggctgaacaagttggagattttataatagagccatccaatgaagcaataaaaaagagaagggatgaggaaatggagataatcacagattacatggtgcttgagatcgaagaaggacaaatatacagtgacatgaacatactgaaaatggcaatcggattctatgcagtgataaagaacattaaaatcagaacgaagaggtccgaaccgagggaatacatggttacatgtgttaacaaaaattgtaattggtttccgcgtgcttcaaagttgaaacaaacacaaacattcaagattagaaaataaacattcaagattagaaaatatgtcaacaaccacacctgctcattggatgtcataatggaagatcacaggcaagtaacatacaatatgttgggattttatgccctanataaaacccattacaatctaatattattttacctattatatttactcattttatatatggacaatatataaacattaatttttttttgggatatattaatgttagtttgatatattatttttaatataatatgaaaatatttttattaaaatattaactaatatataaagataacaaataatataattatttattttttttaaaaaaatataattagtcattattaaaaacaaactactactaaatatgcatttcctaaaaattttatttttggaggtaaactccaaattttccctctatattttcaattgccttacagttaccacactctctcgtcttcttccccaaattaaactgtttcagctttctctaacctcatcaactcagctcaccgtctcaacagcttccgaggcgcacccagtaaaccgaaaaat

SEQ ID NO: 41022 - DNA, 3606 bp, Cannabis sativa
  modified_base (741)..(744): a, c, t, g, unknown or other
  modified_base (2034)..(2034): a, c, t, g, unknown or other
  modified_base (3434)..(3438): a, c, t, g, unknown or other
ggtcctgtaaatctagggcataacttgcctcttttctcaaaatgcttgatccctttcatcggatagacccgtaggaatacatgacctcctacttgaaattctatattgctgcatttcggatctgcataactcttttgcctactctgagaggcaatgattctggctttaattttctcaatcgcttcattagtctgttgtactgactccatacctaggtatttcttctcccctatttcaacccaatgaatgggagatctacattttcttccatataacagttcatagggagtcatccctattatactttgataaatgttattgtacgagaactctatcaacagtagatacttactccaggagccctcgaaatccataacacaggctcgtaacatatcttccagtatctaaaattgtcctttcggactgtccatcagtctgaggatggaaagcagtactgaattttagtttggtacccatagcctgttgcaaactctgccagaacttagaggcaaactttggatctctatctgaaactatggattttggcacaccaaggaatcttacaatctctttaacatacaaatgtgcatattgatccactgagaaggttgtcttaactggtaaaaaattagcagacttcataaattggtctaccgcaacccaaattgaatcaaataaaatcgtggttctaggtaatcctacctcaaagtccattctgatatcttcccacttcgactcagnnnnggttaaaggctgcaacaacccttccagtctctaacgttcaaccttgatttgatgacaatttaggaatcttgatacaaattctaccacattcttattcattctgctccaccagaagtagggtttcagatcctgatacatcttggtggtgcaaggatgcagggaatatggtgtggtatgagcctcctcaagaattttatttctaagtcccacgctatttggaacacaaaccctggtcttgaataacagcatcccactaactgacattgtaaagtctctaacttgacaagctgaaacctcttgtctgatctttactaattctggatcagttagctgagaagttttaatacattttaacaaatcagattgcagcgtcaagttatgaagtttgcctacaacaaactcgatgcttgatctgaccatgtcttttgctaactaaggtaaaatctgaaccatactagtttcctgcccatcaccctttttgctcagggcatcaaccactacattggcttttccagggtggtgaaggatctcacaatcataatccttaaccaactcaaaacaacgcctctatctcatattcaaatattttttagtaaagaaatatttgagacttttatggtccgtataaatttcacatctctctccataaagataatgccgccaaattttcaaggcaaataccactacagcaagttctaggtcatgaattgggtatcgctgttcataatttttcaactggcgagaggcataggaaataacccaatcagcctgcatcactacacaccccaaaccctatgtggatgcatcacaataaaccatgaacttgtccttgtcagaaggtagcgctaatactggagctgtgattaacctctgtttcagctcctgaaagcttgcttcacacttatccgtccatacaaaacattgattctttttagtgagctcggttaagggtattgaaattttagaaaacccttctacaaaccgatgataataaccagccagacccaagaagcttctaacctctgtcagtgttttcggtcttggccaatccctgacgaattctatctttcctggatccaccttgatcccatctttactaacaatgtgcctaaggaaggacacctgagatagccaaaattcgcacttcttgaacttggcatataacttatgtttgcaaagtcgttgcagaaccatccggagatgttgctgatgctcctcttatgattgagagtacacaaggatgtcgtcgataaatacaataacacaatatcgaggaaatccttgaatacnctattcatcagatccatgaatgttgcaggagttttggtcagtccaaaagaaataaccaccaattcataatgtccatacctagtgcaaaaaactgtctttggaatgtcctcctcttagattctcaactgatgatagcccgatcgaagatcaatctttgaaaagaccgtcttcccctaaagttgatcaaaaagattgtcgatcctaggtaaaggatatttattctttattgttagcttattcaattcctgaagtcaatgcacatccgtaaagacccatctttcttcttaacaaacagtactggagctccccagggtgacacactaggcagagaaaaccctatgtcaagcaacccttagagttgaatttttaattctttaagttttgatggagccattctgtacggggccttggaaatcggttctgctccatgtgccaagtcaattacaaattcaatttctcactgaggtggtaaacaagaagttcatcaggaaaaacgtctaaaattctcgaaccaccttgatgtcttctggccgaacagagtcaggacgagtggtatcctataccacggccaaaaaccctaaacatccctctcaaaacaattccctgactgttagtaccaaaattactgcaatccgagatccctgaacctaaccaacaaaaacaaacggttgtttgccttctggttggaagatcaccatcatcctcttacaatcaatactaactgagtacttggacaagaaatccattcccagtataatatcaaaatcgaataaattcatttctattaaatcagcactcaactctctatcctctattctgatcagcttagacctaatccaccttttgtagatgactaattctccgccaagcagtagggttccaaaccctgtttcatagctatcatgcggtctatccgatttactaaaaattctggccaccacataggaatgagtggccccagagtcaaacaacacaaagaaataagagttgttgactgagaattgacctgttaccacagaggaactggcttctgcatcagcctgagttatcgtgaatacccttgctggagtgggttttgctgcaatcttcgatgctttagtcctaagttggggacaatccctcttgtaatgccctggcataccacactaaaagcacccctgctctttacactctcccagatggtgctttttacaattggggcaccctgggtaagtgtatcgggttttggtgccactctggcaatttcctcgaccctggttcccacagaacctcttgttctgacctgagccactggtagcagtagatgcctttctttgttgatcagtggtcgagccactaccacccctgataaagccagatgcaagaggagtaggagccccaccaacaactggagtcccacnnnnntctaaagtgcactccactgcgccctcagcccgtagtgccttatccacaatttcagcataggtggtactgtcatcagtagtgatcattaggtcgtgtttatctttgcattcaacccacccaggtacttctctttcttgctgaaattggttggcacaattcccgaggcca

SEQ ID NO: 41023 - DNA, 1306 bp, Cannabis sativa
ggttacacgcaacaagaagggctaaacttctttgacactttctcccccgttgcaaagatggtcacacttaaattgcttcttgccatttctactataaagaactggcacaccttacaactcgatattaacaacgcctttctaaatggcgatcttaacgaagaagtttatatgtcactgccacaaggacttactttgccttcttctctcaatgcaggtaccaatcttgtgtgcaaattgcacaaatccatctacgggttgaagcagtcctcaagacaatggtacaagaagctatctgatgctcttctccaagaaggattcaagcaatctcaagctgattacactctattcaccaagggatccgaggatactttcatagctcttcttgtgtacgtagacgatataatcatcaccggcccaaatatatccttgctgcaccaattgcgagaatccctccaccttaaattcaaactcaaggctttaggagatctcaaatacttcctgggatttgaaatcgctggatcaaaagaaggattatttctatgtcaaagaaaatacaccctccaactccttgaagatgttggtttcatgggtagcaaaccttcaaaaacacctatggaccccaaacttaaattagataatgaacatggagaagaattggacaacccctcacactatagacagcttgttggaaagcttctatacctgaccttatcaaggcccgacataacatatgatgtaaattctcttagccaattcatggcaaatccccgtactactcatctacaagttgtcaaccatctacttcgttacatcaaaggaaacccagggcagggtctcctatattccaagtcttcttcactccatcttcgagggttctcagattcagattgggcatcctgccctgttactcgacgatctacaacgggattttgcatcttcttaggagactgtctcatctcctggcgtaccaagaagcaaccaacaatctcgaaaagttcagccgaggctgagtatcgggccattgctgcaacaaccagtgaaattacacctggttacagtatctcttacacatgactttcaaataccacaaccacaccctgctttcatcaactgcgacaaccactccgctatccatattgccaataatcctacgttccatgaacgaaccaaacatatagagttagacttccacttcatccccgacaaaatcaacaacaacaccatcagattaattcctatctccagtgcattacagcttgttgatgccttcacaaaacctttgacttcaccaattttgtgaactcat

SEQ ID NO: 41024 - DNA, 1930 bp, Cannabis sativa
  modified_base (58)..(67): a, c, t, g, unknown or other
  modified_base (174)..(179): a, c, t, g, unknown or other
gagtgaacttgagctcggatgagattgtacatgtcaaagcagcgcgacctggagtgtnnnnnnnnnngacatctggggattgtattttggtagtcgctgtgcgacctgtaatatatgtattataatattaactttaattttaatatattataaagtttaataattaatataaannnnnnaatttgacacgtttttcgaggaaattctttgattagcaaagattgcaccgtaattgaaaaagcacagtagcatgccttagcattagggcgttacatacggtgtgggtgccccctaagtgatcaagcagacttatggtctcttggtcacttgaaattcaccaagtattatagacctttgcctgtgtattttcttggaaggacttgtttgtacgcatgtggaactaaaaataatgattaactttaagaagttatcttgttagcaacttgtttaacacaatattgaattgaaacactgtttttattcattaattggttataaatatgtgttgtttatgtgcaacatacatttattgatttcaaaagcttacaaaataaaaagccttcttctagaactcattctatggctacccctacccaacatgccaggcaggagccatcattgaagagtggtggatacttaactctttctaaactaacttttataagtgagttgacaaaactactactgaagagtagcattcttataagttggtcattaataatactttcggagatgttccccattccaatatcttagtaggagaactaactccttgatctcattctacctatcaagcttgtatgcacctttgatttttatctctgtaacttggtatgggccttcccagcttggccaaaacactagtgctgcaggatcattggtatttaggaacactcttcgaaccactaagtctcttatgaagaatttcctttccttgaattgtttgtaaaagtacctagaaaccttcttctggtaggcatgcaggttgaggttggttttgtctctcctttcttctattttgtcaagggattccactaacagggtgttgtttacctcttggtcataggttatcctcctatgggacaggtggttccagttctacaggcaaccttgcttcaaagccataggccaatgcaaatggtgttttcctagtggtcgtcttcttggtggtcatgtgtgaccagagtacctttgggagtaatttaggccaactttcttttgcctcttctagatgctttttcaaagtttccttaagggtcttatttataacttccacctgcccattcgtctgaggatgagcaacagtggagaagctcttaatgatgccgtgtatgttgtagaacttaatgaacatgtcattgtcaaactgtttcccattatctaacacaatattctgtggcagtccaaaccgacatatgatgttcttgactacaaagttgaggactttcttgaaaattattatcgtcagtggtttaacttctatccacttagtgaagtatttgactacgactacgacatattgtacacctccttttcccttagggagttgagcgatgaggtctattccccacacagaaaagggccaaggagactgcattagtgtaagttcatttggtggagctctcaatatctttgagaatctctagcacttgtcacattttttgacataatccgtagaattctcgatcatgataggccaaatatacccttgtctgagtatctttttggacaggctttgcccccaacatgattgtcacagaagcctacgtgcacttctatcaataatcgctcgacttctaccttagtgactcaccttaggagcgacattgagaaacctcgtttatacattacttctataggattaaatactgagcaactttcctcctcatctttcttgccttatttctattttcgggtaggactccagttt

SEQ ID NO: 41025 - DNA, 2437 bp, Cannabis sativa
aatcccacattgtctggggaagtttgtatgtgatgattctgagactatgtaggtatgggactacctatattaacaaggtacctcttgttttttggtagcctgacacgaaagaacttcatggttaaatgtccttaacctggggtgatttcatttcaaaaagtttttccaagaagcgttcgagctagaacaaagcacgttgggaacacttgagttgacctgaagggtcagtcattaatccaggaagcagccagagtggcatacctatgcataagagccaatagtccatgggggatggtccaatggaggcttgaagcagggacgttacaaagataacgtgtaacagaacgtctaacagaacgtcagggagaacgtcagggagaacgtcagggagagtagtggtatcactaaggtaaagaagattatttgaattactcatagtgataaggtaatgatggagaatacttttatatttgactggatggtcaatcttgtatacgtggtgaccattgaaattccaagaaaagattgtcttattaagcattgataaaaatgtatgtcacctagaatggaaaaagcttatcaactgagatgcaatttaatggacgtgtattcaagtggttggtgaatgttggatcacaaagtaggttatttattaagcaacaaactatataattgagtgtaaaataagttttagagtgtttaaccaagtataaagatagtgatgattgcaaggaagcaatggtagcgtatgaatcagggagtgaaatgttagtggtaaagatggaaaaagaacacgagagtcttagatattgatgaattagcattatcaacggaagactcaccataagttggtgtggtagttcataccaaaggattttcagtaaaagagagaatatacttgaggtttgtatatttctggatgtgtttgaaaagattatcaagatttctaccaaacacagaaaagaaacttcaggatcgatgaatgatttttgattaattattatcagttgagaatttgagaaatggatacttctagtttagtcatggttacccgatatgagtaatgttacctctaccgtatatgttgaatcaatttactttataacggtggttaaccgtaaatgattgagagatttaaaagttgtgtcagttcaagataaattgatacaagttaaaataagtggagatgatcaagattcaagtcgataataaaattgaaatttctcaagtttaagtgaacaaaactgataaggaattgtaagatgctaatgaagggagtgatgaaatttagatttaattaacaaagaaatgaaagcaagaaatacaattaggaacagcaaggaagcatttactttctaataacccaccatgagcttaccttggagttaatcatacttaacttggagtaatcccaagatgggaaatcatccagggaatcatctcaaaaagcatgcgagtgaggaaaaagtacgctagaaagatttgtattaggatgcaaaatcagtagttgttccaaaaaattatcaagaggaagggatgtcttaataagtagagatttacaaggcatcaagatgagtatatattaatggatagaagtaaggaaggaatgatacaattaaatatctattagaaataaatatttagcttgttaataagctaaatcaatacatccatagaagattctataggaagaataggaagacatgattatgaattatgtacttttggatcttatgattttgatcgagtagtaacggttggacataccgagttaatatactgtctattagtgtagatgatttatacaataaatgaggatatggagttcatatgaaagaatagtttaatcttatgaaattgcaaagttgatatctttggctatgatgttaagagttaaagaaagttattgaaaaccatggagattaaagagaaaatagtatgatgctttattcttgaaagatgggtaacttggaggatcaatagaatattagaaacatgttgtgggtataattgataaaagttagattatcttagaataatggagtgtttgtcgaaaagtgataattaaatgtaccattcgttaggtactttaataagtgtggtacgaaggaaatattggatacttgttcattggagtaacataggtaagaagacaatacgatggactggaagaatctaagaaacttataaaactatagggtgaattcaagttatatgctcgctttattgagtacatagaaaagctacattgatttaaatcgtaggaatatcaagttccaaatagaagattttgtttttcttcgagtattgcctatgaaagggatatgtagaaacgaaagttaaaccctagagtaagtaggccaagtagcctatcagctagtcttaactcctgcgttatctggggtgtataatgtgtttcatattttcattctgagaa

SEQ ID NO: 41026 - DNA, 1276 bp, Cannabis sativa
ggctgggctgacctgctcgacattctggtcgatttggattatatcagcgtctttttgagcggggatttgagtacgggctctaggatgcacgatcgttgcagtgttctgttcatacgttccccttcttctgtttagatcgttccttaggtcatgggttgctcccaacctttcgaacatagaagagtctggtttccttagcgattgattcgcttggttgacaggcggaatggcacaattagtctagttggagccgtcaggtatgactcctcctgatgaattaccgaacaaagtttgctcgcctactactgggcccatgagcggaactcgtgatcagggattgggaggctgaccattagtagtctggaagtattcattgttgggtcctcttccgtttctcccaggggaatgacgttcggcgattgctgacctacagtttggtaggctcttcgaatcagcacggtggcttgccgactacgatctttgatctctgcatggtgagccctcaatgcctccatctctttatctctccatttagggaacatacgcctttgttcgtcgaacgcgagatttactgcagcacgcagttcgtcctgattatgattgataactttagaaattagagttatttttcacttttttttagctaaaaattagtttagttcttagttttttaattaattcattaagtttttaattattttggaatttattagctttattgtaattttatatatttttgtgtgtttttataattattttattataatatgttatgtgctatttattttagttttctcattaattttatgaatttttagatatatttggtggataaagtatgaattaatttgaagaacatgtgaaaaaattggggtcaaaatgcaattttaaaagcaaaatcaaatcagcccaagaagaagcccactctcggtcagctctttaacctaatccacaccatccgtgtaaagatctaaacgcccagaagcgtgcgtgaggcacactctagacagccgagagtggcactttaagggatttagcttcatgttgtattttctaaggactttgaagcatttgtcaggtcgtctatgtgccccccagcctttctagatttgatgagcatgtcatccatgtacacttccatatttcgcaaaatctggtctttaaacattttgtgtaccaatctttggtacgtatttccagcgttttttagaccaaacatcatgacttagtagcaatagagacccatatttgttcggaaacttgtatgttcttggtc

SEQ ID NO: 41027 - DNA, 2244 bp, Cannabis sativa
agtaggattatgattctactaattaatttagtatgaattagaatattttgccataagtgaataaataagcgtaattttttaattacggagattttattgaaatatgtgggtatgatgtatgttattcgtagaataaaaatattttcaggtttagtaatcttggggacccgatcggaggcagaaaatgatacatcgattttagagtatgattttaatggaattattataataagttgattttaaaatattagagtttagcgaggtaacaatattggactattttatccctagggttatgaggttacttagcggggggaaaagggcattttagtctctttttgtcctttgattagtcaccttatttttgagttgagagtggttgtgactctatttatatatgtgtatacatcttccctctctaatcgagagggacgctgacggtgtctcggtggcagcccacttgtcttaagttgagtcctaggatttttcttgttaccacgagggattccctgatccctaggtcgaggctgtcttgcatcctcattcatgcgagaagcttttggtatgtcattttattcgttcctttggtttgtaaatccttgggatccttgaggaacgtcacgtcgttgctcttgattattcatctgattatccattggaacatcccttgtacccccaggttgttcttcctgggtgttttgagaatttccctggtttgcttcctgtctcctagttcttgaacctcgaggtctgcctcgtgatcttcttactccaggatcaggttgattcggaggatttgttccttgtgccgcccttgccgctgcagcctctctttctaactcagagtttcgtcggttagactcggcaaaacgttgtcggagttttctattttttagttccactaatggtacatacctagttggatcataatcatcctcacttctaggcacatacccagcagtattatgggtatcttcattcctttctggattttaactatcaccaccatcgtttcttcttgaacgtgatgttccagtggtatggagtctttgagatccattggttcttttccagggcagtgagtagtttctttaggttgatttccatcatttttattgttatcgaccatcaaaatatggatagaattctgtttgtaaggagcgatttttctgagttttatcactaaggctctcaatgaaagcaccaaactgttaacgcagattttcgttaaccaacatttaaatagccttttagcaataaatattctacaaaaattaataaataataaaaaattaataactagatatttttacatggttttgcagttaaaatctgcatactccacgagttctttttattagggtttctttattaatacaaaatacaacatttgaataataataatttctctccaaaattttacatccctttttctgtggaatctgcccctatttataggagtataggttgacagttattcttttgggatcagctcaaatgtatcttttcatgtaacgtggacaatccccacatttcagttaatcacatgtgggataatatctaataactacccaactgttctttatttttatcctttagatggttattggtgacttggaaggttgtatctcgcttgacatgagttctcctccttctccatctcaataagaaaaaaatgctaagtgttggtaagtcgttcatctcgccgcattccttcatttgattcagtattgcgaggtgattgtctcgctatgtgttactcgagtcggttgtatttgtttatttagtctgcttgaatagatgaatctccttttttttgcccatgtatttcgaggtagatgtatgtctcgtcaatatcagttcaataattattatccttatctcgcttgagacttatacaaccaacaagttttgaatattgtctatcattcctttatttaataattacgagttattttaatttacatttaatgatataactttactatatcattgaagttgattcatattcctcttgtagcacacgtgtcagcttctgaaatgtagccgaattttgggtataacaggaaattttggctgaaaatgcttatactttcaaagtttacatttatttcaaccttaagaaggaattcaaggtatttttccgtttagggaattcgtttgaaaacacatattgttttaggtttgaatgtaagttacaaaaactgtgcatattcataagcaatattaattacccaacatatt

SEQ ID NO: 41028 - DNA, 1617 bp, Cannabis sativa
tttaaataagatggactaaaataaaggcaattgggctgagattaaactctagggccaaatttcacttattgggctttagagttagatttttttccactttatttcaactaacgaaacaactaataaagtgtcttttctaattttttttagtatttttcttgtctaattttttaaataccaattttattttgataataataataaataattaccaaataaaatacaatttaaatatatttattaattagacctacaaagagtactaattaacaaataaacccctattttcttttcttctctaaattgtccaacttggtaaaaattctcaaataagatatagtctattttagaattataattaatttattaaatcaattagttgagtctataagatgatattatcccataaaatgtaaggaccatgggcctatgtaaccaagctcctaataagtagattcgaaatttatcgagtaaatttcctatcttattaattcctcctgattctactatagatttagaatcgcactcctgattatatagaacactctacataccaaatatagatatgctatgaattatccattgtctcaatcacaaaaatcattgatcctctatagacggtttacattgagtaaggacaaaattaccattctactcttcaatgtattttatccttaaaaaacttagctacttgtaaataatttttcaagaaactaatataattaccaaaatgagtgtttatcatttattgcatttagtgagttctaaggaactatcgttgcacttctaaatagttatagaagctatagatgtccatatctatgattaacactcccactcaattgcactaccgagttcccaagatgtaagtattgagatggttctacagtaagcttgtaacggacaagtcaaagaactcgtacaatacatttaagttagagcttaaccatctcaaggttgagatcaaatgatctatgatcaactaagtgctattgacttagaaaagatataatgatgttaatatcggtccagtccgatgtatagccaatacatctgatactagtttcctttactaatgccctggaaaagacatactacttatccaactgtaagcgaaccctctcagttattatcatatcagtgtaaatctagtgcactgataaatcgtgtgactaaataatttgaagtatataatcacaattactttccactgtgatgacatcactgtaattgtgaataaatatatgtttgggatttaatagaacttatatattaaatatataatcatgcaataaacatgtgaacaaagcttatgactaggtcatgatatgatttttgatctttattgaaattaaataagattacaatgaaattgggttttatttagggcataaaatctcaacaaattcctacttgcactaatataaaactaaaagtgcactttaatttaatctcatatacttgatgatctaatcaaatttagtatttggcataaattatataataagatctgataggttgtattcagtatcaacctcatccaccatcacattttctttagtaataaaatctatgattttgcgtattcctcacctatatgttttactcctcttaggg

SEQ ID NO: 41029 - DNA, 2715 bp, Cannabis sativa
gctggtaaaatggaatttacttctaatgtgttggcaaaaggggttggcaaatcaatgttggtattaaaacttttgctagcacaaaataaaaaatactgaaaaaaatgactttttccagcgcatttatgcgctggtaaaagctagattttagccactacaaatgttctctggtaaaactttgaccattttgccatctcaatttgtgaaatacgctgggaaaagttttaccagcgcagtagcgaaccgtgctagtaaaagtgacatttcttttagtgcatccgtttgatcattcatcattacgaacgaacggtttctattgcttgggtataaagtttgaaccttccccttattctgccattaccgttttacagagtttcgaattcaaatttcaaccattttttctatttaaaattgcatgccctcactatccctcacatacttctttcgagtttctaccaatcttttccctcaatcccagaatcaccaaggttcaaaccctcagcatcagggagtattcaacaaggaattctttgagaccatatttctaagtgaatttccaccttgttcttttgatttgtctattattattgctttccttgtatttttttgcatcaattattaatttttatggatttatatgggtttttagtaacttaaggctataaattttaaggttatacgattcacaagttttggattttcgtgctctacatttctagaataattcttgtgacacattttgttgtgatcaatacattgctccattatcatcaagattatgcacacccagaccttgtagaatccgattatctgcaattctaagccattgtttttaaacttcaaacccatgaaccccaatctatacttgagattaatgaagaaaaaattaggaggcataccattaagaccaatcaagaagatacatccactcattataggctattcttagatgaagttattaagtgtaaatgttgttacctacgagaggcaacttgcactgagttgcccagtttagtaaaaacctccttagcaagaccattatttttatcccaagtcactgttgtttttctcccaagcatttaagattattgctcctaaagcttaaaagtctaagatgcctcagaatcccagtgttacgtttgaggcaaagctaatcgagtctaagttcggattgatcgccccctacgtaggtcaatttttaaggtcttgtggcatgaaaaatgaaaaaggatgtcatatacactctgtcgtacctggcgagtttagttgcttcttccaaacttgcctcttgaatgatgaaggctttagtaccagcaaatcttcaaggatgggtgcttggagtgtcgaacatgttagagaaagtgttgtccttccccttaccaaatactttaaggatttttgtaactaccttaggattgtgctctttcaaatcgtccccaactcttacagaatcctcgcatgcctaaagtcattttaccacatcttgggattagaatgcctagccccttttgagatcttgtgcttctactctattaaagcatgtcctacgagaaaaaattgttcatgaggcttctactacttggggacccattctaatgaatatagaatcattattataggcttcctaataaaaaggagttcaaagatgattttttctggacgacggggcttcacctagttgacaccacatgattcagaattttacgtaagagttcatccttcctaaaatatgcgttttgagttttaaaattttgatgattgaatacttttactaattctctgttcttctatcttctatttttggctgctacaaatagaccaattccaacaccagtggttcaaaggaggaacgacatcctggtgaatcttccttatggaccacggttgatttcttgctacatgatgacaacttgaaatcttatggccttcttgcaaaataccaatgcaccatggactataagagcccctagtatcctacttagcagcagattccattgccttaggaagaagaggaccacgactatgttgactgtacccattacataaaaaatgtaaccactagggaagttgctgaggatgaagaaggggcaccctgaggtaaaacttcttgcttttatggatggtctcctattgtccttaggactgagccaaaaaccttagtgaaatttaaagatagtgaatacaattcttacatctagaactgtgtcgacttaataactcatatgttcgatagttggtacccaaaatttcatgtctagttgagtagtaataattcttattatagaatttctaactaatatggcacaaatactcatagggctactaatcgagattgggatatgtctccacttaattcatttgatctcttcatgatcacaaactctagggagtttagtaaatataatagcaatccttcatccctagcactttcggcaattacttaagtgggagttttgatcttggcactctatatttatccttttttttagaggtcttaacctcctttgttttatttttgcagatatagataactatgaagatctcatctgtagccctggtgtcttggtcaagcaaggtgaaaagagaagtgcctctaaggtagtgacttttgagatgcaacttgaggttccaaagaagaagaagggaaataataaaatgaagattgcttcctatggcatcattattgaacaagataatgttgccccaactgactcc

SEQ ID NO: 41030 - DNA, 1719 bp, Cannabis sativa
gtgttctatgttatatacaaatagatcttgggttaattgttaatttatttaacatttgttcctcgattggataacgaaatagatagaacttcaactcattttatctaagagtgtcaaatgaaaaaataaaagtatattggcttgttaaaagaatttcaaaacagaagttgccatgtgtatttataaaacatgatctaaaatattatacacaagatatatattattaaaacatacgtgaacaaataacatgaatcaacttagctagttcaaaagaatttcaaaatagtaactatcgtgcctataaatctacacaacaattttataatcatataatgcaatagaaaaaggatagtccacaagagtttctccacaaaaaagttcaaaaaagtccaaatcatctctaagttaatcataaaggacaaaataataaaaacaatgacacgcacaaaaatatacatatagacacgtattgatgtatgcattccattttacagaccaaaactagaaattagtgcagagaaagagaacataaaaggcttaatgtatcacatatagaaactgacaatgcaacatagccaaagtgtaaacttagtatatacctttgtcaatttaaagaaagtctattggatctccagctttctatctaatacatagtgaatttaaaatgtaattccctcttaaaaaatcgcttttgttgacactatgttgggcggaggttaacattttattcacaaacatagctgcaaatgaatagaaaaaggtaatatggtggagccgagggaaaaaattaccgtacaaatgggattgatttcacatgaaagaaacagaaacatttttattggaccaaaatcagaaaattagaacgaaaccacctataattcattattaacacatattcatattataaaactctaaacaaaacatagaataatttgataaaactcaaacaaccagaaaaaaagttttcatcgtaaacacaatacaatacaagtacctgttgtgagtgtaattgtttatccgaccaatgattgaaacagaattccaactctccgacctctgatcagtagtgaacgaacgagcttgataatatttctagggtaccgactgatgagacttcggttttgtaactggctttgggcctcaccttggcttctcatattggcctaacacaaacaaaataataataataaaaaaaaagaggtttttacaaaaatacgtgatttttgagtaaaaatttacaattttattatcacacggaataaaataacctaaaataacggtaaaacaacaaaataaaataattaaaaataatagtagaacaagtaaaaaataaccgtagaacaacagtaaaaacttaacacagtaaatagtatttttgaaaagaaaaaaaaacacagtattttaaaaaaaaaaatccacctcacagtaaaaaaagttagaaatttcaacatatggtgtaaaaatcctatatttttaaatatttgtatatattttacattatattatttgagaactcgctaatttacgtgagtaggtttatttttttgttgttgttcaaatgacctttgaatacttcataatttagtgttctgaagtcattcgactttgttgtatgatattcttagctaatatttattatttatattgttatgtatactaggagtatataattttgttagcataatatatatatatatatatatataaatataagtatat

SEQ ID NO: 41031 - DNA, 1704 bp, Cannabis sativa
cttatttataactggcccaaatcgggacttgattttttttattacaaattagaggttattcttgaatagagtattcttaaatagatgttctactgtattaggatcaattatagaactttaacaagattttttttgaaaaaaaaatatatatataatatttaattgatttaataaatattttattttactaaattattttatgattttaaattcttattaatagccatgatatatttttactaattatttcataaattgggctattttgagttattaatgtaaatgatataaaatgagaaattttttaagtaaaatatatttatttggtagaatatttagtgtgaataattgctgtaactattggagatcatcttaatacaattacattttcaacaatagtattattttggtgtatttttttttttcatcagcaatataatttggtatagaatctattacttttagtgactactctaataatcattcacactaaataaatatattttacttaaaatatatcatattttatactatttacatcaataactaatttataatataactagacaatgtaagtgcgtctcgcacggttgttactataattaattaaaaaataaaataatttaactttttatatatatttttaaggtgacaaattcatacttcaataattttttttttgtttttttaattagaaaagtaaaatatttttaaaaaaatatgttttgtaaaattattttaattttttaatttttaaaatgagaatcaaaagtttcactcaaagagtcattttcaaaatttatttaagcacttttttttaaaaaaaaaaaaaaattatagtctatttgtattctccttcatctatattttagagagaagtgctaaggacactctctatcaaactctcttttacactctttatccaatttaatgacaaatgttatcatttaaacaatgtttacttttacttaataacaagtgataatattatacttttattacaataatgtcattctaactaatttactcaaataacttctatttattgaagagaaaaaaatatttaaaaaaagccataataaaaaaaaaaattaagttttataatgttacatgtatttaaaaaatgagaaattttatttacacctcaaaacttctaaagacagacacctcattttaataatttttatgttatataaaatttatattttttaatgaaacttattttttttttttaacttttttcttctagttcatattcttaaaaaatattcctatcaaataaaaataaattgtattttaaatattacgaccaaaaaaattaaaataaaaaattatataaaattttattagcaaaaaaaaaaaattatacatggtttaaaaaaattatgaaaataaatattaaaaataacacaaaataatgtaagaaaaaaaataaaaataaaaattaaaaattattttaaacttcattttcttaaatattggggtgtacttattattttgtaaggtgtaaatagaactccgcttgaaaattttagttataatattataattaatcaaactttaaagaatataactttactagacgtacgtctttcacaaaatattagaaaataaattattcgtcttaaaaaaccaattaatcataaaaaattaatgcatatataatgtatttttttttttgttttccttcctcttcattttttt

SEQ ID NO: 41032 - DNA, 947 bp, Cannabis sativa
atgggaattaaacttttgaacatataatcattattatattacattgtgttgacgacactataatcatgaacaaatatatatttatatatgttctgaccttaatagatttgatacattaaatatagtcatgaaataaatcatgtgaaccatgcagcataaaatgattttcgatcttttattaattagtaaatttgattataatgaaacaaatgttatttacagcacaaaacttgatagctacttacttccaagattttgaaactcaaatatttaattaacatgaatcaattagttattcaagaatcctaaactttttagttagctataaggcttgaatttctcttttaaattaacctaagttaattacaaagtctaaacttcttttgtgaattaacttgagttaattatgaagcctggatttcttttgtgaattaacttgagttaattaagatttttactaagttaattttatgtataataaagcactagcttactttcggtgcgctaaagttcaagtttcaggggatacaacctactcttacacgtgttgttaacttagttatttttttatagaaagaatataacgtgataatcatataacgtatgctacaccccaagtattaagagtttagactcttgatcttgatcacctgttaaaagaaagaattatttttttaaaaaaaatacttaatatgaattgaaaatcccttcttgttttattcaaatggttcctcccctgaggcatacatgggaattacatatagaaattaaaatcaaactaaagaaaagaagactggccacccctagtctactgatagtaccggcgtaagtggcaagcattccatgctcttgggctttgtgatccatctagccttttcaagtgataggttctatcactaattttgtcttgaatctcatatggaccttcgtactttggtcctaagacc

SEQ ID NO: 41033 - DNA, 1341 bp, Cannabis sativa
  modified_base (34)..(52): a, c, t, g, unknown or other
  modified_base (1097)..(1100): a, c, t, g, unknown or other
tatttctggtctttattaataagtaaatctgatnnnnnnnnnnnnnnnnnnntttagggcacaaaacccagcagtgaggtcctcctgagatcatatccactctctcgttgggtcttggcggtaggccaggaatatgttgggcatctctggggggagcaactgaggccaaagctccggctacaccccctggtgctccttgaggcaaagctcctactgcctggaccggattgaggtgacgcatccggttcttgatccattcgtagagatgtcccaatcggatcaagttttcaatctcgtctttgagatttttgcattcattggtactgtgcccaatgtcgttgtggtactcacatcttttattaggatccctccgggagctgttcttgtacagaggaggtggtctctagtagtgcgtattttgcctggtagcaaaatacacacgctcttgtgagtccgttagctccgtgtactgggtgtagtagggagtgtacccccttttctgccgcttgtcctccgtccagttgctaccttttgaagacattttcctccgagagccttgaggaggaccggctaagcttgtggccggagcggagtgcgacggggttgtccattaatccctgagggatttccaaagtgagaagatgcaggggccaaggcttgactatattcgggagtagcacagaattgtatgctgctcatcgggggagcggctgttggtaggggtctcgggagctgagctccgggtatatatctcgctatcccggtaggatagtatctcccataggccactatttgggcttcttataggttgatgtatttctggactctcttctggaagtcttgaaggttggaggctccttcttgttgtaactcgttccagaatggagtccctgtacggatgcccgcttgaagaagagcgagctgttgttcgtcatcgactttcttggtttttgaggcttcttccttgaacctctttataaagttcttcaatgtctctgtaggcagctgtttgatgttagtcaaggcgctaacctcgagattgacctttcttgcggcgacaaactgcctccggaagctgggttgcaacttattccagnnnnccacggatcctggttccagcttctcgaaccactctttcgcggacctacttagagtaagcgggaagcacaaacatttggcgtcgttgctgactctcatgactgtcatgactcggttgaacagtgacaggtgatttcttgcgtccgagttcctggtataagctgccatttcgggcatcttaaaatttttggggagatctgcttccaggatgtgcttgacacatggctctcggtcttcacagtc

SEQ ID NO: 41034 - DNA, 1754 bp, Cannabis sativa
actttgctcgggtgattgttgttcaagaagatccgtaatttgttcattgctttgttaaacttgctggccagattaatcctatgagtattacgtttgtgtatggcctcaatactggtgaggagaggaaggggatgtgggtcaacttgctgactgtaactctgccggccaaaccttggctcataacaggggatttcaatgctccttttgatttggaagataggaagggggtaatgatgtaacaatcaatgaaactgtggatgctacaaactggcttgtccaaattcataacgaaagactcctaaagactagatcggacttctcttggactaacaatcaagatggagacaagaggatctattctaaaataaatcattcatttgtgaatgaagattggaatgatagatttcctttgacaaaagctcactacagctgggagactattttagaccactgtgcttgtgtgatttcaatggctattgatgagaagattgtaggtaaaccgttcagatactacaatttctgggctgaccatccagagttcaaacaagctgttcttgaaagttggcaaaaacctgtgagggtcgtggggatgaaagctctatctcacaaacttttgaggttgaaacatgtcatgaagaagttaaatagagaagttataagggatatagggagaaggtattatgaatctaaagccctttttttgatagcaagaatgcaagctcaagctcatgctcaagatctgaattttcagcaagaagagaaagaggcacccacaaactttatcaaccatgaaaaattataccatagtttcttgagacaaagaagcaaggtgacttggcttagcaaaggagttgagaataatgcttactttcatgctagtttgaaaaaaaggaggatggagaatagcattatatcctttactaatgaacaaggggtggtcatagacaatttctatgaggtggtcgatcactatattggtcacttccagctatacatgggaaccgaatccagacctacagctagtctcaaaacaggttgtatggagatggggaattgtttaaatcttgagcaacagctgagcctaatcagaccgtttacaaagaaggaaattagaaaagcttttttcactatttcggatgtaaaatcaccagggccagattgttatggagctggttttttcaagaaaatgtggccggagctaggttctgacttcactcatgcggtggagattttcttcactacaggatccatgccccaagagtttcatgccacaatgctcaccctaatcctgaagactgaaaatccaacaaaggcagtggattacaggcctatagcttgctgcactaccatttataaatgtgtttcaaagctgatttgtatgagacttccacaggttcttcctctgattgtcaaccaaaaccaaggtgcttttgtacaagggagatcaatcgcgcataatgttataattcttcaagacattttgaagaactacaaaaggaagaacatctccccacggtgtactcttaaggtggatataagtaaagcttacgatacggtaagctgggaattcttagaagctcttttgaatacgtacaaaatgccatccaggtttataaaatggatcatgtcttgtatgagagctaccacctatttcaaatccatggatgaatggaagagttcaagggagtttcaaaggcaagaagggtttaaggcaaggtgatccactttcccctcttctgtttgtgttgattatg

SEQ ID NO: 41035 - DNA, 1639 bp, Cannabis sativa
atgtggcgagtaggtggtgacgattttttaatgggcccttatacccgttggtttaaaaccgtcgggtatagtataggcgatgttgtaaaaccgttgcttatactatacccgacggttttaaaccgtcgggtataatcctccccttttttacgtttttaatgaaaaacgtcgtctacttttttaggcactattataaaccgtcaagaataccaattttcccgacggttttaaacggttgcttaatttttttagcaatggtccctaaaaaaatcgtttttgggaccgtcacgaattcttccttttgtaatagtggctcactggccctattgtggattaggttgtggtcatggttggggggctatcgttagcgctcttgaagaaggtttcaaatagaggattgatgtcgtttgttttcaattttggggggttcttcttggtgttcgggatcggcttcagctagatcttatgtgggattaggtttgtagaaagggtcccgatctgggtgaaggggcttcttcgggtctgctccttttcgtctagtcgtcgtggtagatttttgtcctttcgggtaggcgttctcacttcctatggggtggtccaattcagatggtctcatcagatgggtgtcaatggttcgtgggggttgggattcacattggatatctaagtggggatcgtcgtcttttgtcgaatacgcctgtggtggtgattctgttagattttatttaagcttacattaatttttattggttttattaaaatttgagctgattggatagttctttgctgtattagaccatattgttggtgattaataattaatggacttagcatctatgtgtgcaaaatgtaggtgtagcagaagtgtgaagattttttaattaactaaagcctttgttaagctatgctcagtccaactaggattatatagttaagtctactccctataaatacatattttctcatcacaattgtatacttttaataatcaggtagaaattaaaattatttctgatttagagatctcaggaggaagctaatcctcatgcctttgccccaaatcttctgagtaaaggagtcagtagcctccctagaacgactgtttattttttcttattggctcgcatagattgagtctgatagtccatccactcttggaattcacgtcgttgctgtttgaatgcaaagttcacaatgacacgagtttcctccaagttatggtgaagtgtgttggtttgcattaggacttgtccttgcatatccctcaggttctccaaaatagagttatcccccaaatcgactcggggctctcctttagagggctgaccaatgccaggtctagtctctccaagatatgtccaactggtagtctctttctcctgaacattgagcatgactccagtgaaatgggttattgtcctagtaattcaggggttagtatttgcagggactacaggttggttgccttgaggaggcagccgagggttgggattatctaaccttgagttaataggtgcctggacgttgcagttgttggaattatattttaccaagaacttagatctactcacaagtatgttgatttaacaacctaaaattgaacttctaaaacgatgaactaaacacataaaagttaaga

SEQ ID NO: 41036 - DNA, 1342 bp, Cannabis sativa
tcgcaatatattgaaaaatggcaaggacttatcagttgacttcgaaatgaatctgttaagtgcattcattcttcctgttaaagcttggacttccttaggcttggttggtgatggcatatctatcaaagccattattttctcagggtttgctttaatgcccctcacgttgactatgaatcccaaaaactttcttgaggaaactccaaaggaaaactttttcgggttatgtttcatattttacttctttaatattttgaagcactctgcaaggtctgtggtatgacttacactttgtactgattttactagcatatcatcgacataaacctccatgtttcgtccaatctgatttgcgaacatctcattcactaatcgttgttatgttgccccagcattcttcaaactaaacggcatgaccttgtaacagtaaagtcccatgttggttacaaagctcgtatgttcctgatctgggacgcacatttttatctagttatatccagagtatgcatccatgaaggagataagctcgtgcccggcagtggcatccaccaagtggtcgatcctgggtagtggaaaacaatcctttggacacgccttattcagataggagaactcaatacaagtctccaagctgcattgggttttgggacgagaataggattcgttatccatgagggataaaacacctcacgtatatagttgttaaccaacaacttgtccacttcctgtttgagtgcccattgtctctcggaatccaagggtctcctcttctgtctctttgctgggtggtttggatcaacattgtaatgatggcaaataacattagggtcaatccctatcatatctccatggtttcaggtgaactggtcttggttcgtccttaaaaacttattagctgctatttcaaatgttcatctacgttcttcccaatgtaaacacactttgtgggacttcctggatctagaacaacttcttctaattcttcaattgatttcaataagtttctatcatcatgaatcaagggatcaagatcttcatccttcttctcgctttcttctatcaaaactgccattagctggtgaccgacatttatgtactgtagctctatgcgatagcaatcgcgagccaaaaactgatcacctcgcactacacccacacccactagtgtttgaaacttcaagaataagtgcttgatcgaactaactgcacctagtctgattaatgcttgacgacccaatgttatgaaatttatagacaatatgcaagtgcacgtaatcaagtattaaactcacgcaagtgaggtcgaaccacatggaattggattaattaccactaaattata

SEQ ID NO: 41037 - DNA, 1232 bp, Cannabis sativa
ttgtaaaccccgattcctactatcgcttcgatcacataaggaccctcccagtttggggtgaatactcttgcagatgcgtctctcgtatttgcaaatactcgccttaggaccaagtttccaacgttaaagagcctcttcttaactttcttgttgaagtatcttgtcactcgatgttgctatgctgcattagtaatctgcgactgagtacgtgtttcatcaagtagatccaaggacaattttaaaagttcttagttttcttcttgattataaaactctcatatgtgagttgagatatttacttctattgacagcattgccttcaagccaaatgctagcgagaatggagtatgtcccattgctgccttcacagtcgtcctatgggcccaaagtacttgaggtagttcatcgacccatctacccttggtagcgtctagttgattcttgatagtatccttcaaggttttgttaacagcttcctcttgtccattcgcgtgatgcctggatactgatgagaagcttttaattatcttgttcctttcatacaactcagtgaataattcaccatcaaactgagtcccgttgtcttacactatcttaatgggtactccaaacctttaaatgatgtttttgagaacaaagtgaaaaacttttttgcaggttatgtaaaccagaggttcagcctccgtccattttgtaaggaaatcgatagccacaactacgtacttggctcctcctcgcccttgggaagtgccccaatcaagtcaatcccccatattacaaatgggtaaggtgaggtcatcattctcagttccgttggtggtacgcgaggtatatgcaaaaatctctgacacttatcacactttttgagaaatttatgggtgtcctcatttagggttggccagtattatccttgtcgaataatcttttttgatagactttgccaacctgcatgatccccacaaaagccttcatggatttccttgatgatctcgtttgctttcgcggtaagaatacacagtaagagaggcattgaatagcccattctatacaattttccttctactatcgtgtagcgaggctttgaatacaagactttttgtgcctcgttttttgtcagttgggagtttttcattgagaagatagttaactataggcatcattcacatgggcgagctatctatcatctcgacatcttccttttcacatatacttggttcatttagcatttccac

SEQ ID NO: 41038 - DNA, 2646 bp, Cannabis sativa
  modified_base (841)..(844): a, c, t, g, unknown or other
  modified_base (980)..(985): a, c, t, g, unknown or other
  modified_base (1093)..(1097): a, c, t, g, unknown or other
  modified_base (2592)..(2601): a, c, t, g, unknown or other
ttaataggagtcctaatagagtcatagacttgaagacaccttatgagatgttgtatgggaagataccaaacatgaaacacttgagagtgtttggatgtgcaggttgtacattaatctaatgataagctagatgctagatctgtcataggcacatttctaggatatcctataggcaaaaaggttatagaatctgcataaaccaaaatggaaaacctaattaaggtggttatttctaaaaatgttgtgtttaatgaaaatgattttcctcacttgaaagccgagaaaggcagtgtgttacctgatgcagattcatttggcaaatgggaagatttggcagagtttgaaattgagcttaaaggatttgaaccaagtgagaagaatgacaacacatgcacaacttcatataagaataaggaacaaccagatttatctgactaccaacttgctaaagatagaaccagaagaaaaatccatataccaacaaggtttgcagaagttgatctgattgcctatgctttatcaatagatcattcatgtgatatactagaaccattgagtatagaagaggctttaaatgaaaagtacaagaaggaatggtcttgggctgtggatgatgaattaagctcgcttagaaagaacaagaaatgggtattggttccaagacttgaggataagaaggtgatctcatgcaaatggattttaaagattaaagaaggtgaggtagagaatgagcctgtaagatttaaggcaagattagttgccaaaggtttcactcaggtggaagggatagattacaccgaggtgttctcacctgtagtgaagtataagaccattagacttnnnntgtcaatggcaactcagcaaggtttaaaagtggagcagcttgatgttaaaactgtgtttctaaatggttatctagaagaaaaaatatacatggagtaaccacctagatttcaggtggaacaagatggaaaagagannnnnngtaagttggaaaagtccctatacggccttaagcaatcacctcgacaatggaacaacagattcgacaactatgttcaggagattggtttcacaaggtccaagtttgatnnnnntttgtatttcaagcacctagaagagtcagcagttgtgtatcttctactctatgtagatgatatgttaataatgggcaaagacaaagcagtaatcaaaggaattaaagataaactcaaggcagaatttgacatgaaagaattgggagaagtaaagaagatacttgatttagaagttcatagatccaagagtgatggagtcatggatctaaagcaaaagaactacattgagaagatcctaacaaagttcaagatgcaagattctaagagcactttagtacctcttggaggatagtttgtattaaccaaggaagaaatccctatgacagcagaagagaaagaagatatggaagaaattccatatgcaatggctttggggtgtctcatgtatgtcatggttagcacaagacctgacattgctcatgctttaagcataccaagtaggttcatgtcaaatcttgggataaaatattggaggacactcaaatggctactaagatatttgagagggaatctgatattggattgacttacaaaaaagtttcagagcaagtaacattgaaaggatatgttgatgctgattatgcatcaagcaaggatactagaaggtctgctacatcttatgtgtttcaaactaatagagattgtattagttagaaatcacagctccaatccgtagtagcactttcaactatagaggcagaattcatggagaccacagaggcattcaaagaagcaatatggctacaaggaattttaaaggagttaaagcttctagttagaaaggtaagggtatattctgatagtcaatcctcgattcatttgtgcaagaatccagtttatcacgagaagacaaaacacattgatattcagttattttggataagggagaagatagaagaagaagtaatcgagttggagaaagtgaagtcagaagagaacctgctgatattcccactaaggtgttacctattagcaagttcgagcattacttggacttactcaacctttgttgctaagtagctacacataaaagcattacaaactccattggacatatatgcttagcttgttggggcttgaagaaataaggtggaatttgtggtattattccttaaacccccaacaactattctgttagttagttaattagttagtctttacctaacttaactgtcaattatgacagcttgcatattgggtcccttgggctatataaagtggagtactcctctcatttcgtaagagaatcacaagggaagaagaacaagaataagggcaagaagtagagagacacaacacagtagagaaagaagttagagtgataaatggagagagagatatctgagaaagagagaaagctaggattgggaaattttattgaacaacattgttgattatgttggctcgggttagtgagttaatgagtgttgagagattacaccatggataaattgtcgtgattttttccttgtagctcctgagattgatatcactnnnnnnnnnnatcaataaagattggtggcaatgctttcaaactagagtatgacca

SEQ ID NO: 41039 - DNA, 2332 bp, Cannabis sativa
  modified_base (1132)..(1135): a, c, t, g, unknown or other
ttttaagaaataatttcttttaattattatttccacatcgagataactagactaacgtaatagaaaataataatcaaatattttggttattagattatctattaacggtaaaaaaaaacatatgcttctcatatattaaaataatcaaattaaaaatataagttgataaatcaactagttagtgcattattttttttaataacatctaataaattttaaatgtaattttttttataaataaatacaataaaaaataattttagtattatttaattctttaacaatttataaaagaaactgttaattataatttcaaacatctcatttggtaatatttggtaatagtgtataaagtgtggttctcacatgtttaaataattcacttgaagaatatgtcacactaatattattttttttaattaaaataataccgtagttgttattttttattaagatcgtagaaaaaaatattaaaaaattaataataaaaacaaatgttagtggtcactcatacagaaaaaataataaaaaaaaaaaagaaaaaaaactaaaagatgggctgtgacaaagaaaaaattggatactttgatatattgggcaacactaacaagaatgtataatttaatttagcagcggtatatatgttaataattataatgttaagtatataattaaaaaattccctaatttatatttataacatatacaaagggtcggccctgagcataggcgggctaggcctgtgcctagggcccacctagctcaggggcccaaaaaaaaatttatccccttttaaaattacatattttttttatcaattttgaaaaataccatatttttttctaaatgagggtccaaaaatattttcttttactcactaaatttcagggccggccttgcatatacatataaaaatttataagtaattcattgtattgacctcgcttttagttaacgacgttgagtcaattaaaacgattagaataataaataataattatatgaaattagggatgaatctcactaaaagaagaattatgtataatcaagaagatcgaatatccttataataaagctcactattttaaagtatgtattttcatttagtatttattttaatctatttattttnnnntatatttatttaattaaaattattaatttagattactcctaataaaaattttaatttaatatttataaaattatacttaatagatctaaaaataaataaattattccccatcatagtattaattctcaataaatattatgaaagttatttaatttaagttggtccaaaataaattaaaattaattttcaacttaaatttaattttctaataaatatatgtaactaaattcgaaatccaatgtatttaaaaaaaaatacatttttgaaatttatataaaataaaataaattttgcaaaattattctaatttttgttggtctaaaattaactaataaattaattttcaacataaactgaatttttctatttaattaaatttcttaagaaaaatatacaatatttaagtatcttgaataaatcaaattaaatattatttttttatttaattaaatatatctagaaaataccacaagtctatacagaaagtaaccatctagatattttattaactaattatttatattctaattaaaatataatatattttaatttatttattttaataaatcattaatgaaaaatttactagatttaagttggtctaaaattaattaaaattataaatttttaactttaatctacttttaaaattttcaaaatatctgcatttaattaatgcatttcaaaatttatttacttaagatgattaataaaataaaataaaatttaaaaattattctaatttaagttgttctagaattaaaatttccaactttaatataattttccatcaaattaaatttcctgaaacatatttaatatttgagtgtcttgaataaaatcaacataaatattaattttcaatttaattaaatgtattaaaaaaaataaaacaaataaagtatcttgaattaaattaaattaatgattaattctaatttaatatctaagaaaaatattctaatttaagctgatctaaaattgaataaaattaattttcaacttaaatatatttttcaaattaattaaatattaaaaaatataatttagttactagaaataactatcgagaatttatttcattaaactaagagtttttctaaattaattttaaataatctaatgaaaaattaattttatttattttaaaaattaattatgttgctaattaatttttaattaggttaagctaatata

SEQ ID NO: 41040 - DNA, 1415 bp, Cannabis sativa
cataatctaaaataatatttacttcatccaccaatttttttttttttttgaaccactaatttttagttagtttctcttaataataataattatttaaatggttaatttttcctaattatttcatttatatacatggcagattctatgttggcaataatatcattttagacaaaataacaaatttaagccgcctgaattaattaaaaatattcataaaataaataaaaaaattaatatatatctttagaaaaactatcatcctagcttgtaaccaataaaaaaaaactaaaaattacataacttcgtactcaaatcaacaccacccctatataatcaaacaaataaaactaaataggtattgtttttatgtaaattgatataatttgtttgtatatataataaattataaaaattaatgaaaaaaaaaggttataactgtatttttgttaagttccaaataaacttatataagatctattttttttctctttttttctcattcatttctttctttctcccattcattctctttttgtcgatttgtgtatctatcaattacacaatgtcagtgtctttatggagtccaatctactggtacggaaactatcttcgtctatgtttcttcgctgcagggctcacttctcaaataactaacctcgacaatggcaaaacgaccattcacttttggggaccgaaattcattaacacgactaagccatcgttggttttgatacacggctttggtcctgtgcccacgtggcaatggcggaatcaagtcacatactttgcccctaaattcaacgtatacgtccctgaattgatattctttggtcagtcaacaactcagttagctgatcgttctgagcaatttcaagcagacactgttgctaaattaatggaaaagattggtgtgaagaagtatagtgtggtgggaacaagctacggagggtttgttgcgtacaatgtggcaaagaggtgggcagatagagttgataaagtggtaattgcaagctctgctacaaatatgagattgagagacagtatggagttgctaaaaagggcaaaagttgagaagattcaagatctttttctcccgacaactgttgcacgattaaggactctactcactctcacagtgtataatttttctaagtttgtgccatactcgttactagacgacatgctcagagtaatattcttttatattaagcatttaatacttattatttttaattaaaaattattaattgggtcatctattttcttaaaaaaataatttagaccttgtgttttttaaaatggtataaaataaaccttaagtttattttttgtcaaataaaaacttaataataacttaatctaaaagtattatgataaaaatgattatatttttttactaaatttatatatggtta

SEQ ID NO: 41041 - DNA, 1001 bp, Cannabis sativa
aaaaaaaaaaaaaaaaacaatgtgccatttgagtttgacaataacgacaaaaaaatatagcatatatttatttacatatgtagtacattattagcgctcaatgtaatatttattaattattttatatttaagtatataattaaaaaatttccttcaaagtaacgtaatagtttcttttatatttttttaataaaaaaaagtaaccaattaattaaacaaaattcaatatgtcaactaattttatattactaaaaattatttgtaattttatatataaaagttactgtatggtatatattctttataaacttattttatagaattatttcaataaatattatacaatgagtatatatatatattttaaaaaattacgcttattttactaagagaagctatttagtaattttttgtattttattgtattttattaaattttaaatatattaaaaagtaacgtgaaagttgctataaaaataacaaacaaaaaaataacataatgatcaacaatatataagttaatgaaaataaaattataatttttaaagttaaccaactagaataagtaacaaaaatatgtatatgaaatattatttcacaaactatttagtatttaatgtcttattttttttttcattaataatatctcataattttaaatattttttttttattaacaacatttaataaattaaaaaattgctttgaattttaaatatatttttccacttgttgaaatggttagattaaaaaacatattacaatggtattattcccaaaccattaaagtaattggaaaataaatgatacttggaaaaaaaaaaattgatgttaaaagaaaaaagaaaaagtacaccaaaaaaaaaccaagtcagcaatagtggcgctgacaacataataatatgaatataaataattaagtacataatttcggtagaactaacctatttttaacaattaaaattaatttcgctttttccataaatagttatcttataacg

SEQ ID NO: 41042 - DNA, 1538 bp, Cannabis sativa
gtcaataaataacaaatttatgaatttattttttctgctgcaaaaggaaaccattatgtcatcattttatcgcctccgtgaaaattgagttttgaaagagctacccaattttcgccaaatattacgtgccgttgtatttgaatgatatagacatgcacgtgaagaatggatttaataataaccgtccgatgtacaacgtgcggattggatttaacttcaacggcttacaaccaccattaacggcaaaattaacgaaccattttcgctttcgttgacaaaatataaaactaaaaaccgcaatttatgtatttttatgacctgaatggaggggtctttgtgtaatgacttcgtatttcaaaatatgaaattaatatttaagttaaaaataataggattgatgtataactgatttgagatataaccactactcccaatttcaaaaaattctatttattataagaaaatgcagagagaaaggaaaatagtattagaggttttagaaacctatatagctatatgaaaatatgaaaataggaaatagcaaacctcatgtccttcaaaaggtataattatatatagtattgaataatataccgaagatatagatatgtatatatatagtaattcaggagtacttgggcacattttcattattgtcatacaatatttattagaatttgaaataaaatgaatgagattttattttaaaattaattggcattaaaaatacacatagtctattcgttttataaattttattatctttctaaatattagggataagagactattgatctaacaatattagtaaaagattttatatatgggatatgaggcatgattccacacctatatttatattattatagatacgctatatatctcttactctcttttaaaaagaaattctatatgacgtacaatacatatcatataacttgcaagaaacaaaatcaattgcactcgcacgccattgccccttttagtattttacatatacacatatacgtgaaggaaattcttactatttctaataaaacaaaggaaactcttgtgatagatttggaaaactaaatcaaattccttcttactatatattataattagctaaaaaagcatatggaataattggaatattttagaaaaacaatggaatcctaaaaaaataaaaataaaaataaaaacaaacgcacacaccatatggaagaacacgacaaaataacaaattaaaaaaaaaatatatacgtggatcaagaattataaaatctattctatataaaatattgctatataacataatgaaattattggttgacttttttttaaaataaaaaaaattacaaattattaaaaattaattttagattttgatatttagaattaattaaattttaaattaaatttgattgttttaatagtttaaccagataagcattttcattaattctgaaaataaatttaggactaataataatttttttaaaattattatgacaaagtataatagtaatttttgtttttatttaaatcactattat

SEQ ID NO: 41043 - DNA, 2023 bp, Cannabis sativa
aggtgcggctgtagagaaaataaagaagagaaagtaagctttagaatcctagaaccctactttgttcttgagagaagaagaagaagagaaagaaaattttataaaccctgaccctatattttcttgtgctgccgtgagaaagaaagagaagagtgtttgaaaaagtttgaattttttgagggaaaaatagtggctgccgaattagtgtgctagggttaggaacttaccttttacattaggttattagggtttgtcttcttgttgggctgtctttgagtgagtgggtcgaacccattaatagcaaactttgaaaagggggccttgattggagagagaaagtgatttctcttggctgcctttaattgtgtgggccaaataaattgattagggaagagtcaactctctctttgaatgttgacttgatttgttgttggactccttggtattcggctcttcatattgggctgaaacattacatttgtgagattttgaataataccaattattttgtggatgcataaaatattaaattttgaaaaatatcacttttgcactattgtattatttgtttctttaaactgtgttggtcaaaataaaattccaacattttgcttactaagtatatatatatgtacaataaattaaatcatttacaaaacaaaccatagtgtgaaactcattttcattagatatgcctaatgacatacttggaacactttaaccttatatttattcattttacaaaagtcttagataattgcgcatctaatatcttttgtactttctttaatagtgttccatatgcaacatactaaatttaatctatatccttatcctttatttaaacaaggtagctaaagaagcatgctaatttttaatatttccttaaaatttatcatatttagcatgagaatcaaatttatgttggtagacataattgaaatatgaatttgaaagagaacaaaataaataaggttaacaaaggaattcatataacacaaaaagttcaaataatggcaaatctcatctcaagataccaaactcacattaatatcaagtctttggacagtaatataaactgtaagcggtactcttgttggagcaatcaaatattaaaaataagtcatgtcaaacaatttgtcaatgtttggactgtatatatcgtttacatggaaaccatacaattgtcacacatttatcaccacaggtatatgtgcactcaaaataagtataaccttcctttgggtcgatcaatacttatatgaaaaacacacacaaacctctaacattgctcatgagaaatctacgcaagacaggttgctttggcaacattttatttctaccaactcatttagaatgaaagaaaaatttaaaattttatttctagtatgccaaatttaaatttaaaattatccatatatatatatatatatatttaattgagatatttgcacaaagatacgtgcatttaaaaataattgcatgaatacactcttctatattaaaaccggtttttttgaataactgcacacacacataccgatgttgagctttcttagattgaagcagctcattttctttttaatgcaaatttcttctcccacattatcaactcatgtgttgtacttgctagctggcctactctcatttgtaaccaaataaatgaaaaaataaataaataacaaaaaattgatttacctttttttccttaaaataaataaataaaaagtttattcctcatttcttctttatttttttcttacttaacttttatcagtattttgaaattttaataaaaaaaaaatttaaacaggcacatcaattttttttattatgacttttaattaatttattactttaatatatgtgtaattaacttttaatactaaaagaattctctctcatttttttctttttatacgtgtaaataattttttttaccacactgataattatttagtctaaaaaattacactattataatatattttttaaattgattattttaatatgtaagaatcat

SEQ ID NO: 41044 - DNA, 1121 bp, Cannabis sativa
tacaacgagttgcaactaggctttgcttgttgaaagtcttcttcaaatgacaaataccaacttgagtctaaattgaggttgtaatctcagaaatttgaccccttcaaataaatcgcattgatcattttgacccacaacatgtcatattttttcattatattccaaatatatttagcaagtgaagccttatcccagttcaacccgtctttgaagccaatcccaccataagcttttagagacacaccttctcccaataagtaatgtaatatctgtcttacttttgttaccatttcggctgtctctacctccttcacaacactttggagtgtgtaaaaaaaaatataataagtgtctttggattttataattaaataaaatacttttgaagtatttggataaattcagatgtcttcaattggatatacaaatacacatttttaaagtgtatgtacacaatattttcattgagtggattttgaaaacatatctaaattaaaaataactaaattatcccaaacaccaagtgaaaaaatatacctttggtaaaaattgttagagttagttaggaattcggttagttagttactttctgttaagtcagttatatttggcatagtaatactgtacaagttctcaatatatatataatacataactctgctcaattcttaggcagagcttctctttcaatattctctgtttctctctcttgtttctgctcttatatggtatcatacctatggccgatcctgacgacccccgccaccctgctcctctacctcaaccagaagctccggtcgcacctcaggcaaccgcaccacaacttcacattccaaacaatcttcttcctctaaatattcgactggatcgccacaattactcctactggcgatctctgattcttccctccattcgtgctcatggactcaacggcatccttcttggcacaactccacgaccggagcctcttcttgcatgtacaaatacgattaaccctgcctttgatcattggattcgttgtgatgctctgttaatgagttggctcatgaattctctctctgaggctatgcttgggcacggtctttactatgaatccgctgccgatgtttggatggtctttg

SEQ ID NO: 41045 - DNA, 1313 bp, Cannabis sativa
  modified_base (1284)..(1284): a, c, t, g, unknown or other
gtaatacgcctaagttagttagggtgttacaagctggtataaggaacaagtgtgtaatgcctcacgaaaatcatccatttgttttccattccgcagtcctcccccggcttgttttgattagagagaatttcattaaaatcaccaattaccatccatggaagaaggggagaaacatctttaagtctttttagtagagtccatgttgtatgtcggttatgtacagcaggagccccataaaagctgaaagtgccacttaggaccattagaaacaaccatgtaaccatcaaatacatttgtattataatattgcaaagttacatctacatcatctttccaaagtaacataagaccaccactatatcctactctagggacttcaagtccattattgaaatgtaaaagatttctaatacgagaaatagaattattagctaatttagttttcataatgaaaagtacagtgggggtttgctctttgacaagcaaacaaagtttgcgaatggcgctcgggtttcccaatccacgagcattccaactaaggaacttcatgcgtgattgcgggactggaagccagcctccgcagagttatccagagcaccaacagaatccatagagtcagcagaaacttgatggtgaagttcatcttcaactgacaaggatgaagtagaaacaattggtgagtttgctatgcaccttttcaatgtttgccttagagaaatgccttcattttgccttttcgattgcacatccgggttaacattttcctgatgttttgaaaaaccagcagctgtagtggtaatggatgtggatgtagccatagaggatgattcaaatgtttgtttatggagttaacagtcactggtttggttgatggagggtaagtggcataataattgttagtgttagaaatagatgccatcggggtatatactgcagagagatcagtaaaattttttgagttatcattagtaagaattgttgcaggcgtgtgggatgaccttacaaattgagaaggaatgatagatgagtgatcgagttgtgatggtgcaaaagtaacagatggtggctgttggtgcaagtaagttatcccaaaagttaaatacacattttacattattcaaaaatataaattttttttcctaaaagtactctaagaacatctctaatggaagtgtaaataagtggtgaaaagttacttatttatcaagaagtgtgctccaatagtgtatcaaaaagtgatgtaaatttagcacatagcaaattttgtgcaaaatttggcacaanatttgttacgatgtaaaatttacaccaca

SEQ ID NO: 41046 - DNA, 1292 bp, Cannabis sativa
agtatgctcatgagcccttgaatcctgaagatgaggctgaggaagagcaggtgactccactcaaaaggaagaagaagcttccggcccagtccaggccttttgagcatgtaattagcattagggagcccatttcacctactcagccatctcctcccgtgctgggaagagggaaagccgtcctggcaaaggcgaaagacttgtcaggtgatggggactgtcgagtcttgttcggacaattgctttgcaggatatttcgtcttatttttaaactctttgactatcatgctttatgcttctgatgcctttttcctctaaccgtgttgtttttatttcgtgcagacatgtctcagaagatgtttgatgccctgaagaagagagttggaggaagctcaagctcgtctccaccgaccaagaaatctaaaagcggtgaggcgaccccttccaaggaaaaggcaccagttggagaggttatcgacctttctgaagagctgatttttgcggacccttccactccaaaagttgcgaagtccaaggattctcgaggaggaagctcggacaggcctaagcaatcaaagggcgaatccgagctagccaagagtggacctgagcaggtgcgggctcctactccacctttgtcgatgcttccagaggccaagaaaggtagagagatgcttgctcattacatgaaccggttggttcttaaggtaagtgagcagctgaaaagatgaatgcatgtttgatttttaatttaaagtctcaaatactctagaacttgtttgataatcatttgaggcgaaattaagaaattacacataattttaagatatgatacatgcaattttttttcggatcgattgaacttttcaagtctaccctatttgttaaatccctagttttacccaatttgatgagcctaaatattaacatcttattttttctttttaaccctatacaataatcttttgagcctaaaacaaatccttattcatcctttttcacactatagtatattgatgttttatgtatttgagtgaaagttttgttgatgagaaaatattcatggttatgtataagtgatgataagaaaaaatatatattattcccttattagaatgaatgtatgcaagttgtaagtatttcaaaaaaaaaaaatcaataaaaaataaatataaataaataaatacttgcaatacaatttaagtgtaggagaatagtaagttttatggaaaaaaaaaagatacaagattgaattgttgaggagagtgattggggaatacaaataggaattattt

SEQ ID NO: 41047 - DNA, 1175 bp, Cannabis sativa
attattttttttttgtggtaattgctattattaaagttatacgatgatatatatttcatgttattaaactcagttactaagctagtcgtattataatttttttttaccatgttatactcccttcttgattaaaatatagcaattaagttttgtaatgttgaaagttacaattgtataatgcatgaaagttacaattatttattggagtgcagttacatagattatttatcaatataaattatttgttttgtaactgaataaaaataaaaatgcaccattaattgaacctattaattgaatcgtttttcaatatattattaaatttaaaaagcaaaaattaagaacaaaagtaattaaaaatcaagaaatggagaaaaatgataatgtaaaaagaaaaaatgttaaagcgccacatcatcttacttaacaacaggattatataaatatatagatagatattgaataattattatttttactttttaaattttagactttaccttatattgccgcttaaaagatacgattttaaaagtactaattgattaagtatagattttgatgaattaagtttagaaaaataaattaatgaacactaaatttacaagatgggatgtggaagtcatctctgatttgttcaataatagagacaaggaattcatttatagaatacctatatctaccactaatgtgacggataagtggtattggagcaaagaggtttcggggacctattctgtcaagtcggcttataagttaattcaagatttgaaatttcctactggctcccctattagtactgacttttggaaagctttatgggctttgaaatgccctccaacagtaaaagacatgttgtggagatttgtgtcaaactgtttgcccacctgtggatcacttgttcaaaggcatgttcgaatctcttcttcttgtcccatatgtaatagaggtgttgaaacggttacccattttctggtttcttgttcgtttacagcggcttgttggcgttcagctggtttatatggaggcaacccaggggacatatcatttggagaatggctgcaagaccgatttaacaattgggaattaagggagagacatatggggggcaatgctttgctgggctatttggcaagatagaaacaacaaggtgtgtgatgtcgcccaattagtta

SEQ ID NO: 41048 - DNA, 1210 bp, Cannabis sativa
ctatgaagctgattgaagaccagaagaagaagttggaaatcgaactcaaggcacacagtgccattcttctcaatcttggggatgagatacttagggaagtgtctggtgaggagaaggcactaggattgtggaacaaactttcttcaatttacatgaagaaattattggccaccaaattgtacctgaagaagagattgtatactcttaaaatggatgaaactagagagttgcggaagcatcttaatgatttcaacaagattatcttggatcttaataatcttggtgtcaaaatagatgatgaagatcaggccataattcttcttagttatcttcccaaaatgtatgaacattttgttgatatcatcttgtatggtaaaaacactctcaccatgactgaagtgaaggcagtactcaattcaaaagaaaggtgatgacggtggagatagcaatggcgagggactgttgattatcaaaggaaaatttcccaagaatcacaagggaaatcagagccatcacaagccaaaccagtttagaactggtgcaaagggctctactgggggatcaaattcaaggggcaacactagaaaacaatgcttctattgtaagaaataagggcactttagagatgaatgtctggacttgaaagctaaattgaagagggacagtcaacaatcaagaaccagaaaatcacgggtaagcagatcttgtagatggatgtgagacagttgatgttctggtggcatcaagttctgattcaggcagagaatgggtgcttgattcaggctgctcatttcacatgacactaaacaaggaattactcagctctttctcagaagaacataatagaacactcctaggcaataacaaggcatgtgcaattcaaggaattggcactgtcaaaattgaaatccaagatggaaaattgcagagtcaggtatgtccctgaactcaaaagaaacctactatctattgggatgtttaacaaatctggctactctgtcaagattgaaggagggatgatgaaaactggccatggatcccaagatcttatcaaaggtcaactgaacaatggcctttattttctggatggtaaaacagttattggaagtgcagcacctgatgtacacaaccctacaacaagccaaagccgactttgacatctcagatttgcacatgtgagccaaaagggacttgaagagttaaacaaaca

SEQ ID NO: 41049 - DNA, 1201 bp, Cannabis sativa
tgcctgtgggagattgaacattgtaaattttaatccaaatcaaatttaagtttagagtgacatacctaatagaacacaatcttgagataaccttttgtgaacttttgatatctacacccttggaaatggaaaacacctcaaaagaccttgtgtttccaataaaggttttaaacaatgcagctgatagtgtttgtggttttaaaaaaaaaacctaaagtacgattttatataaatgaccaatacctttttagttttttaaaataaataacattttgataatattttcctatcaatccacataaggtcaaatcactaggttgtactatctacttccataacctaaaaatggagtctcataatatccaaatattcagttaatagtatacttatgatgtgacatgctctgtagaactattcatgtaccttattttcaaatattcatttaatactgtatttggaaattgattctttcattaatgatctacatgtaggagattgaacattcaaagttgtattccaaataaaatttaagtttagagttagaaagacatacccaatagaacataatgtgtatataacctttagtcaacttttgctatctatgcccttggaaatgaaaaacacctcaaaatacattgtgtttccaataaactttttaaacaatgtagctgatagtgtttgtagtttttaaagaaaaccctaaagtacgattttaaataaatgaccagtacctttttagttttttataaaaaataaattatttttaataatattttctcatcaatccatatacggtcaaatcagtaggttgtactatctacttgcataacctaaaaaaaatacttacgtagaaatatgttattacagtaaagaaacattcattatttgttaattaattatgatgaaccattttttaaatgataaaggtatattttttgtctacagaagggtacaaagttatgtgatgtttgatttgaggtatttaattaggatgctttatttgaccctgtaaatatagattttagtgagataaagttgtatgtatactataatatcggtactgttattatatttatttcaaatttaaataaaaataagaagatagggcaaaatagtgatttcttaccaatgtaatcaacattacaatttttttttaaaaaaaataaaagcaaccaaaaactaacattacaaaatagcaact

SEQ ID NO: 41050 - DNA, 1397 bp, Cannabis sativa
acaaacccaccgtgggattgggtcaaaaacccggacccaaacccagaccaaaacctggtctgggacctagaccttaactaggaccctgatcgggaccccaacccggacctgaaaaagacctggactcagaccaggaccaggaccccgaacccagactcaaacctttaacttgtacttcgacctaaacacggaccaaaacttgggatccaaacccgaacctgaacttggacctagaccgggacctacgatcgggacctagatgggagacctgagccccgaacccaaacttggagtaagaattcggacctagatgggggacttggatccaaaacttggccccgcaaccaggaccgaacccaaaactcgaccccagactcgagacacaggacccgaccttgcacccacaacttaggacctaactaccgagacacaacactgaacctcaacccaaacccaaacttaggacccgacccaagatccgagacatgaactaaaacaagacttagatccaagaccaagatcagaatctggaccaaaggctttgacctgaaccgtagttagtgtttgaatccaggacccagacctggatccgtgcctagacccgtaatcgtaatcagactaggtgtgggattagaacctagacctgggacagtaacaagaccaaaacctaaaaccaaactcagaccagaacacacaccgagacttggaccggaccgggacctatgacttgggacctaaacaaagagcgggacctggaccaagacctggtgtcggacccagacccagacccagaccgaaaatctggggctatacccaagacctaagaaccagagtcagacttgggacccaaaactcgtacccacactaggactgggacccgcactcgaacccgaatcaaaactgggacctagactcaaattgcgactctagacccaaacccgaaccggaacacgaacttggacccaaatcgggacctaggacctgaacatagatgggggacccagaacgaggaattgggcccccaaaccgacacggaacttgggcttcagaacttagatcgggattcgggacctgaccctagacccaaacatggacctaggacccacctcgtgacatgggatccgggatttgatgcttggacccaacccgtagtcggtgtcttgattatggacttagaatagaaccccaacccaaaatcgaactcaaaccaggacccggacacataccaagacctaggcccacactgaggaaccaaaaccgaaacgtgaactttaaccagtttgggatcttggaacgagaaattgactcaaacttagaaccaaatgaaaactgatgaggacatcaaggaccaagtatcaagtccaattccagtgggtccagtgactagggcacgagct

SEQ ID NO: 41051 - DNA, 4424 bp, Cannabis sativa
  modified_base (257)..(265): a, c, t, g, unknown or other
  modified_base (1261)..(1267): a, c, t, g, unknown or other
  modified_base (1824)..(1826): a, c, t, g, unknown or other
  modified_base (2118)..(2123): a, c, t, g, unknown or other
  modified_base (3964)..(3966): a, c, t, g, unknown or other
ccgaaggagagaatgagatccaggctcagatcttgttattagtctgcgacagaaaggaacaagggttagagatctgagcgaaaagagtcattattatttcgctgcattaatgtaaaaaattttaaactcttatgtgtttattttcatcgtattagaaaattcatatttagggtgtgaataaaacatacatgttattaaatctagatcgtggtaaaataaatcccaagaactggccttagagccatggtaatgatttnnnnnnnnnaaatatggatttaaaacaataatttgttgacttggatgtgttcatgtgagtttatgtgtggtttgatgaatgtatgtgaattatataatttttctatgaaaataatttatttggattccttgtgaaaagttaagtaatttttgtttttacaaaactcgattcccataaaaattgaaagagatatggattccttgtgaaaagttaagtaattttggtttttacaaaactcgattcccataaaaattgaaagagatatggattccttgtgcagagttaagtaattaacttatatgataaattaaataattataaatttgaaattaaactagatatttttattgatatcttaaccattatattttcaaattcatctatttgttattttgtgcaatattttatttttaataaattataaattagaaaaataatattttatattattttacttattagaaatttataaatagtattttaaatattcaaataacctagatatttttgtaaaaattaaaaaaaaaaaaaaagctaaattaacgatattttgacatataaattagaaaattatcatttcttttattatttaattcttaaaataataattgtccaaccatatctaatttaaaatttatttattctgttattttaattatattaaaaagataaataatattgaaaatatatatttggtttttttgaaatcatttatcttattaaatatttaatttaatttgataaaataagttaaataaaacctagatattttaaaattagtttcaattttgaactttaaaaaagatatttaaggttgtttctacaaccttaaattttcaaaatttagttggttatttaaatgataatttaattatataatattaaatatcttattccacatattattacatgggtgttgtttgtttatttaaattgtttattaataattttttttaacgaacatattatttatttgatctacattgctatgattaacttgttgannnnnnnaatgatctaattttaatcatagtctaattgtcagtagatcatataaataatttgtaacaagtaaattttgtaagttctttcattcgtgataaacctagaaacatgatagggcccatccaaatcggtttgacctgtgtgagcctatatgttactttttggcttagatgcatataggaagtacatttatttctagatatttaaatagactaggttactaaaataaaatatcaccatgatagttttatttatgctcaattagtattgggcttactcaataaataacaattatttaatgaaaggttaaattcttctcttttggaccttgtttgagagttagggggccaatagtagtgggcacgacatattagaccatacccgccctcccatgaacaatcccaattgcgaaggcctatttgccttgtttaaataattgtattaggctaattatactagtttaacctaattaaaattaaattagcaacatgattagtttttgaaattaacaaaattaatttttcattaaattattttaaaattaatttagaaaaacacatttnnnttaaagaaaagattctagatagtaatttctggtaattaatttatattctctgttaacacagattattcgttaacaaaatgtgaacctcacgatgataattcaatacagaataaataaaagctatagaaaaataatatatgaacataaggtcttttatgtggttttgcagttaaaattctatatagtccatgagttaatcttattccaatttttgaatatttcttcagggcccctttcataagagttttttcatcccttttttgagattgtttgccactatttataattgcannnnnncagttaattacaaagctgaccaaaccatgtttacaaccattatccctaaaattgtgggatctgattacatatcacgaaatgtaaatgcggtgtatgattttgaaaattgtacacctgtgattttcccgttttactgggtcaaaaatatcatgtattaaacacacctttaattgttgaatctggagatgtcttgatagaaagtttattgtagtgatcccaatggcgagctggaaccattcttctttccgaggtcgacaatgtatgtcttgagttgatcgcgggtatacaaaaatcttctgacttgccagggttatgaacctcgctcccgttagttggatgaaactataggaagtttcctcatatcgagatggtcatctcgcatacttgttcttcaagtcgatccgacttttacacttagtttccttattgcaagctaaggtatgtgtcacttttcttcgatgcctcgttattcaccttcagtgacatatggtatctcgttaagacactaagtgctagtttgtacattgaatcctcgcctaagaccttacagtcagcgggttacaaatatactctgatacttatgcaattattgagttattccctaaagagatactgcaccgattcacattccctttactttaatacgtgtcatccaccaaatttcaggtataacaattgccccttaaaaagttcttttttagtcaaaagatctttttaataattacggagggcatttttgccaaaatcctttcttggaaaagacacctcctttgattctggcggttgtacggtttcaagagtcattatgaatcgcctattcatattctgcacagctccaagccgttagatttttcaatcttcggctttcttgtcactgtactttgtgtataaaagggcggctcaagtttgtcctattgcttaaacctctggctcctttagtgaaatccattgtcagaatggattatttccttcctgccaaaatgtcccttctgagttcagaggttcgtccttccagactaataatacccaaatgcaccaaccattttccatttgtccctaaagacttcaagcctcaactggagccgaaaacgatggattctagggctgagatgcttccaaccaatgtaaaccaggaaaaccccgtagcctgccatgaccgatcctcacaaatgatcccacagggtacagatcttgtgagcgatctcaaaggtcctcctcaggctgatgaagaattccagaggaaggttggcatggtttcaggtggatcttggaaagaagttggtgtggtttttatcagagaatttggccaacccaagaccctaatctatgccaggagatctttgcgtcgacctctctctagtgttgagaaatttcctgaggctgggaaaaagatctcggctttaggaaatgggatcatttgatgatgaggggaatgaggtctgtgcagagatcgaggctctctacctgtagtcggtctttctcaagctatgtgtagatggtctttttcaagcaatatgcagacgatctttctcgagttcaacggcttcccctctcattctttgtttaggagaatgacttaatggtttgcccttagtggcatttttgtaaagacaagtttctaactagtcttaggtttttcttatcttaaattcctttgtactgtttttatttgaatttaatacaattatgtttgcttgcgtttttattcacaatgtaaacaattatattttgatcaaatatacagtacttttgggttcctccattgctcgtaatcttcctgtttaagtagttagtaatctaccaaacttttttattttcgagtggttgtcaattctgcctcnnnattgcagttataatctgccttaagaaaacttaaatatactttatggattttatcactttgtatatttttaaattgctcgcatgaatagttacataatctatttattttctaggtttaagtacttctaccaaggcgttgcaatgtctcgtttagtactttcctagcttgcgagaatcattactattcaattttatacgcaagttacaacttttgattttcctctcctgttggataggttatgaaaaattatagttgtttgatcccttcttcgtcaaaaaggtttgatcaaggtgttataacgatttgacccctttctcgtaaaaaaaatttggtcaggtagttataaaggttcgatccacttttgtcaaagaggtttagtcgagaacctttgaatttaaaaaaaaaatgaaatgacgggtttgcattatacaatatatttctagatgaatttcggttag

SEQ ID NO: 41052 - DNA, 1809 bp, Cannabis sativa
tgatatctggaagtaagcaaaattaactatatatatatatatatatataaaataaaaaagaacatgcagaaatagatcttcgttaagactttattttgaacagtatccaagcaatttttatattttattatttttttactataaacaactatttttatcttaatttggccacaataagttatttgaaaattcaataaacacaatcataaaaaaataacaaaattagaaatatttccattagaccagttgcaattacggtgtacgtcggttgatttaatcgagttattgggttgcaaatattcaattgtaacccgcccaattaaaaattagaaaaagttcaacccgcccaataattttatcggtttggtcgggttaatccgtccaaagcgttcttcacttttttctgataaataattattattattagtttctaattcaaaaaattagatttaaaaaaataaaaatacattatttatatttcaagttaaaaaatattatagtctaaattaattttaaaaacttttatataagataaatataattgagtaaacatgaaataattgaataaaataataataaaaaaataatattgtatagattttaaacttcaacttcaatatccaaatacaataaaaattattaactataaagttaagattttaagttaaatactaaaatgaccaaactttaaatacaaaatagtttgactaataaatataagttttgtaatatattatatacattttattaaaaaaatatatattaattggtttaattcggtataatttgatggtttagaataatttgtaaacccccaatatttattgggcggtttggattttcattatattatttcgagttgtattttttgtcaatttattcattttgatttggacgatttattcgagttgggcgatttgtaaactttattaaacacccctagtcataatataagttgttgacttcactacaaagttgattttctgcttacttgttataagtgtattatatattcttgataaaataactcttaataaacaataattttatttaataattgaataaatattattttaacgtggtgtgattaatttatatatatatatatatactgtatattgagatgggcatttggtataaggtgttcaaaataatttaattatagagaatattatgaagaagaatataattgtaggaaaatatggaaactgtgtttggttttgtatgatggtaatatgtaatcatattcatgttaattaaattaaactgtttggttgagcacatgaatcttatatacaaaaaaatatttttttattatatatttaatgttaattatatataaaaataaaataattatttatgaaagaattatatttattagttagtaaatattaaattttattgtattttttattaattaaaataaacatttctatatattttattacaaggttatttatttttgtttactatgttatttatgtacaccatctgcataaaatttatgtataataaatatatatatatgttattgttattaatataaaaataattcagttaaaaaaaatcgatctcacatactgaatatatatatatcgtaatattttatttataataaatgataatatatattattggtatttaaatttatttattaattcaaaaatactattcaagttaatataatgtaaggtaataatttaatcttatccttttttaaggtatcaacattactctttttagggggcgtttggtacgaggtgttcaaaataatttgattatagtgaatattatgaaggagaatatgat

SEQ ID NO: 41053 - DNA, 2836 bp, Cannabis sativa
  modified_base (28)..(33): a, c, t, g, unknown or other
  modified_base (67)..(72): a, c, t, g, unknown or other
  modified_base (99)..(104): a, c, t, g, unknown or other
ttagtaactataatacatgcaaaaaaannnnnnataatacatgcaaaaaaaaaaaaacttaataaannnnnngcaaaaaaaaaaaaacttaataaattnnnnnntatatgtataacggtcggtttcgattttttcggttagtttattaccaaaaaaaaaaccgaccgttcaatggcgattttaaccgttagtggttttttcggttttcaattttgtcggttttgattcttacggtgttcgataggtcggtttgaacgattttttcaattttttggattttatgctcacctctatcacccaaccccagatgagaagaaataacataaggattaactatattcggaagccaaggatcatgaagcacatcaatttgcaaaccagcccccacacttcgtcttgctcccgcaatcacaagcgcttcaccttccataatacttctccacacaaagtttggatttttacccaacacagcattaagaaaagtgccattaggataataacggccttaaacactgatcataatttacacatctaacacatttgtgtcgaaattttatatatatatgtatgtgacaggaattcataacttaccaacgatagttttacaagaataaaattaagaaaatatataactgaataaattgaaaaaattaattattttaaatattaattatacttggcgtgctaattttattaatgttattaattatatgctcttctacacggagccaaatcgtctgtctctttactctgtcccaattcctgtccctccactcaaattttgacacctcatctaaaatgacagcaatgcatttaacagtgttagtttctctttctaaattacactacctccttttgttcacaattttgtccattctttatttttgtttttttctctttaaaaaaattcttttcaaattctataacatcttttcgataagttctagcagaaaagttctgggaaaaataaatctatacaaatacatgtacaacctattttgttttcattttcctatcgttgttgtattttagtttttccttctctttgcaaatggtgttggacaaaaaatactccaagaatattctcgtagttgatgaattaatttgtactaaatttgtggatttattaattttcaggtttcctaattccctaaaatccatttctagttcatagaaagacaaatctcaaaattaacactaatcccaatctgaccaacaattactgtacaacttatgataacagtcaataacagccaccattgcattaattgttaaatcaaactatatatatcattttccttttgattatatatataaaaattgaaggcatatatttcaactaaatctggtctattggaaatgtgaactaattttcgattgaagctagtttcctttcttaaaaaatattgacagaaagagttgtagagagagtacccagttaatgacagaaatgttaattgttactgttaagggagattttttttttttttttaaaaaaaataaatacataaacgaagtgaagtaagtgtaaagtccgttaattatatacatgagaatgtaaatgatgtaatgtaaatgatgtactaaaagatgattgctgggacagagtaagggacagaaaaaaggaacagaagatttggctccaaaccaaatatccaccaaatcccaaacaacttcaaaacaattccagtacgcaaatttcatttttgttaattagaaacaagcttaaaaactgcatatatcaaggatttgaaatccatgaaacgatgtacgaaaaccctttctttacaaaaaaaaaaaaaaaaaaaagaaaagaggcataaacagggattcaaagcttgagactttcacgtatgttatgtatatgtaattatgtatatacaattacagtagaagagattttagattgaaattcaaaagtgattctattcgtacctgtcttcagtagagacaagagttttttttgattgagaaagcttttgacacagataaataaatataaatattaaataataaaatgattcatttttagggcatctccaatggagaaacccaaatttaatgttaaatcaacaccaaaaaaactattattttaatattaaatttttttcaattccaaccacaacactaaaaattataccaaattttatttttttttattattttataatataataagaattttttaatactaaatatacataattatttattttttcttctttaaagtattatttaatactaaatatactaagaatatatttagcattaaagaagaaaaagtaaataattatatatatttagtacatacacaattgatgattttagtaaaattgaatggaattggatagaagttattgtatccaataatctcaatagttcgggagagatttttaaccgcgcaaaaaattcaagacataatttaatatatgtcaaagtttaaggataattttttttaaataataataataaaaataaacaataatacaactataaataagttaaagttataaaacaaaaaaaaaaaataataatttaataattttgttattcaaaaaacaaataatttaataagtttactgaaaatatatttttataaataaaaaaaatcaaaattaaaaataaaataaaaaaaaaatttgatttttcttctttgaaagatcatatactttggaaaagaaatgcaactcaaaatacttgtttgtcaacattacattacattgcacgggaagaaaatattccgtgagaactgaatacacaatgcttattgaatcaataaaatcttacaactccatacatgacatgaaaacctcaaagaaaaacaccatatatatat

SEQ ID NO: 41054 - DNA, 1427 bp, Cannabis sativa
tctgttctgttaaatgacaaaatataaaaaatataaccagttttgttataacatctttagattagattattattaagttttattccgacaaaaaatcagttcatggttatttgtatgattttagaaaatataaggtctattttgtcatttaacaaaatagatagtccaattgatagtttttgtaaaatatagggttcaaaatggtagtagaagtgtttactattagaataaaaagtaataaaaatattaataaaataaaatattatattttggaattattatatgaaaaataaaaatttatattttatttacaaaaaaaaatatacttttataaggtgtggacaatatactttttatgtgcttttaattatcaaaataactcttacactatcacttacacaatcagatgatggttgctgtgtggttgaccgaaagttgcatcagacgaatatttcaatcagacaaaagttactgggtggttagccgaaggttacatcagacgaatgtttcaatcagatgaagcttgctgggtggttggccgaaggttgcatcagacgaaggcttcaattagacgaaataactgttagcaaaatatttatgcaattgtaatgcaattgttatgaaacattaaaaatcagaatagtgtttccacgtacgtaactatatctacatgtctcttcatgatttaatatgaacaaatttaccattagaaatttggaaaccaacgaaatacaccatgataaatattttactatagtattgatgtaatttttttagattatacttgagttggattatttgggaactccaattttgattttttgagatctgcattttatggatttgaaaattgaagttaggagattagttttatgcaaattaaactggatttccagttaaattttaggttgtagtagttaatctacactttttattttttatgaattcgaaagagtccctgttttgattgattctgatcgtcttcttaggtgaagtcaccgaaattaatggtggttatctttcaagttaaatttttgtttcggttgcgttgggttgttgcgtaattgtgtcgatagttgcctagaaagcatagatcctaggttgaaggtgtgtgtaagtggtatttgtgtattttttttatttgggttgtatatttacttatttggccagctggaagtatttttgtaatattgttatttttttttttggttaaaacttaaaaaaaccgttatatttttagtgatctaattttttttttaattttcttgcataataccacaattggagacactttaacataactttgtttttttaatctaggactttagttgtgaaaatggcacatgtctggtcggtgtttaaagttttcaaatcacctcttttgaaattaattatgctataaaatctgtgttgtttggattggtgct

SEQ ID NO: 41055 - DNA, 1541 bp, Cannabis sativa
  modified_base (1042)..(1047): a, c, t, g, unknown or other
gatgccacgtcagagtgccaaatttgggataacacaagtcattctgcaaggccagttttgccagggcatcagtgttggagttttgttctcttggaatttgctcgattttaaagtaattgaatcattccaagttctttcgaaccttctctaaatacttttccattctcaagcctttggcctggtattccgcgagaacctggttcacaatcagctgtgaatcactatgtcaaataagatttttaacctttaatgcttcagctattcttaagctagcaatcaaggcttcatattcaacctcgttatttgatgtgtcagattgaaatcacaaagaataatgaaacttaaagccttctggttatattaatattacccttgcacccgaaccatgctcgttggatgcaccatccacgtataacttccaagtttctgcgtctcggtgaacaggaaaaatttctttctggagttataccttctattaaaaagtctcccaaggcttggcccttgacgggtgttcgagggtggtatgttatgtcgaactgtcccagatcaattgaccattttatcaatcttccagaagcatatggttttgataaaacttgtctcaagggctgatgggttagcacttttatgaggtgtgcctggaagtatggtcgtagttgcgagatgcatggactaggcacaaagcgagtttttcaagagggggatatctagactctgcccctagtaaccttttacttacatagtaaataggttgttagtgcttaccctcttctcgcactatagccacactaattggagtaacgtttctccaactattggttttgccaacactggaggcatcgctaggtgcctttttatgttccgaaaggcctcttcacactcttctgtccaatcaaatttcttgttgcctcgcaatacactgaagaatggcaaacacttatcagttgtcttcgaaatgaatctgtcgagtgcagcaaaccttcctatcaaggcttgtacctccttaggctttgttggtgatggcatgtctattaatgccttnnnnnnttcagggtttgcttcgataccccttgcattgactatgaatcccaaaaatgttcctggggaaactccaaaggaacatttttttcgagtttagcttcatgttatacttcttcaatattttgaagcattcggcgaggtctgtggtatgattctcactttttatagactttactaacatatcatcaacgtaaacctccatgttttgcccaatctggtttgcaaacattcgctcatcaatcgttgatatgttgccccagcgttcttcagcccaaacgacatgacattgtagcaatagagttccatgttggttacgaaacttgtatgttcttgatctaggacatgcatttttatctagttatatatagaatatgcgtccataaatgacataagctagtgtccaacagctgcatccattaactggtcgatcttgggtagtggaaaatagtcttttgggcacgccttattcagaataaaaaactcaatacaagttctccaag

SEQ ID NO: 41056 - DNA, 1370 bp, Cannabis sativa
ttataaaattaaaaataaagcaatgtacattactaaaactagtagaaattagatttataccttaatgaacgatgagatacaatattttctccactaacaccgttggccgaaggtataaccaccacaaccactacctataccttcggtttaccctaaaaaataaggaaaaatgtgatctttttaggtatatagttttaagtatgaaaaatagaagatttagaaacaaaaatgagctaaaatggtgaaagacaaagggttataaacctattttggggtttctctggtttgggggtttctgagttggttgatcgaatgagaaagacaaagggttataaaccctttttggcatcggttatttccaaataaccgacgccatatttggcataaaattgccttctaaaaattttcaaccctatgccgtcggttatttattactatgctgaaaaaaaagtgcatctaaaggcttgttttgtagtagtgcacacagtgtcgttattagcatataaggataactgtatatttatatgcatagtttagtgcctattgtgtaattaggactataatgagatagtcacaagggcggagccaagacttaaatactaggagggctaatcataaaagtttatgaaaaatttatattgtacctctttaaaagatcgttttggtacacctcttatttgcttcatccaataaaattttttagtttatttttttataggcgcgtacgttgtcaaataaaaatttaaatatttttagaatgtcgaaaataaaattttaactattgcttaccacatgtataagaaaaaaatagacacacattaacagaataattgaatcttattttgagcactgtaaactacttagaattttttaaaatttacatatgattctaaataactacaacgtagacaattttaaagaaaaaaaacctaactaaaaaattcttctagatacaaaaatagatagggatagaaatttcattgtaggagatttactatagaattatccaataatttttgtatcgtgtaatatatatatattcatgtatagtaaaatttataaaagtgtcgttttggtacgttctatctattttgaaatctaattgaagttttagtgcattttatttttatgattgtgtaccgttatagttatttaaattcactgataaacttttaaaaaatctaaattataataccaaaaaaagtttaaatatttttttcactcataactttattttttttatttatgcaaatacttatattacatatttatatgcaaataattacacatttatatacaaatacgtatatataattgttgctcctaaattcgcccaatatacgtggaccagtcaagaggggacacgtgga

SEQ ID NO: 41057 - DNA, 2087 bp, Cannabis sativa
aatcacaaattgcttagaaaaatcaggaagagccaaaacaggaacggtgaccatggcgtgtttgagagcttcaaaagctgctgtagcttcatcattccaacaaaatcggtctttcttcaattgctctgtgagaggccttgcaatggacccataccccttaacaaacttcctatagtagctcgtaagacccaagaacccgcgaagacttttcaaattggtgggcagcggccaatccaacattgcttggaccttgttggagtccaccgagaccccagaagaagagataatgtgacccaagtattccaattgttgttgggcaaaacaacactttttcttgttagcataaaattggtatttagccaagttatccaggactacctgtaaatgtgagagatgttgcctccatggtcggactataaacgagtatgtcgtcgaagaaaacaagcactaagcgacgaagaaagggtttaaagacctcattcatgttagcctgaaatgttgctggcgcgttggtgagtccaaacggcataaccaagaactcatagtgaccctcgtgagtccaaaaagcagtcttaggcacatcctccggttgcacccgaatttgttggtaccctgacttcaaatccagcttcgaaaagaccttggcaccatacaactaatcagaagctcatcaatgactggtatcgaaaacttgtcagcaatgggttctttattgagagcccggtaatccacacaaaaacgccaacttccatccttcttcttcacaagtaatacaggactcgagaacgggctcgcttggctgacagatccccccttgcaacatttcacacaccaatctctcaatctcatcattttgcacatgagggtaacgatagggccgtatactgatcggggctactccggagcggaggcaaatagcatggtctcgatgtcggggaggtggcaatttgtttggcatgtaaaaaacacctgaaaatcgctgcagcaactccgaaacagccgctggaatgtcctccccagcccccacggcagttgtatggccgaactccacccacaacccttcatgttcttctttgatggtcttgatcatcgtcttaagtgagacccgagtcttgtggagggtggggtcacctcgtaactccaccatttggccgccccttttaaacctcatgaccccttccttccaattatggtgagtgtcacctaacgtctccaaccactggacacccaagattacatcggtgcttcccaaagccaaaggcaaaaaatcgtcaattatctctactgtttgcaatgaaaccggcacccccaaacaaattcccgctcccttgaccgcttgacccgttcccatttgaactccataggcttccgtagttgaaatgggaagtttgagttgagtaaccaaggatgtagctatgaaattgtgagtagctccactatcaataagtaccgtcacctcttggccatgaacgctgcccactaatttcatagtttttggagaagtcaacccaaccacagaattaagtgacacttccaccacttgagcttcagtcaacccttcctgctcattaactcctagttcttccatggcattcaactcttccatttcttccacttcctcttgcaccaaaataatttgtaattctggggatttacattgatgtccccttgtccatggtccatcacacttgaaacacactcctctagctcttttctcttgcacctcagtctccgtaagtctcttgaatcccttaccaaactccatttctcttctctggtttaagggggttgatgcacgttggaaactattttgggaagaaagacttttattaattgtcccattcagtccattaaaagtcctttgagtgagcccatttggattaaatgaagaatttctatttgggcttacccctttactcggcccactcccaaaagcccgaaccactttaggattggcttccactatctcagccaactccgtagtcttctccaaccccaccggttcaaggagacggagtgtcccctgtatctccgaattcagtccgttcaagaacgccgactccaacagcggctccgccaccgccccc

SEQ ID NO: 41058 - DNA, 1978 bp, Cannabis sativa
ggcaaggctaaagctgaggagtcgtgagagcaagcaggtgaagattgtacatgtcagggcagttaggcctggagcgtgcgatctttgggacatcaagacttttgcggaatagtcgctaggcgacagaactttgtatatgaatagcaaacttttgtaaatatattttgtaacaggatcctagaatattattaatgtattactttatgtttttaattaaataagtaaattttaattaatcacgttttttattaatctcgttgattagcaacgagctgcacagtacattgaaaatcacgttaacatgcctaattagttagggtgttacaaatggcttcaagttagtgcctcctctaatcttttatcatcttcttcttctttaatttagcaaaggttttaataatttatgctttaggattttctatattaaagcatttttaagaatatatttagatctgtaatatatatatatatatatttctaaaatattttataagtcctaacaagtggtatcagatccactttttgctaaatttattaaagatttgatgattttgaaattgggtttttttatctatttcatagatttatgcggttgaacctttttttttttttgggattgagatatcatattatatatatgtttgccatatatataaataatttgggtgttttgctttgatttgagtgtatggcttccgtcagtatattggtttgaggtcagccattattttccactaatatttatgatgatgtatttggcgcattttttttctattatcggatggtttacagtttacacgttcaagtgccattttatgattatttaatattcaatgacaattcctataaatatgtataagattggtattgtttatattgtcaataatttgacttcaattttcttcttctatgatataagttttctggcttcagattttgaaaagcctagcccaaggaattttttttatttatatgatgtatatgtatgtacactaagcccaatcaacccataacaaaaaatataattgggtagatttatatatcatatgttattacattatgaattatgcattatttttcctgtttgtttatatcatatatgtagtattattacatatattttggttcaaacaatttaattcaaattttggtgttaaattatatctaatattttgagtaaattaattaaaacaatatgtcgtcaaaatgacctcttttgtgtagattaatttatttaaatattaggttggttgtgtgtttgtaattgatgcatatatgactaacccaaaggtaaataactattttgctaaatttcaaatatacctgtgaaaataaatgtgtgacaattataaggtattttgtgtgaacaatatgttagtccaaagagtattctattgtttgacacagttttattgtcaatatttgattgctacaccaagagtaccgcttactgttaatattattatccaaagacttgatattaatgtgtgtttggtatcttgagatgggattaactaatttttgaatttattgttttattatgcatattaatgtgagcttgttttatttgttttatattcagctagtacaccttctgctgcctcaatatatgccaatattaattctattcttatgcttgatgggtataatttcaaggattggaaagaaacttacttatagttctcgggtgtatggatttagaccatgcactaagaaatgaacaacctgcacctctcactaaagaaagttcccatgatgatagaataaaatttgagaggtgggatcgttcaaatcgcatgagtctaatgattatgaaacacaacattctagaaaccttttggggcacagaattcgaaagggttactatggccaaaactttccttgaacaaattgaggaacgttttgctaaaaacgataaggttgaaatgacaacacttcttggttctttaatgaacatgaagtataagggtcaaggaaa

SEQ ID NO: 41059 - DNA, 1433 bp, Cannabis sativa
gggtttatctcgacgggccaagcccgtcgagattggttagcaataaaggggggcttaacccgccgagattggtgaaaatagcctgtcgtgattggtcttcttagtggtgatttatagcacttttaactaccaatatcgacagacttagcccgccgagataggataaaataaaagaaaaaaaatacaaattatcattaattttattttcccctaccattatatatttattataagaatatacataaaaaattacaatacattataaacaatatatctaacaccattccataatattcaaccaaaacttgtgaagacatcattacggaatctgagtcaaaaaatagaaaaaaaagaattcaaatatatttttttttaattcaaatatttaagagttacagaaatatattgttgggctctttatagaatcaacaagtctcatttgagccacgaagacaattaaatagacctcactattcctttgacttcccttttcaatagctccctgaaaaatgacatataatcaaagttaagaccaatatacatttgtaggcttgaagacccttaaaaaatacattgtataaatcacctaattcataaataggtgggcacttcacttcaaaatcacatcaactaattcaaaataaatttccataccttctttaattataagcaattttagcacgtataattttatactcaaacaattatatacatatatattatatgtaaatagatttatacatatgttcgtaattttttgacaatttattgaaaaacttgttattatctctaccaagtgtctaagaagaagttatatcaccttttatctcattgagagaaccttatctagctttgccaagtcttaatcttgaacttcaaattaaattagtaataaacagagtgaaaggaattgcattaactgaaacacatataagaatgacaataaaaattaaaaggtttagacaagagaaataatccctttgaatgtatggtttacttgacaaatcaaacactagtactagaaataaaagtgtgtttcttactttacacaagtaaaactatacaagactaaacacatactgaaatcaattccatttgtttactgtggaacaaaagtgtatacaagactaaacaaaagtgtgttcattaatcaatttcgacaagataaaatttgaagcctctataacttgtgacccttcaaagagataccattttaatcaatttcacctttatagagttataaggacgctattcttctaactaaggagtacatatacatacaaaaaattaaaataaagcatagatactcgaatgaataaaattattaatctcatcattgaacttatcttaaaaaaaacaacataaaaaactgattcttgcaaaaaaaaattacctgaatttgaatagtgtatgcaaagattttgagactagca

SEQ ID NO: 41060 - DNA, 2514 bp, Cannabis sativa
  modified_base (1243)..(1245): a, c, t, g, unknown or other
  modified_base (2196)..(2198): a, c, t, g, unknown or other
tggatacacattttgacaatgtttgtctgaccatataattacactatgattgtaattggaggtaattgatggattctaattacactctctaattttcatgaccccttatgaaaattgagtgtaattacactgtgtaattactaaaaacttttcatgtaactaccacatcttatccaaacataccttgtattttaaattatagtataattactaaactgtgtaattaccaccctaataattacacaacctagtaatgacacagttacttccaaacacacctttagttaattataaatttaaataaaaaacattatatatttatacattctatattttattaattttttaatattatacttatatatttatatgaaattatacaccacccaaaataatttcataaacttatttctttgagtctgtctaatatttgttcttattaatatatcaaaaatataagaatatcacaatttaattaactttctttttccattttttaacttatatgattagtgttaatgcagatttttgttaactaaatttgagcctaatcgtgacaatctcacacagaaaaaataaggctataaaagtaaaaatatgaacacagggttttttacatggttttgcagttaaaattctgcatagtccgtgagtgattcttattcagatttctgattattttctcgggacctcttttgtatgagtttttccatcccctttttgatcttacttgccattatttataatcatatagtgagcagttaattacaaagttgacttgaatctttttacgatgatcatcccctagaatcatgggatttgattacaaatcatgctaagtaaatgcagtttagtttctattttatttaaattaaatttcacttcacataacatagctgtgaatatcccacttttattgggccaaaatagacgcgtattaaagatatatggtgagccttatctcattgggatacctcgcttggaatagagctgagttaattttgatggcgagctggacgcctcgctatatatcaccttgatttactcctatacttatacttagtttatatatcgtgtgctatacgctaaatatttctattgtctttatatctcttccacgcaacgaggttaatgcctcgtcttgcacacttgcagttacatggtttctcgtcgagacacaaatcaacagttagtacatttttatctcgcataagattgttcagtcaaccgagttataaacatnnnctgttaattatgcttttaacgagttattccacgtcaagtgtaattacgattgtgtgtgtaagttctccattcttcccagctcgacacgtgtcttcttctgatgtgctcgccaaattttaggtataataatttccctttaaaagtactttttttaatgaaaagagctttttaatgattacaaagggtatttttttttctatgatcctctttttgaaaagacgcatgtcctctgattttagcggttgtgcggtttcaaggtacatcaacattaaatgaccaccttttccacttcagctttgaatcatatccgtaggatcaaatatttctctaatctaacgaagctaatatcataagtataagtaaggaaaaagaaaccacctttgcattatttcctccattttagaaagtctaaaaaactcttaagctttttggccaagaatcaccattgagtttgtctgaggacttgcatgccatctctgtccttaacatttttttacaagtttcctccgacttcatcttctcaaagcgatccttgctaccttcgaagatttgcagacggagtaacaagtcattgacccaagccccaactccaaacagtaagttgctttcttccttcacatgcttgctacattgtgctaaattgctacttagtttgtttgtatcgttgtcatctcatttggttttggtaatttttagggttaaaatgtatttaggtccatacaagggtacatgcaatatgtaggttgtttcagaatctccaactcattaccttcgggtttgataaaattctctctagggattgggactactttttgcctgcagcaatgtcccactctggttcaggaatttatcattcagaagttttagaatttgagtttcgtatgaaatcaaccatcccgtaggaacccaatccttcaaaacccacttccaaattagagttgaacgatgctnnngttagggaacacgtagtgagaacccaccaagaaaatattgctagtcgttacaggcgtttcttgcaagaaatctccaaaggcaaacgccaattcttgcgagaagcagcctgtaatatctagattcaaatagtatttaatttttttttgagatattaatggtgcgaggataattatcttatttatttgtgttgttagtgaatagagactattgcttagagtagtcgtaccaattttctaaagagagttaaagttgtattaactacgaaagtaaaatattatggtattttcataagtaggtaatcgtttaattaaagtc

SEQ ID NO: 41061 - DNA, 2186 bp, Cannabis sativa
cattttaaccatcttttcacatccacgaacccttcggaggaggacatgaataaagccttggacggaatcacgtgctctctctccgagctggataaagccctccttgccgaagagttttccttggacgaaattaaaaaagcttttttccaactcccctcggataaagctcctggtcctgatggttttaactctaatttctacaaagcaaactggacctctattagaaatgatgttctcaaagcagctgccagttttctcaatgaaaatggggacatcgctcctctagataccaccctcatcactcttattcccaaagtcatacaacctacttccctctctgaattccggcccatcagcctttgcaatatcatctacaaagttatctctaaggctattgcaaatcggctcaaactcgttctcaataatttgatctctcccaatcaaagggatttccttcctgatcgactcatctcggacaacataatcattgcccaggaagtagcgcactccatcaaacttaagacgaggggcaaaaaaggatggatggcagtcaagctcgatatggccaaagctttcgacagagtggaatggactttcattgttgctattcttcggaaattccacttcccaccccggtttgtccatctggtgttttcctgcatctccacgaccacatttcaatcaatctaaacggtagagtttctggcagtgttaccccatctagaggtatccggcagggtgatcctctctcaccctacctctttctcctttgtgcggaaggcttctcctctctcctccgccagaaagaaagaaacaagtcccttctgggtataaaagttgccaggcgggcccctgctatctctcacttgctttttgcggatgatagtttcctcttctgtcaagcgtctattaattcttgtaacgtcataaaagaggttctcgatgtgtacgaaagggccactggacaaaaatttaacttccaaaaatcctcgttgtacttttctcctaatgtggagttgagggaccaaactctgatctctgacttcatgaggatccctgttcgtccctcttttgagaaatatttgggtctccctcaacacattggccgaacgaaaaaacaattgtttcattaccttcatgacaaagtctggggccaccttcataactggcgaaacaaagtcttctcaaaagggggcaaagagattctccttaaatcggtcattcaagccattcctacctatagcatggcttgcttctgcattctggtggccacttgccgctcgcttgaatctaccatgacaaacttctggtggggaattaatgacaacaatagccccaaaatccactggcaaagctggaaaaagctctgcaagtccaaaaaggatggcggacttggtttttgttctctggtccattttaatcaggccatgcttgcaaagcaagcctggcacatcttaaagcaaccaaactcaacggtttccagaattttatccgcccgttattaccctcagtcttccttccttagtagctccacggggcattctccttctttcgtttggcgcagcatttgctgggggaaatagttgcttagcaaaggcctcatctcaaaaattggcaatggacagaacacatccacttcttctgatcattggatccctggtttccgtcaagttactcccttatcccctgtccctgacaaggtcgcctcctttataacatccactatgtcttaggacatagctaagattcagtcttgctacccggcccacgtggctcagaccatcctttccattcccctccctcttatcccaacccaggatgatctgatttgggaaccctcaaactctggggtctacacagtcagatcaggctatcacctcagtttttctactactaccccacccgacatcccctcttcctcttccccctcgccttggtggaaaaccctttggcatctttatatccctgccaaggtgaaacactttgctttccgagccacaaacttaaccctccccactgcccaaaatctagcctttaggaaaataatccaatccccgggttgtaaccgttgtggaagccaggtagagtcggtgtcacatgctgttctactgtcagagtgtccgaagagtctggaaaagtacgcaattttacccttatatgttttcctgctcttcagagattttgtt

SEQ ID NO: 41062 - DNA, 1188 bp, Cannabis sativa
  modified_base (726)..(738): a, c, t, g, unknown or other
attccactttatagagtaacatgttaccatcaatattcaattttgtgcataaataatctaatatatgagttgttacattgtaaattaaatttggtgaatttagttgagaatgctgacctattatttacataacttaacttgtttactttaaaaagtaagtagataatttatttaacatttttatcatgcttcataaagtatctgaccttgatgcaataaaaccccattgtaataatgtgtgcttgagattttcaatctaatctatttaaggccataaatggccttgtggagatgatagacatgagtaggttttgtagcatcctcaaacccatttgattgcttcatgtacataatttcttgaagctcactattgagaaaagtatttataatatcccgataaatttaatggtaaataattagagtttatatttatattatagtaaataattagagtttatatttatattatgggttaatcagataataagtgggattatgatcctactaatttattttagcataaaatttaaatttttctataagtgagtaaataatcgtaatttgttaattacagagatttatatagcatgtgtgaatgtagtatgagctatatgtggaataaaaatattttcaggttcggcgaccctgaagactcaataagtggatatataagcgcaatttgttaattacggaaattcatttaaaatatgtggatataatatgagnnnnnnnnnnnnnaaaaatattttcaggttcgacaaccctagagacccgattggaggctaaaaatatcacgacggtttccgttagaaatattgataggattattaggataagttgattttagaaatatcaaagtattttggggtactcagagtcgaccaaatactctaaaaatataaattttttagcggctaagaaataataaaataattatcaataataaagtttttattaataatttattattattattattattattattattatataatataaactgaaactgatacagtttcgtacgtatattatatatatatatatatatatattaagtttaaaatatataacatataacagtaaagaacgaacgaacgaactctcgctcttctctcgtcaataaaattttctctttttatattcatttttttcgattttcaatctaaaacttagtgatctaagctc

SEQ ID NO: 41063 - DNA, 1048 bp, Cannabis sativa
  modified_base (27)..(33): a, c, t, g, unknown or other
aaaatagattacattgaaatggagttnnnnnnngggcataaaacctaacagtatcttgcatgaaagaatttgttttattcacgacatgtttacgacgctgattgcgatatatgtttttttagtttttaatatgtttgcttacaatatttgcaaatggctcttaaacttaaacttccagtttcccaatatttcacaggacgtctcacctattgaggttcagataggtttagagatgccaatgccaagtttcaagagcataagttgatagataagattaaggctagccttttcggatacttctggaaagctggagatttgactttctctgaggtgttggtccacgacctactcttacggaagataaaagtttataatgaaaaggaagatgaggtatggtttcatgtgggcaaaaatgacatgagatttgggtgtatcgagtttggacttattaccggcttagctatgggtagtgcccctacaaagaaagaaatagaagtcaagtttaacaaccgtctagtgaggacgtattttgaagggaagagtttagtgtaggtggattcactgttgcgtagaggcgagtgggtagtctcttcctaaccaaaaacaaatagaaaaaaaaaaagactaattatgagttttgtcctttgaacattaatatatacaaaatcatgttccttacttttaagaccattaaaaattctcatgaactattgagatggttcgatttaaagactattttccaattttagtaagaaatgaaagttcaggaggcttgatttggtacattttaaagttcgaatgacatgatttgatagatatcaaagtctagtgagcatgatgagtacatgaactatcacataattagtaaatcgaatgaaattggaaaaatgtctttaaatctagcagtagttcagggagaatttttatcaattaaaaaagttcatagagcataatttaatacatgttaaagttcaagaggcaaaaatcctaattagccaacaaaaatgtatgtgttttttggttagttaaaggtcaagaattcaaatcc

SEQ ID NO: 41064 - DNA, 1807 bp, Cannabis sativa
  modified_base (65)..(75): a, c, t, g, unknown or other
tatattcatcggaaatgcccaactttatcgatacttacagacacatgtgtaagaacaattctagnnnnnnnnnnnccaaaacactataaataccccctgtatatttattttaaatcaatcatggggcgtgaaacgaatccaccttttagagatgactaattctctgccaagcagtagggttccaaaccctgtatcataactatcatgcggtctacccaatttactaaatttttttgcttccacataagaatgagtggccccagagtcaaataacaaagaaaagtaaaagttgttgaccgagagctgacctgttacaactaaggggctagcttctgcatcaacctgaattagagcaaacaccctagctggagcgagtttttctccaatcttttgttcttctttcttaagttgttgacagtctcttttatagtgccctgacaaaccacactggaagcaccctttccttctacactctcctagatgatgcttttacaactggggcattccgggtaagtgtattgggtttcaaaactaccctgacagttgcctggaccttggttcccacagaacctcttgttctgacctgagccaccggatgcagttggtccctttcttttcagatcagtggtcgagccactaccacccctaccataacaagaggtaggaagagtaggggccccaccaacaatatgagtcccttgggactcctgaatgcactccactgcaccctcagctcgcattgccttccccaccatatcagcatatgtggtgttgtcaatagtggtgatcataagttcatgtcttatcttcgaattcaatccatctaggtatttttctttcttactaaaatcagttggcactattcccgaggccaatctagccaatcgatcgaactgagttgtgtattcaataacactcatattttctttctgggtcagttgagtaaattcctttctttttgcacttctgactgcttcattgttgtacttcgcgttgaacaactcctagaacttttcccaaatcatagtggtaacatcgcaagttagggacaccatgtcccaccatactagagcatcttcttaaaactggaatgcggtacaagccactctgtcattgtcggtaacgcccatgaaattcagaattctagtaataaccattagccactattcggccttcatcacatcggggcctcccggaaagactggaggtgcctgcttgcagaacctttcatacagtggtttcactcggttcaatgcaagaactggtcctgcctgcatagcaggggcatgagctacctgcatttatggagcagggatcgtaggagcacactgttatctcaagcgtttcatttcttcatctttctcattaattttggcttgcatttctgcaaacctattttcccattcatgggcagcctagcagcctgcagcgggttaacatcaccccgacttcgtgccctgcctctagggcctttgccccagccacgaacatttgggggaatcttaactccttgaccaccactagatctgactgagttaccctgagtcctggtgttttgcctggcgtccatactactagaacagcccgtgtaacacacagctagtcttgtcagattgtgatcacgtataacgtactaattaccgcttattttggaaattaaaaacatgcgcctattcagctatcaggcaactaacacgcttcctatcaagcttttcttaaatcatactatcaaaataaactactaatgcaataaaggcttactaaaccgtgagacgagctgatcgttgatgataattgtacatgtcgt

SEQ ID NO: 41065 - DNA, 1998 bp, Cannabis sativa
cattttcttgctctaacagatctatagattagtttttctgtttcgttgattttttgctcaaaaattgaattttaaaattttcgcattttttgcgttttttctagttttatggtttttttttattattttttttgcaatatttagcaatgtatttacaacgatagactaaatttaaagttagggatgaagtttagcaataattagcgatgactttagcgtatatttgcgatatgagactaaaaaatgcaaagcaaattgctaaacattactaatcatcgtgaaaatttgaatgtaatttaacacatttagcagtgtgttttagcgatgttgtgatttagcgacaattagcgatatttaatgacattaatgtgaaaatcagaaaaaaaaaatatatagaaaataagcgatggattgagagctccagtgatgagtgggaattttgagggtttcaaggtggttgagctcgtggatttttgggcttcaaagtggagatggcgagacttacttagagtgagagaattaaagagagagacttttttgaaatgtaaggtatttttgggagaaaaatatattaaaaatatagataccctacttttaattaataatatccaagatgagatgagagcttacttgtgtggtttgcttggcatggtggctgctactaataatagcttctacttggggttaccttgtactatgggaagaaataagaatgctatattgggtttcttgaaggaaaagatgattaaaagaatacaaggatgggagtcgaaattcctttctaaagctggcaaggaggtgttgctgaaatctgttgcccaatcgcttccaaactatgctatgagcgtatttcttcttaccaaggaaatttgctcaagcttagaggggttgatggcaaggttttggtggaagtcgcaatctaagggagcaacgaaaggggtgagttgggtgagttggaataaactttgtaaacataaagatgttgggggtttgggttttaagagtttgcgagagtacaatttggcttacttgggaaagcagggctggcgtttaataactaatgaggattctttggtggctaagctgtataaggctagatactatcctaaaggcaattttttgagtgcggagttgggtccgaacccaagcttcatctggcggagcgttttggaggctaaagaattgctacaggctggccttaggagatccatttgtgatggtaaaaccacttctatccccaacgatccttggctccctagtgttgataaccattttgtgactacctatcatcctaacctggtgggaagatcggttgacagtttattgcagctagagagaagagcttgggatgtggatttaatccgtgacatgtttaatcaacaagacatggatttaattctttccattcagctgagtgatgcacaaaggggagattgttggtactggtctaaggaaacaaatggggtttattcggtgcgtagtgcttacaagttgttgcagcagattagtggagattggccgagcgagggtgctgatgtgtattggaagagactttggtagctgaatgttccagcgaaggttcatcatttagtttggcgtgtaatttctggtactctaccaacaaagctacagctctccaatcgacatgtgcatgtcgatctcacatgtcctctgtgcaataaggcccctgaatcgattcctcatgttttatttggttgtgagtttgctcactcctgctggaatattgcagcagtttctgctgctggtgtaaatgaaagtgaatttttcacttggttctgtgacattctgcagcagggcagcaagcatatagcagaggaaactgctatgatcttgtggcggatttggttggcgagaaatgatatgttgtggaataagaagtcgactacagtttcagaagttgtccattcggctaggactaatcttgacacatggaaaaatgctcaaacaaaggtttttactccattgttgaatgttaat

SEQ ID NO: 41066 - DNA, 1366 bp, Cannabis sativa
  modified_base (883)..(888): a, c, t, g, unknown or other
aataattgttaattctaaagcaattattaagattttgtttaataaaaagatcttttgatctgatagaggtggaagaagttaagaataatatatatatgcagttcaacgatatttttatatatctattgaactctggattatatgcataactccacatgatctctatatcacttaggggtggattaagctattgacatatgtagttcatttgaactctagactatactcaatacaccacagtatctctatgacacacatattttgattaaacatggatataatataatgaacataattagcaaattattggaacatattcttaatcctatattttgttctaattaatatgttactgtagtaataaaattgataccaattaagttcttggacataatatcacaataccttatttgagtgggagaattttaaaattctaagcccatcttcatttggatgacacttgtgatagaaacgttagaattcaactgagaaagtaaatctaaccattcatatggacagaaataacttgtcagaattttgaggataagataggagaatttgcaagtctattcgaatgacttaggcaaaattccttatcctcatgaaatattttatggtatctctaatgattacttaaccttaagcaagtattttacattaatattaaaaatagattgctatgttgatgacttaacctagaaggaacttacagtatcagactaggataatatgccacaacaagatatcgcggaaaaacaatagtaagaggttaaatatacttatgtatgaatttaaccagactcctactgttgagtgagagtcatctaagatgtaatcaaacaaggaacattaggagatagtcaagaaagatttatgaaagtgnnnnnnatgttagatgataggggtgtatattagaatccctatatctacaccaactcataaacgattcgagatggtggttcctctggcgggggaggaattattctagtaggatgtaaaaatcaatctataataatttaagctccatcagtgaagataaataactttattgtttcgaaaaacactggaaagttattcaactgaaaagaattctacactatgttatctctattccattttggatagaatgagagatatgtcttctatttattcaaatgcacttaataaactgtaaagaattcagtatccctagatgagtaatgcatatagtaaataacgttgcataacgttttatgaacacaaaggaagtaatggtggagaaagcagtagcttaccacaaacttacagttccagtaatttgggttaagtcaaatatactaccttgatctggatatcaagatatataattgattgattgaaatgcact

SEQ ID NO: 41067 - DNA, 2611 bp, Cannabis sativa
cctcacttggaaaatcaccagctgggagtcgctaaaaatccatagccacatgaccttcaactccttggcgagcctcaatccagctagcatcgcttaatactcggcctcattgttggaggccttaaaaccaaatcttattgcacaatgcattcgaattcccccaggtggtgtcattacaaccccaacccctgctccactatcatttgaggcttcgtccacatgcaattctcaatggactcttcttctgcatcactttctaaccctttattggcctcttgcccttggtcttccccgtctggacgataggtgaatttcgctacgaaattcgccatcacttgtcccttgatagacactctcagggtgtaagatatgtcaaattgacttaactctatcgaccatttgagtaggcatcctgagacttcgggtttgtgcaacacttgtctcaaagggtggttggtcaacaccacaatcgcatgcgcgtgaaagtatggcttcaacttttatgatgccacaataagagcgtaagccaacttctcaatctttggatagcgagtctcgacgtccacaaaatgcttactgatggagtacatgggctgttgttgcttcccttcccctcttacgagggcaacacttagagcgtgttcggaaactttcaaatatatgtacagcttctcgcccttttctggtttagccaacaaaggtggatttcccatatgttccttcaagcttgtgtaggcctcttcgcaatcttcgcccccatgcaaattgtttatttcctttaagggtatcaaagaatgggagacatttatcgatggaccttgatataaccctattaagggcggcaactctcccagttagacaccgcacctccttcctgttcttgggtgactccatgtctattaatgcctttatcttttcagggtttgtttctatgcctctcttgttgaccatgaatcgcaggaatttttcggaggacacaccaattacgcatttcagcggattcaacttcattcgatatttgcgaagggtggtgaacatctcgcctagatcctggattagatccttggctttcttgttctttactaacatatcgtcgacatatacctccatgttgcgtccaatttggttagcaaacatcttgttgacaagtttctggtacgtcgccccaacattcttgagtctgaaaggcatgatccgaaacaacataggtctcgatccgtaatgaatgaggtgtgttcctcatcgaaagggttcattgttatttgattatacattgagtatgcatccataaaataaagcaattcatgccccgttgtcgcatccactagctagtctatccacaacaacgggaagctatcttttgggcaggccttgttcaaatgtgtgaagtcgatgcatactctccatttttcgttaggtttagggaccaacaagaggtttgatacccattcagggtaatatgcttctcaaatgaatttgatcatgtcaagtcggtcaacttcaaccttcagagcttcgtgcttcttgacatttaaggccctccgcttctaccttactggcttcgcgttcggatctatgttgagatggaggcacattacggttgggtctattccttccataccttcatcccccaagcaaacacgtctagattattttctagaaactccttcaattccctcttaagggtttcgaggagcccttttccaattttgaggaccttgggcaggctctccaagattactatttcttccaactcttctattgactccactcgcacttcctcacaaactcgagggtctagcgctgatgaaacttcgttgccttggctgggccccccatggttggtcatcgttgttggttctcgaggctttgtgacgattcagagcgacaagttatagcactctctagcttcattctgatcccctttcaaagtggcgacatcccaaggggttggaactttcatggtcaagcagtacattgagatgaccgctttcaaccggatgagtgatggtcttcccagcacaacattgtaagctgacagacaatccactaccaagaaggtggccatcaccgtggaatgttggggtctcctccccaccgttagtgccagttctatcattccccgtagttggactggttctttggtgaacccgtatattggtgacgtgcaaggtttgagatcctcaaggcccgacccatctctttcagagcggtgtaatataggatatctactgagcttgcatcgtcgattaacgtctggtgtacacgagtgttagccatctgcaccgtaagcaccagtggatcgttgtgtgggaaatgtattcctcttgcatcatcctcctttgtaaaggtgactggggtgttctccccctcgaaattttttaggggccttagcttcaaattctaggagtgaggttctcgacttgcctcacgggcgtacttgtctctcctccttcgagtttttcctcctacacaaggccctcctatggctgttctgacatcttccactgctttagggactctattgggcactctttgtcagtgttctttatttttccatgccatgttgatgttcgcctctcccttgccggcggtggacaacggtaggtct

SEQ ID NO: 41068 - DNA, 1485 bp, Cannabis sativa
aaattattttttaattaaaatatttaataaaacttttttaaaattaatatttacaattttttttattttatgtaaaaataaataaataaaattaagttaatagtatcaaattacaagtaaaattatttttaataaatttttaaattaataatcataaccgtttaataatgatataacggttaaaagtaattgtacattatgtattttttttttcttttgagataatgtattattggttttagcatttttaatataatatttttagcttaaaacaaagaacattgctattagacatcttacaattattggttaacaatatttttttaaattaaagcaatttgtggcgaattttttttatgtttttaattttatacacttaactctttaattattttttttgtagcaaaattatcttatatttatttttctttgtaaatttgacacgccagttaaatatcagcggaaagattatagtatgcacatgtgtatatgtaacagtaaaatctcgaaatcaatatagtagtaattctattggtatttaacagtaatatttaattaaaaccttaaatttgcaaaaaaaataaataaacttaagcggattttatcactaaaaaaaataataaaattaggtgtataaataaatttttttttccacaaatttctctttaaattacgagatttgataattatatcacactaataataatataacatggtaattttttagctattctttaacacaaatgtatatgaaagtgcattgttatacacttatttatttaattatttgtatatgtagatatacattagtgaaaagtaaaattttaattgttattacaacaacaactcatgtcagaaaccctttgccctagacatgcaccacctttagaatagcctttgctaatacaatcactattgcagctatttgaacatggacccaagcaaattactggcaagtttattgcttctgctggccctgttcattgtaattaaattaatatataataaactcaaatgttaaaaaaatatatagatagatatataggaattaggtaattaccagctgaggctaaaagcaatgcaatgcagagaaaacccttgagaatgatacctttagaagaaaccatctctattaatttctctagcttgttgatatgatatgatatgatattatttgttcttatatatatctttatgcaataatcaataaataaaaaagttgacctttttttcttaatgcagattttggattttgtttctatatatctatattttttttttcttattattatggtaacgtggatctgacttttaaagacatgtatcctatatcataatcctatacccagtgatgaaagttaaattttgatcagatctcttttcattgatttttttttttgggaagaaatctttcttcattcattaaattggattttttttttagaaaaaatgaaattagattttttcatatataaacatatataa

SEQ ID NO: 41069 - DNA, 1649 bp, Cannabis sativa
  modified_base (299)..(304): a, c, t, g, unknown or other
aaggggaatgggtgggtatgacccgctccgagctctgagctccgcggctctgagcacaaggaaagcggtggtgatggtggtggtaatggcagtagttgcctatttattattgttaatttattgacaattttcacactttcaaattggttattttgaataacaactccttattgttctttttctttaaaaaaaacctacttaggattttttcgcctaactttgtcatgtactaagttatgtttcctgaacttttttgccgttaaaaattctcttatactattgagattgttagatttaannnnnnttgtctaattttagtaaaaatattctaacatggatgaaagttcagaaacataatttagtacatattaaaatttgagagacataatttagtagatatctaagtctagggagtatcatttagtacataaacaatcactgaaacataaaattgaatgaaattagacaaaagttttaaatctaacaatctcaatagttcaggaataatttttaacggctaaaaaagttcaaaggcatgatttcgtacatgtcaaagttcggaaaaaaaatcctaaataacaactctattattatttttattattattattattatcttattatgatctcattttgtatctatgtattgcttcaagaaaccaatcaaggggcttcactcacactgaaactaataaaataaaatatagaaataacatcatactcggcaatttgtatatggatacaccttttctttgtcaataattctatttttttattattatgggtgtgcacatcttccaaaattttactaaaatctaagagtaatttatcatgtaaaaaaaatcgtcaaatattttatatgtataggaaataaattgtttgaattttgtatgtattgcaaattattttgtactatatactattatataaaaataatatccttagaattatttgaatatataatttcaaagaaaaaataattatttgattatataaataaataaataaaatatcaatacacttatttttatttaatgcactattaaagtgccccaaataaagtttagtagctaatattattttgatatttgcgacaaaattcacttaacatttataattattatacatataatcttaatcaaaacaagtagtaaaaatattttattttatgattttgttgcagtcgtactttttttttgtcattaaatgttaacttaaaaatacatgatgacatattattgaactatgtattaaataagttaaagaaatatgtagtcatgtatttttgagaagatacttacgggcttaattgatacttaataactaaaaaaaatgtacgaatgcaacaaaatcgtaagataaagtacttttaccatcactttttttaatttacgtcatatgtggaacaattgcaaatgtataatgattttattgaaatatactcgttcagtaccctttaatttttaggaaaatatatttggtactccgtattttcaataatactttttttgtttttaaaattatacatattgaaatatcctgaccacggttttctctcgttccatggcgaaacggaaaaaactaggtcgaaggccgggattgaaggcgccgactgaagcagcaggttcggaacagtgtgtcgaccaggag

SEQ ID NO: 41070 - DNA, 1224 bp, Cannabis sativa
  modified_base (143)..(144): a, c, t, g, unknown or other
tataatttattgtgactaaatgtgcttttaatcacatacttattgtgaataaaagtaaattagtgacaatttgtttttagaaactatgttttagtcacaagtaactttttgttataactaaagtcatatttagtcacaaaaannttatattgtgactaaaagtttgtcactaaaggtagctactttttattgtaaataccaactagcttattattgtattgactttgaagatttactttcatgtatacacatgtgtacacagtgatcattcaattggtatttaatagtgatatttaattgacgtctcaatttttttaaggaaaataaacttaagagagttttgtcactaaaaaaagataaggcgggttataaaaattaaaacataaaggaatttttccgccagttattctttacaaaaatacgattttaaacttttaaaattataaaaattcaattttgtaagcaaaaattaagaaaacaaccaacaaataatgagaaattaacatcataatatataaataaattataaaataattaaaaataacgagaaaactctcctgacaactatatctaaacaaccgaaaaaaaatattgaacaaccattgaagtctgtatttcttgtaaataaaattaaaagttcaaatagtaaaaatgaaaatttctacgtattaacatgtttttataattttttttcaaatttttactctatgtaaaaattcaaaaagaaatgtataagatgaaattattttgacaaattaatgatttaattatggtttattcatcaacaaaatattactgaaaaatttattttgatataaagatgaaacattggatatgataaattaataggttatatattgttggggtatcaatttaagtcctacattgaaagaatagacaagagttgttttggaatatataagtgttccaccttcttcattagtatgaggccttttgggaagacaaaactgtgagagcttaggtccaaagcggacaatatcatactaatataggagtcaatacgaggtagtggcccaacaaggtgaaagaacgggacccaacaagtggtatcagagccaaaactttaggagcgctgggttaatgagttgcatttgcgatgtgtggaagaaactctcaatgtgataacctcgcaattgaagatctatatggtgccctgtatcgaaagtctattcaatattgaggtagtcaggtggtatgtcccgt

SEQ ID NO: 41071 - DNA, 916 bp, Cannabis sativa
tagaatatgcatgcattatgtagaaacttaatatcatttacaagatcatggatgctactccatttatctattaattggttttaaagaaatgttaccgaaagaggtgacataatatccggtcacacaaatttggttaaaaaaatttagtttcccacctcacatacttttaaaatttaaccaattagaattttttttaatcaaattttatttatatacttacatttctcttctctctctcctgccatctcatatatctggcacacctttttttttttgcaacaacattgggcgattctcattgaagatgattaatcatgaagtgacacatcaatatagtacattgggcaccttaagacttttttttaaaaaaacgaacttcagttcaactaaggcaaagagcaaaaattggcgatcacaagggatcaccctccccataatacaaactaggagcaatacaagaacttctaatgttcctggccagaccatccgcaactgttctggcttctactaatataaaagaaactacaatctagaaccgtattaagtaattcatgaacttctaaagaaaggttaaaaaaattccaatccaagtggcaattcttcaaggaacatactctcataacattcctgcaattcgaaaggatatgaaccttacccgaactcgatacccgaattatgcttcttcgggtcatacccgacccgacaatacgagttttggtttttcggcttttttggcatcgggtcggggcgggtggtcggatttttcgggttgctgggtcctaatgttcagccctaatctgttgatctgctgatagagttttctcatggaggggagcccgtgtattgccatcaaaatactcagagcagagattttttatctccaccaagactgagttaatattgggcatcccaccct

SEQ ID NO: 41072 - DNA, 2525 bp, Cannabis sativa
ttgtgctaaattaagtcaacattttagaatgccattcgagtagtaagtgtgttaaattataacaatacactatttttttagtaattcattggacgatgctcttaaacccgcccatacctggaataatttcaccatcaagatttatgactctaattttccattaggcagctcagtttgttaatatggttttttttcttaatttaagcattggctaattagtaatttttctctcaaatttgacatgtactaaattatctctcctgaactttttttgccgttaaaaattccctctgaactattaagattgttagatttaagaacttttgtctaatttctttcaattttactatttagccgaatttggtatatgtcaaagtttggggtggaaaattattaattagccttgagcatttaatattacaacccatgcataatttgagactcgaacacaggacctccaacgcacacgcacgctcctattaccacttgagctagcctgaagtggttatttgttaatatggttaacttaattaaccttggtactcagcctatatatataaaggatttgagtaagaattttctataatgttacttcctaaagagagatgagaagtttgaatttttagtgtttgtaaaaagaattttttaggtgaatgtttttagagaaattatgaaagaaaatactcgtaaacttatatgtttatttggttgagaagaattaaaatataataatagaaataagaataagaataaaaataaaaataaaataaaatcaagtttaaaatgcataaaaaaattattattattttttttttcatattctattaaaatggttattccttttaaaatggaatagccattctataataataatagaaaagctattttattaaaataacatttcaatactttaaaatgtaaccaaacaagaaaatataataaaaggtttccgtttcatttcatttcattttattacctccaaccaaattacaccttagtgtagcttgtagtagaattgcatttgtgcaaatccaacgaagaatatatgttctattcttcctttgtttgtaatctttgtaccatttaattggtttcattttcttgttaccatattcaaatttggagctaaataagttaatcctcacaacttaatttgatgccttgctcatcagagattatttgaacgagtaacaaaccactcttgtaaaaactaaaataaacaatttagtaaattaccacatttcaacaacatgtaatcttcataaaagagcaacaaaatcgtaaattgtgaataaccaaataagtaaaaacaatatagaagagcaagtattttaaagccaataccattttaacttgttcctttcaaagaaaagaattcctcagatcttgctagcaaaggtaagaccttccttcttaagctggtctaggctctcaacagggggttggagtttggccaccttagcgatagcgctattctcctcgggattaccaccttcaaggaatgcaccaatgaccttgccatccttaatccagtatgtaccgaacttggcctttggtgtttcaggattgttgtctccgaaaagtacagtttcaccaacattgtcgccatagaactgccacgccagatcaaaagaacgagagtagaagtatggaaggtagtcatactcctcaacggattttccctcctcactagccttgatggcctgccaaaacaaagaatttagaagtgcattagtttgatgatagtagttagtaccaaataggaacaacataaatatttgaatttaatgagcacaagataaagcaatttcgtctagactagaaaaaaatcacttgaaaaaggattataaatgtaggtgaatctgcataccttgacggcttgttcagctgatttgcgagaatggtcaacatgctcgactcttctattctcattgtacaatttaagagggaaagtagctacatctccgacagcatacacatcaggaacacttgacttgaaaaaagcatcggtctgaagccatacaacagtagaaagaactcagtatcattggcacattcaaattcaaacatgatcatcagcaacagcaaatattttattttttcaattttatgaagatcaaagttatgattaagaaatgaagatcatacaatcaaagatttcaattttattttttccactaaccttaatgccacctttctcctcttcaacttgtcccttgaataatgttgtaaggggtcttcctccaacaccaacaacaacaatgtcagcttcgagaactctaccatccttgagtttcacttccgtcacctgcaaaagaatcaaaaggttcagcgtaagtaaattcagcctcattattgtgaccaagaaaatgagaaattaaaacgagtttacctctccattagcatttgaactgaaaccagttgcaacagttcccttgataattttaactcctttgtttgcataatagccctcgtagaaagcagctatttcagaagtgaaaagccgaggcactacaaggaaaaga

SEQ ID NO: 41073 - DNA, 1516 bp, Cannabis sativa
aatacttatattcaagcatatatatataaaaattatatatcaatgtatttaattattaatgaaatgaattgtttatataaaattctaacaaataaagccaacatatattgtatggtagtgctgcaacttcaaaaaaaaaggatatttctaaattttttcttcccaattacagcaagtactcattgtataaaaacgtcaaacttgtcacatgaacatcacccatattattaatactctacaaaccttgagaatacacttgatatggtttgtgaagttcattaagactcacaaaatcgtctcttgaaacattaaccaaattgttagtacataatttataaccttaaaactaactaaaattataaattagtaacttacatacctaagcttatgagaagtttttaacgaaaagcttcaaacgagcaacttcaaatatcatatctgaagtatgataaattaatctacctctttttacacaatgtgaataccttattctcataagatacaagtcgttgtcaacgtataatctcaaatcactattattcttgttttgcctaagaatcaatttactaattgaagacataattttttttccatctttttattgccaatatattgatatatattagctttcaacaacattttgtacttacaagtagcttttgagtcaaaataattttttcatgttaattaataattttgtcaaaatactctacaaaccttgagaatacatttgatgtggtttgtgaagttcattaagactcacaaagtagtctcttgaaacattaaccaaattgttagtacataatttgtaatcttaaaactagctaaaattataaattagtaacttacatacctaagcttgtgagaagtttttaacgaaagcttcaaacgagcaacttcaaatatcatatctgaagtataataccttattctcataagatacaagtcacgtataatctcaaatcactattattcttgttttgcctaagaattaatttactaattgaagacataattttttttcatctttttattgccaatatattgatatgtattagcttttcaacaacattttgtacttacaagtagcttttgagtcaaaataatttcttcatgttaattaattaataatttaataaattacttgattatataatgatcatgttcaagataatttttttaattaatatattttatttatgtcttgtataatttatgatataatatttgtaaaatttgattattttgcaatattttagatgaaaatttgatgtttcaaatttatttataatcatggaatattttaatctaagggggattttaaatatgtaagcgatatataggtttgtctatacccaactgatcaaaatgatcccttctaaactgagttctaagattatcataatttgcttgataaaaggcacataacagaggttagggcaacattttcagaattatcttcatcactttcggtttcatcatcactccaagtgacattgaaacttttcttattctt

SEQ ID NO: 41074 - DNA, 1505 bp, Cannabis sativa
  modified_base (1298)..(1299): a, c, t, g, unknown or other
ctaagcagcaaaatcagagttacaaaatacatcataggtagacacaacctgcttggtctagtgtggcccaaacatgtacaagcatcaccaagctctcgcactcatggttgatcatagacccacgtgctacgctcacacgtctatttatgttagcatagactcacgtgttacgctcacacatctatttacaataaggccttagtagagtttatctgagttatagttaccgagtctaacttgattatgcctttcccgcataaccctattcatatatacataattcatatattacgttctttcagtggtttatcctgatgataaatgttaggtctaacccagttatgtcttatacacataactcttgacatatatgcgtacattcaatatatactataatatataaaatcttagggtaataaccctaacttgcatactaaataattactcatataacatattatagtatgttcaaaataacacatattgagggtaataaccctaacttgctttcacttgattaacaatgttactatacatcgttgctttcttaccttcgtgtaaattctacggtaataaccctagaccgcatttctattaaacttagggtactaatttaccgagtctaatttaattatgccttgagcacataattctttattctaacatatttagcatggcataacacccaaaatttttaattagtagggtaataactctaggtcatataaccgcccattttagggtaatatccttaattccggttcttaattaatcacaaccatagtataaacacatgagcgccaccgcgcttaactcttcgtgcaaactactgtcttacctgatgtcccatgtatgaggagattccgaatccccgggtgctcctaatcaagtgtcggtaatcctagccacaatttttgggattcacaaatagggttaatccctaaatccactctcaataatcacataattagcattaaatttacagattaacatatagagctcaaaacgagctttctaacggtataaagaacgtctgaaacagaatcccgagtcaaaagttatggccaaaacaaaattcgaccttcccacgatacaatccaacgggaattccagttggaatagccctgaaccaaccggaattctgattgtctgggaagaaacaacacgaaaaatctcctactcaaatcttccctaatcaccgccaaactttccagagcatcatcatataacataataaacatattttacagctcaaacacaatgattgcagcaagaatcaaaaagtgccattgttgagnnaggtttgagttcttgaactcaaactttctcaaccacacaattaaacaataataacagctcaattagttctaactcttcaataaaatataacccaattaatagaaaccaaaactaaatcaaaaatcacaaagtgccataattacacaaaaattcaagcttgaacttcaaagcttcaaaccttcaagcttaaaactcagaaatccaag

SEQ ID NO: 41075 - DNA, 1694 bp, Cannabis sativa
gattctgatcatgttgtaccggcgaatgttgctgaccaaccccgcctggaaaaatgagtcttatttgttggaatgctcggggtttggggagcccccgagcattccgaaacctttcccttatagtgaagcagcataaaccttgtttactttttgttattgaaactaagctaggggttgggtctagttctagttttaagtctaggttatcttttgataatgttttggaaattcctagaagaggtttagggggaggtttgcttcttttttggactattgctgttgatgtatatattaataattatttctctaatcatgttgactgttttgtatctatgaatgataatattaatactaaatggaatctctcttgtttttatggctctccttatgtttctaataaaatggatacttggactctattgcatcggatgtatgatattgctcctagtatgccttggtttatatttggtgattttaatgattatctcactttaaatgatagatctaatgcttctaacccttctgtgtatgccatgactaattttcagcactttcttaataaatatagtctgcttcctctgccgtgtatagggaacaaatttacttagaaacatggtaattcttttgaaaggcttgattggtgtattgttaataactcttggttagatttgtttcctaaggtttctctttatcacttaggtttttttggttctgaccatagggctttaaaagttattcttgaggataatctttgtaaggcgtctggtagaaagaggtttatgtttgagaatttctggttttccgaacctgattttctctctgttgttaaagaaggttgggggaacaattcttctaatctccccaatgctgatcctctttccaccttcctgcttaagcaggactcctgtattaagactgttcagtcttggagctctactaagcaaaactttagccgtcgaattaagtctttacaggatcgtcttgagactcttcactcttgtcaatctcattctaattttaatagtaatcaggccaaagagcctcaatctcaacttgattctcttctttttaaagaagaggttttctggaagcagcattctagaatagattggcttaaggctggtgataaaaatacaaaatattttcattctaaagcaaattctaggcgtaggaataatctaattcgtgagattgtcctagattttggtgagcgtattgattctcaacaagatattagtaaacattttcttactttttatagtactttatttacctcgcaaggttcggatgctagggctgtggatcatcttttgcagtttatccctcaccgtctctgtgattctgctattcaatagcttgatgaaactttccacagtgatgaggttaaggatgctcttttccaaatggctggggataaagccccaggtttggatggagttaacgccatgttttaccaaaaaaattggtctacttttggccctgacttatgtagtgttgttctttctattcttaataatcaagctgacatttcttccattaatgaaattgttattgttgttattcctaagatgaagaatgcttctcaaattcgagattatcggccaataagtttgtgttctactatttataaaattgtttccaaagttttagctaatagacttaagaatgtacttaatgatatcatttctccaaat

SEQ ID NO: 41076 - DNA, 1225 bp, Cannabis sativa
atgaatagttaatcctctattcatattttagcttatatattatttttcaagacacgtttgtatctcgtttataatacatgctataatatgtgagctgttatatgctcagatcgcatatagctttctattgctttatgagaaagaatttcacttacaactgctaatttaattttctcttaaagaaaagatttttcaattcttgacttcatattgtccaaagataattttaatcaattatcctttcctttgtgaaaaatttttaatttttaggtcattagcactatagtatatatttctaggtggaatctagttattatatacatatatgcccccaagtaattttaaagaaaataaaactttataattactcgaaaaaattacttttttttttagaacaatgatcaatcattacggagatatatatagcatttacataataaaattactggtaataaggccgtaaatactcactgttccagtgattctttattagcgagccattaagccaagctaatttataaacctcgattcctacaatagcttgtattatatatgggccttcctagtttgggttaaacactcctcctgctagatcttgtgtatttgcaaatacacatctcaacacgaaatctcctactctaaacaacctctttcaaactctcttgttaaagtatcttgttattcggtggtggcaagctgcattggttatttgtgactcattgtgtttttcttcaggcaagtccaaggacatacgtagaagttcttgattttgctcttgattgtagaatttgcgtttgtgggtcgcgatgtgaacttctacatgtaacatagcttttgagctgaatgccaatgaaaatggagtgtgtcccgtcactgttttctctattgttctatgggcctagagcacttgtggtagctcgtctatccatcttcctttgtgaacatctaacttcttcttaatagtattcttcaaggttttattaacagcttctacttgctcatttggttgaggtctcgacactgatgagaagctcttaattattttattcctttcacagaactcagtgaataattttccatcaaactgagttccattatcagatactgtcttgattggaattccaaaccagttgggttttgtgccgtaaataaaatccatttcaatataaacagatttactaattaataaagatcagaaatggcattttttgttgcatggttcaca

SEQ ID NO: 41077 - DNA, 2811 bp, Cannabis sativa
  modified_base (929)..(929): a, c, t, g, unknown or other
  modified_base (1158)..(1160): a, c, t, g, unknown or other
cacatctttccagagaagctttcacggaattttctttattttcttctacgataaaaaaatgcttttgggaaacaaacaaagctgtctagagccatgataaaaagttgggcgtcaagggtgacgactcccttgacactgggcgcccaggttgatatgttctacacgaacatgtaattctgtcgatccaattgcaattttgtctcttgaattactcttgttttgctccaaaaacaatatatgatacctagaattagaagaaaatatcatccaagtggtgattcagctcccagacacaaccaggcaccacactgggatcctaggttgacattcaacctagagctaggtatttcgtcaatcaaacgatagttccattcttggaattaatcttattttacctccaaaatactactttgatgccttttcaagtaaatatctcatttacatgtgtgacgctcaaggccaccgacacccatgtgcagtagtgatcacctggttgtcacctagtcgtcacttgtgattacccatgcatcacacatgtatatcaagtaaaatagccaagagatattcatggagtcaaagaatgaactaatgatatctatcacattattaaatcatctcaaaatatgcctgaagcccatgaaacaaggttctttgaacctattggttgacattttatgttgacctaggtgcccaaaggtcgacttgaccttgtagtcactttcagcaatgcacaccactcaataaaattgtcataactcactcaattattatccaaatgatactattaaagtggcatatgaaatccattttcaatacaaatctaagtgtagttcacacccttgccacgatcttgatgtttcgggcctcaaaatcaacccctgagctagtgcataatatgttggaagttattttaccaggatctaaatttnctaacatgtatgttgattataattctataatataacaccctaaatataaatttcctaaaataataaaaataaacatataagagattaaaaaatccttacattggtaacaacataatattatgactccttccgttcagatctctaaccttctgtcgcagagtaataacaagatctaaaattggatctccttcaggtgttggattcttcacaatcttccacactatgattnnntacttgacttgatatgagtgggcatgtactcttcactatagttcgaattgaatgaagaagaagaaggaatgaattttgaaaataaaagaagaagagaggctctcttttgttttctaattttttctgacaaaagagtctgaagtcaattgaaaaaactagagtcatcttattctatttatagattccttctagggttaggtttagaatttaaatggaatcaaaaacgataaaataatggctttacggagttaagtcgccgaccatattatggacatcactagtttaaattttaccatttatttaactcatctttgtttcataaatgccatattttaattctaactctttaaatgtcaattctatctatttaataattataattaattatcaaatgaaattgtcatttaacttatttattaagtagaccttacaaagtctcttaattaacaaataaaccctaaaacctattttcttcacaattaagcccttgcgttaagccaagctcgaagaatataattgtttcacttctagaagttagagaagctatagattccatatctataatagcgctcacacttaattatactaccatgttcgtaagatgtaagtattgtgctaattcaattggtcagctttaacgaacaactcaaagaacataaataatacattcaagccagaacctaaccatctcaagattaagatctattgacctaaaatcaattaagtgatattaacttagatagatataacggtaagtttatgatatattatccaattatcaatatcagtctagtctgatgtatactccatacattagatcctagcatactttgccagtgccctagaaaggacataacatttatccaaggtgcactaaactttatcgctgattatcatgtcagtgtaaatccagtgtactgataaatcatgggacttaagctttaaaatatatgatcatgattatattttactgtgtttacaacactataatcatgaataataatatgttctggatttaataaaatttatacattaaacatataatcatgaaagaaatcatgtgaaccatacaacataaaatgatttctgatcttttattaattagtaaatatgattatattaaaatgtgttttatttaggacattaaatcccaacagaacatctcaatgaattttgtgtgatttttttattattatattataatttaattggacatcatttcccataaaaggagagctctcctagctcattttacacatttctcattctctctacaaggtcagagcttctctctcttcacactttctctctctaaaaattgtgaagtgaagctatagacttagccatttttttgtgctctcttgtaaggcaattagtttttgtgatattaaaggatctaagtaaacgtagctctattaccatcgcgtaatagggagtgaactatcataattgtaacgttctattcttttttttgatacattaattggccctaccacttatcaaatgatatggatttaattgcttttcaacgtcaacactcctctagtgtttgtttttattatggaatattatactagaattatgaaagattagctagaaaccataattttggtttcatactcgatgcgatggaatagaattaaaccatcta

SEQ ID NO: 41078 - DNA, 951 bp, Cannabis sativa
agttgataggaaaatgtgttaaaacatccaaatcagcttcaatttttgtacttggcaatgccatgtttaaactgtgattaatcacaaaaagtctacaaattctaatgcataataaatcagacaaatcaacaaccacacactttgtcaaacatataattctattttccatcattaattttagatcaatttttgaaatatctataaaattatctaaatttccataaatattttcataaaattacaatggcaatatttttacattttctaaaaataatcttctaatttttttattgaaaaataattgttcaaaaaaaaaaaaaaacaataacgtttagttgcattaacgataaaaaattacattgtgcgattataaaatgatcagatcataataattattttgcgatcatatatttacaatgtacgacattatgataatataaattcaatgtagttattttataaattttaaaatttcatatagtgttaatttgacaaatttccttctaagtagactgttgaattttaataggcggctaattagaattagaatttttgtttttgtctttcgaattttgacatttaccaaatcatgctctcaaacttcacagaccattaaaattctccaaaactttacagatcattaaaattctcctgaactattagatttaagaatttctattcaattttgttcaattttaataacgtgaccaatctctatataccaaattgtaccccaaactttgacttgtacgtgatgtaccaaatcgtgccattgaatttttatccacgttaggcatccattagtaaaattaaaaaaattctttaaatctaataatcccaatagtttaaaagaaatttttaatgtcctaaaaaagtcagggggacaaaatcctacattataatatgagcattgctattagaccaactccaatggatgtaccattttagacc

SEQ ID NO: 41079 - DNA, 1531 bp, Cannabis sativa
agtattactaaccaattgcaagacgacacgtttagaaggtgctaagcaccactgatgcccaatagtaatgctcttttctttattatatatatagataatctcactttgcgctattttataataataaaaatattatgaatacatatttagttttatatttatttaattgatgataacttttaaatacacatataatctcgatgaataatttatatattatgtaatttttcattcactcatttttcttacaatatctttataaaacatccaacttataaataattaaatttgtatttatgaaagaatttatgtgtttgaccaattactattttgggctatatatatatattctacaattgattttctttataataattctgttttggtcaaaatatatgatatgaatgtatttttctttttaaaaatttcatcaaacacttaaattgtatataaattgttgaaaaacacataagtaaaactcattataattttattactccatgattcaacactattttttttttctataaaataccatgtatcaaaatataaaataataaatttatgtatataaaatgataatatagataacataaagaaataaaaatagagattaatatttatatattcatcgatagcttaattgtcaagaatctttatttcatacttctctttaaaacatataataatatttatatgtataagacaatctcatatacatgtatatatattatgtcaaatataagaaaaatatttacttattttaagaagttcaaattaaaattaattattaataataatgtgatttttttctacaatatttcagtctaattgttataatatataaattataatacataacattattctatgaatctggagtggtaaaaaataaacttgaaatatgatttacttttttctttttattttataatacttaaacatttatttttttaaaatttcgatatatatatatatataaatatagatatagatattgttagttttttatattgttctaaaataataaatgtagtagttgaaatactttaaccaaatatatagtagcctaattttatcttagaaatctttaattatataactgttattagaattactattaatatgattagaattttaataatctatatatatatattctatataaagtgtgtctatataagagaatttttggtttatgagaaattcatgggtgaccttttatttatattaaaaataaaataatttatgagaaattcatgcgtcactttatatttatatataataaaataaataaattcttgatttatgagaaattattaggtgacttaatatctattaattaaagatattctttattaattttataatgaatttttaaccatttaaccacaaaaccagcctctccacggtcgatgcacttttattcaactttatttgaatcaatcaaaagaacaattctcaccattatcgctcactacccaacgacaattaatgtaacgtccgtattttatatttactaaactcgaaa

SEQ ID NO: 41080 - DNA, 1209 bp, Cannabis sativa
tataaaatattaataaaaaataattaataaatgaaacgggtccccgtcggggcggggagtgtcatccccgtccccgccccgtttaaacattcggggacaaaattgatccccgtccccgccccgtttcctatttaaacggagaatccccgccccattagggacgagtccacgcggggtaccatccccgtggggaaaatgtgtatcctaatcccaagctacttcaatatttatcttcgattaactattattatttttttaacataattcgattaattaatttgaacacgtaatattcttttgtctatattatttaattatattgtccatcgataataacagttagttatgtattacgacaagtttaaagctatctcttattcatattttgcctaaatataatataatatattacatacattggaccacaaatataactgtttagtatcatagatgcacacatataattggatacatacatatatctatttacaactaatcgatgttatctaagcatctttacactgtacctttttgattaattcattaatcctttattactaatctctaacttctaaatcgactcaaaccaggctgactacttaattattatcctaaaattttagaggttgtttggctttataatttaaaaactattttctgttgttttaaaattgaaaataatttttaaaaattaataagaaccgtttagcaaaaatttttacaaacagttttttaaaattgagtagattacaaaaaacatcaaaatattatttttaattttcaaaaacaaattttttgtctaatatattatattttatatttttacttgcatattcgaatcctagattcgaaaccatacccgaacctgaaacctggatgagtttacggtatggtgctaacatattaattttttttagtaagaaaaaattttaaaatagttttaaaaaatttgtgtcaaaacactattaaatttttaaaatgacaaaaaattattttctattctcacttttaaaaatacaattttaaaaactgaaaacacagctaaacatgtccttaatgtgtggggttttttttatttttatattttaaaatagtttattttttaatattattagatagtcccacatcgctaatgaatgaaaagataatagaatatataagaggaacggactactcctcccatttattgccaattagttttaagatgaa

SEQ ID NO: 41081 - DNA, 8066 bp, Cannabis sativa
atgcatttatatggatagctttgtcagagccctagtattttagactattaaaaaaaaaactaacagtaaaatatgagctcacacttatttatatatatataaattattagtgacgtggcataggcggaacaagttcggctctgtaaaaggcgtgcctgaatcgttaccctatattatatatacgtataatatatattatatatacatataatatattgcttaaaattttaaaagtgtaaatttgtataaatttagattttaagtgtatgtagtaataaatgtaatttataggattataattttgttttaatttatttaaaatgttaagcttttaggtttttgaaaattttttacaacttttaaatagttacaaaattataagtttgttaaataattgattatgtaatgttttttaaaatttctctagaaaaattagaataaaaatatataacttactcacaaagttacttgtaataaaaataatattttagaataattatataatattgtagtatttaaataataaagatttaacttaaaaaaaattgttactcaaaagtgcgtgaaaaataaatataaaaaaatgtaatagtaatataaaaaatcataaataattaattcattaatactaaaaataataatataatttttttaaaaaaaataatatatataacaaatttgaagtaataaattttaaaaaataaataaaaaaataaactaaattagttattaattttatattatataaataattgagtaattaatattgcaataataataaaaatttaatatatataaaagtaataattactttaaaatatatataaaaaataaatttagttaattaataatataataatctataaataattaaataactaatattaaaaataataatttaatttttaaaaataataaaaatttaataaatcacaaatttgaagtaataatgaataataataaaaaataaacttaattaattaataaagtaataatttataaataattaagtaattaattttacaattataatatttattttttgaacaattataaagtaataataatttaaaaataaatataattaattaataatatggtaatcttaaatgatgaacaattatttttaaaaataaacaatagaacatgattttttaaaatttcaatataaaatattttaacttaaagatatcataaaattgtgtcattaacataaaatcttatatgtctttataaaattgtaaattgtgtcatccaattttgtattaactgttgatcttggagatttaattttgctacctaattttgatacctagtagggtaccgtcgacatgtgagtcggctccacaacaataccctatgtacggtcaatttgggtcattccaacaacatgtgtacggtcaatttaggtcattgttgcagcaacaacatgtgtatggtcaaatgggaggatctccacaacagcctatgtatggtcagattatcagtgcgcatagtcagtaacaacaacaacctacttgggttcgttcgcaaactcgataatttgtagagatcttacctacgctacagactggacaaccttattacccaccccgccggctcctcaatctcgtgataatcgcgacggttcaagacttaactcgaatgtagatgattttatggaatttactgatctgaacaatgataatttatgtaaatttttatgttttaaagtttattttaagacaattttataatttgatttaagatagtggtgtatattgttattgacaaattaatattaatgtttcgtttcttaaatttaaattctaattaataatatgttcataaaataattattatatatataattatataatatataggggtaataatatatataatatataattattataaaatattattttaatactatattaaaataattattataattgtaatatataatattataattttttttattatataaatattaaaaataataaatcttttttttatataagaaaatattaataccagcgggacactaaatgtggtccgccgatattaatgtgtcagcatgtaaatgcgcagatattaataccggcagaccccaccgctattaatccgccggtgttaatattattacctgcagaagtctgttttggccagtattgctcattaatagcgaccaattaataccggcaggtaattaccagcagatttcgccggtaataattaatacctgcagtttatgtaattaataccggtggatgtctccgccggtaatatagaaaattcttgtagtgtttttacatacaaataaatttacataaaaaaatttctataccctttaatggcttatattattttttaaaaaataagagcatagcctacatctaatttttactaaaaaattaatgatttatatcaacacatacattcacaatatcattaccatccattcacaatatatatcacacacatatataaatacataaaacccacataatatttaatatatatataatggaattgctctaataccaatcgttgattttatggtactaaatcaggtacgcagcagaagagttatttctgattatgattgtaccatattctcaagatcaccatatgtatgtatattaaactgaaagtaaatatatgaaaataacatttacttcttgaagcctattagggtatccttgatttttttttatttttttttgtatgttgtatccttggaacggtgatgaaaaaactcacaccttgatcttccagaccttccaccatacaaaaggactagtgtggggaagtagaataatagtgtatatgaagttcttgattaaatctcaacacatgagcaagaattatttccttagtgatggagagaaaaaaaaaaaaaagtttactaattaatcctttttaggctttttgaaaatttacgtacaaattctatagcttcaaaaactatatctaatttagtttatgcggtatattaaataaacccaataaaaattttatttaattaattatttaaattaattcttatttaattgtttgaataaataatataaccgaattcatttatagatatttatatcttataacagagtgaggaaatctctcaaccacttgagagaatatctcaactactttttaaatttaaatatttatctattgaattaattaattaattaacccaaaaagacgaaagcaataaggacaccctataatagtggtgcctacactgtgtctaaacatagtgtaagtggcgcctcctctgtcttggctaagataaggaatgtatcttttttcctgacaacttttgtcttttcctatttaattaatttgaaacaaaaatatttattacaaaataaataattactattttgaaaattcaaaatagatttttctaaatttccatatacaacttttatccgagcccttgaaaaaattttaaggtagtgatctggggaccatggacctataattttaagctccaataaactagattatttaataaatctcatcaaccaaataattctatttattaattccataattacttcactataaatacggaattgaacttttagtaattatagaattatatttactgagtttatactgcaatatctattgatataatcaattccagtgattagccctcctagtgtcagttcgtaattaattttgatcaaattaccgtttcaactttctaattacttctttatcctttagtatcgttaattcactattaaaattataatttagatccaatgtaaatttgtgcacaacttttcaattccaaaattagcaagagaaccaacattcgattagttaggaaagtcaggattccttaattatagatcatgttcccaacaatccacattattagattctcaaaactgaagttgtaagaaccatcttctctgaaaaattttaacgagtgaatcaaaaaaactaataacatgaacatgagttcatgattacttaagatttaggctgatctactattaatcatctttatgatatgaattagttctttatagtaaaccacatgttttataaagacatcttaattatatatcgctccatgttatatataatctctattatatacaacacattcacttagatgtcatactacatcagtaatccgaattgagattgcttgtaccaaataacgggcatcagtgaaccgcagtagcaaccattgattaaagatttcataactttaatatgttactggctgctttattcatggctaagtgatcttaattctttgtacgattcaagtcacaacctcatgtatgaataagaaatttttcgatatttatatatatatatatgattcaatattaaatattaataatttaacaatcaagtatatgtgaaaatattcaacttttatttatgattaaaaatatctttgcgagctttttagggaataaaccctaacaaatcgttctttccaagataatgaccagataggacttgattgttttccaggctgccaatagtttgattttgaggcttgaaattggaaggtctatcgggtcggggggtttccacatagttgtttaggcgctcctccgagccatactactgtcctctacaggggatataaggatctttaccccgagtatgatctcttcttagtggtgggttttccagcatgtgcccccagtttgtcgaaggaatcatcggattaggttgatagcctcccttggtcggtggttaatttttttttctattgtacacgcatggactcagcctgcttgtatccactcttggaattgacttttctactattcaaacacgtcatcacagagcatttttcttcctgattgtggtaaaggacgttaatgtgaattttgacatgtcccacaacttctctgagggtttccaaattattaatttcccctagatcaacttagggttctcccacaaatggttggctggtgcttggttcggtttctccagtatatacctagctggtatttctagtctcttgcgtgccaggagtgaacccaactagagggattatcactccaagtcttgctagtgggggaacccttggaggtagtcgcatgtttggattaggatccgtcaccattggattcccctaattggtggggacttgaacattgggatccatcaacattggattagttggttcactggattgggaccttctcgtcaaaactatcgtttgatgataaaagcttcacacatgacttaagtttaactctcaatgaaagcaccaaaatattaatctctcttttagccaataacattgagtctttaaagcgatgatattatgaataataataacaattaaataataataatgagaaataagaacacgatgaattttatagaggttcggtcccatgatagtgataatagcctactctcctttttgttgtattactttgaagattatcaagatcacaaggagccaactaagtgagtttcttaacaatcttggtgaaagcttacaagtattctgacagcataagagctcttctcaaaaatatgaatttagatccctcaacaataaaatggcttcactatttatagagaagatacaataaatattgctacccaaaataataggaaaataaataggaaactaaagcgttgaatccttgaatctctcatttgtataaaattaatcccataaatgtaaggatttgatgtggagatatttaaggtaaatatcttaaggaatatgcattgccgcattattttacgtagaagattatgctttgctagctaatggcatgttgctcgaaatattatgcacagatctaccttagatgcatgctaaagacatagacttagccaattttgagtgtaaatccatctggatagaatattgggggaaaataaactgttcaggtcttggaatgatctctatgtgtcaccttatcgagtgctatgttattctgtagaaaaattaggataacacaaataaaagttattagaaaaaacttaataaatatttaaacaaactaagatttttgtcaagaaaaaagagcttatttatatttacaaatttgtatctttaaaaataaataaaattattaaaaatccatataaattattttttgaaaaatagaaaattaaaattaaaaaatataatgtttatttaaacaaacctaaaattttggagaaaaattagatttaaacttattttcacgaaattaatttttttttttacaaagattggatttttaatgtacttttttcacgtctaaatatgtttttaaataaaaaataattaatctcttaaatcatttaatgactttcaaaattttgcttttaattttcttattaatcattcaaaatatttttttccttaaatttgaattaatttttaagaattataaatatatatatattgatttttttattatgtttagatgggatacgatttgataattaaagttcaggggagaaaatattaatttatatgacacattacttttaacagaaaaataggataggtctaatagaatgactaaatttatataaatgtaaaatttcatgaaaaaaatgttaaccctttgtatatttttgatgagcacaatatgatagtttcataagttagaaagaaaaaaatattaattattcttttttttaacacacaattgataatgacaatatatatcagcgtgtacaataaaatatgtgcatcgtgtcatgtcatatcaacgtatttaatattttattgtaacgaaagtcccaatagtactaaatgttaaagttgatagggtatttttaacaccgctaataatttaatactaggtaggtcatcttctcccacctcctttaattttttagaagataaatttatatataatttttaatattttatagttttaccacataaaaatactatatttgtatttatattcttatctatgtcttattttttccctatgtaatttatatgttttttatctcacatttttttttatttgtatcccaatcaaatttgtatttttttttaatctcacatatttttatttgtatctccataaattttatatttttttaataaaattttattaatactctttataggaaaaaataatacccccactaaatcatttggctggctctgctactgaattcgtggggcataatcgtattagtgacaaaatactttactattcatcattttaaagttccttcaaaaaagagataatttgaaaaaaaaaaaaaacaaaaaaacaaaaaataaaaaaaaaaatttacaaaaatacggtttgtatagaatttgaaacattttatatgatttttatggttttatttacagaaaatacagacttttgatgtatttttatgttatacttttgttaatttgttgtttattttgttatttgcatgttattttctgttgttattttaatgttgtttagatgttattttcctgttacttttacgtagttttcttgttatttttgtgttgttttataaaacatcgtaaaaatatataaaaaaaatctttaaacgtaaaaatataaaatctcttaaaaaaaaatagtactttgcctaattaatacttaaaaaatcaacattttcccatacaaattactcatattaataatttttctatatttaaatttatattattacatttaaaaactagttacaggaaaagacaagaaaaataaatatcattataaatataggaacatttctaacgattccataaaaattagaggaagttagaaattttacgagtttttatacttttttgcgaaaaatatgaatttttttttaaaaaaaaagttattttatgagaaaattaaagaagaaattaaaaaatatgaaacaatcagataagagtaattatggtaatcagagcgtaaccaattaccataaggagataattaaataccttatattattttatatgtatatatattttaacttttttacaaaattttcctaagaaattatattttataaacttatactttaaaaactataaaaatgaaaggctaattaggatttttgcccttgaactttgacatgtaccaaattatgctccctgaactttt

SEQ ID NO: 41082 - DNA, 1390 bp, Cannabis sativa
cgatctggagatcaagagatggagaagatgaaaaggcaaaggaaaagaaaaaaaaaaaaggaaaaagaaaaaaatatataattttttttagatttttattttattttttaaaattaaaaaaaaaactaaataagaaattgtttttttttctatttacaatttttatatttttttttatattttttacatagattaataaaattgtgtcatatgtacactgtatctacgtagatatacacgttaaaagtctaacatgacacttaactcctaaaatggatggaaattgtaaagtgctaatggtttcctagatttaggggttttgccactaaaattttagttttggggttaagtgcaagcaaagtaaaagtattaggggtttcgccgcaattaaccctatatatgatcagacatttattttttttattaattttattaagaaaaaaattaaatatttgtcattgcagaattaattttattgttttgatatgctagtttaatatatattttttaatttatataaaaaaagtgtcaattgaaggttaatatatataaaatatattggtaaataaatatcgaaaacatatatattaggtttaattataaataagtattatattttaatttataaataggatgtaattttttttatttttttaaggaaaatatttgtcattgcagaattaattttttaattctgatatgctagtttaatattttttgtaatttatatgaaaaaagagtatacaattgaaggttaatatatataaaatatattggtaaaaaaataccgaaaatatacattaggtataatttattataaataagtattatattttaatttatatatgtgatgtaatttttttttttaaggaaaatgggatgtaattaacttcgacgtgtgtataaacttttattgaatacatacaaattaatttattccataccaaaacactatttattattatctaataaagagaatactaaggagttccacacatttttctatagaaggttccacatatatattttttttacagaagtttcatacattttgatttaataaataatattgaaaattattagtgacttataacgtaccacatcagtttttttttttttttttggatacctaataacaatacttgcaattacactataattgatagaactcaaaatctcaatagatatttttataaactattttgtaaaagaaaatatttattttcatattagtgtaaaaaacaaaagtcttataaaagtatttttagaagtaatagtgtgattactattagctagtgtatttactatatctaacaaatacacattagagtaattagacaatatttaaaatatattgtaccgatgtcaaataataatggcttatgaattc

SEQ ID NO: 41083 - DNA, 1386 bp, Cannabis sativa
atagaggttccccaaaattttgcggttacgtccttttcgagctcacctcgttccactatgattcttcaatgttcaagagttaccaaagcatggattccaactcacaaaggttagtggtaatccgaatatatatatattacaatgattttctcttatttttcctctctgtttttcctttctattcacagtactaactattgtgtttttcctcttctttgatgcatgaacaacactccactgagttgaatatccgaacccaagtcccaggattccaaggatacccactgtatacctccttcaactcaatctctgtctgtcttttttctctgaaaaataaccccttgattttgttgttcagctctcatttttgtttttggatctttcagtttttactgatctgatattgttgattgttctcctctagtctgagttatattttacattatatatgttgtagtgaaatacagaggaaagggttagttaaaaagtgtaacaagctttttaactaacttgctgatctgtcctaggtatttagaggccaaaggccacctagtattttttttttactgccttgtaaactctgagtaaatgttctagttttacagtgtagaggtaatatggggtttatttcaacaagtatttttattgcttttataaatgataattaacctatatcttcgattatatataaatatataaaaaataaatatcctcaaaaccttaagaaaaaaaaatctaagacctatgctatcgattaggcctacatggggagatttatatcttaagttatttggtaataactaaagtaataggcagtgacggatccagaatttttgatctgtggggctttaattgttatgaaaatatttattatttactttacattaaaattattactattttgtgggggctttctactattttgttgtataattattgaactaaatagaagatatttaattttttttcacactaacttttttttagtgggggctatagcccccacaatcttattagtgtgtccgtccctggtcataggtctccactagtaggtttatattttcagcaattactaaacaattaaagatataaagtttatagttttttagagaaaaggaaaacctttcactttctctcactgatactcgtatttctcagtttaaacccccataaccacttgttgaccactacatttgacaactacttaatcttatttttttgaaaattaattatgcacaaagaataatatttttacgttgttcaagtgttaattaacctttgtccacgagtctcttgaatttatctgtgtaatattgttcttacaatggaatttcctttttatacaaaattctttcgctctccatttcctccattccttccctattt

SEQ ID NO: 41084 - DNA, 1462 bp, Cannabis sativa
ctttaaacatcatatttattgatatctcatggctctttctttttatcattattatttggagaattttcgtttttatggattttaaggtacaattttgtaaaattatgtttttttgttttattttccaaaaaaaattatgggaatttttttttaaaagttggaaaatatggaacaacaaggataaggtcttacctaaaggaggtaattatttatcgctatgattatcctgaaaataatatttatttttaatttcttccataaaataatttttttttttcaataaatagtataaaaactcgtaaaatttataattttttttttatttttttttgaaatttttatagttttttaaaaaataatcaagagaaagaagaaaataatgcaattataatttataacagctacctaccttatgcatctacgaatagaaactaagagtatctctaatgaagtgttaaagatgccatctatatgtatatttgagctcatctttattaaattgaaattcaatagtaatataaatttttctaaatttaacacatactaaaagtgttaaaattagcacaaattaaacaaggactaaattatacaccacaataaatatcatttttattttactattttttcacttattaatataattagtaacttgttatattttatttatatatttaatagggtttttatatacttttacgttatgtttgatgggagagagccaggcccgaccctgggcataggcgggctaggcctgtgcctaaggcccacccagcccaggggcccaaattttttttttcttttttaaaattatatattttttttaccgattttgaaaaataccacattttttctaacgtaagggcccaaatttttttttttcctatggcccaccttgtttcagggccggccctggagagagcaagagagtatgatggattgagagattacagaggatgaggagtaagggggatggagaaaattgttgatgtcctttgtggtgtttagtattaggtgtaaggtgggaaaaatgaagaaaaaaacaattagtaaattcatccttctgaacataaaaatttatcatttttaaggataattattgtatcttgcaaattgtattttgtattttacaattcttctaaattttgagggattaaatttttaaagtttggagggagaatatctcccttcatctctccctcttgccaaacaagtgatttagtctctctatccctcctaccaaacatagggttaataaaaataatgttgttaattttttttttacatatttttttatcaaaacgaatgctaattttatgaaaaatactataagatatcagtggtgtgtcatgacccaaaatagtacttacaaatacatatattattaagcaaaatatctatagatgatgtaacgtccccgcatcaagcctccattaggtccttacacccacggaatgatggctct

SEQ ID NO: 41085 - DNA, 1504 bp, Cannabis sativa
atggctgtaaacatattttggtcagctttgtaattaactgccatgatgtaattataaatagtggcaaacaatctcaaaaaatggacgaaaagactcttatgaaagaggccctgaaaaaaatattcagaaatctggataagattggctcgtagactatgcagaattttaactgcaaaaccacgtaaaaaaccctatgttcatattttatttttctgtgttgaattatcatcgtgaggctcaaatttgattaaaaaaaatctgcattaacagtttggtgctttcattgagagcctctgtgaaaaagcttagaaaaagcccttccttcattaaaagaaaaacctttccctttatggctgaaaatccagagaatattaacaccccacatgaggaaactaaccattgttatggaaaagagcacatgagctctagaagatctaccaatccgcagtccagaaggaccacccgttctagaagggcacaacctaaggatggccccagtgctcggaccacacgtccccggagaactcaacctgacattggtcctagtacgcggacaacgcgctcgaggagaactcagcgtgggaatggtcagaatctcgggacgagggatgaagacctcaaccgtggaggtgcccaatctgttggagaaagaacttacgtaaagccaccgcctgagacgccgtctggaagaggcgcaacgtcaaaacactgagttagatgtgaggcagcctcagccagggcggtgtagggaacgaacgctcaaaattaacttgaacttggagtgagaagaccacgaggcagacctcgttgctctcaaagcaggagataggaaaaggcccaggaagaacaacctggggaaaacgagacaccccctaaaaatcaggatgaacaaccagaaaggagacaactggaaactaatgaacgagaaatccctcatgaaaatgaggaggatcttggaactcaactgggagaacgaagatcacctgcttggaatcatcaacgttctacccaaacccatagagcgaggactcgtacgtaccttgatggggaaatacaaaaaactgctgtcgggaggaaagaacagagcgtaaagaaccaagtgtgacttcgaggcgatccatgacccatagctgatcaactcgaagaggagaaagtactcaacgagctaatgatcgagagagtatgggaaccagtaaatctgtgagccacttaaagacaaagtctatgagtaggacgcggtctatgagtaagacgagatctgccagcagttactcccaacaagatctgggagatcacttgaattggaagaaacctgaccttcgccaatagcttggtccaaagcaagaggatacaatccaattgcggataaacaagctggatgacaagtttagtagagatcaagtgagggaattagggaaatcatctggatacgactctgacgaggagcttgagccgtatcacccagatattatgaatacctattttcctttgggattcaaaaacc

SEQ ID NO: 41086 - DNA, 1313 bp, Cannabis sativa
tattattttattagattagtaactattataatacataaagcaaaaaaaaaaaaacttaataaattaatatatatgtattacgatcggtttcagttttttcagggtttggttctaacggtgtttggtagatcggtttatacgaattttttttttagtttttttaaattttatgcacaaccctacttttagcatttctttagaatcactgtatatatttgtgtgggtttaggtagggctgttaattaaaatgctcaaattgttcacactgtaaaaaaaaatacagtttaaaattctttgcggtgcggtttcagtttgaatttttcttaaaccgcacggtgcagtttgcggtttttgaattgttaatatgcggttcaaaccgcaccacaccgcatattataaaaatactaatttttatatgtatttaggtccaatatgtgaagacccagcccaaagtccactagttattgtattattgaaacttaaaactttttttcatatttatttccaagctttatgatatttttgacaagtattgcttaaactttgttatatttgtgataatttaattatttggtaatagtattgtaaaaaaaaaatatttagtgatagtccaaactgcagaaactgcactataccgccctatttttacagtgcggtttctgcaattttttagttttacagtgcgaatgcactttaaaaaattagaaaaaccacatatgtaaattaatttaaaaaaataataaaaaaccgtaccacccgcacagtaaaccatcctaagtttaggttgttacttaatagttaaaattaaataacaagttgaaaatttaatcgcaattatcatttatcagctcttttgttcatttcccgctcttcatcccaaactcaaacccgaaccccaatccgccggagcagagtagacaaagatcacttcacgcaaaccaaaagctaccccaaaattcccgtaagtatttctctttctcttcttaattttctcggcaaccaaacagacacatgcaatgcaacgaactctgacttattgatttgattttcttcaccaatatattgtttcgttatgctctttaaactgcagtgtttgaagctcagctgttactaatcccgaaaatgggagatctttcgaaaaatctcgacagccataagtcgatttcttactgcgatgatatgattagggttttgaaggataagagggaaattgatgtcttggtgcagtcctttgataatgtgaagaccttgcgatcttccagcctcgctgatttcaatgaggttcaaaacatgcttcaaggtctatttttttt

SEQ ID NO: 41087 - DNA, 1412 bp, Cannabis sativa
  modified_base (1051)..(1077): a, c, t, g, unknown or other
  modified_base (1195)..(1198): a, c, t, g, unknown or other
actatgaacaagatgcagatgccatagataatattatatggttgtgttcttatgatgacttgggtttcgttacaacaaagagttcttagaatagtccaagtgggttctggtaacagaatacaaaactcaaaatccatacattaacatacagttcggatccattaacagaaaatgaatattaaactttctgaaggttgtgctgtaatgtccaatgtattctggaaactgaaattcaaaatttcatatttggaatctaaaattaaagtcaaagacctaaacttataccaaatatttcttgagttattattctttcttagaccatcactactaatctaactcgaagtttaagtgcctttagtaagcgtatataagtagaagattctctaagatcgaggatttatatcattttaggatagaatgtctggaatatagtgatctgcgccattcaatttcatagtagaaaatagagtggcatcataaacaaatgatttataatccttcttacccaatgatatactatctaagaaatttcttaatgaaaaaactaaaggaaaaactaaaggataatttcgattaaaataagaatccaaagatgtcctgcttaggagagcgtcaaagttatccttattttataaatctcttcattatttcatattgtaaacactagtctaagtcgtcatctttggatatacaactagatgttgcaattacaaatacttatctgtcgagatctaacactattatgtttgtctaatggatgataatcctttgggatttgtctgattaaaacaacaaattaagttagaccaacaatgaagactcgaaatttttactacaaaattaataagagaaaactacatgaaggttcaatataaattcatacacaattcaaaaattattaagcctttagcaagtaacaaagatatgtgaaaatagaaaaactatcatatcttaaataatttttaaggtttccaacaaacttatacagtgtcctggtaggcgagagtcaaagatagcatttattggatagagtagtcaactcatctaaaannnnnnnnnnnnnnnnnnnnnnnnnnncgatcaaaataagaatccaatgttatctcggtaggtgagagtcaaggtttttcttattttattagcttccactactatttcatactttgtaaaattatctctaagtagtcaccgtagnnnngagtctaatagaaacgaaaacttacaaaatacttatcttttgagatctttacgttgttaaatgtccaatataagaccatgcatatgggggacgaagtctagcgtctcgaagtcccattaaaatattaatcatgtaagaccaataatatagatcgaatgtccttataactaaagctcattattttaagaaattgtattttcatttgaaacttatt

SEQ ID NO: 41088 - DNA, 2427 bp, Cannabis sativa
tgtctatgtgagaaaggcaaaaggcttagtgttcttgctgctatatgttgatgatatgttaatagctagcaaagataagaatgaatagacaagatcaagaagctattaagtaaagaatttgacatgaaggatctaagggctgcaaagaaaatccttgggattgagattgatagaaacagagaacaaagatgcctaaagctatcccagcatagctatattgaaaagattctaaggaaattcaatttcttggattgcaaaccagtaagcacccctattggcctgcagtttagactacatagctcccaatctccttgcactgatgaagatacaaaatacatggaaaatataacatattcaaatgtggtaggcagcataatgtatctaatggtatgctcgaggcctgatctcagtcatgttgtaagtgctgtcagcaggttcatgggaaatccaggcactgaacattggagtgctgtgaagtggttactaagatacttaaggggaacaatggatataggcttgatctatggtccaaacacatctaatactcaaatagaagggcttgtagactcagattatgcaggagatttagactcaagaaagtcacaaaccagttttgtgttcagaatgaataacagcacaatcagttggaaggctaacctacaaactgtagtagctctatcaacaaccgaagcagaatacattgcttgcactgaagctgtaaaagaagcactctggttcaagggaatcaccagggagcttggtgttgaccaaagcactgttgtcattcactgtgacagtcagagtgcactccatttaagcaagaatcaggtcttccatgagaggaccaaacacatagatgtgagataccatttcattcgagacacaatagctgaaggaaagatcaagctccagaagatttcaacgcatgaaaatccctctgatatgcttaccaaaacacttcccacagcaaaattaaagcattgtttaaacttactacaaatttctgcctagcaagctggtttttgttttctgttacttataagtctgtaaaattttgtttaagagtgtgtaatcttttgattctgtacattaggttcctaggtggagatttgtgaaatgttggttagttaccaaatgtacatgtgtcaagttagttggccctagttcggtatggtaggtaagttaattatcaactaactcttagctattcctaagacatgtatatataaatgtctaactagtgctaaatcaatgttgtaacaattcattcacactcaaatcaataaaatacatttttctgaaactttgtcttatgtttaatggccaatcggctaatgccctagtgagttaatcttgagtgttttgagagagatcaatgcaaggctttgcataacagtagcgattcaagctgtgtaccactttggagtggtatgccactgacattctctattggattactctctacttgtgaaggcatagtgtttgaacattgagtttcatattcacttgtagatgtttcccttgactctgcaagattctctaacttttgtagagattgttgaaggctttgcatagtttgatgactgtattgctgaagctgtaaggtattagctgctaacatttcaatcacctcagcagcagttggcttttcactatatggtgcaacatgaataggttgttgaaactatgcattattttgttgcattcgagtagtagaagcctcaaaagtgttaagcatatcagtaagagaatgagcttgatcttgtggtgctacatgaggatagtaagaagttggttgaacatattgattgatcccactgtaggaagtgatagaataatttccccattgttgattgtatgtgtaagtatcgtagtagagatcatattgatacacttgtggcggggtacaatgaagatcatagtattgttgattgtatatcgccatgtttctaaaggaagatcttaaaattaaaactacaactagaagaacaaattagtaacaaaaattaaatatgaataataaaacaaaaaaaaatctaaaaaaaattctaaattttttctctaaatatctatcttttattatgaaatttttttttaaaataaaattaaaaatactaaaaattaaatatgaataataaaataaaacaatagtccccgacaacggtgccaaaattttggtgcgtgtcgtaagccacaacaaatttactatttttttaattccaatacttccaattatattttagtataatcgtaagtaagtgtgtcgagattcccacggactatgtttatttaattattcacaatttagtaacaagaattataaaaaatgggggttgggatgattagaataaaatagcaataataaaaagaaaaagaaaacaattttaaagatagactacgatatgagaaattagttaaaggttattc

SEQ ID NO: 41089 - DNA, 1997 bp, Cannabis sativa
gtcagattttgtcagactaaaaaagtaacagcaacacacaaaaagtgtcactatattttttttttatatactttattgttatttttggagatatagggacccacaacaagggccactatctgaaatgttattctaaaaaaataatatttaatttttttaatttaaattttatatattataaataattttaattaacttattaatgcaacaattatatactaaatcttaaataggaatattatttagaataaaacataaactgaatatcttgtattgaaataaaaaatatttctatttttttcctttggcagattagttacgagaggcataaaaaaatttaaaatctaaaacttcaattgcttctctttttgcaggttaatttcatgacaaaaaaaaagttaaaaaccaaaacttcaatggtgaattgtgataatgttctctaaaaatcaatcaaatgggtttgaacactaatgccaaacaatgtacatagataaaaaattctaaagcaaatctgagaatagataacaaaaaacaaagatgaagattaaaccaaaacctaataaatctgaacaaaatcaaatcaaatccaagcccagcccagcccagcctatgttcgatcgaatctgcgatccccactaagccagccagccagcaacgaagcccgaaccccatatctaacccagcgaagcaagatgcaaactccaaactcgacatcgcaagtccaattgcacaaagagaacctcaaacacctgcaaagaaaatggaagtagcagatcaaaggtcttttgggctatcgcctgttaccaatatggatcttccgaaggatgtcagaggagatggcaaagaagcccgtcgttggactatttgggcgatgtcagtgggtgatgaagtccggtgaggcagaatatcacttggggtttcagtccgtgtgtcgtccggcgtcgatgggccttgggagggtagggatggtggtcgttgcttcgtcatcttggaggtggttcgcgcacaggaggtcatcagatttcaaaagcaaagagagggagaagaagaagaggcatgtttggctgggttgtttaggctaagtgatagaaatatgaaaccctaaatgtgaagttgaagagataaagaaataggggtttgttgttaaaaaaaaaaaaaagaaataggatttttttaattaattgaggatactagctgatttttagtataacaattaatctttttctttttccaatattgtttaataaatgcaataaccgaaccagctgtataatatatatttttttattattaaaagtaaaattattgttgtatttttttttaaaaaaaaaaaattatgatatagtgacatgatatagtgacgcaccaagtgggtggggacacattaacctagtcacgcttggtgtgtcactatatgccaatatttttcaaattaataaaaattataaaaatttagatttgatcttttagtgacacttcatatttttagtgacacacattacaggtgactaacactgaatgtttaaagtcaacttctgcatgtcactaaaaatcactcctaactcattagtgacgcgcacatttatgtgtgtcactaaataatgtcactaaaagcccaaattgtagtagtgaatcatcaaggtaacatttttcgtaagtccattagtcatttttttaactgagtcgttaatcatttaaaagtaccacatgttgaaattttattggtccaaattatatttcaattaaaataattttaaaaaataaaatatattatttaaaaatcataaaaaaaattaatttttttatcttttctttttcttttttatttcctttccattttctctttcctcttcttcttcgtgtttttctagctgcctagaaaaatcaaaaacccaaacactgacatctctcccgatttcaaccaaacccctctgttgggattttatgccttaagtaaaacccattacaatataatctgatttgttatcaataagaga

SEQ ID NO: 41090 - DNA, 1006 bp, Cannabis sativa
tcaattgttgaaggagattaaagtatagatgatgatagtgatgagaattatgctagcatttagaaacttatgtttgctgtcaaaagagagcccaactttaattctgctttttcagaatatggacatgctatcttaggtgtgtaaggtattattaattctctgatgttcatttcattgattgttgacactaaattgcccaaacattagcactttctttaatttggtaggagaagaatttccattaaaaatcaatagaaataaaagagatcttgaattagagttaataagagtattccttgttgtagtgatagaaatgattagattttggaaataaagtgtcaatttatatagagttaatcaatatattaaattaatgagatatcactcagaattctccaaactctctttctgccactatttcagtagttggaaatccttccagtaaatctctctcttttgaaaggatatgctttagtattttatttctttgcgttatgtataaatatataaaagtcagagattaccatgcaataaatattttagtactttcataaatactactatatttatcatgctaatactcattattgaagtgatttatttttactttgtttcttaaagaattattttctaaatttctatgatttcaatttaattataaaccacctaatataaaattatgtatacgtgccttgcacgtaatttttttctagtatatatatataaaggagaagtatgagacggtgacataacactctactttaaagttatttttgtatcctctccttaattctctcattttttttaatttttaattctataaaaaatacaaaaatatctccataaaacttaaattatattaataataatataatattaatcctaaacttatatatcaatctatatacagtagaacccctatttaagaatactctattcaagaataacttttaatttgttataaaaaaaattaagtcccaatttaggccagttataaataagaata

SEQ ID NO: 41091 - DNA, 861 bp, Cannabis sativa
gattttatgaggtattatttgttatgaggttatttattgtagaactagttttgtttttatttatgtttcagttttttaggaattgatttcccttttattttttaattgtaatcggtttgaattattgcgtgttacttatttgtattcattatgttatttaaccggttctattctattttagttataatataacataaccggctcggctttgagttatttcgtattattagtttttattcattataacactgtaatagaaccgattctattttaattataagtggtttgagttattttatgttatttattatattacagaaccaattatattttaattttaactggtttgagttattagtttttattcatagatcgaaccggctatatttttagttaaatctgagacatctacttttggtgactttccagtaacttttctagcgacggtgactttttttggcgacttttccggtaccgatgacttttctggtaaaatttatttttgttttataaatatggaatttttatatttattacaaaaatatggtataaaaaaacccttataaaaaaaacccttataaatataaaaaataaaataaaataaaaaaccataaccctatgatattatttatttatttatgtcatatcaaaataaactatactctcaattcgaaaattccaatatttatgaaaattgaaaaacatagaggatcgacccatttacacttacagagcctctatagtttagaccaagattagagttcataatatttttttaggtaagttgaaaaataccatttttattaatcagttaatcaaatttacctctaattttatatttaattgaaacatacctctttt

SEQ ID NO: 41092 - DNA, 2085 bp, Cannabis sativa
  modified_base (44)..(44): a, c, t, g, unknown or other
ctatgaagaagaagttagacgctgccaaaggcagatgggttgangagctacctcaggtactctgggcccacaaaactaccgagaaaacagaatttattctgatctaatcaaaaagtttttaattaaacccacttttcataaactaatagaatagttagtaataagttcataaaagcacacgcacgtggcgtccctgcgaatcggggcgttacattatatatctgtgttaatctaaatcaatagacacttatattgagttgtctcaatacgactcaaaatttgttttcacaactatttggaaatatgtcctctagtaatttaaaacatattatgttaactcatacaaagcacgatctaacttatcacctcaagagtaaaaaacaataattaaatatgaaaaatataataataacagtacggaaaatataatatataaataaatgggatcaaacaatagtactatctcttatacataaatatatataaataaatatttaaaaagtctttgtttatgttattgttaatacataaataaattacaaccaaacaaaaaattataattatttgaaagtactctatatgtaccttacttagaatagtttttgatctcttcagttcattcactaattatcattgtataacaataaacaatacaaataaagcatgtcactatttttgaaaaaaattagtcaacttttcctaaattataaataactaagaaaatttaatgaatatataacttgatcacatacaactcttaataaaaattaaaataaagaaaaacagacttgtgcgtaagtatttgtagctgtaaaaattttcttgatgatttgtgaaatataaagaaaatttgatataatttacaaatacatataataataaaaacataatgatgagaatatgattaattattattaattatcttatgtaacactctcccatattttatgcaagaaggatttagtgtgtgaactaccttaataactctaactgtactccaacaaaaagtttgatccacctctctattctttagcaagaaaatacattaggaagaaaatatctaaatgtcccatctcatggtccaactctaaaattagttttaaattctgaattcattttcataatcttctcacaaaaattacttgaatagagaaatgaaaaaaatagcatgacaaatgtactattacgaactaccggagaattaaaatatataccaataatttcctattattatataaaaatcagtatcagtaaagtaacaggaataagagaacatatactactaagaaatgtgagaaagtttaaaaattacctcattaacgaattcaacagggtttgtttcactaagatttgggaacctagtattagagtgtgtaggaccattccaattaattctatttgtgaatgaaaatattaagttcataactttaaaaagatagaaaatcatctcttctaatcaaattttaatatttaaagtacatatacaaaaacttattaaagagtactcaccatgcttaacaaaaatatgttgggatactgtataatagggaataaaaacttttatgtctcgcgtttggttggagaaaataaaaatatagaaataggaatgggaataaaaaaatgaaatcaaatttaaaatacatatatatcttgtaatggaatagtctttaattttatttcaaaattgtagaatgatattccaatactttaaactacaatcgaacaaatagatagaatacaaattatttcattttgccacctaaatttcttttacattctcagttaccagcatatataagaagaatcacatgtatgtagttgtaccaatgaaatgattagttcaatcaaagcatcaataatattaagttgtaggacattatcaatatatgaaactacaatagaggccttgcagggccgtctcaaatatttcggaagtcatgttctaattttaaaaaataggcccctaacaaaaaaaaatatattttgcaaataatattttaaatattatcatattacgaaactatattttacataatgaaacacttaaaaattcaaaaatttttactaaacttgttattaattcca

SEQ ID NO: 41093 - DNA, 1426 bp, Cannabis sativa
tttattgtcctactttgtcactgattcaagaacttgggatgttaggaaattgcactcttgttttgataatgcaatgattaatgatattcttgaggttcctgtttcaggatgttatggtcatgatgttttgatttggaaaagggaaagttctggattatttactgttaagtcagcttatcatttggctttctctcaccaggatctcccctcttcctcttctttctctggttctaaaaagttctggtctaaaatttggtcctctattacccccttaaagttaaactttttgtatggagaatgttgtctcatgccatccctgtagcttcatctctctttaaaagatgtgtgattgattcacccttgtgtcctatttgtaacttggagattgagacgaccaagcatactctgctagattgctccagattcaggaaagcttggcgatattccaggtttgctacttattataataattataaacacttaaatattgatgagttttttattggtcttgttcaaagtctggataaagataatattggtattctgttttgtttcctatgggctttatggaatcaaaggaataaattttttcataatcaatctaccattcccccaagggaagtgtatgattagagtctcaactacttttttaagtttttagatgtgcagcaggttcatgcaataggtcctaaatcttgatatccctacagcatcagtgcagccaacaacttcaggtagcttttgaattttcacagatgcagccactgattcatataatcgaaaacacagtattggagtggtggttatggatgcttgtaatagggttacaacaggattttcaaccccttttgctggtatagtgccgcctgctgttgctgaagctaagaccatctaccaggccatctgatgggctcaattgattaatcttcctatggatgtgcttctgactgattgtaaatcaataatggataagcttgcttcttgtaattggaataataatgttttggatgatgtcctaattaatgttaagaacttgttatctttcagtccaagactagctatttgtcatgttcctagagattgtaatgtgattactcataagatagctaagctaggtcttggattagataatgagttagtttggaatggttctttaccttctttgtaatttgttgctttgtatagttatttttttttttttaaaaaaaagaatgagtatttttttttaaatgaatgaatgagttaattgatgtcataaatgtatatatttacatatatatatatataaataatttgatagataaatgactgtcgttagtactatagtttgaaaaatgagtgagagaatttctcaaaataagaaaaataaattgaaaagcagtgactagtgagtgagaaaaggaaaaagaaagttaaaagtgataat

SEQ ID NO: 41094 - DNA, 1017 bp, Cannabis sativa
  modified_base (43)..(46): a, c, t, g, unknown or other
gagaagcccaaacccccaaaggccctctctctctctctctctnnnnctctctctctctctctcattagagatctgcctacttgatcaatgttttgtaaccttatagatagctatatcagatcccacctatagtgatctaaatagtattatctctaggtatcaatacagctaaaagagaagtaggtcattacccactaactaagggggtcgaacctctataaaaatcattgtcttatttactttattgttcttgttgtgtaacatgtggcaaacatcagattcattcgacttcgatgtcggttggccactttttgaggtcaatagattggtgctttcatcgagagtgagttgatattatatctaatcaaatgccatggttaacacgagaagaactctagatgcatcatctgcatctttgggtcttcctcaagaaccatagactgtaaatcttgatgtcaacattctagccacgactggaattcccatgaacactatagatctcgtcaatcttgccatctcaacaggcatcacaaatctggccattacagctggccaggatgttataaacatccctgtgatctgaacaaccggcccttagctccaagggaggaccctccccaggtgcctcccattgaaggaaggacccttgggaaacagcccccatgaacaacaactagatctcatctctggtattatgtaagagagacaagaccaggaattggcaagccccacgtggacttgggagaagatctcgagttagctagacttagagaggtcatctgccaagctgacctaactgaagaaccacatgctattgattgcgatgtattcacttagcagagatgcaaattccttaaagaaccacatgcttctaattgcaatgtattcactcagcaaacacataaattcctgagatggatggatgactaagagtacatcctttgatctcactaggcagagctggattgccacaatagagagaccagtgaccgaataaggtggttcaatcaaagaacc

SEQ ID NO: 41095 - DNA, 1161 bp, Cannabis sativa
aatgtcaggatatgtacccggagctcagctctcgggagctatgccccagaccacttctcaaatgagcggcataccattctccgctacaccaggatataatcagagcctagccttggctcccgcatcatcacattttgggaaccccgtaaacaacccctcggggatgggtggcaagctccatctcactccgctcctaccacaagcccgacaggacatcctcagagctcccagagcaagaggtcctcaaagggtagcaaccggacggaagataaacgacaacgaaggggagacacccctcaatatactcaatacacggagctcacggacacacaagagcaggtatattttgccacaaggaaaaatacacattactggaatactcctcccctgtatagagacaattcccgaagagatcctagcaagagatgtgaataccacaacgacattcgccacagtaccaatgaatgccaaaacttgaaggacgagatcgaaaacttgatttgattgggtcatttatattaatggattaagaactggctaccccatctcaacccagttccagcaggtggcccgttgcctcaaggggcaccagggggtgcacccggagcgccaacacctgttgtacctcccgggagagcaatccctcaacaggtccctgggttcccaccaagacccaatgggagagtggccatgatctccggtgggtgccatattgggggaaccaccagaaaagaattaaagcgctatgctagagccataaaacatgatgaagtgtgggaagtcacccagcttccagcacaaaggccccgacttatggaccagcccattactttcatggaagaggatgcgaatctggtgcgcttccttcaccatgaccctttggtcatagagactcatatcgccaataaaattgtggcaaggatattggtcgataatgggagttctgtgaacttgttgttcaaagatcacagccataggcctcacggacaaggatttgtcgcccagcggctcctagctcataagattcaatgggaccacccttatcctaatagggaaattgagactgccagtcaccctgtgcctagataccactcacaatacttttaagtacaacaccttcgtggtggtagattgcccaactgcatacaacgccatccttgg

SEQ ID NO: 41096 - DNA, 968 bp, Cannabis sativa
  modified_base (37)..(46): a, c, t, g, unknown or other
ccgaaatatacattaaataataaaatatttttgtcannnnnnnnnnccaaaaatggaattaacaaatataattaaaaaattagatggagaagctcattatcattcactatatttagagaattatttagtaaaattacttcatatacaatttttatttgagtaatttacatcgaaaatacctaagttttatatattgtagcagttaaatacctaagttatttttttggtgatgaaaataccttctgttacatttttgttgcagccgtaggtaccttggcgttaactgccacataaattaccaattgtcaacatcttattagcccctcattaaaattaatccacatcattaacattaagccacgtcactcaatattattaattttaaaataatattaaaattatataaactaattaaatttaaatttaaataaaagttgtataaaataataattaataaaaaaaaaatagaaccctaaagacattcattctcccgtactctctcttgtttgctttcttctttgtgcctcctttgtgtccagaccggcggagctcactccggccgccagtggtccaaacgaaccgcgaaatcctgatccccatgcccataaacctgcaagcccagtctcctccctccctcgcatcccctttcgatttctctcttgctggcattaatgaagatctgctactgagagcaagttcgacgacggtctcctctcctcgattcctccctctcgatttctctatttatggcattaatgaagatctgcgactaggtaagcttcaacggagatctatgggtgacgaagacgaagacgaagatgatgaagtgggtgatgacgctttcagatctggtgcaagcattttttatttaaaaataatagttctgtgaaggatgaataatgacttgaaaaaattggtttgccttaaatcctttgtttattttcaagtttgagagagagagagagaga

SEQ ID NO: 41097 - DNA, 1823 bp, Cannabis sativa
  modified_base (1550)..(1566): a, c, t, g, unknown or other
ttcggggaaaaattgctaattagctaataataataataagatatgcttattcactaagttttttcttattagattttgtgttttctcttttttaatgctccttattagtgcaagctataaagataatgaactgactctctaattttaatttttattttagattatttattctgtggttgatttagttagaagtaatttcttttaaacaatattaatctttcacatattttaacaaataattatacgtgtaatttatataacaaacttacgataataataataatactaataataataataattcaattaaataatgtgatttaatattttaacatattaagattataatttttagtatttttttatagtacattaacatattaattaattaataattttttaatatataatataaattttatttttacaacataaataaaaagtttttaaacaatcgcgcgaggcgcggtatcattacctagttcaatataaaataaaacattaactaaatttataccaaaataaataacatattttttattatttttttattatttataaatagaccgatctgtggcctaaggcgtgctaagagggcccacctaaacccaaagcctaaaatttatttcaaatatatatgagcttaaagaaagaaggttatttatgtattgttttcattttattttatgtgggaactaggaaattaagtcgcgcttcgcgtgttattgttcaacttttataattttttattatataaatatattatacttgttgagtgatataatttaaaatatagtattttgatatgtgtaagtaatagaactaaaattagaaacataatatttttaaaatatatagaaagatgacactttgtgataaatattaaaaatagtagaattaacaaagaaattgcatgtttaattataaaagaataaatgaaaaaaaaaaactatttttaaatttaataaattgggtttgtaactgatgatgtagttctttttaaaaaaactatttagacctgatttttctttaatagaaagaaacaatataactactatttatgaaagtttttacattttattttatagatgacaactgtaaaaaggggcgtcacaatattatctatttttaaaaattaaagaaatgagggatttatataaaaatgttaatgataaaattggtctctataaagattaattttaataaatattatgtggaggtgaaatatatgccttaaattataatgataaaaagggaggtcacgattcatatgactaattgcttctatatggaaatgtttatttatcttacgattttgcaataattaaaatgataaataccgtatgaagttggttgtgcaatcgtgtaatcgttataattatatcgtgtcccgtacaatcattaaaatcattaaaaaattaaattaatttataattatttttttattttagaaattcatatattaagtaatttttttattaaatgagtatataaatatattagataaatatataaagttaatttgataactcaaaataataataataatnnnnnnnnnnnnnnnnntaataataataataataaagattataattaattgggcaatatcaactgataaatcagccatgtatatttagacaaatcgaaatgaatgtaagattactttatttataatttagaagtatactaattatgtattttttttaatccatgtgggattttacttacaaaaaaaaaagttactaagaagccatatttctcaatatttataaaataaaatataacgatacactgagtccaattgtaattaaatatttttactc

SEQ ID NO: 41098 - DNA, 1783 bp, Cannabis sativa
aaagtagactacattagtggagaggattgcactaattcaacttatgagagcaaaatttttaaacttgaggatcgaagttagttataatagggattcaaaggtttttgtgggaactatttgcatactttattgattaaattgctcagcataggcattaacgatatctataacattcgaaacttgattgagacacataggtttaaggcatattcactaccatcatttccatccattccacatattttttagagcattttcttcgctaagccaaatctaaatgagttgtatcctctctgttactagtatttttattgttgctatttcgtttgtttttattgtttctgtttttcattactcgaggatgagcaatactctaagtttggggtgtgataactctatggtatagaattatttttagtggctttaaacctaaattatcataaaaagagtaatgaaagtgtgttgtttgttaactttaattagtttttatctttatttcttatttagtaaactagcttttaagtcttgtaaaaattattatttttagttgtgcttatttaattaaatgttgcttgtttgctgttgggaaaaaagagttaaagtaccaaggaaaagaaaaggatgcgaagccaaagtgggcatagatgctgaaagtgggttgaattgctgagcaaatgctaaaacaaattcaacattcatgtgtcaagcaacattgtaccctaataacctaacaactaataacctaacaactaatgaatttcatccatccacatcaacactcaacactcatgtgtcagcccaaacctagtaggccaagaatggaaagaaataagtttctattttaaggtattacattgtaccctaataacctaacaactaatgaagtacaaccaccttcatcaattttcttagctcaactgccatttttagaaggaattaattgcaaagaagaaaaaatacagaaaaggaaggagaaaaagagagcttcaaatttaaggagaaagacaaaggggacaaaaggaggcctcatcattcttatttataggatttgtcttcttctactcatctctactctttttattctgcaatctggtttgatataagaatatattgaactaagtggtaaaacttactttgtgagttttgaaaaaaaatctcataaacacaaaaaaaaaatatgttatctctgtgcaactttgctgaaagaaagctgtaacaactggaaaaatcctaactaaagagattagttattcaagtcacttttaaatataatacaatttttgcaagtgttttcattgtaatagcagccatatatttttttttttgtagtttaattacaggtcttttaaatttgattcattaccccattattctcattattttccatttacttaagttgtgattagttgattttcggagacaatcttgcttatcactttattacttgtgtgactgcgtatacttacgtactttaattttcacaacactcatcccaaaagatcaactacacaagcatataatgctccatcttcgatttcggaaagtgttctgaatcgacgcttctaaagatctcgacacccttatctaccagccgagcatgggagaacaagctgaaagagcaccaaggaaagtcacaaaattagggccaatgtgatagatttcttgcattataccaaagagctctagagcatcacatttagtactaactaattacatgtttgttgtaaaaacaaacccctttaagctattatggggaaatatcaggaaaagcaatgcttgtgtt

SEQ ID NO: 41099 - DNA, 1213 bp, Cannabis sativa
atcagacatgaagtgtagcttgccataccttgtgctattctcacactcggcatccaatagggcaatcccttacatcacaagttgtactcacccatgataggataacctgcaactcatacaagcaactaaaaatatatcctccagtgctatgctcacaccagcaacagaaacctatcctataagtgctcttctcatcacacaaacagtcaagagcctttatcactatacatattaacaatactaacataaattaacaattcataatataaaatctcataagcacatgagcatcaaacccataatagagtcgtatgtttcaacatacatcctgtgcataaatatccactcttcttacctcagttgctaagtatatcattttctctccctcgaacctctcgcggagtttatttgatgagaacaagatcctaaatccaataactaatatttgtaggatatgataacttttatgatatccttaaaatatcctccatttacatcaccctcatttacacaatcggaccccctcattggaccccacatcggacacaatctaacccatcggacccatcggatcccccccatcggaccctatatcaaaccccccatcggacctacgtcttctacctcgcaaactaacagtttcattcgaccctatcggatctacatcggactccatcgaccttgcctaaaatcacaaatctgagattctaaaacttaaatctatccctaaatctaacaaaatctatctttaacactaaaatcacaaacaaatcaataaaaaaataaaaaatgatggtggtgcgccgtgggtccgtgggggagcgtcgtgggccggtgggtctcctccgtgcgggtgtggccagtgtttgggacaatttggggttgcgacgactgggtttaggttgggcgaacagagagaatagagagaaggagagagaataggtgtgggactttgagagggggagttttgagaattaggtaaaatgaacatattttaacaattacttagagtttaagttttcttaaccttaaatcatgtataaaatatcaaatttctctaacaaatgtatataataaaataaaaattaattaaatattattattgagattacgaagagaatttgttattattatttctcatgcattctatatcctattacgaattatttcaaaaaaatctatccaatgcataaatgcagcagaccataatatc

SEQ ID NO: 41100 - DNA, 1311 bp, Cannabis sativa
  modified_base (41)..(67): a, c, t, g, unknown or other
tatataaaaatatgacatataatccaattcaatataatacnnnnnnnnnnnnnnnnnnnnnnnnnnncgttccaaacgagccctaaaggattgattatacaagatttccttataagatgatattaatttttgaaataaaattaattaatcaatataaataaattaataaaaaaaattgttcacaattttgatgctttcgtgtgttattggaaagtaaggccaaataattggaaataaaaaataatggcatttggtacatccaataatttattataatatttggtgggtaggatgagaaaagttttcaagcttctacaacatttatatttgattttaattttaatgtaatgaaattttggtctgctccaccgacaaaggaggaatgcgtgtgtgggtccaaagcctttgctgtgtccaccttagcagcctctctttcattacatgatttttattttgttattgttcattttggcagaatgtctttctctcaattcccaaattgtccctccataataaatcccaacgtgttttcatgcacatggcaagaggggagctttatatgtataagtgaagaagattaatatgctaatgcacaatttcatatcatgtaaatatttcttatacacttaattcggatttttttattttttattttttattttaacatgtatcaaatcatcctttttgaatgaatgttaaaattacctgaactgaactattgaaattgttaaattgaaaaacttttgtccaattttagtaaaaaaagtctaacatgcatggatgaaagttcaagagacttgatttggtacatgtcaaaatttgagagacatgatttgataaatatgaaagtttagaaagcatgatttagtatatggacaatcaaaaaaattgaatgaatgaaattggacaaatatcctaaaatatccaaccaaccatctcaatagttcagaaaaaattttaagacatgatctagtacatggtcaaagttcaggggagaccaatatcctaattagccatttccatactatttactcactaaaatttaaaattatatacataatacatattccacttgattagagtgttcatccaatccaatctaatccaattcgtactattttgctcataatgcatccgatccgcacgtgcagatttcatattttggatccaattcaatccgcacaatagttcaagtccaatccaatctgatccttggatcagttattttagattgattactttttaatattgaattatttaatatttattgaaagttatatttttttaacataactagtaacaaaataaaat

SEQ ID NO: 41101 - DNA, 2538 bp, Cannabis sativa
accacatgatctaaaatcaatggtcaaaaaaagtttcctaccgataggaaacttttgctaggtcctaccatagtcttgccctataaacatatatagtaagattatagtaggacttagcataagttcatcaccagtagggaagttttttaattttagatcatgtggttattaagacgtaaggtgtatatttttatgacagaactatatgtatacaattaaaattttatacatattataataatatttaattatatatttattcaaaaaataaaataatactaataattaaaaaatttattaatatttaatttgaattattattatttcttaaaaaaattaatttaaattatttttatataggtgttgtctattattttttttttagctatgtaaagatctcaatttttttttatctcctacataaatagttattatttttgctaagtctctaagaaatctttgatgctcgttaaaatatgacaatatattcaaaaagaaattaattatctaaatttttatgtgtctaacccatatgaataaattttgaacttttatttttaacaaaaatattgtgtaaatgaagcataaatttcacaactctatctcgttaataactcttctatttgtctcgtggtatctttcgccatggtagccatttttcaagagaatgggtgtgaaactaatgttatattatttattaaataatataatatttaagataaaaattgtgatatattatatatattattacatataatataattgggaattatatacatgtaataatcacaatattccagttcggactcatttagcaaatatcatgggggtgaaggtggtggataattatgggaagtaccttgggcctgccatcttttgtgggaagacgaaaaagcaacactttgagttcattaagaataaggtgtggaacaagttaaagggatggaatgatcgtttttctcggctgccgaaaaagaagttcttataaaggcagtcattcaggccattcctacttacacaatgagttgcttccgcctaccgaagaaaactattaatagtattcatagcatggcggcaaggttttggtggggatcttcagagaaagattcaaagatacattggtgtaaatgggacgtcttatgcaagcacaaagaacaaggtgggttgggttttcgagatttaggactttttaaccaagctcttctagctaagcaagtttggcgatgcatacggtttccagattctctatgtagtcgagtgttgaaagcaagctattacccaaatggtcgggtggtggaggcaaaaagtgggaatcatgcgtcatttgtttggcgaagtttggtttgggggaagaagattattcaaaaaaggtaccaatggaggattggtaatggcaattctgttagagtcattgaagatccttggctgccacgtcctgtaacttttaagatatatgataaaccgcccctaccagatcagttatatgtcattgatttgaagaaaggtaatggggaatgggatgaggagtttattagagctgtcttcaatccaatcgatgctgaattaattttgggaatggctactactgaatgggatattgaagataaaaatactatggcattatagtaaggatggggagtattctattcgtagtggatatcgtatggcgactgccttacaagtgcgagatgtgcagtccgatacacaagctgttgagaagtggtggtgcaagctttgaaagctgaaacttccgccgaaagtgaaacactttgtttggaagatggctcattcatggattcctactaactcggcgcttgctcatcgacatattcaggtagaaccttattgtaagaggtgttctacaggtgcatatgagaatgtttttcatgcactatggggatgtcgagttaaccgagaggtttggaatggagctgggttttatggtagaatacaacgacaaggccgagaggatgtgcttgcattcctcatgagaatttcaagtttgttcactaaggatgaatttgaattttttctggttttatcttggaacctttggtatattcacaactcggttaatcatgggggacacaagcctcaagctagtgcaatattggaatggtgcagcaagttccttcatgagtttagggagagtactgtgtcggctcaagttggacagcggagagaagaagcaaggtggactccacctaggcgaggctcttttaaaatcaatgtggatgcagggatcaaggttggggaagacttagctgggcttagttctgttgtccgggatcatgagagtcgggttattgtggctgttaccaggtttgtgcagaagaagaccacgccattgcaggaggaattgcaagcaattctgatgggtcttcaggccggtatacagcgcaacctgtcctccttttctattgatctgattgccttcaagtcgttaacttagtgatgaaagaggaggaaggatgtcgagatgtcgatgggctcattgcgcagataaaagagctgctgcaaaatgacagagtggctggg

SEQ ID NO: 41102 - DNA, 2916 bp, Cannabis sativa
ttaaataatcaaactgggaatattaaaatacggaatttcacaccctaaggcaacccacgaggctctgacacaagcaaagcgacatccccttacgattgaggccaccgtttgaggtcgccacttgcgagaccaagtgacaacacgacatcctctcttgctgtacgctagccatatgcatgacaccatgaccttcactacaaaaaaaaaaaaattatctttagtgatagctttttagtcacaacataattttttcgtgactaaatgtgacttttagtcacaacaaaaagttacttttgtgactaaaacataattttagatacaagttgtcactaatttaattttagtcacgacaaggtgactaaaaacacatttagtcactacaaattgtgatttttgtgactaatacatttatctacagactttttaatcacaacataagaataatgatttataattagtcacaactcttttttacattttagtcacaagttttgttgtgactaaaagtaaaaaattttgtagtgcttacactctattcgcctcaacacaatactttcctatgagagaccacttgttacacaagaggatgtcatctcgttatgtaagccctaccttgctatacatgcaagaggatcctacctcccgcatgcatgcacccttaaccaataatatgcactacaagaaatgtcacttttaccagcacatttttgtgctggcaaaagttagtattgcgctggtaaaatagaatttacttgtgatgtgttggcaaatcaatattggtattagaacttttgccaacataaaatgaaaagcgctgacaaagataacttttcccagcacgtaagtgcgctggtaaaagttagatttttagccactgcaaatgtacgttggtaaaactttgacctttttgtcatcgcagtttgcgaaatgcgctagtaaaaattacttttaccaacgcagtagcgaactgtgctggtaaaagttacatttcttgtagtgatgtatgacgatatttgtccattatagcaatactttataattttttaaaaaaattatagttttatccttaatcttttctttttgggctgtaaatagactattagacttcataggtttctttattatttcgatttttccagccttgtatatgtttctattttattactgacttgatcaagattaacccactctgttaggattaattcagattacttattatttgtttgtttgggtattagtctatgtattgtttattctgcattcttttcatctccatgtttctttcatcaatcttccattttttattgttctaaatctttatcaagatttttataatgtcctccaataaatcgccttccaccactccagcaatggcatcagaattcagtggagaagaggtttagctttcaagaattgtttcaagattcaaataacacaatctaaaaatgtcttcagcaaagttcgaagtggataaatttacagggacaaatgatttcaatttatggtgcatagatgaaaagacaagaagagagacagaattgagagcttatagtgcaatcctcttaactcttggagtgaagttttgagagaaatctttgatgaagatacaacctcaggattgtggatcaaattgacatcgatttatttgaagaaatatttggccaactagctatatttgaagaagaaactctatgccatgaaaatggatgactgcaaggaattgaggaagcacttggatgaattcaatagaattgtgcttaatttgaataatattggtgtcaaaatagaagaaaggggtcaagctatcattcaattaagttctctgcccaagatatttgagcattttgtagatacgatcttgttaacaatgtcaaaagtcaaacttgcacttaattccaaagagatacaaaagaaattagaagataaaggggaatcaagaggagatggggtatacataattgttagggatagaactgataagagagaattcaagaacatgaaccaaagtggtagccagaccaaatcaaaatccaaattcaagagtaaaaagttttattattactgtaagaaagaaggaaactatagagatgaatgtaatgccttaaaagctaagaaagccagaagcaaaagcatggaaagaggtaaatcaaaatgttgcaaaggatggatatgaatatgttgatgtcttagttgtgtccaacaaagagtctgatgaagaatgaatactagattatggtttctcatttcacatgacgccacacaataatttgttttgtgaattcaaggacatacaaggtggaaatattctcctaggaaacaacaaggcatgcaagattaagaaaattggatctatgttgtttgttatgcatcctggcatcaagggaactatcaagaatgtcaggtatgtccctgaacttaagataatattttgtctattggtgaattagctgctaatggatattccattaagattgaggaatctcttagagtaactaagagttcgctagtttttatgagaggggatatcaaaaatggtatctatgttcttaatggaaaggcagttatgggaacatctaatgcaactttgaatgacaagagtgataactatactagaatgtggaatttgagattagaccattttaatgaaaagggcttgatagaattagagaaacaaggcatgttaagagaaaaattgaatggtaaattagaactttgaagaatgtgcactaggaaagagttgtagggtgaaattccctactaatatacatattactaaggaaccactcaactatgcccactcaggtttatgaggtctttcaaggacaaactcttgggggtcctaactacttcatgatcatcatagatgatttcagtaggaaggtttgggtttccattttgaaaaacaagaatcaagct

SEQ ID NO: 41103 - DNA, 1862 bp, Cannabis sativa
  modified_base (467)..(489): a, c, t, g, unknown or other
  modified_base (908)..(911): a, c, t, g, unknown or other
ctatctaacaatttttgttgtgcacttaacagaatataccaaaaatttaacagaatataccacaaaaaagttatctttaacagacacctattcaatttaaactagaatagttgaaaaaatttaaaaaaaaaataaacaaaaagataaaaacgtgctatcttcaaaagacccaattaaaaagtattacacatacacaacccatttccaaaaaatttacaaaataacataactattgggaagatacctattcacataagcacccattcaattacacaatttatatatcaaaaatgaaacatctttgcaatagtttaaaaaaaaaaaaaactttgtgtgttgccattaatttgcagttattattggagccttccagattaatttcgagtgattgttgaagccttataatctgctaaaatctgcaaagttctcacgatttgtacatgtattattgaaagaaagagattgannnnnnnnnnnnnnnnnnnnnnngtgtctccatctttaccattactgtttgtatttcttatcttaatccctatattgtttatatttgtatttgtgtgtgtttggtgttcttagtgattttcggatttggtgtgtagagattaggtcgaatgttgtgaaagttttctgggttattgttttaggatagaagtgagaagagaaaaattaagaaccctaacccatggttgtgtacaaaagagaaataagaaaaaaacctagaaaactctaatatttccttactgttttagaagaaaattagaagagaaaagaaagcataagaacccattacaacaatataaccctgccattagagtgaaaagaagaagaagagaaagaaatattagaaactctaaccatacaatttattttgagctgctgcttttttgtgttgaagagagaaaagnnnnttgaaagaatttgaatattcttttgacaatagtgctgtcgtaggaatagttttagggtttgaatgatatatgtttctttcctttatgtactaggtttagtcacttagggtttcaatttaggttgggctgatgttattcttactgggccgaatattaaagaaaatggtcattgagttgctttatataatgtaacagaaaaagatgggtaaattaggaaaatacttagaatcctaaacctattttatgtaacagaaataaaaatgtataaaaaatatagaactatagaaagtatatacctgtgagatttagttttaaaaccatagaaaatatagaacctattgtcttgggctgatcttacctattgggttgggctgaattgttagtttttaaatacagcatacatggtgtaaccaaatatttatcttagtaaacaaaacaaatgataagaacagggaaacgaaataagaaagaaaaactaacaaatgcataatatacatagtatacttttataaacaagtataaattggtactatattatttcacatatatgattcgattgatatatattataatatataataaatcttacaaattatattattattaaaattttatgtttctaacactatagttaataaatctttaaaatgacaaaattaaccaatatggagactacaattaacaatatcaatccaacaacaagtaactggaaagcaaagatgatcgttggttataagtcattggtgcatacaagtccatacaagcataaaaaaaaagttaactcttattggtacaaaggtaaattaatttatttaatactcaattgaacattaaatattttttttatttcatatatttatttgaaattgaatacttactttaacacagggaaataaagtagaagctacaatttttgaatctgatatcgacacttggaaagatacattaaat

SEQ ID NO: 41104 - DNA, 1652 bp, Cannabis sativa
caagacgatcatatgtccgtcatagatggctttaaggctaaataatagtaatgttcaaaaattgagggcatataggccaaagcaagaacacgaaagctttgaagcccgatatgagattggtttgcatgcatgaggccaaggccctgctagaaccgtatagccagaaaagacctggatagagctcctataggggccacgtactgagctacggctagggcaaagtttcttacaggatccaagccatgttgagtcttaagttgaacatttgactataatagactcaccattaagcttcatacaaagtttctaaggaaaccacgtatgaggctaaggttgtatatgcctacaaagccaaactcttgccgaagtcacaagaggacagaaaactagctacccacttgaaaccaaggcccataccagccaaggatctcaagccttgaaagggtcggtcaggatcccatgactcagccaagacctggccagggtcaccaaacccaggcatgaacatgcaagctttaaagggtagaaccctaaagctggccaactcccatgattaagccttaggactggccaggtctcaagcaagacctcctaggccaaccaaggtaagttttgattcccaatgtgtgtttttcttttaaaattcaattatgtgcctcgtattccttatgactcaaagagtcaagaatcacagcgaatgacaaaattgaatcttttatatcaaaaagttatgcattacacattccaaaaatatcatgaggatcaatataccaatgagattacaaactaacatgtgaatcaaaaagtttctaaaagcttaaaaagcttgaaacttgttaatggcagttacaaagaagagatatccaagaaaagaagatgagatgtatatatatgtatagaaagagcaagagagagagagaagatcaaagatccaaaagcatgtcaggcaaaaagccaagacaatggctagaaagtccctattcgatcagacgttctaacagggacttgggggacaaatgttatcccaaattttgtcccaaattttgtccacctgacttggcacctgacttggcatacttggcatgtccactggcatgtccacgtaagctaaagatagagtacaggtggagtacacccctgccagtagcagaacaaggcatccatgcaagttataacaaaactgccaagcaacaactaaatggagtgaagcgagccctcaaggagctgtactaacatccttggtcggccaagagaagcctataggtcgactagagtgagcctacaggccggtcaggatctgtgcacaagctggcaggccaagaagtgacttctggaccaaggaggcttccatttgaccaagggaacctggtctctacaacgaaattgtattgactgcatttcataatatggattagtaaaggcaattagcataaattattggtatttttataattatttgtgaatttatttaattgtgggtcccgttatcaaaagtgggcatttgagttataatttctcgattctagagattttattaaactctaggagtattatttgtataatatgtgaattatgttatttttctaatttttgctcggcgataatagaatatgatatggatgactattttaatcacttgggtaagtctagaa

SEQ ID NO: 41105 - DNA, 1380 bp, Cannabis sativa
tcagaaaatcaagtatttatttatttccttaaatagaaatttatttctttaaatagaaatatatttccttaaataaaaaatattcttatataattttcaagttggaactggttgttataggtggcggagccagagacatattctagtggtcgtaataattttttatttttttatatttttttatttttttatatttttttaaaaaagagtaaaaaagagtactatcattaaaaaaaaatataatttttaatggaatattgtaaattttatagagaaaataaattaaaaacaaaaatgtaaggtgttccaatacctaatctacctaatgatctaatctaattgcttatgtaaagtgcgaaacttatgtaaattggattaaaaaatctaaaatttatatttatacggattgaatgttgattcacatttaaaaggaactgatttaaatccatttacacatatttatatgttttctaaaaaatattaaatatacaattaatgtaagaaaaaaataatttaaaattttaatatatattatgatacaaaaggctaaatactattttagactatatattttacaagttactaattgaactatttattttattaaataacaatttagacttcatatttttcaaaatagtacaaaatagacattaaactcaatttttatcaaattataaaacataataataacataacctggatgtgttatgataagattatttacatttgttgttttcatctattcgtcttagaaacttgtttcatgttagttattgtaatgactgcatatttataaatggaattggcaaataattgatatttattagtaaattaattaatatatatgattatatgtgcattaatagaaattaagctttattgtcaaaaataggtattttagtgaaataatttctcaattacgaagattttattaaattatatgtcatgcatgttatttatcaattatgaaatttttatattttattcccgataatagtaaaattttagtgattttttatatttttatatttctcctcactccctcacacactctctctctctctctctcagccctagaaaacccaagaaaagaaccaaccttcaaagaccagaaattcatccatttcatttaaggatttagcaagattttggaaggaaatttgtttagaaaccccaaggtaaaccctagttcatttctctctttgaaatttagagttgagattggttttgacgtatgtttttgagaattcagttctattagggtttggggaagttagaaatagttttggggagtattttgtggtgttgtttgatgttaattgtgtaagagcactcacttgagatgctttaaaatagaaatagttttgaaaagttaga

SEQ ID NO: 41106 - DNA, 2150 bp, Cannabis sativa
agggtgagtcgtcattccatgaagcagtcagagtgacgtactcatgtataagagccatcattccgtgggtgtaagggcccaatggaggcttgaagtggggacgttacagtttcttctgcaattattacactacactcctcggtcaatgccactgtttcatagtactccatttttctcttcttggactggatttctttcatgaacttcacatagcttggcatttgttccaaggctttgcaaaggggatgttaatgtgcaagttcttaattacttctagaaatttcgaaaactagctgtctaggttggtctttcagagccttcgtggataagggatcttgtggtcaatgctgacaggtgaagaagcttcttttgatgtgagaccctcaataatcttcttctctgctggtgtcggtgctggttgatcgtaaaccacttcttccactgtttcattttcattaggtccctcatacttcttcccacttcacaaggtgattgccttacaattttcttttgggttcacctctgttgtgctaagcaagttaccttgacggcgggtagctatttgagtcgccaattgccccatttgattttctaagactttaatggatgatctagtctctgtcataaactgtagcaacaaatctgtttgtagactaaaccctccactagaaccttgtttctgtggttgttgctgattctattggggctgattttgttgctgatagaacccctatagttgcaaattagaggactgcccctgtacattctgccgtcgaccccttccttgattgtacccatagttgttgttttgagaataattcccgatggcttttgcttgatccatcgggaaactattcacatctatggggcatttgtcataggtgtggggacccccacagagctcacaagaaaacttgagcctgttttgcttacacatccatcagctttgtcagggcctcaacttaggctgtcaatttggtgatggcgtctacctcgtgcatactagctaccttcttcatttagcttcttttagttggccattgttggttaatcatagccatttctttgagtagatcatacccctcatgtgcactttttaaatgccccgccagctgcggcatccataatcgttctggtgttaccaatcagcccattgtagaaattgtgaattaacatccacttttcaatcccatgatgtggacattttctgatgagatccttgaacctctcccaagcctcatagagagattcattgttcagttgataaaaattattaatttctctcagcttggtagcttttgctggaggaaaaaacttggacaagaactttgtctccaaataagtcaatgtagcaattgagttgggtggcaaggaaattaaccaacttttggctcactcccgcagcgagaatgggaacactctcaagcggatggcatcatcgctaactccgtttactttgaaagtttggcataactccataaaaattgacaggtgcaaatttggatcttcagagggcattccaccaaactggactgaagactacatcatttggagtatggctagctttatctcaaagttattagcctctacggcgggtggtcttatacaagactgaacccccgtcaatgttggaagaacatagtctctcagactacggtcaggtggaatacccgttttttgcctggtcttctacacgacacctctgttattaccgttgttgctgtcattattactgaaattagcgttatcagccataacttcttctgtttcagctcttgctgtgcttctttcttactttttgtttcttctatttcttctacaggtcttttcaatttcaggatcaatagccagtattatactttgtccttgacgtcgcatgcacccccaatccatgaaataaaaaaagacaatctaaaagaaacagattagcaataagcaaaaagaattgaccatagtagaatttaatctaatttttgtaatgtcaatttttaaacaattccccggcaactgctctaaaaacttgttacaaaaaatatgaatagccacacaagtgtatgtaatcaagtagtactcacacagatgaggtcgatcccacaaggaattgaactgaataccactaaatcagacttataattctatttggtaaccaa

SEQ ID NO: 41107 - DNA, 1847 bp, Cannabis sativa
ctgctcaaccacatgaggcggaaagcatctttgcaagctaattaagtcccaagataaggaaggcgaaatgaacgaggcaactttatcaggaacaggggagagggtaggaacctgacggagacccgggatccaatgatcgcggatcgtgaaagtgttctgcccattacctatttttgaaattattcctttgtgcaacagctcttttccccaacaaatgctacgctagacgaatgagggtgagtgccctatcgagctatcaagaaaggatgagtgaggaaaatacctagctgacaaaatttttgacaccgttgagtttggctgtttgaggatgcgccaggcttgcttagcgagtaaggcttggttgaagtggaccagggaacgaaagcctaagccaccttcctttttggatcgacaaagttttttccagctttgccagtgagttttgggacggttattatcattgacgccccaccagaaattggccataacagattcgagagaatgacaagtggccaccagaagacaaaagcacgccatcgagtaagtgggaatggcctggatgacagatttaagcaaagtttccttgcccccttttgaaaagactttattcttccaattatggaggtgaccccagaccttgtcatgcagataatggaacagttgctttttcgttcgcccaatgtgctgaggaaggtcttggtatttttcgaaggaagaccgcaccgggatacccgtaaaatcggatatcaaagtttgatccctgagctcaacatttggggagaaatacaaagaggatttatggaaattaacctgctgtcccgtggccctcccataggcctcgagcacctctttgatgatattgcaggaactaatggtggcttgacaaaaaaggaaaccgtcatccgcaaataggaggtgagagatagcaggggctcttctagcaactttaaagcctaaaagagctctccttctttcttgttggtgcaagagggaagaaaagccctccgcacacagcagaaagagataaggagaaaggggatcgccctggcgaatgcccctggaaggattgacactgcctaagactttgccatttaggttgaattggaaggaggcggtggagatacaggcataaatcagatggacaaacctgggggggaattggaatttcctgagaatagctactatgaaaggccattccacacggtcgaaggctttagccatgtcaagcttgatcgacatccatccctttttcccccgcgtcttaagcttgatggagtgcgcaacttcttgggctataatgatattgtcagaaatgagtcggcccgggaggaaagcgctttggtgtggtgagattagagtattcagaacaagtttcagcctattggcgatagtcttagaaatgattttatatatgatattacagagactgataggccgaaactcagagatgtacttaggctgatggactttgggaatgagcgtgataagggtgttattcagaggggccacattcgcatttccattgaggaaactggaggcggcttcaagcacgtctttcctaacagcatgccagttggctttgtagaagtgagagttgaagccatccgggccaggggctttgtccaaaggaagctgaaaaaatgcttctcaatttcgtcctgggaaaaatcctcacttaagagggatttgtcggagtctgagagagagcaactaatgccttccatagctatattcacgtcagaatcggtggggtttgaggaggtgaagagctgattgaaatgagactcaatttctcgaataattccttcctcgtcagagaccatgccaccatttgtcgtatggagttg

SEQ ID NO: 41108 - DNA, 2400 bp, Cannabis sativa
ttccatgttaatgtacttttgtaatattttttcaaatttttagtctattatgtaaatttttctaaaatattcttcaacacatcttttattattaatttttaatagtatttatagtttttttttttttgaaaataaactcttcacttattaatattatcaagagtaaattgcggcataaagattaaagtttaacttccagttacaaataaatacctaagtttaatttttaacggtaataacacttaagttatatttttagaactttgtaggtacctgactattaaatattaagtcattatccacctgtcattttttattgctatatttaaattaattttttttaaaaaaaaataaaaatttgatgactttgaccaatcaagaatcgtcacgtagcaatttacttaacactttacagcgagatacctacaaaagtttcagaaattataacttagatattattaccgcaaaaaattaaacgtaagtatttatttgcaactattaaacttaagtatctatgccacaaattactctatttccaaatattactaaatataatgataaattaatcatatataaataatataggataatgctttagtaaaggtattaaaaatgactttattatgtaagagtcattttttttaatatgtgtcattattttatttcatgtgtccattaaatattatttccttattttttttactgaataattatttgttaaaaacactattattccctttaaacaaaaaataaaaaataaaaactatcattcacttctctcttcttctcctctctctttttctctaaaagttcttaaaagttgtttatcaaagaacctaaactataataaaaactaagaggttgtttggcttcataacttaaaagttgtttttttttttaattaaaaaacagattttaaaaactaataggggttgtttggcaaagttttttaaaaacatttaaaaattgagttttaaaaaaattaaaaaaacataaaatatcaaaatattattttttaattttcaaaaacaattttttgtgtctaacatattaaattttatatttttgctcacatattcggatcatagacccggaaccataccgaacccggacccgaatactgtgcaagaaatggtaaatttatctgtaatgagccatgagtacaagggctttgcggtggattgtacatgttcaggccatactagaccaaatgggttgagtttaccagtagatatattttgtattctcaaattttgccgcttaggccggcgtgtaaaataacttgttatatttcgcgaaaagttttatgggatcccaaaaatatgttgactttttggattgattgtaaagtttaaattattacaagttatgtttttatcccattgtaattaaagtttaaatttttccgctcttattgtttagtaatcccggtttagcaggattaggttatattactagttgtcgtaacgtgcctaattgatagggcgttacattagaggtgcgcgacagcgagtccatagtttttgctcaaggctatctcgttcattcgcaaatcgtcccagacacaaaggtcaaagaaatgggtgaggacgtcgaaataccagactgtgagatggaggatgaggtggaaggcgagggtagcgagacggattcagttaacaatgcccaactagatgaacctttttcctgcgaggacctagtctcacgggtcaaaaagtctaacttgtttgcattcgtaaaattaaatttgattcatacaactacttctaagcctttgccaatgcagcgacctcaccttcccttcaccaatcctgaaatcatccctacgcagaacgtcatggtttcgattcccattcttcgatgcggggtgatgcttccttttcattctttcataaaggatattctatctcgctatgacgtttcccctttctaacttactccaaatagttaccgtatagtcctcgggttctatgcgatgtatatggaatacacgcgaggagaaccaacagtcgaggattttagcttcttttacgacataaagagtgttggccatgataatagcttctactgcttaactaagtgggccaactctgaaatgaatggagtggaaggtacagtttccaatatggaggattagaaatcaaaatggttctatgcatttaagatgtcaggggtcagaattgacttcaactaccgacctcgtatgttgcatacttttacacttaatatttattttgattacctcataggcgctaataccattttccatattcgcagatagaccgactcgatttgtactggaccgaagtcgtctggaaattgctgaagtcttaagcagccttctagttcaagatcacaattgtcgtttattgtgtacttctgcaaaattgcgcgagcata

SEQ ID NO: 41109 - DNA, 1148 bp, Cannabis sativa
catacctgaggcttttaggggtgcagtgtccgcggaggtcaccgatgccacaactttccttactgaaattgagaaacgctttgcaaaaagcgataaggcacaaacaagtactcttttgaagaaatttatttccatgaagattgagggaaggaaaacataagagtgtacattatgaaaatgtttcaccttgattcaaagttgaaggcactaaagcttgagctttcggatgacttgcttgtgcctttagtgcttatctctcttcctccacaatttagctaattcaaggtcaattacaactgccaaaatgagaaatggattattaatgagctcatttcattttatgttcaagaggaagaaagactgaagcaagagaagactgaaagtgctcatctggcaaccacctctaaggataaggacaagaaaaggaagaatgagactgctaaggataaaagtcctgcacataagaaacaaactcaagccaacaatgataatggttctttcttttgaaacatgaaaggacacatgaagaaggaatgtgctgagtacattacatggcgagcaaagaaaggtatttttcttacgttggtctgttctgaggtaaatttagctttgaaactaagaaacacttggtggttagattccagtgctactactaacatcggtgtttcaatgcaggattgcctgattaacagaaagccaagtgatgttgaaagaagcatttatgtggcagacaacaagttggtgaatgtggaagcaatagggcattttaggttgttgttaagtattggttactattttgacttaatagatgctttttttgtaccgtcatttagacagaatttagttttcggtttttgtttggacaaattgggttattattgttcaattagaaacaactgttttagtttatctattaattcaaatattgttggaactagttctcttatggtttataacaacttatattttcttgatgttgttgcttcttttaatgaaacgttgaatgtggaatcacgtggtactaagcgtaaaatagataatgaaaaatcaagttccttatggtgcaaacagttaggtcacatctctataaaaagagttgagtgagttgtatctcatggaattttaggttcaattgattttttagactt

SEQ ID NO: 41110 - DNA, 1410 bp, Cannabis sativa
  modified_base (425)..(433): a, c, t, g, unknown or other
ttttgttgtttttgtgtatttgtgaaattatcccttttaataactctataaatactttatttagtgtgattcataagaaatttttttaaaaaaagttctcataattattttattctctaatatcaaaaatataataaaatagtaataatttttttttcataattatcaaataacaaaacataagatcactcgatctaagctaattcatacagttatatatatttactctgtagttgatattccttaccttctacaacttcagagcgaaaaacaaacacacattataattagaagattaattaccacacatttatttaaacaaacaactaactttttttttttttttttacagtatacgatcaaaataaacatgtgagacttagtagttcactaaaaaaataactacttttagtgacaattttttnnnnnnnnnataaattttttgtgattaaatttgacttttagtcacaataaaaaacttttagtcataacaaaaagttatttgtgactaaaacataatatttagacacaagtagtctttaatttagttttagtcacaataagtattgtgactaaacacacatttagtcccaacaatttgtaatttttgtgactaatacttttagccatagattttttaatcacaacataaaaatattaaattttaattagtcacaactattgtacttttaactataaattttattgtgactaaaagtaaaaatttttgtagtagttcattaacttactaaatctccgttctttccaaccctcgtcttataacaaacatgacccataaattagagttctagtgacctcgaaagatcttttgataaaaagacaatatagataatagtaaattagtttgcctcatgtggtttggaactttgtgtacaatgaccatagaaatgtctggtaccttttagggagaacatgatagagatagagtattgtatggatttaaagttattttaaattttactattttaaggataagtgagtgaaaacactctttattttaaaataagtcattttatgttacggggaaaaagaagaagcaaatttgctaagaaatattaaagaaggtcatatgtataataattttaaattatgaggagatttgttggtataaatattttaataatttaagtgcaaaaaattattaattatttaaagaaacttatttaataattaattgaataaaaataattaataattaaatttaatgtaaaataaaattagtcttgattaatattttataagaaagtaaaatatattgataaataaaataaaattaggttattattaagttataagtaatttattattatttttaattaatttttacattaatcaccacggttagtaataatataatgattaatagatgaaaaaagatgtgaatgtgat

SEQ ID NO: 41111 - DNA, 1654 bp, Cannabis sativa
agtctcactagtagagttagagacttcaaattggtttttacacttctcaaaaattcattgccttagctccatagtaatcaccatctcataattagattttttagcattcacgcaagtctagaaaccttattcggtgtagtctaagagtattgaaataccacccttatcgactaacatattgtttctcttttgatcttaagatttatttgattatcttccaatattccttttctagcttaaactgatacttactcactactcccactcaacaagtaggtgtctagtctaatgcatactaaaatatacatgagacatctcactgttggtgcttagggaattcttttcataacttttatcttttctagaatagttgaaactgttccttagataaataaaatctatgtctaggagccaaaaggtttccttcaaaattagccattaaaaaaatactccagcatcttgctaaagaaagtttcttacaccaaagtaagtaaattacccgatataccacatgccacaggtttagataatctcaaacctactatactaggatcgggaagttttattaagtccattgaatagacttattatcaaaatttctcttcttgtccttgtaataaaaaacttttagtttctccatacgaatggtattgaccatagatctagagcatctcaattaagatgcttgcgtagatcaagttgtctaaggtttaagtgttcacaaagatcggggacgcacctttcattcttttggtcgtaattgctaatcggccttgttgcaaaaaaacttcttgattgataacgctaggagttactcatgctctcctgttcatcatgataatggtgacatgtatcctccccactccgtgtttgcttttcatgtgcatgagttctggtcaatctacactaaccaggagtccttgacctcgacccactcggaccatttcttgatcttatttcttaaggttcctgtcgaataggcattcatctttgaaagagatttgacacacattccccacttaagtaggtatatgtgctatctttgtcattttagtttggtctccgtgagtgtcttgttggatgccctaaccccgggtcgtccccctacaccctcgcatcatgctgagtgaaccctcggtccccaggtggtgtttgcctggcatctgcattcatgcgagatgactctgggttatcaggttgcacattcccacaatttgtgtttttgtaggagaaacttggattgttgggtcgagtttctttattgttggtgtatcctagattttgggacctcctccgtccactggaatattccttgtattccctagttgatcatcttagggattgatgggatttccatggttatcacctctaggactttccccatgtctcctgctctttgagcctctaggtcttccccaaggtcccctaatggatgtgtttggttggttaggaggtgcatcgctgtgtacaacccttctagccataaccttgcattcaaactcaacattcctccaatttgattctgccaatcttaaacagagttgtctattttccaatccactaacgacacgtatcttaggtctacagatcttaatcctgatacggttaggttcaacttagttttattgtttatgttcttcaagttgttcatgga

SEQ ID NO: 41112 - DNA, 2628 bp, Cannabis sativa
atgtgtgtggctgttaccttttcagcctgaaactatacgcctatagtgacgcgcagaaaatgaatgcaaaaggtttcagtgacacgtatggaatgtcactaaaaattgcctttctagtcagtctcattagtgacgtgcgttgaagtgtcactaaaacccaattttctagtagtgaaacattgtgatgcagccccttgtcagctcacttaactccttttgcttgctgcttgacagctttgccataccttgtaaggagactttgtccttctattggccaggccgcattccatgtgtccttatccttggcttacgtggacatgccacattaagtgcacaaaacttggaataacgaatattatttctaaataatttaaagagagaaatatattattttagagaaaataatatttatttcaatccttgtaaaataagagactaatgaaaatcaatcaataattatttattggtagaataaataataaatcttatttgtgacaaaattgagaaattaattttggaccttaaaatatggcccacacgtgtaggcccattctacacgtgtagacatatgaaggtctatgattaatttagtttgatgattttgttaagttaaaataatttaaattaatttaattatcttttaattattaattaaatacattatttgataattttttaattaaaaggataattattaaaataaaagatctattgatattttgatattcgattattagatatttatatttgaatttgaattgttaattcaaatcaaactagatgtttatcttttattttaaataaaagattaaagatttcatttataacactatatatagggatatatagtatcataaataacaacaaaaaatagaacaattaacaaaatgtaaaggcataacaaaataaagagaaaataggattgatttttctcattcatctctctctctctctctcttgtctcacacgtgtacacactattccaattgcatgtgaggttaaaccataatctcattacagtgtctcatgagttgagtacacattgtaatacctataagatctaatagcccactctattcttgagtgttgaggctaacttggaagataaaggtgtggattcttcaagtaagttctgggattggatgattgattgttatacgaaaagaatcaaggataccctgatgagcatcaagagataattgaatttctttcaatggattagatataatctatattcattatgttgagaacctttggcttatggtttatgttggataaaaaatgttttatcgaaattctaattccgcttttataactatgatatggaccataaaaactaatatttttaagtgcatatggtaaaaaggttagtaaaacttcagggggtacaaactatttgtattcattgttggctttatggtaataaattaggtacacaatggaagagttttgtgttactgattatcattgtaccatagcccaatgaatctccagatatgtgtacattaaatcaaaacatgaaatagtaagtttagaacatgtacctcttgaaggctatcaaggtatccttgaaacttcctgtatgttgtatcccttaatccagatgatgaagatgatgcaattgggctcacacaattgtcttccaaattgatccaccacacacaaggaatagtctgcgccattaagataaatccttattaattaaatcatctttaattatttgaataaataaatatctataatcaaatttgttgatagatatttatgagggaatctctcaactgcttgagagaatatctcaccaacattgaaatatttttaaccacttttcaaatttaaataagtatgggattgaattaattaaataattaattaacctaaaaatacaaacccatagggataggcgtctaccaagtcttgttaggacaacgattgtgtcttttctcataacaatttttgtctcaacgaatcttgtaattttgtattaacagtttttttcttttccctatttaattaatttgaaaaattatttatttattaaaaaaataaataattactattttgccacttcaaaaaagatttttctaaacagtattattccactctttatcccttcccttgacagtgtttcaagttggcgattcagagaccatggacctataattataatctccaataaactagattacttattgagtttcatcaaccaaataatctttgtttattaattccatgattactccaccaaaaatatgaaattgaactcttagtaattatagaattatatttattgagttctactgcagcgtccactaatataatcaattatcatgattagccctcgatcggtttgttcgtaattgttttggtcaaaataccattttaccattctaattatttctttatcttttagtaccattaattcactagtggaagtgtaattttgatcccatctaaatttgtgcacaacattccagttctaaaattaacacttaaagggaactcgaattcaatccgttaggaaagtcaagattctataattttatatcgtgttcccagccatccacattattagattcccaaaataggatttgtaagaatcatcttctctaaaaaactttaacgagt

SEQ ID NO: 41113 - DNA, 2330 bp, Cannabis sativa
tgtgtttaaaaaaaattaattaatttttattttatttttttaaaaaaaaatatttacgtggaccaataatattgtgccacgtgtacactgtgtccacgttagctaaactgaactgagccacactagcaaataacgaagtcaagggaacggaagtgtgtttttgctaacagaatgctgattttgggggttttaccgccaaaatttgagttttggggattaattgcaagtaaaataaaactattggaagttttgccgcaattaaccctttttaatattactttggtttaaaatgttagttgtattagtatttaattaatgattaatatatcatgtatatatgcatgtgtttaattattatgagcacaaaaatgtattaattaatttgtatgctcttatatttattttttatacactatacatgatcatttctacataattaagaaattaacaaaacacgttacatcaaaaccatgcatacgtacgtataggcgtatacatattatattaaatttattatttataagaacaatattatatatgacaacatatttttttccaatattcatcttttttaaaactactcatcttcttcctctcaaattcctaattttctttttatatataactcacctaatatatatgggcaagattatggctggacctagcaaaagttcgttatcggtagggaactttttttgaccattgattttagatcatgtggttattaattatgctgtaaggtatatactcttacgataggactgcttgtatacgattaaaactttatacatattataataatatttattttctaaaaaataatattaataattaaaattttattaatttttattttgaattattatttttttaaagttactttgaattatttttatattggtatttttttcaaaaaagaatttattttttctaaacttatttttttggcttcttatttttggtttttcataatttactgctagttttttttatgtttacacctaatcttttctttgttttgtttttaggctgtgtgtagttctggtgttattgactgttttctcagtagtttttattatcttgttgttgtttggatgctcttttgagacgtcacttataaaaaaaaaaacaaataattaattcggttagatattattttttctgccaaaaaaattgagtttaggagaagcaagttggtacggttccaattctagagcatctaaaattattcaagcgatcttacattagaagaatttttgaaaataaatatctatataaaaataatttaaattaatcttaaaaaataataataattaaaaaataaaaaattaataaatgttttgattattaatattattttatttttttaaataaatatattattaaatattattataatatgtataaaattttaattatatacaagcagttctatagtaaaagtatataccttacatcataataaccacaagatctaaaatcaacggtaaaaaaaaagttcctatcagtaaggaatttttactaaatcctaccatagtattactctatatataaatacaaattctaataggtgccaatactatgagcgacaaagtgaggtattagaatcgaacttgagcctatatatatcttgactatagtatataccttaattcttatttcttatagtaaaatgacctattgatccgctcatataccttgagtcaatgggggtgtgttggatcaatactatgagcgacaaagtgaggtattaatgacgaatttttgtgagtgaaaaagaaatacttaattttattctcataattaagtatatgtacttatgtgtcttatttcaaatacaccaattataatagtttaattggtgaaaatattaatcaccttgagatattattatgtttattggatttatatgtgacattgtttaagtattacttatctttctttctttttttgcaaattaagttttacttacttcaaaagtaatatagtgaaattatttattttgactgcatatataatatgtattttacgtggagttgtcactaataatttatatttaactataatattaattaattattaatactttttttttttgagtgtattaattattaatacttaatgtctaattatatgtagtttatacagataaggaggcgtttagttggagataataaaatggaatggaatggaaatgaaataattttcatttcattccgttgtttagttgtattttaaagtattttaattttcacctttttggtggaatgactattttatcttaaaaatgaaagaaaaatcattccaatgtaacaagaaaaaaaatttaa

SEQ ID NO: 41114 - DNA, 2366 bp, Cannabis sativa
gagattaactgtcgtgtctatctaattttttttcccttagttgtttattatttacttatttttaacgtttttttagtttatattaattttttcgtgctttaattttagtgagtgtggattgaataaattttgttgacaatgattgctcgtctttaatatgtgcttttactttgatatcatatgcatggtctcgtggaaaaataattttgttgatgataaaattcttgattgtgtgatagttataattttaggaaaatgataaattctcataatttgtgtgcttaactcatgattaattactgttcaagcttgattttttttaaaaaacttttgcacatcagttgagttatcatatttgctaatgtttggaaagatattagcatgtttgatttttaatttgaagtctcaactactctagaacttgtttgataatcatttgaggcaaaattgataaattacatatgattttgagatatgatatagataattttttttttggatcgattgagcttttcaagcctaccctatttgtgaattccctagttttacccaatttgagcctaaatgttgacatctcattttttctttttaaccttatcaataacctttgagcctaaaaaaaattcttattcatcctttttcacaccatagtatattgatgctttatgtatttgtaaaggtgtgagagttttgttgatgagaaaatattcatggttatgtatatgtgatgatgaaaaaaaaattattattcccttagaatgaatatttgcaagttgtaagtattcattaaaaaaatcaatgaaaaataaaaaaaaaaaagaatacttgcaacagttttaagtgtgagggaatagtaagttttatatagaaagagagatataaaattgaaattattgagggaaatgattgaggaatccaaatagaatttctttgagagaatgttgtatatgtatgctatggtgtgatttgagcccaaattaaccttctttatctacctttcaccctagccttacattataatcctataaagtcctattgatctttagattgtgtgtaattacattagtggagaatggtttgataattaagcttatggagtagattttcattgaaatacacatttattttgagacaaaaattaactgtcgacaggcatgtattaatttgagtgttagtagtatgatgatttgattgcacacatacacacaaaaaaaattgagtttgaaaagtaatttatcctgagttgaaattataatgattgaagagtttggattttcttggaattataaagggatgtacatgcttaaaacaattttttttttcataaagaccgatttttttaagcatcattcattttatcattaacttactcgaggacgagcaagagtaagtgtgggggaatttgatgagtccatatttatcttataaatatgattaatttgcatatttatattcttaaattgattctttaaattattgattagtgtgattttaattttttaggctattttaaagactatttatgcatttagagtctttcagagggattttagcatattttggtgaaaaatagtggaagccagcgagctcgatttaacgaggaacttaattacaaattctgacgaccgtagatgcagaactgtacttgcagctcaacatgaaagatttagatctcattcttagctttccagaacatcttgaatcgtctaattctgagtaatatcgagagagttatggccaaaatactatcagtcattgcagtaggaaatttctgaaaaaaggatggcgaaaaaaaaagatagattttcaagaagggttgtgattttcttatattttgtttaaaagatgagttatcttttcttttagtgagatatttcctaatactattataaatagaatgttaattctaaaaggattcatctatttttgaagcactatgaataggacctcagagagaaactcagagagaaagcaaggaagagacggagagcgacttcgaagtgttcttcattctagttcttttcttccccttctactcttattaaatattatcatatacattataatgtctagttctgagtagttttcttttagtttatttcaaaatccgagacatgaattcttagtttctttattgagtgttaatttcttgtttctatcgtattaaattgcttctgttcttctatgttcaatgtcatgattattattttaatcttgtttagataactactaaattatattttactttaatctatctttatcttaggattactattcacctaatagtctaggattctaagtgtttgtgacaaattgcaatttttatttgtgatgaagaataaaacttaggttaaatgaattatatg

SEQ ID NO: 41115 - DNA, 1530 bp, Cannabis sativa
  modified_base (1152)..(1157): a, c, t, g, unknown or other
tgcagggcgaaaatctagttacagctgttctaacgggtcctggtattgtcttcatccagagtttgccattccaccgattttctcaacgcatcgccaggtaattgatcattctagattaaccctttaaccaaactaggttagattcgatgctcatattctgtttgtttaatggtttggatcctctgaaaaagaaaatattagtttggacctttgacaagtgaattattatgtggtgtgcagggcagttacatccccaaacatgagagaaaatccaaagtttttcgttcagatagctattttcttttttctggcatatgttgtgattgtatcttcgttaattttaacagatgtataaatctcatccactttttggtcacatcatccttttattttgtgttgcttgttaaaacattgtagtcccattaaattttaacatagttatatataacaacagatacgaaggttttagttcattttctatttactgtttcttcatagtttttttttactgatttactagtgtcgacaagtaattattcaaaacgcccacaataatcacgacacttcgacatttccatcgaaaaaaaaaaagtaatataatattgtattttactgatttttttgtcaaaataaaatttaataataatctgatataaatgtgttatgataaaactgtttacattttttgtaactgttcctgttaaggagtgtcttcaagttaattatataaaaaaaaaaaaattgttaaaaattaagctcaggtcctatttttactattttggaaaatacatggttcattttattatttaacaaaatagagagttcaattagtaacttttacaaaatacatgattcaaaatagtatttagctaaaaaaatcacctacatcaacatctcgaaaggattttcttacaattgctaatattagttgttaaaatactttagatataaaaaatgagaaatagggcatgatgatcccctccacaaaaatatgctttcgtgtaaactgagtatggttgtatagggtaatatataattatattctggttaattaaattattatatctatttaatgttaattatacatagaaataaaataattattcattaaaaaatatatttattagttagtaaatattaaattttattgtnnnnnntattaattaaaatgaatatttctatatattttatcgctatgttatttattttgttcactatgtcatttatatacactatttgcgtaaaatttatgtatattgcatatatatattattgctaataacgtatatataactcaattaaaaataaaaaatggatcatacagactacatatatatcgtaatattttttataataaattaaatattaatggtatttaaatttatttattaatttaaaaatattattcaaattaataaaaattataggcaggaggtaaaataatactaactttattatatgggggtaaaataataccatatcaaaagtgagaggataaactaatattagtgacaaaaataaagagataaa

SEQ ID NO: 41116 - DNA, 2086 bp, Cannabis sativa
  modified_base (67)..(67): a, c, t, g, unknown or other
gtaatcaccaatggattgatgtgaggatatctcacgttcttctcatcttcctccgagaatatgattngaggttcttcagtttttaccttcttggaaagttctagggcaaataccaactgttcattttcacatctttcacatacctcttttgggcgttgttgctctcccctgcgatatgcggccctcccaaaataactagtatgtcctctccttcaataggaagaggttgtaacccctaattgtttgggttgttgggcagactgggctggttatgtccattgccatgtcccttcacatactgcttgaagtggccccgagcgatgagactttctatctcgtctttcaactgacagcattcgtctgttgtgtgcctaatgtcctcatggtatttgcaatacttggtaggatctcttttgtgcctcacatgcttcatgggctcgggcttgctttgccgaaaacaaccttgtgctcatgcacgaggtaaatattttcttgagtttcattaagctcgatataaatagtataaattggcacgtacttatcgtgcttcttctgtttctttttatcctttgacgattccttagaatcgtcctttctctttgaccttgaggcctctgagttatcaactctatttgagatagtacttgttgaaacattactgggtttgcctcatgagcctgttttcaacaaattcatctcttttcgagcttcctcttttcgaatgtacacttgagcccttcgttggactcagtgatgttcttcactggacgaccctgtaagtcatcccacagttctccccaagcgattgttggatcagagtgatccccgcctgaagggttgtaagttgtgtacagtcatccagatttctaactcttgcaacagccgtgctaaaatgacttaagtttgccttaagtgtctcgcctggctgttactttatgttagttagcgaggatgccttgggtcacctatcccttgcggtgtggaatttttttttttgaagtccttggacagctgttcaaaggaagttatggaatgatgagtaaatttgttgaaccagctgcttgctgctccaactaacgaggtgggaaataaaatacaacgtaaattgtttgtcacattactagctcacattattgtgttgaagttattcaaatgggagactggatcggtggttccatcatacaatgagaaataagggtttttaaaggggaaatattcatgatatttggatggtacggcttgagctcctcgtccgagtcgtatccagattgtctccctaattcccccacttgatatctcctgaacttttcctccaactcatctatttgcaattggataggatcctcttgctttggaccgagttgtaggtgaagattaggttttttctaattcaagtgctttcgaaggtctggttgggagtaattgctaacagtcctcgttctactcatagactgtgtcctatttatggacctcatttttctcactgaccttgtcctcgaatgacttgtagatttattggttcccgtgctttctcgatcattagcatgatgagcactctctcttcctcgagttgatcgactgtaggtccttgagcgccctgaggtcacacttgcttattcacaccctgttttgtcccctgagcgtagtttgttgtattttccccactggggtttgtacgagccctctctctatgggtttgagaagaacgctagtgattccttgccggtgacctacgttccccaggtagtgtcctagggtcttcctcatttccatgaggaatttcttgttcattagtttctggttgcctcccattctcatttctatgagagggttctggccgatcatttggattttcaggggaaatttaattttccccaggtttttcttcctgagtattttcctatctcctagttcgtgagccacgaggtctgcctcgtggtcttctcactccacattcagattgattttgagtgttattccactgcttcgccctagttgcggcagcatcacactctaattcagcaaaccgtcgttgcgcctccttcaagcggcgtctaagtttgtggttctccatttcataagtgac

SEQ ID NO: 41117 - DNA, 1588 bp, Cannabis sativa
  modified_base (695)..(704): a, c, t, g, unknown or other
  modified_base (1309)..(1310): a, c, t, g, unknown or other
  modified_base (1559)..(1562): a, c, t, g, unknown or other
aagccaaccaggatgagacattgtgtcaccaaaaattttaggaatagtgatagaatcaagagaaataataaaagagcaagaagaagaggaaagatgattatcaaaaataaaagaagaaataggaaaagtacattggctcttacctttacgtagtgtaataggaagatcatctttgagttcctaatctgatgacgaagatgcaggtgtaggacatgaaacaggaggtggaggagggggacacctagtgtacactataggaggctgagggagtggtggaggtgtaggcattatgggagtgatgaccgaggcaggtgaaggaataagagactcgtcaaaacatgtatcaggcgtagaggatgtgatataataaaccaaaaaatcatcatcctctccctaacgagttggagtaggtaaagataaaaaaataaggtgtattttccacaaatataacatcaatagaaataagatatttgttgaaattaggacagtaacatctataccctttctgaagacgagaataaccaagaaatacacactttaatgccttagggtctaatttgatgacatgtggacgaacatcgcgagcaaaacaaacactgccaaatacccgaggagcgactggaaacaatcacttactaggaaaaagaatttttaatgggatctcaccattaagtacagaggatggcatgcgattnnnnnnnnnncatgccgtggaaactgcatcggcccaaaaaggtttaggaactttcatttgaaacaagagggcacgtgcagttttaagaagatgtctgtttttacgttctgtgacaccattttgaggtgcagtatcaacacaagaagttttatgaagcatgccattagaggtcatgtaagataaaaattgagcagatgtgtactctttggcattatcacttctcaaaatacaaatagataaattaaattaattttgaatctcagtacaaaaagcacaaaatatagaaaacaactcagaataatttttcattaaatataaccaagttacacgagaataatcatccacaaaagtaacaaaatacctgaatccaggttgagacaaaataagaggactccaaacatcaaaattaactaactcaaaaggaacactagcacgtttattgacttgaggactcaaactaacacgatgatgtttagaaaactgatatgactcacaatctaatgaagacaacttgctatattggggataaagtttcttgagcaaaggaagggatggatgaccaaaatagtaataagcctcaaaatggaagaaacactcaaacaagcaatagaggtnngtgaaagtgggtcaagaacatacaagccaccaaattcatgtcttttaccaataatcttcttcgtcataagatcctgaaacaaacaatcattgggaaagaatgagatgtaacaatttagattacgattgagttgactaacaaaaagcaaattaaaggacaaattaggtaaatgtaaggctgattacaaagtgagcataggtgtaggaacaacagtgccagatccaagaacagaagatgttgatccatcannnnaggtaacaatagaagtgggactatga

SEQ ID NO: 41118 - DNA, 5771 bp, Cannabis sativa
atatataaagatatatataaactacatttagcaatgcaagaaccactacaacaaaatttagcattcgctgcgaaaatattagcagtagactaaattcaccgttaatataggagtattagcgacaaaatagtagattcgctcctaatattattataaaacaaaaaataattattagccgcgatgctcactgctattgctagccgttaataaaatctctcccattcaccgttaatggcaatcaaattaattaatagtaaggaaaatagtacatatctcgtatattgtaatgcaacaaaatattaaaaacatgcatatttcagttgtgcaaattattatacatatgtaatttcataaagtatagaataaattacaattatgaaactagctaaattcacaagcaaatcacacaccgaaccctttaaatgttacaaacacaagtaataaatgaaagatgatgttaattaataattattatcctttagtactacatccagattgcaaactcttcaagcttggaagcaacgaactccacaccttaattattgtattaatattctaagaaacaaaacaaggaaacaaatgaattataaggaaatgaaaagaaatatgaagatatatatatatgtgcaactaaaatatatacatgaaaagttatacttcattaattaccttctaattaatgaaccttctcttcagtacatttatgttgacaaaaatactcacataaatccaatctccaatatttcccatgaaatcgaaatagttatgtctccaagaagtatttagtaataaattaccacaaactccaacaaatccaattacaaatccaatccatattcccttgtgaagccatgacatgtcaatccaatcttcactatcttcagcatagcctccatcaccaccacccaaatgatcttgaggaccatttgaagactcatctccaaaacatgaattggtcaatggaggtccacacaagccatcgttatgaatgtacaccgaagcattaaaactttgtagttgagtaccgataggaattcttcctgataatttgttattcgacaaatccaataaagacaaagaagatacacttgccaagcttgttggaattacaccagagagcttattgtgggataaatctaaggagtctaacttcttcaagttcccaatctccatagggattgtgtcattcaaattattccttgaaagattaagttgaaccaattcaacaagatttgtcaactctttaggaatttttccactcaaattgttacttgagaaatcaatcacttttaataatccaagagtcttgctatactcacgataaacacctttccacattaaccacatagcaatttcacatatttgaatcacattctcgtagaggggaattattgtcgaaatagcaatatgactttgtttcctttcatctaccatagatgtgaaatttttaatgcatgaaggaataagtcctcctatggtatttatggaaatatcaaatatttgaagaaattgaagatgacacatacttggtggtatatttccataaaaatgatttgatcttattctaagaaaaatcaaattggtgagtctttccccaatccaagatggtatatttccttctaaattattatattcgatatcaagaatttgaagttgtgtacagttctttaaggatgaaggaagatttcctgagaaattattatgccctaaaagcaaatattgaatttcattcaacaaaccgattgatcttggaattattccagacaaattattattatctaattttagaccgatcaattctttgatattccaatgacaattaggaaggctttcactaaacatattatttgaaatgtcaagaacttttattgatccttgtaatgggtaacaaagaaaactctttagatcagtaaatctattatttgatagcatcaatatgctcacattcgatagataaggtggaataggaccatgaaattgattcgaagatagatctagaaatttcaaaggactaagccaattagtaggaatttcatcgtgaatttcagcatttgaaatatcaagtcgagagatatttttttggtttttgagccaagtaggaaattttagacctaacttgcaagacctcaatgatacatactctagttgaaatggtggaacccaagtggaattgaagctcaatgttaaggagttatcagataaatcaagtcttttcaatttggaaagctttttaaaatgaacttcagtaacaagcccaataaaagagtttgaagagagatttaatgtgtcaagatgtttgagctcaccaatacctttaggtaaagtaccggtgaaagagtttgaagagaggtacaatttttcaagatgtttgagttcactaatacttttacgtaaagaaccaataaactcaggaaatttagtaaaattattgtaactaaaatcaaggtacctcaaatgttgtaattcaagcaaagaaggaccaatttcaccacccaaataattatgattgttgtcatcagatttaagatcaagagcgataatatgacgatgagtttttgagttatcgcacctgatacctctccatgcacaacaatcacggctactacttgtccatgaggatagacgattgccatcatcgacaaagcctttcttcaagttgagaagagcttgtctctccttctctatgcaataattattacttgtagtactactccatacttgattaatgagtgtggctagcaccaacaaaatcacaactttgatcatattgagaaagtaatataactttgattcatatatatgcgtaatatgtaaccgtatatatacatttgatcatattggttgactaatgtttaaatacaaatatacggcactccaaagttgacaagttgttttttttttttttttgttttgaatctttaaaagtatagttgaatatttatcaaataaataattaaaataaacaaatgcatataattggataaatagtgctctttcacaaatcttatgtgtttgtgacttgtgagatactaagctattataatctaacactacaaacaaaatttattctataaatataaattattatttttatgttgtgaaggtccaatcacaaaaattaaaatttattgtaactagatgtgtttttagttataatacttgttaactaaaattaaattagtgataatttatatctaaattagtgactaatacaaaggacaaataattaattataattataataaaagaccatggtccaaattcaacaaatgcttagcttttactattaataaaaatgtttcttttaagattttaactctttattattaataaaagatgaacattgctataaggtaccaataaaataaaattattatattaaattataggagttcattataggagttcttttaatattatacttaaaattaattttatttataaaaaaacattcaaaaaatttatttacactaataccgacgtgttacgtcagcataaataacaaaattcaaaattattatcaaaaatgaaataaacttgaaattctcgcttctagaatttcattattttgcaagttttaaaaaaggcaacttttttgttgcttttaatgtaaataatatatcaattagttacattttagtaagaaaaaaaactattttaagataattttttctcaaacacatttaattgcttattttgatcagataactttaaatttatgattttattttttaatttttaggctacattatatgttcttttattatttaagataacttggggttattttttcttttcgaaaaattctaaatcatattttgagttgtggaaaatatatattttttccgatataattagaaaagatgaacaaaataaaagtaccatttccctttcttttataaattataaacaaaaaagtaactaaatattatatatatttgaacaaaacaagtataccacctaatttgaacaaaacaagtataccacctaattttataccacgtgccaaacatgtaatttaatagcaatatcaattttgttcatagagtttgcttaggttattatatatatatgcagggccggccctgaaaatatatgggcccaagacgaattaaattttggggccctaaaaaatatataaaaaaaaattaaaagaagagtgttatgggatttgaacccatgaccttggactttatgccatccacctcaaccaactaagctataaacatttattgtttataatacacttaaattttacttaaataaaagcctaatagcttttttttattttttttatttcgggcccccggaaagtgtgggccctaggcacgggcttagcccgcctatgcctagggccggccctgtatatatggaacacttcttaatgcatatcatatgaaattaaaaatatataaagacataaatttaaaatatatagggtaaattttcaaaaatattttttatgtttatttagaattttataccgcctaaaatttttatttataaaaatacgtctgtaaaattttaaaattataaatatatactttgctcaacaaaaagtaataaaacaactaaaaaatagcgagtaatcaacctaacaacaactacaaatcaattataaataaactataaaacaatcaaaaatatagtttattatttttactgaaaatttatcttttgtaaattaaaaagtttaaagtacaaaaataaatttttttccgtaatgatgtatttttgtatttatttttaaatttttgttctataatgttatctttttttaaatgaataataatagtaataataaaagatatttgcggcataaatttaaaaacttatataccacatccttttcttttacagattaaataccaaacattatattttttctatttcattactacaaatttgttaaatgatgattggactttttaaagatgccacatattgtataatgattgatccatctcatattaactttttaaaaaataatttaaataaaaataatagtaaaaaatatgttttttttttttaaaaaaaaaataatgaacatatcattatgaatgtatatatgtacaactaatttatgagatgatatatatggactggagatattttacgaaaattagatttgaaaaaacaaataatgataaaccaaaaataatataatgcttggtgaaaacaccttcagtgctaaacaaaaaaagaccaaacaatatatccacaaattcttctcagacaattcaagcccctttctttcaactccagcattaaacaaaaaacaatatgatgaacaacttaaaaaaatacacacaaaaaataaatataagaatatatcttatcctaaataagataataagaaataaattaaattcaattataaaagtatgcagcatatggttatggatgattttaattaatccaattactgagttttgtcttattctaattttgttttgttttctaattttgttttgttttttttttttttttttattaatttgatgttattaagcttttttctttaattatttactttttgtatcaatttttattttttttgggtaaataatttcttaatttcttattagtatatttaaattaatttttttaaaaaaaaataaaaatttattacctgagaccaattaggaattattatgtgacaatttacttagggtgtgtttggaaagtcacaatgtaattggatttgtgtgtaattggcactactacaatgtaggtctttagcttctcttttttcaacacattttataaaa

SEQ ID NO: 41119 - DNA, 1709 bp, Cannabis sativa
  modified_base (1609)..(1611): a, c, t, g, unknown or other
ataagtatcaaaaggtttaaatttataaatgatataaattcaatatttatttctagcggtataaatacttaatatttgtaaaattgtaattttttttttctaattttattagtacagactttattattggttaaacatggcacatataagactcgaattctagatcattgggtgtagacataaatatgtagtatcaattacttccaaatgttcatttaataaattcaaaaaggatattgtattaacaaaactagaagaaaattacagctttataaacattagatacttatgccactaaaataaacattggatttttgacgtttacaaacttaaaattttaggtacttatgttgctatttaccctaaattttatattgatattcccaacaataaaaaaaatatgggtaatctaatgatgtcaataatttgaagggattatttcacaaatacccaaaaataacaaaaaaattacaaaaatacggttgtacgaaattttaaacaattttaatgattttatttacaaaaaatacggtttttttatattgtatttttgtttatttattattaattttttgttatgtatatgttatttttcgttgttgtttgggtgttattttcctgttacttttatattgtttcttgttgtttatatatacataaaaaatcgtaaaaatataaaaaaaaaaaatgtaaaaatgtaaaagaaaattaaaaaaatatatatattttatgtaattacccctaatttgaatctttatgttgacaaattagtcactacaacaaattttgatagcttttagtcactataatattttttaagtaaacacaacaaatgagtaatatcaattaattagtcctaactttgttatattataatgtaatatatagggtaaaaacatatggaaaatttgaaaaaataggcataaaataccttaatattttatccctaaactaatacatatcaaaattgaaaacttatgaccactttatctaaaacccaaaaatacccctctcataactcaaccccaactctctctctcttcctctatctctctctcacaaccgaaccacacacgatccaaaacccccctcaccaccgcccacaacgccgacccctcaccaccgcctacaacaccggccccctcccaaatcaaaaccgagcacttctcactgtctaccgcctacaccgccggccccatcaaaaccgaaatgtccaaggtaagattcggctcccttttttttgtcattgttttttttttgtgtgatatatgatttggattattgataggtattgattttaaggttataatatataatgtatgtgtttatgtgtgcaccgtgagttttgttagatttagggttcgatttaggttcagatctgcgattacgggaaatcgcagtttggggaagacgatggcccgatgggatccgatgcatgtgctgaaaaattctgtttttgggtccgacgagtctgatggggacctcgattgggatctgatgcatgtgctagaattttttttttttttgggtttgatggggaccccgatcagggttcgatgcatgtgctgggtaaaaaattttttaggtccgacgggtccgatggggatcnnnattggggtccgatgggtatgaagaaagagagaagaagagaggggataggggataatgtaaatgagggtattttagagatattgtaaaatgtgtcatat

SEQ ID NO: 41120 - DNA, 1197 bp, Cannabis sativa
  modified_base (75)..(76): a, c, t, g, unknown or other
aaaaaatagaaggatttaaaagtaattaattaagaaaatcaatgacatttttgtcatttactttaagaaagcccnnaaacaacatcctctcttttaatagagttatagataagctgccgacagcaagctttctccattgctagggccatagctattactctgcttgttattaattgttattatccaagtgattgaattttgacccgggcggagtggattcaaaggtgatgagtatatctcgttcatcggaggaggaagaatgggtgtcgtggatccgattaatgctctagtcttggatgtcggacagagaaggcggaagagggtatccgatgttggggacttgaaggattggcgattgggaagagagaaaggtggtgctatgaaaatatagcaaaataatttaaacggtatacgtggaatggtataaaatcgtattaattaaaacaatgtcaaattcttaattaatatgaaaaaaatcgttcctgacgcaaatatctcttatctttttatctttttttcttctattctattttttttcttacgctgacaattttttttttctcttttttgtttttttttcttttctctttcatttatttcttaaatggattctatttttttcttttctttattttttttccttttctcttctacatctattgttagactatttgtgatttatttttcttctttctacaattgtattgttggattatttataactgtaactgtaaaataatataaactaagatataatttgattgtaattttcaataataaaagacttttgtttacataatatatagttactttgttttatatatatttttttatacttatatatttttttttgaaaaaaatacacaaataaaacatagtttaaataagtatattttgaatattctcctattgttatattttttattctctaacaatcacataattagtttttttaaaataaaaaatcatgctatgaacccattaatcatattttcataaatatgttttcaatcattaaattcagaatttcaatttagaattcagttttccaattaaaaatcaacaagcaaaaataaaacaataatgtcaatgtactattattatgatatttaatcaatgtgaaattaaatcttaaaatcatataaataaatttacatataaaattaaaacttaatattatatactattttttttttt

SEQ ID NO: 41121 - DNA, 939 bp, Cannabis sativa
aaatagagttatttagtattatgttttttctttaaataatttagtacacaatatttttattggacaccaattgtgtctatcaaattggcacttagcgattgattagtaatattcatagaattattatattaaattatacaatactcaatacttaagtgcatcaatgatgatatgacaataagaaaaatgctagacataattgatttttaacatttctctttagtatcctttgtttttagagaaacgctaaagggtaccagtggtgcataacaccattctatgtgtaaatatcgctattggtctaactaactatcgggtcccatataatttaatataatagtttttaggaagtatcgctagccaatcgcaacgcgacatatcaagaaggtgctaggcaccactagtgcttaatatcaatgctcttgtttttaataactatcatttggtatgttgtattttgaaatcataaatatttagtatattgaatttaaatttaatcaattaaattttattaatatgatcactctcttgaattatatgaattttaaattcaaatgtaattatttaattatatataattgagagtagcattgtcaaattaatataattatattgagtaaatttgaatttttttttttgaaaagagaataaatttgaatttaaggagctaaatatatataattttaaaatattaattatgagattgagaattattaaaaatataaagtactaaaattatttttttttgaaaaaatagaaagtacaaaatgagtaaaattccttttaaaataagtcttatttgtcacattggttaaaagtgacttattacttaatacttatgtgtggaatttgtgtatgctgatatcattctttttaattttatattataatttcttcgagtaatgctagatatataaatgaattgtacatgttattttt

SEQ ID NO: 41122 - DNA, 2055 bp, Cannabis sativa
  modified_base (41)..(58): a, c, t, g, unknown or other
caatccgcacaagggcggatatccgcattttgcggattggnnnnnnnnnnnnnnnnnngattggattggatcggatactttgtgaacacccctagtgagatgtcactttttgtgacggtttatttattttattaaatgtatttttttattattatttattattttttcatatttaaaaattattacataattcacacttttcccattttgtaccgttcatcttcttcctccggtttttttatttatttacaggcgattattgtgtagtggttgttggtattcttctataaatattgtttttcctcattaacaatggttgttgcacgatcatcttctagtcctgttgctaaaaatcccccaaaacagccccaaaaaaacaaaacacgatcattaatgggtaagaagagtttgaaagataatcctcctacccctacttccccattttctcattaacaatggttgttgcccgatcatcttcttctcttgttactaaaagtcccccaaaataatcccagaaaaacaaaacacgatcatcaatgggtaagaagagtttgaaagataatcctcctagccctacttctccatttcctgctaaaagaaaattagatgctcgtacttcaaagaacactaaatcaaaactccctcgacttgtgttagagaactccaactctgattttgagttagagcaagagtttttaaagtctcccaaatttgataaggtatttttctattgatttcgtattgttttagggttttttttacaggttgattatattacacatttcttgtattttatttatttatttaatttttttgttttccaagattaagattctgtttgttagtcctcctattttatagttttatgtttgtttgactgtatgtcttgttgtcgttttggttttgttttgtcaactcttaggggaaggataaatccctactgaagaatgttcaatcaactgatctgtttgaggagatgattgggaaaagggttgttaaggtgtgtggtttcattattttacttctaatgtttttttatgcttgattttgttattttgttatttttgttttgttttagtaatgttttcttttgtttttttttttataggattgggaatccaattacactcgatcggaatattaccattcctgagttataacctctggttattactctgttattgaagatattaaaaaaaaattactgaaacccaattaaatatgttttcaaaaactgtgtttggtcatttttttcgtatcccaaactatagtatccatttccaactcattcatggtttgctgttgagggaggttcaacagccaactgagttagaattttaggtttgtttgcaaggaaaatatctgagatctattgttgaggagttttcgttattgtgaaaataaagggaaaattacacaatatattgattttttttcccttcattacaaaaatgctgtgaagtgatattttttacttttttactgtgtatttttgtgttttatacggtagttaactgccttttctgtacataacttttgtcggtttaacatatcaaacttaaaaatctcttttatataaaaagagctgttttgacgtgggatgacactttttgtgacggtttatttattttattaaatgtattttttattattatttattatttttttcatatttaaaaattattacataattcacacttcccccatttcgtaccgttcatctgcttcctcctgtttttttatttatttacaggcgattattgtgtagtggtttttttttttttttcaaattttgcagtttacatcttaaattttcctctaattttccccttttcttgttggtattcttctataaatattgttttcctcattaacaatggttgttgcacgatcatcttcttctcctgttgctaaaaatcccccaaaatagtcccaaaaaaacaaaacacgatcatcaatgggtaagaagagtttgaaagataatcctcctagccctacttccccattttctcattaacaatggttgttgtccgatcatcttcttctcctgttgct

SEQ ID NO: 41123 - DNA, 1745 bp, Cannabis sativa
ccccaagccttgtttggtgggaagtaaacgaggcttgcttaggtgcctctggctgtcttattgattacctggcacgtgcttcgggctcgtgggttgcatttatgacaattatcattacaatttattgctttttgcaggcaacgattcgcttcccatccattaatgatccggcgcatttcatgggtgtcaattaaatactcaagcgtttctagccgccctgatgagcgcttatcccaactgttagatttgcagaatgcgaatcgattgtgattctcaccgtacgatgacgcttggtcacagttgcttcacacgcgttctggcctataaaggcagcattctcctttcatttggttactttcaccaatttgccatattttctcaaaaccttatagagagaaaaaatgtcaaacaccatagatttcttgctgctcttccttcgccgctgtcagtcctcgttataccgtcgaccaacgccgaccctcagctctcaaccttcatgtaagttttctggacactttgtacttgtttactatttttttgcatggtaggattagaatttcttggttgagcgtcgaatttaagggaaataactcagactgaatttgtcgcgtaatgcgtataatctcccttattctgtgttggctattttcctttatttctctttgaagtcgaccccgtttgtcgagatactgcttttagggcatggggcgatttttgcttccaccttctacgttttctttttattttcttttcctctactttcgatgcctttgggatttttgcacccgatgtttgctaaggaaagtccttcgggtttccattttttgcaaacatccggaggaggcctctttccagcggttaggggactcccattcccttttttaacattagggtttggtttggggcctaactgctggacttcttatttcttcagaacaaaaatgtctgcccctgcctccgaagcgaagtcttctaaaaagggggcggccactctagccaccatggaggaagtcatgaagggccctgttgcccaggaaaactacacttcccgtgctaacggttgggaggcggatgagctccgctccacctagacttgcgctcaccaactggagaagattgtgaccgtggctggtatcaagccatccgcgtctggggtctttcaccgcctgcctcaggacaaggagacgcccaatcacaactacgggggctttggagcctggagccacacccatctcatgtctggggccatgctccctcttcaagattatttcattaactttcttgtttttgtcggccttgcgccttactaactaattccacaagcttatcgcctgctctcgggcttgtttattttttatttaaccagagactgggcttcacctagctcggctgaaattttgtacttttatgaacttgtatctgtccccaaaaagggggacaagcttaaagatggttttttcaccctccgggcccatccttctaatgagggctcgatcccttttaattttcaaaggaatgtaaaggaataacgccatcgctttttcttctcttccggtttccaagctgtggaccacccggagcttctcacggagtggcttaggattccttcttttctccgcactgctcctacctagctgttcctccagcataccaagactttctccacttatgacaagaaaggtcttaacgtgggagacttggtcacgacggagaactatcagatggccaagcttatctccgggagc

SEQ ID NO: 41124 - DNA, 2231 bp, Cannabis sativa
atttgcatagtttactagttaattacaaaagataaaaatgccattgaatctggatattattcagctattctgttgggcttttaaggcccaatttgctgctcatgagttgctatctacgtgtagaagtgcacaggaaaccttgcagagcacctcttggctggccacacccctgtggaaggcaggctggctgaccatagggccagctgggggtggcctgccagctcctatgagggtgttggtgtgtcacttgatgcccatttgagttttggggtttttatttgcttaggtgttgacttgaccttcttattggtgagttgtactaccacgtggcactaattttgtccacgtaaacatgccacgtcaggaggacaaaaattggggtaacagaaacaatttttcaactggtattttttgacatagtggttcacttagtgatccatttacctaaagtagggatacttgggggaccagtgcgctacaggtggatatatccaattaaacgagccatgtccgtgtctaaataatatgtaaaaaaatcattccggatcggaaggatttatttgtgaagcttatgcaactaatgatgcattaagctttcattccatgtacttctgggatgttgaaactcggtttaactgataaaattaaaatagtgatgtcctcccacataagcttgaaacagaattctttatattcaagcatgttgggtgatccatttgtaagaggaccatcgtgtctttaccaatgcaagaaaaacttaagacagagtggtacattctgaagaattataatgaagtggagaagtttatcaagtaagatactttgtgcattcttaatttagttttattcactcacgaccttctcttacaaaattctatttatgtgtagtgagcataggaatgagctacaacttaacggtgatcaaaatcttcacacaattcaagagaaagagtttcctagttgcttcatgtttgagtaagtattgctttctactaattctgtcatcaaaataaggtttcttgtactagtattgatgtaaagaccgcttaagatcaatattttggattattgaataattagggtttattcatgagatttaattattattcataatatactgtggagatttatttaagttgatatatattaattattctacatatgtgaatctctcgttttttgtaattgtgtttggtagcggtggaaagtgaaattgggccattagagagtcacattttgtaaggtatagaattttatgattaatgataaattacccttggatagttttaaacttttgattattatttatgggaaaaaggtctttttactaggttattctttttgtctttttgtgcaccaataacctgaatattagattaaaattatatattagggatgcttaaccttgaaggaattggagaacactttgaaacacatttcactttgtaccattcttctctctttcgaaacacctagagccaacaagggggaaagagctttcagctaaaattcaagagatttcagccaaagattaggagttccaattcaaggtataatacttagctttcttatctatggttttctttagctcaagataggttaattgcatgattttagtgatttgaggttctgtagttgtgcagctattttgggtttgaattctaggattaagagaggtttattttagttgattttgagctgagatagctagttgtgccaaggattactcaaactcaaagttagagagcttaagttggctctctaatggtatttttaattttagagttgtttatgattttctattgcttgatttgaatttattggagcataagcaggtattttggagattattggagtgtttggggttgatttttgtttagggggtcaatttttgggtttccctgcactaaatcggcaaaccggttttgtccctcaggaaacctagtgaaccggttaaccggttggggtttttccagaaaccctagttttcctcaaattattgatatttagtgtatggtcatatatttcatcgatagagttattcctaatttgatattaaagtccccgaaaagtgttttagcgtgtctctcatcggaatttcaaatattgtggtttaggatcgtgtaaagcgtcaagctgtaattccactcaggctgactgacacacctgaacacagaaacgaggtaagatagcataaaatatatatgtgaatgtatgcttgttattaattg

SEQ ID NO: 41125 - DNA, 1293 bp, Cannabis sativa
agtgtggtggcttgtagtgtggaatgttgtagcttctagtgtattaatgagtgaagagaagaaaaaaaaaattggtggtggtggaatatgggattcgggtgtgggtgtgaaattgatgggaacagatggttggagagggtagatgtaattggggagggtattatggggataacagtaaaagtgtcatatataactaattttgttaagtataagtttaggagaaaatttttaagataatgtaagcatattaattcaaatttctctttataaatgggatacataggtcgtatttggattacattttttgacataatatttttctaatactttcaaatacgattttttttactacacatatatattatttttaataataataataaaaaatattgttttggttcctatctttttttaattagtttagagaatttatttatttattttaataaatatttttttaattagtaataataataatattttgttttggttgctaacgattgttattttagttagttagaaatttttttgaattgtatataaatatttttttagttaattaatcaattaatatttataaaaagaattaaaaataaaaattagataaaactattttaagtgattttaaagtgttattttattaatttaaataagatatttaaggagaaaatagttagagttattctgagtaattttagagcgtcatgttaccacttcatacttctcctttataatatgtatagacaaaatacaaaatcaatgctaacgaaagtaactataaaaaaatgatgtagaagtggaaaactatttttttatacacataaaatttaaggagaatataaatagagttattttgagtaattttagagcgtcatgttactacctcatacttctcctttataatatgtataaacaaaacagaaaaacaaaaagaaaagaaaaaattgataataagaggtatatatactaatgtagaaaatagtgagaagtatgaaaactatatagatatatacatatgtcggtgaaaagaattagaggaatatatgatttatatattgattatagtttgaaaataaaaaaagaaatatcggtaattaattaatgagtgatatttaaaaaattaatatctttgttaatttatctatttttaaaagtaatcattatttttttgttaattatgatataaatatatgtaactttatttatttaaaaaaatgtgatagtgataatgttatattttgatataatatttttgattgattaaatatatgttacaaagttacaagtttgtta

SEQ ID NO: 41126 - DNA, 2490 bp, Cannabis sativa
cttaaggtagataatggttctttatctcaggatgttactcgtctccaagacaaaagagagggtctccagtctcttcttcgcaggttggaagatgagcttaaggaaaaaaagaccagggaggaggaacttgaggctgaggttaagagccagaaatctgaggtggagcagcttaggaagaaagtggacaccttagagactactggtctcgagattatttatgacttttggaagcccaatcccaaggaaaattttgaataccttggggcttccaaaaacatgtttctcgactactgcaccactcaggcggccaatgagaatcctgaggcaaccacttccacttctccgaccgagcagaatgtcgaggctccttctgtccagactgatgatcctccagcctcttcagacctacctgatcctcctgctgtttaatttccatctttttactatcttttttatatgtctattcggccaataggccttcttttgagacaaggtgaccaaccaagcggtctttaaacttggaatatctttcatttttcgaacaactggctgaccgggtagcctttaatcctgggtgtgaatgctttgttattcttaatgaatttcatcccttatttataatcattgtccaactgtgttcttttttttctttaccaaatgctttgtacaggtataggtgccctcaagtgaccgagcagacttttgactcttggtcacttgttttcacaattatgcttttgtctgtctggggctttgggtacgaccaaaccttttgtacacatttaacaataaagttatgacatgctaatgaacttgactcaattagaattgaaataagcatctttattcatttattggtcggaaatatgtctgttactgtagtaacttacattgaagctattatgttgatctaacctaatctttaacttagcataaacaaaacaaattgcagaaaatgaagactgtactttcaaaggtggtcatccaacctgaatactttataattttatctgaacctttgggcgtggtccgcccagaaggccattcacttaagagtaaatgttcttttgttttatacttaacatggtcatctgacctggtacttttaatggtagtattgtcttaagtattccccattccaatatcttggtactagaatgagttgcattttttcatcatacttacccagtttgtatgctcctgattctagaacttcaagtttgttgtggttcgtttttcttcaacttcatcaagtgattctggaaggagtggatgattaacttcttggttatatgtcaatcttctgtgggacggcggtttgagttctacgactagcatagcttcataaccatatgccatgccaaatggagtctgtccggtcgctattttctcagttgtgcgatacgaccataataactcaggaagttccttcggccagtttcctttagcatctacaagtcatttgtttaggctatctttgagtgtcttgttgactgcttcaacttgaccatttgctaggggatttgctactgcaaagaaactttttataatcccatggttcgcacagaaatcagtgaaggattgactgtcaaattgtgtgtcgttgtccgagactatcttgtatggtaatctgaactggcaaattatgtttttcgcaatgaagtcttggaattttttggaagtaatggtggccagtggctcggcttccgtccatttggtaaaataatcaactgcaaccactacgtactatactctgcctttgcccttgggtaactgtccaatcagctcaattccccaaatggcgaaaggccaaggactttgcatctgagttagttcatagggatgtgggtatttttgagaatcttgggcacttataacatttcttaatgtaggccttggagtcttcaatcatggtcggccagaaatacccttgccttagaattttcttggataaactttgcccagctgtgttgttgccgcagaatccatcatgtacttgtgacaaaagttgtgcagcttcttcttgtgtaacacacctgagtagtggcatgaagaatcctcttctatacataacaccctctacaatgatttaccgtgcagcttttctccttattttttgagcttcaatgagtcttttgctgatgtagtagaccgagtgttggatgttgttctcttctttgatcagtatggcacttactggatgttccatgacaaccacgtatattcctaattcttctctgtctagaggttttgacagtacaggaggttttgcgagttgcatttttagctcttgaaaggctttttcgcattcctccatccattcaaattgcttatttcctcgcaggatgttaaagaacaaaatacacttatctgttgactttgaaacaaatctactgggtgcagcgacccgacaagttaaactttgaacttccttggtttttgtaggcgatttcatatctaggaggacttgaattttctctagattggctt

SEQ ID NO: 41127 - DNA, 1172 bp, Cannabis sativa
aagcccattcttggtccatcatcttaagttactactgagcctaggcccatgaacgcattggttggcccattacatatgatcaataagcatttgttgctgattataaaggaaattatatttacggattttaaaaattaagtttgactaatttatatggtattttttttttaagtctttttatagtattttatatgttatatatatatttaaattaggtttttaaattccatatttaatatttttatttgtttaggtagttttatttgttactagtgccgcaaaagtcgttggaatttgctgctggcgtcggaaaaatcaccggagtagctgtcggtgccgaaaaattcgtcggagttgctactgacagtggaaaatttgttggaattggcattgtcgcgagaaaaatcactgaaaaaatactaagagattggttttcttgatgaagaaaccactttcttagtgatttttccggtgacaatgccaattctaacaacttttttgacactggcagctacttcagtgactttttcggcaccgataaaaaacttcaaaaaagtcatcgaaattggtatagttgcgcagaaaaattaccaagaaaccagtttcttgatgaaaaaaccagtttcttggtaattttttcggtgatttttccgacgataatgctaattctgactacttttatggcgtaggcagcaactccgataaattttttaacttcagcagctactctggtgacttttccggtattgacagcaaattctagaaaattcgtcagacttgacattgtcaccgaaaaaattactagaaaaataccaataaactggtttcttcatcaagaaactacaagtttcaagaaactaccagtttcttggtgatttttccggtgataatgtcaattctgatgacttttctggctctggcagcaactctggcgactttctccggcgtcggcggcaactccggtgatttttccggcactgactgcaaattccggtgcctttttcggtacgggtaacaactctggcgatcactgtagtttcatttgttttatttttttaaaaaacaaaatatgaagggaattcaatattttttatggtaattcaatcttgttaagtttttattttaaataacatattttttcctattaagttttcttaccatatttatctaaa

SEQ ID NO: 41128 - DNA, 891 bp, Cannabis sativa
ccgaatggttaggcctgtgttcttctttggccacggcattgcccacattgtaggacccggatggaactccttcgtaagagatcgcgggatcagagttggagacgttcttctcttgagacttgttcatcaagttacttctccaatcgtcataatcaatgccaaattaatccgattaaaccaccaaaataatcagactttcgttcctttgttaccccaagaagaacaacgacaatggcgtgatcaccaaccacaacgacaagaagggccagaaccaattttgtgtgtaaaaagattgagtcttgaagatgtgactaatgttgttggtcatcaaattgttatgcctaaagagatattagaagtgtttatagcatcaggaggagtaatggatattgctaatttgcaacatggtaattttatggttgatttcttagaccaacacaatccatctttgatattagacgcaactttgggtttgagaattgatacaatggaagtttttattgcatacaatcattggttgcattatgtgcatcgtcgtgggcttcgtgttggagatgtcgtcgtcttctgtttcgatctttttcgaatatgtatcatctcatcggcctatcgttacagtcctcaacatggtgtttgcgctccaattccgatctagctcgaatcaataattaatcagttgtaattgttaaatcaatcttggaatcttgcttcttctttttttgttacttgtttttttctataacaaaatttgattgatgttaataagtactattcataaataaatgcattacattttttgagaaagaaattgtcaattagtactatgtagttagtattcattctctcaattacttgattataatttgtcactaagattgtgataaaatagtg

SEQ ID NO: 41129 - DNA, 1840 bp, Cannabis sativa
  modified_base (1706)..(1717): a, c, t, g, unknown or other
aatttttattatcaatcatatatatactatatataattaagaataaaaaagaaattatatatatctatatcggggtcggatatggtgcggatagtattatatatcctcgccctcgcctcatccctgcttcgcgtattgaaattgtcccccaccaccgccacattaaccaccaagatggagaatctccacctaattaggggcgggtccccgcggttacccatctccgcggtataaattttgatctctagtaacattctatataacactttaatacattattaactaatattatttacaacttaattaaaatgtaataatttctttaacagtttaatagatgcttaagagatagatatacaatttttttttaaaaaaaaaaaattaatatattatctattaaaaaatgaataaataaataaataaattaataaataaaatcaagattcttccaaaaaaaaaaaaaaaaactattgttttctcaaacactattttcagatttactttttaatatctttacatgaaacaattttttttttttttttggtttgggcttccttttattttatttttttttgaaaagaaattataattttccacttgtttatatataaaaagaaaaaattgaataatctttattataaaatgtggttatttaacaatttttgttggtttaatattgaaattccatattttaatattcccaattttattatttaattaaatgcaaaataataaaactgttactgaaacagtttttctttagctacagaaaacaactttgtaactccaaaagccagaaaaacaaacagtgtagaaaagtaaaaacacacaaggtttttgtacgtggtttcaacaatccatttagattgttactagtctacggggccaagcccagatataaaattcattagataggtctcaaaaatacaaagtaattgacctatgcataaataaactccctcttattatatgccgcaagcttgatgtattccaccttctaaccaaaccttgttgaaacttcaagagctctaactccattcgatctccttgaagagtgtttgcttcctctcggtgcaagacttgaaaagtaatcttccgaaagctttgtaaaaccttctcctgaaggtagcactgttgttcttcttctttgtaaacttgaatatagactaaagataatacaaaatacaaataaacagagtaagtcgaacaagctcttctctacaaaataagactctcttttctaaagataagagtaaaaatcaaagatacaaaagatatactaaacctagctgctacaaggtgtatttataatcaatatacaccttattgacagcttacacacggtctgaacaagacgacagcccactaaaaatttctctaaaataaatcttcaatcagcccaggaatttccatttctgtacctacaaaatcgtgagcagtaagtgcgactttccttttatagaaaaggaaagtttaagtctagttttctcctcaagaaatctgatctaacaaaatgggaaactcacacaagatcagaaaagacgttagatagcaataaattgagtaatcaaacttaccttgtttaccttaattttcataaataggaaagttagacaacttttcttccaaagttagatacacaaaataaggaaaccaatattaacaccacagtgaagttaataataaataataaaatatttttgtcnnnnnnnnnnnncaaaaatggaattaacaatctccccctttggaactttaattgacaaaacattttattaggagaaaaattacatcaagtgttagaaacaaaagtaaaagagtatagaaaatactccccctgcat

SEQ ID NO: 41130 - DNA, 2575 bp, Cannabis sativa
agcccaggtggaggcattaacaaagttgctgactgcataagccaaacaagctcaagatgtcggcgagctgtgtggaagatctcatactactgacacctgccctatagatgtagacagtttgccaatggagcaagccgaagccattggaaactatcagaataatcatggtttcatccaagggcggggtcattgacagaattttaaagggcagtttccaaattagatgcaacaagggttctactaacagagaaatcagcctcaacagagtcaacaacagaatcaacaatagcaaggctctagtggagggtttaatcctcagatagatatgctactacaattcatggcagagattgaatcttccattaaggtcttagaaactcaagtgggacagttggcttctcaaaacactaatagggctcaaggtaacttgcctagcactactgaagtcaatttaaaagagaactgtaaggaaattaccttgagaagtggtaataactatgatgatccaagctgagacaagccagaggatgaagaagatgatcaaccagcacctacaccagaaaagaagaagactactgatggttttcaacaaaaagaaacttctccttccatcagtattgaccatcacataaagattccctatcctcagaggttgcgaaagaatattgtggataagtagtttagcaagtttcttgaagtatttaaaaagctgaatatcaacatcccctttgcagaagcccttgaacgaatgtcaacttacctgaagttcatgaaagacattctatccaagtaaaagaagttggaagaatttgagatggtggcacttacttaggagtgcagcgcgatcctgcaaaagaaactaccacccaagcttaaagatcagggtagttttaatattctatgctcaatagggggtttgatagaaacaaaagctctatgtgatcagagagcgagtattaacttaatgcccctatctgtgtttaaaagactaaaactaggagaagccaagcctacaacaatgactctacaaatggcaaatcgttctttgactcatcctcgcggtataattgaagatgttttggtgaaggttggtaagtttatattccctactaatttcttaatacttgacatggaggaagatgagaatattcctatcattttgggaagaccattcttagccacggggagagcgttaattgatgtgcaaaaaggggagttaaagttgtgcattcaaaaggaagaatagactttcaatgtctttggcgcaactgaaattcctacttgttgtcgagtggaagttgtaaaggatggtcgagaagtaactgctaacaagaagaaaggaacgtccaaagaattatttttgaactttttgatgacgtatgaaaagactaatgtgggaattgtgaaggtgactctcagttagggattgctttgaaatttgcagcgttggatgacagttctcttcatttggtacaagggcccttatggacgcaaggggtggattatatccaagttgaactttgtaaccatcaccatcaccgccatactgatgtggcgctcaggtaagttccctttcctttattttaaatgtcatattgaggacaacgtgtcactatagtttggggggtgaacttaattttttttttaatttttagtttttaaatttttttagtttttagtgtttctttgttttgcattaattttcttaatatgagtcaatttgaaagtaggtagatagcatgatttaaaaaatttatttatttttcaaaaaatctgtgtgcttggtgatattacattcttgactaatttcaatttttgctttaaaagaacatggaatcatattaggtaattttctagtaattaaattggtttatgtatgctaattgtgacttgtggaaagttgtttgaaaaattctagaacttgcttgcttgctatttgaggcgaaataataaattatgcatgactagaaaagtgatttagccattttttttagattgattgtgcctttcaagtcatccctgtaagtttatcctagttaccatttttgagccttaacctattctttgtttctacacattttgagcctagaaaagataaactctgaatatccaaaacttaaccctaagtataccataagtggacctttagtttggaagaatttggatgggaagtttgttgtggaaaaggtgtgaaaattgagagaacatgaaaaaaatattcgattgacaacaacctgaaaaaaaaaaaaaaaaaaatctgacaaccaatgtcaaattaaaaaaaaaaaagataaatttaaagttcttgcaatcttaaaaaaaaggaaaaaaaaaaattctttcatgttattagaaaaaaaagggtattgagattgtgtgtgaaatatttgggtgacatgattggagaagcttatggtatagacaagcctaaatgaccattttatctacccttacctaagcctaacactacaagcctagaaagaccttttgattcttagttgtgcattgatttatatgagtggagaatagtgagtattgtaagcatatggaattttgggttagtagattgatgatt

SEQ ID NO: 41131 - DNA, 1656 bp, Cannabis sativa
  modified_base (219)..(221): a, c, t, g, unknown or other
  modified_base (248)..(248): a, c, t, g, unknown or other
tttttagtgttgtggttggaattggaaaaaaatttagtgttgaaatagtatccttttagtattgatttaacattaaatttgggtttccccattggagttgccctgaggggattgaaaaagggtaaataacattttagattttgtgtgttgcaaaagttaccaattggaccctctattttgttagacgacaaaaaagaccctatattttctaaaatggtnnnaataggaccctgagcttaattttcaanaattttattttttaatataaccaattttaagataatttctaatacaaagagatataaaaaatgtaaccagttttgtcataacatctttagataagattattattcagttttattttgacaaaaaatcaattcaggttcttatttatacaattttgaaacttacagggtccattttgtcatttaccaaaactaaaatccaattggtaacttttacaaaacacagggtctaaaatagtatttacctattgaaattagtgctttacatagatcaaatcattcaactcggccaactcaacatatttttttttttttatagtaaatagttgtgttaagattagatcatggttcattgggctgaaaagtaatagaacaaataattatggattgaacatattctaactttatataactcaaccccacttaatttttgagagacgttctaaatttaagataatttttatatataaaatatattttacattcacaaaatatatacaaaaattatattttatattttaataaataaattatattattacgataacaataaaaaaataaattaattaaaatatatcacgaatatgcagtccatagttactctactacttctataaacaagtctaacgtgagaatcaatcattataattaattttcctgcccatacaatgattccaccaccaccttagtttttttaaagcactatgttaacatacacatgatacatatatacatatcatgtattttctcgtgcactaggttaaattattttatcaaatattaaaacttaaaatatttcatctcaatccaataaattcaacataatctattctatatattattgtactaaataaaattgagttgtacaagaaaaaaattgaatggtttatagtttcttcaaaccttaattattaaattggcacattaaaacacatctaactcggcccttatatatccctatagttcaatatgtattattttatttataagctattaaatttgtgtgaattttatattttgaatttaattcaagttaatttatacaacaattcaaattcagcaccaataatgccaattggattaggaatacattgtagaacgattattattttaatataattatttaaaattcgttttgcatcaccaaatcaattaaatattaaaaataaaatgtcattctaaaataatataattatatactttttttttaaaaaaaaaaaatcaatgattctctattaaaaataattaacatgttgttctcatacgtaggaattttaaatttttcagtagaatttacacaaacacatatatcaaccctaaattagttggtgcagattaaattaaaaagaaattactcgatatattattttttatttttttcttaaatttatgatttaagtttttaaaagta

SEQ ID NO: 41132 - DNA, 1157 bp, Cannabis sativa
tactagtatactttaccaataccttggaaatgacataccacttatccaagtgtaagtaaacgttattgctaattatcacgttagtataaattcagtgcacttataaatcatgggacttaaactttgaagcatataatcacaattactttctactatgatgacatcactgtaatcatgaataactacatgttatggatttatcagaaatttcatattaaactataaacatgaaaataacatgtaaacataaataatttctaatcttctatttatagcaaataaaattatattaaaatagtttttgtttagggcataaaatcccaacaaactcccacttgtactaatataaaactaaaagtgcatttcaatcaatccatagtctcgatatccatatcaagtgtagtgtgtttgactatacctaaataatagaaacagtaaggttatagtaagcaatagctttctccattattatttcctattgtgttcttaaaacattatggaacattatttttctatatgtattactcctctaaagatattgaattcttcactacttaacaaatgcatctgaatatacaaaagatacaaatctcattctatccaaaaaaaggaatagacattaaaaacagtcgagaactttcttcagtttgaataactttctagtgtcttttaaaagcgactctgttatttagctttactggtagaacaaaattattatagatgggtttctacaccctagtaaaataatttctccacccctagagtaatcaccatctctgatatcaagttttgagtttgtgtagatatatagattctaaatacacccctatcatctaacatataggccacttttagagattctttcttgattatctccctatgttccttgttcgattacatctttgattggtcccactcaacagtaggagtctagtttagtgcatacacatgtgtgtatttatcctcttactattggtacttagaaaaatcttgttgtgacattttatctttatctggaataataaattccttctagactaagtcaataacatagtattatagtattatcattgaaactgttatacccaaagttcggtaagcacatcagaggaggacacgtgtcgagctgggaagaactcaaacacacaaacgacaag

SEQ ID NO: 41133 - DNA, 1520 bp, Cannabis sativa
tattaaggtgatattttataattaattagcgagtttttataattttcattaaagtaaaataagagggagctggtattaaattttaccaacagtgatattacaacttgcaagagtgctagcctgttaggcaactcgcaaggcgttaatgtggcaactcgctaagcagtccatatcattattttgttttccactaatgaaaaaacttgatagaatgaccaatttataacattgtgaatagttcagagattatttataacgggttaaaacattcaaagggaacaataatacataagtccgaactaattgaccattaattattagtccaatttcagagtattagtaataggagggcaaatttggcaaaaaagttttcaaaatgccacgtaagcacaataataaaggcttaaagaagaagaagatgaaagtgttgtgtgaagccaaaaagaagatatggattgggtgtgaagtgtgtgaagcagtaaaaggattaggctatttggaaaactgagtgagtcattggcttaactctctcttccatggcttcattcctttctttatctctacccaaactcaccaccaccaccaacaacaacttcataataaaagctacaacatccacaactactactcctacagacacccttaatgagaaattcagcagaaaaggcatcaagttcacagaaaacgacaacaaaatccctgtcgttgagttaacagtcagaaatggtagctcagtgagtcttcaaatacctgaagctcatgtcacttcatacaagcctaaggtgtattggaaagatgatggttttgaagaggttttgtacactcataccactcctactaaaaaaaccaaaggaggcattgctttaattcttaatgaagtctctaatcctcctcttaataagcccactaatgtctctactagattctctactactcctaaggccgcccccgccacatcatcactcctcgctaactcccaatggagtgtcaaaaacgtcgattcagatgctatcgacgctcttcaggtacataattagatgatgttagagtgtctcacattgaactaaactttgttatataactttattaatttacttagttttagttttgagatgtaatgattataatcaaggtttcttaaagtaacaaattctaacaagcataaactagcaaatctataatcttaaattcaagcatatttaaatatttacaatatttaaatttaccatatttatcaaatcatttttcttaacaaataaattctaaatatcaatttttttttgtgattattattaaatctaacatatttaaatatttacaatatattctaaatttaacatgtttatcaaactatttttcttaacaaataaatcataaatatcaatatttttgtgtgattattattaaattctaacatatttacaatatattctaaatttaacatatttaatatttatcaaaccacccgaataaatatttgggtcaaaataacaaattctaaaaagcacaaattggcaaat

SEQ ID NO: 41134 - DNA, 1206 bp, Cannabis sativa
cacgatctaattcaaaaatttcacttgattgcgcatgtttagcatattttttcacagtaatagaatcattataactgattccactgagttcaccgccatagaattcaacagttacacttctcatgaatttatcttgaatcgttatcttttggctcaatttcattccaatttcactgaataagttgagtgggtcttatacgcaggcttttaccccgatccggccgtagaggaaagggagggtcaaagtcaaaataaaggaaaaaatgggtggcagaagtaggggcgagatggcagtggcgaggcaggtgttgttgcttacaacttgcatgctcaacacttgttccccttgaggcattccactatttaacccaggaagggaaggaaggagtatcactcacccacgccaactctaatctctaaccctttttattttttattcatatttttaaagatttgcttagcctcaactccctttcgagcgcgtgcaacccactttttcattttcttgatttttggggtgaaggaggcatagaactactaccaagatgttataaaattttgataccttggtcaccatttttatatattttaatttataaattagtataaaaattattaatcactcataagtataatatttaaaaaaattacgggtgcctagctaataataaaaagggtaataaatattgtcaaattatatattatttttgtatttatcattattatcaaccgtgagataatatctataaattaagttgtatgattatagataaataatacatattttaatgcttctttaattttttttaatagtgtacaaattaaatttttttttagctaaactttctcaattattattttaattatatttaatatttaaactcaaattttagtggtaaaactttttaaactattaaactgttagtaaatttaagatgccatctattttttaccgttaactgccaataaaaactacttatgtgtacactcttgtacgtttatattaatacacctaatattattatttaaaaattataaaagattatttcaaatttataataactttatttcttaaatattttatttttatttatttaattttaaaattattttaaattaatgtactaatataaacatgtcacatctacaaaagtgtacatataagcagtcatgacagttaattgaatgacactttaaatatagtaa

SEQ ID NO: 41135 - DNA, 1689 bp, Cannabis sativa
gaaaccttttggttgcacatggacttcactcagctcgtagtcttgttcggatgggtgacgcgtgtctttaatgatggacactaattcgatgtgactctaactaggggtctcttcgattcctgaccttttgatgtctattgaaagctatacctcgaatcaaagttcgatgtttgagcacattttgacagttacacttctggtaatcaatacttaacatctattagaattttgaaatgattgatttccttttcagattacttataaatagaacccaaatcctttcgtgatccttttagccatttcaacttttaaagaactaaagaaaaaatttccaagaaagttttctcttagattcttcaaagaattaatagaaaatctcctgacgataccatccgagtagagcaaaaaagctttgaatcagtgagtaagttattgcctttcttttatatatttgccatgaaatgcatgcattatttctgaattctctactatggattttgcctgttcttgaaatgttctaggttaactgtagaataactagatttagggtttggaaattccattcatgtttaatcgtaacgcctaattatctgactgcgcttcagttttaaccttaaattgttcattccatccgtccataagattttaacaaaaatcagattccaattgaagttttgaacttctggcattggaaattccacttctgggtgaaatcttttcttttgattcttaatcaggcctggttggcatatacaatcttttttcattcattatcctgaccaactcttaatttcttgtttcccaccttttgtttgtaggtagatgaaccctagtgatttatttttgaggatgcaagcatcatatcgaccatgacttgcttcaactcctatacgaagatcatccccgtctccgtgcaagtctatcttcgtatagtgacaatctttcaaattctagttttaaagattgagagtaagtagcgagcacacgccttccccggaaaccgaggttcaactccatttctatcccgactagattcatggcgaagaatacgaccgtttcatctgggaacttaagaaaggttggagatgccattttcctgctatgctatctggatgtacagaaccatccgagcatagttgacactttgcccgagggccaccaaattccggctactaaagtaaattctgttgccaaatttgctgtgactattgcaaggcacacttctgataaaactccatccaacgtaaaatgatggcacgaactaagtagactgtcagaaaaccctcgtctaccgtccctcagtgcctgtctagctactctagccaaggtagaacaggcccatcctacggtcgacgaggagactattggagacattgaggtccaagagatggaggaccagggcgaggtccgtcctgcatctcctcccgaggctgaaggtgaagaggaagagggggtagcttgggtgctgccctttggtggctttaatggaaaaggaaaacctgtttcggagacaagtgatgtcttggaagcttgccgggaatacgtcgaggaggagtacaccaaggctcatcctgtaaataggagaggtcaagggaaactcgatggatttctccaccatccatcctgaccatgaagagattgactaatcttttcgaagatggtctcttggggactttcaaatgcttcctt

SEQ ID NO: 41136 - DNA, 1530 bp, Cannabis sativa
  modified_base (1503)..(1504): a, c, t, g, unknown or other
agggcataaaacccaacagcatccggataggatatagtctgttggagttgactattcgaatctacctttccaagagtgacaactaaccaagtggaactcctttctaggggaggactagttatcctgaagattgaacccggaatggacatgatagttttctgggaactcccatctggactcgactatcattctacaagactcctttcggggctaacaaccacgagcgaacaactttttcaaaaatgacgtttgcggagaccttttcatttggagaaactataccataaaatagttaatttaatttttaaatttctttttacctattagtaacctaccattacaggtcaaaaaatatataaccataatagcagggccggccctgagttgaaatgggctataggccaaaataattttatttgggcccttactattaagattaatagtattttttaaaaattattaaaaaaatatgtatattttcaaaaaggtaattttttgatttgagcccctaaaatgagtggtttttaggtgcggatctggccagcctatgtccaaggccggccctgtataataattacaataaaaatataactattaagtagtcactttttaagattatcttcaaaaaaaaaaaaaaaactttaataggtgaaaatagatcatttaatattattgtgttcaaacacattacctgtgtgaaagataatatatttttttgaaagaaaatactaaaagaagattattatgcaaaataattaaaagaaataattattctgcaaaacacattcgaaatgacaaaaagaatcagctcggacattgtttgaaccatagaaaaaaaaaaattgggcatttgtttaaagtaaatgcagtaattttgaaatatatatatatttgtagaggaaccgatcttaatgaaagtgtaaaatgtttgttgaccaaattcaaataagaagtacaagtttcatcttcatcatatctctaatataaaattttgctttatgagtattttttgtttcgtagtaaatccaaataattgatggaattttgttaattttcgtttaatttcattttgtaatatggatggtctgatggtgatgttgctgtgtagtaaaggcttttgtgaaaaaatcccacatcggaaacagataaattaaccaagaaacacagctactataaggcttcaagacttgagccttatcaaaccacgcagtcacgcggtgaacacaaagcgaactattctttcgccttttactaaagaataccgtgtgttcgccgcaattagtggcatacgcctatttttggagaggtttttcgaaagggaaacttctataataaagtctaatttttttttaaagtaaagtttctcaattctggatattaatgttttgttttattaattttagggtgattatacacttttagtattaatgtattatttatttcttttgggcttcgtttggaacgtcgtattattagatttctatttttatataatactatgtnnaactttaatttatactaaaatattat

SEQ ID NO: 41137 - DNA, 2492 bp, Cannabis sativa
tatgcgagctactctcttgtctcaaatgcgattagactttggtcatgctcgctgtctctcgttgattctatcttaagcgaggtttaaaactttgaggagtcccttgtggacatctcagttttcattagaaatctgagtatacgtgtcctctaaacaggggtctggtctcgagtttttaagtgagagaaatctcactataacacacctattcctctggatcattcagcttatctatcttccagctggtttctcccctcggacaactttcttggggatgacgaagccagtattatagtataagactttgctaggggtaaattagatagttagggtaggactagttttacttctatatttttgtgtgcatattctcacgtggtcacttctgacacttgatttgtttgtctttttgaagcagccaggccaatggaggagctcttgctgattcttgcctagacctatagtccagactctgctcttcctccgacgcctgatcagatggtgaccctggggagatcttcttctagcatccccttaggccaaatcgtcttgattgacgaagacggggaggtcgaggaggaagaggaaggcaagattctggcccccttggaccgaaagcacaagggcaaaatggtggaggcggagtcttctaaaaagccctagagagttgatactccgaccgtcagctccgactcggggattccaccctgaagcagaggaatactctatgcctcccgacatcgtccttacgcccattcccgcaaatgaggagagacagcaactccagattgccaagcataattatgctatggctgagtatacgaaggggaacactgaggtggaggctttgaaaaaggtctcacgggaggcccagcagaattccttgcgtgatgaggcctttaagaacgcttgggacctgaacatggaccctctaaaggactggttcaaccgctttgttgggcccaccctcgctccatttgcctccaagctgacgagccacttcgtctccaacctgacccaactcccggccaagagatatgcagcctgcgctttcacaaactccatctatcagattcaggatatcagtgcttctatgaccgctgtaagtctctgttagtattttttgggtcttactttatggcacctaatctcctgtagttactcctttttcttgtattgccagatcgctgcagagaccggtcacctctcaaagactttcattgatcatgggtacgtcatgtctgaattcaggggcatggacgaagccatgaagagtctacgaaacttggcggctgagaggaaggcatttcgggaggaggcccaacagagggaggctcaggtggagcggaggcatcaggaggcgttgaaggccaaggctgaggagttgaaggcacgggatgaggtcgtggctagggcgaggcgcgagcttagggaggctaaggagacaatggatctgactgccaagctgaagtccctgaaggagctgcaccaggctaacttgcagacgactactaacctaaccattgaggtgaaggagctttgtgacttcaaggctcaagctgaaaagaaagcaaaaagagatgagcttttggcctccgttacttgccagcactgcaccaaatgcttcgatgatggcgtctttatggcctggcagactaatggcccaaaccttaagctcgacttctatccaaagcctgaggaggttctcgtcctcttctgggagaagaagaagagacttgacgccttgctggaggagcgcaggggtcctcgccttccaccgcgaattgattaagccagtcgttcatcactattgctattatccttatcttttttttttctttatatatttagtccttttttccccctccaagacaatttatattaaggggagacacttaaggcccgtccccaggcccttatctttttttttttagagcttttctttaggtttgaacactttacatttatgcttgaatacatattcttcttttttaacttttttaaacttttagcctgttttacatttgtctgtgttgtatgccttactaccaacctgagtgacatgaaaatttgttttaggtcactcagttttacaaattttaatttaggggttgcatatacttgtctggtacaaattttctttacaaagcataaacttttatcttttcggctattggtaatactttcggaggtgatcagcgttccaggccctaggtaccattgttccatccatttttttagcttgtaggtcccgaagccgatttcattatcaacttaatatggtccttcccaattaggctcaagtacccccactccgggttcttgagtagctgggaagacccttcttaggactagatcactaatagtgaattttcgatctttgaccttcgggttgaagtgtttagccaccttcttttgataagctgccattcatatttgagactcatcccggagttcgtcaatttgatccagcgcttcttgtaataaagcct

SEQ ID NO: 41138 - DNA, 1484 bp, Cannabis sativa
aatatgggagaaacaatcaaggaggaagatcaagctgtgatcatattgaatgctttgccaaatcagttcaaagaaatgagaactattataatgtttagcagagacaccctcacccttgaagatgtaatgagtactctcagatcaagagatgcaaaactcaattggcaaaaggctgcaaagcaagaaaccagaaatgatgaagccttgatgattcgaggaagacaaccaaagagaggaaattcaagattcagggatcagtctaagttcaggaacaattcaaggccaaggggaacacaagatcgaaatcaaaaccaaagggaacaaggaaatgccatcactgtggctagataggtcacttaatcaaaatcggttaggaacttagggacaagaagaagcaaaataaagatgaagaggagaaaggaaatgattcaaatgctgcagttgatgatcactatagttcagatggtgatgtttttataataatcaaggcacaagatgaagcttcaagctctagagatgcatgtaccagctcagatcacagggacaatgatgaatggattcttgacagtgattgcacctaccacatgagtccaaacagggattagtttattgactactccaagattgatggtgaaaaagtcatgatggggaatgatcacaaatgccaagctgtgatggtattgtcacaattaccatcagaagctatgatggcactatcaaaactctcataaatgttagacacattccagatttgaagagaaatctgatttctcttggaactcttgatgatgaaggatatgagtacaaaactggtaaatggactatgagaatcactaaaggttcattacttgtcaaaagagatattaagaaacatggcttgtacttcatggatggaaaaacaatgacccctgcataagttgcagcagtcaccaaaggcaagatcgattctaagctttggcatgccagattgggccatatcagtgagcaaggattggtggagttgtctaaacaaggtttgctcttgaactatactcatgtaaatttacccttttgtgagagttgtgtgtagggaaaacaacacaagatcacatttttaaggagcaattacagagctaaataggtgcttgagtatctacatgctgatctttggggtgcaagcaagatcaaaacacctagaggaaatcaatatttcctatctgttatagatgactatagtagaaaggtatgggttttcttattgaaacagaaaaatgattgtcttaacaagtttagaaattggaaaacatttgttataaacgaaactgataaaaaggtcaaatctttgagaactgataatggacttgagtttattaatgatgagtttgatgagctatgtgtagaaacgggcattagattgcatagaactattgtcaaaaaccctcaacataatggggttgctgaaaggatgaatagaacacttctaaacaaggtaagatgtgttctac

SEQ ID NO: 41139 - DNA, 1680 bp, Cannabis sativa
atgcacacggggcggagaattggcagggagtgctcccctgttcccatccccgttaaggattttaatctctatccccacttatttcccattaggggtgggacgagaaatcccctaatgggagcggggacggggcggggaatcccctaattgaaaaataaagtttataataaaaattttaatatacaaaaatattaaattacataaaaaattaaaatatgaaacattcattattattcaataaaccaattattatccaaaacacaatttaaaattcataaaaaagatactaatgtactaaaaaaaaatataaacataaataatgaattatgaaatattactagaaatataagataaaatactaaacggtccctgtcagggcagggagtgtgatccccgtccctgccccagtttcttggtgattttttttttgtaatttttctggcgataatgccaattctgatgactttttcggcgccaacagcaactccggtgactttctcggtgccaacaacaactgcggcgactatgccaattccgatgacttgtttcaattaattttattatttagcatttatatttcattatgatttttcatagtgtcgaatttagtttcacaaagttcataatttcaaaactggttttaaaggttttaagggttctgtaatgaggttgctctattatatgatattattgtatattttttattattttgtttctaggtttgaatctatttttcacacttatattttgttttacattattgttgtgcattgtgtgttgttttgtttatatttatgggtattttattgtgtttttttttccacttggttgattgatgaaactggtttcaattatttttattgtatatcatttttgttttgttttcataatctttattattattgtgtgacaaaactagttccttgacgatgaaactactttcttggtgaagaaaccggtttcttggtatttttttgataattttgctgtcgatagtgccaattctgaagactttttcgacgccggcagtaactccggtgattttttcgactctggcagctactccagcgacttttttggcaccgacatcaaactccataatagtcgtcggaattggcattgtcaccggtaaaatcactggaaaaatcaccaagaaactggtttcttcatcaagattccaacttcttcatcaagaaaccggcttcttcatcaagaaactagcttctttatcaagaaatcggcttcttcatcaagaaaccaacttcgtcaccaagaaaccggtttcctcatcaagaaactggtttcttggtgatttttccggcgacaatgctaattccgacgactatttcggcgttgacggtaacccgggtaaatttttcggcaccgacagctactccgacgactttttcggtgccagcaacaaactccggtaacttttccggcacgagtaacaactccgacgatcactgtagtttcatttgttttattttttttaaaaaataaatatgaagggaattttaatattttttatggtaatttaattaagtttttattttttatgaattttaaattcagattctctttttaatgttttatatgtttttttttttttgaaaaaaaaatcatattttaatttgattggttagataatatgccatatttattataactttaataatt

SEQ ID NO: 41140 - DNA, 1612 bp, Cannabis sativa
attcctgctgaaccgctcttccgatctttagggcacaaaacccaacacaaatgggtgtacagaatcaaggagaatgcagttggttttgttaataaactcaaagccaggttggttgccaaaggcttccaccaacaatcgggttttgattttacagaaaccttcagtcctgtagtgaagcctgtaacaatcagagttgttctcactttggctcttactcaagattggactgtgaggcaattggatgtggacaatgcatttctaaatggggatatacaagaggaagtctacatgattcaaccacctgggtttgaagatgagtctgatccacacttggtgtgcaagcttcacaaagctctgtatggactgaaataggctcctcgagcctggtttgagaaacttcaacactgccttcttgctcttggattcactccttccaaggctgatcattctttgtttattcagcataccacaacatctacaacactaattctagtgtatgtagatgatatcatcatcactggcagtaaccaagagcacatttcacacatcattgctgatctcaacaagcaattctctcttaaggacttaggcaagctaagttactttcttggaattgaagtttctcacactgataagtgaatgcatctttgtcagaccaagtatgctaaagacttactgtgcaaggccaaaatgcagggagcaaagtccatctccacaccaatgacaagtggcctcaaactttctgcatatggtagtgatcctgttaaggatcccaagctatacagatctgtggttggtgccctgcaatatctgacaatcactagacctgaaatagcatacattgtaaacaaagtatgccaatttatgcaaaatccttcacaagctcattgggctgctgtcaaacaaatattgaggtatattggaggcactttggattatggattgcatctcactaagtccatcaactttgagctcaatggcttctgtgatgctgactgggcatctgaccctgatgacagaagatccactttttgttttgctctgttcttgggtagcaacctcatcacctggcagtccaagaagcaacatactgtctccaggtctagcactgaagcagagtatcgaagccttgccattatcactgcagagatagcctggttgcattctctcttttctgagttgcacattcatctgtccaagcctcctgtggtttggtgtgataaccttagcaccattatgcttacactcaatccggtcttacacgccagaaccaagcacatcgaattggacctgtattttgtgagggaaaaggttcaacagaagcatttggaagttaagcatgtgcctgcctttgatcaagtggctgatggtttgaccaaggctatctcaagctccagatttgacatctttcgaaacaaacttaccattggtagtagtaccaattgtaagtttgagggggcctgttagtgtgtatctttgcttgagttagttttagttagttagaatcttgttattggttagttggttgttattttccagctgtctcttatcaactaacttgtaactgtttctgttattcttgttcagagtgtaagcttgtatataagtcatg

SEQ ID NO: 41141 - DNA, 944 bp, Cannabis sativa
  modified_base (503)..(505): a, c, t, g, unknown or other
aagaatcaacagtcgaggaggagatctagtagaatcattgaatatcaacgattgagggagatttccttagattttcatacccacacgttttgggttttctttcaaaaaaagaaacaaatctgattttcttttaataaaaaaattgatgttgtttagtgtgttttcttaattattatgataattatttgttgttgtttggttgatttacatatatttttattatttttttttatgatttttgaaaatctggaacaaaactactgcattgaatttctaggaaatataaaaagaacaatgagtgtgtgttaaaatttcaatacaaaaatatgttgcatttgcgttgtttttaagtttcatttatgttgtttttccatcttcctaaaattaaaagttaaatgtgctggcaatacaataacaacacaaatataactgaatgtgagaagaagatattgcaaatatgaagaaatttatatatacagatgcaataacaacattatagtagnnnattttgagttgttttgtgtgtttgctataattatttattcatcaatcgatattattttagttgaaagcaacaaaaactacacaatatctaccaaagaataattaagttgttttcatattattgtgaagtttttgcaacatgaaaatattacataaaattaagttattttcgtgttattgtaaagtttgttatgaattattatacactacactagttgttcaacaagtaaaaaatagaattttacatgtcaaaacaaaagtttatcttatctcttacattaagacatgtaaaataagatcacacattatactaattttgaataaagtgtgaggattgataagaagagattgtaaatatatatataaaaaaaaattacttatatttagtaataatattgttcgttattttaccattgttttaaagttgtaaatacgttgtt

SEQ ID NO: 41142 - DNA, 5072 bp, Cannabis sativa
  modified_base (1199)..(1201): a, c, t, g, unknown or other
gcagttttcgagacatcttcttctcgaattcttagctgatgatagcctgagcgaagatcgatcttggagaagaccgtcttccccttccgttgaccaaaaatatcatccattcaaggtagaggatacttattttttatactaagtttgttcaactcctggtaatcaatacacattcgcagtaacccgtctttcttcttcacaaataataccagagcaccccaaggagagtaactcggtctaatgaaccccaggttcaataactcttgcaattgtatctttagtactttcaatttttccagagccattcgatacgatgcttttgatactagttttgctcccggaactaattcaattacatcaatttcccaggtaggtggcgatctcgataaatcttctggaaaaacgtcaaggatcttgcacaccaatctcgtgttctcaggtcaaaatgtcacaggttggctggtatccactacagtgactatgaattccaaacaacctctgctcatcagatcattttctttcaaaagtgttattccttgtatgcgtgtcccctaaactttacccacaaaactgttgggttagcactattgggctcaaacaccaccatcttccacttgtaatcgatcgttgccctatacttagattatatcaaaatcagaaagttgcagtttaattagattagcggttaattcacaaccgtcaatccaaaaagacaaagactgaatccacctagtggatactatatggtctcccgaagataacagagtaccaaaccctaaagcataaatatcatggtttatggaaactttcaattactcaactcgacacataacaatgagtagctcccgagtcaaacaatacagtgtaggaacaacaatttatagataactgacctgtcaccactgacggactagcatcagcgtcagcctaagtcatagtaaaaagttgtcccaggttctgagtagtattcttcttaggctactctttcttggcctgagaaaaatctctgataaagtggctcaccatgccacactgggttagccttccgtttgtgatcagggttatcaccattggtcctcttattgatattacaactagcaggaggattcgatgtcgtggccacatcctttgctgtctactcttttgttacatgttgttcatcctcctcaacaattaaggctagctctaccactttcttnnncaaagtgtcatgagtagttgtaattttcaagtcccaactgattgtggcattcagtcctctcacatatttctgtttcctggtgactgtaggccccagatcaccagcaaacttggaaaaccgatcaaactccagagtgtattcggccacaatcattttcccctaagttaatttcacaaaatcctccatatgtgaagtcctcacagcgatgttatataatttttcctcaaataaactcttgaactcatcccaagtcatcacactgacatcacgagtttgtcccacaatatcccactagacacgggaatgatcttgcaacatgaaagctgcacaattcactctctctattcccatcaccctcatattgtcaaggatacgagtaattgtactcatccacctcttagctttaattatgtcagtacctcccagaaaagttggaggtcccagcttcacaatcgttcaaacacgaaatatctatgcggcaacatgaaccccaggttacccaccattggtacaggtgcaggtggtaacagtagctcagtaggggtagccggtgttggttgatgcccaacaggggcagccggtttcattgatcgatgcaactcttcctcttgataaagtatgatacctcgcatttcttgaaacactaccaatcagtaggtagattagcattaccagcccccacattatccccggattctgcagaggcacaggcagtgccggttgattggtttggtcaaccccaggctctacttgctcaccctgtggcctagatgattgcggagggtccattttcacaagtattcttgtaatcaacaacgtcaacgagttaagcaccaataccacgcttatgcacttattgccttaagccctaactcaactatttattccacttaaaataaacacttatcatataacattttaaacctggcatcatataacaaaaaaataatctagatgctcacatactgcctaaaatggaaagcggtaaataaatgatcatataagcagtaaagtatttactctcaacacttactgcaccatgagccgagcttgtctctgacgatgattgtacatgttcggacggtctacattaagtttaaaaaccttggcgctctgataccaaaatgtaacgccctaaaaattaggcacgctacccaaggtgattaagaaaccctaatccccctaaaattaggattacggaaaagataagcgcgggaaatttaaactttaaatgaaacagaatgaaaataaaacttgtaataattttaactttacaatcaaaaatacatgtttcgggatcccaaaaatattttacgaaatattacaagtctttccattagccaacctaagcggcaaaaccagagatacaaaagttcaacactggtagaccccaacctgcttggtctagtttcggccaaacatgtgcatacattgcccaactctctcactcatggctgattagagacagatttaccctttcctgcacaatatagcacccatgaacaaagcccagcaagacagtataatatattcctaatcataactaacatatcttataaacattaatgccatttcatgtttgtctttttgacgtagacctgcacgttacgctaacatgcctagttatttctatgtggcatagacctacatgttacactcacacgtctatatacaataaggctttagaatggttcatttaggttatggttaccgagtctaacctaatcatgccttgaacgcataaccctcaatctttacatacattataatcacatgggataacaattacatactaacaatccactagggtattaaccctaggctattattagggtaataaccctaatcccgttttcaatttaatcacatatatcattttaaatcccaggccaacaaccagaggcgagctgcgatgcccaaggtgctgggccacggccactgggttccaaaccctgaaaaaccattttcccagcttcgaaactcaagccaaaacacaccaaaacccaaccaaaacatgctcaaacactagcaacaactccacgataataatccatataccagaaagctatcacacacattttaaactctaaatcacagcatacatgcatcataaaaatcagatttaaacaacatacaacataggctccaaataagagcaagattctccaagaacccaataaccaagagcttaaatgcttcaccaaaattatcaacccatgataacaacaaattcacagctataaacttaattaaaagcacaatagaatccctaaaatcatttcaagaatactacacaagcatcctacatcaatttctaacttaatcaagcatatgctatcaagattacaccaatatcaacatacatgcattctaagaatatccaaagcttaaaatcataacgttcatctttaattttagcaacctaaaaccaagaatcaaaggtgtgggaactacctcaagttccaagcaatgatcaagccacaactcttcaaaatcaagcataatccaactcaattctcaagcaaattcacaaatttagagataggtttaaagagagggggaggggtgggttttgggtgttggaaacccaaaaattactttccatttttataaataattttcttttgatacaaatgatccaaatgagccaaattaccaaagtgcccctagggccatataacacacacaaaagcatccaagggcaattttatcatttacatcacaaatatactcaaataaatttcagattaatcacttataaatataatgccaataaataatctcgaaattgtatttcgacttcgaacccaattcggcctgaaatacccaattgtgactatactacgccaacttgtcagaatacacctgaaaaaggataaaataggcatactataaaataatatagtctataagcacgtaattaaattaaattcatagttttaccattctcttgtcaaaattactaaaatgtccctgcctcaccaacgggttcttaacatgtcataaattatattaattcacatataatagattatataataatataattccataataatacacaattaactggttagggtttgctaatccattttcttaatcctagggtattacatgggtcctagatgcggatgcccggtaggacagctggtttgacatattgttcatccagacgctttctgctattcaggtcagccctaaggtcatgggccacacccaatctgttaaataccaaggtaccagatggtctcaatgtttgacttgtttggcttgtgtgttggcgaaacatttcagtctggatgaagttataaggtataacttcactcgaagagcgctcaggtaggatctggccgtctattgcttggcccacaggttgaacctgtggctggggattggagggctgaccattatgagcttgggcggtatgcccagcagcgtactcttctgtaccgctcagtggaatactagacacggtagctggttgtggattagaaacttggaaggcccaccatattagtacggtggcctgccttgtttgatcatcgatggctgcttgctgagccttcaaagtttccatctccctatccctccactctatgaactggcatcgttgctcgtcgaacgcgaggtttatagcagcaccaaaatcctcctgatcatgatgcaaagcgttattatgatcttgcatgagtccaagggctgtacggaggttttgaatctcagtatcatcccccaccatcctttgagcattggtggtggacgagactctagtgttgggagtggattggtcggctgcaaaactggtgttcccagtctcttgcacccttggtgtgatcccagccagaggggaagttgttgggttttatgccct

SEQ ID NO: 41143 - DNA, 1705 bp, Cannabis sativa
aacaaagtgagatgtgtatgctactttagagtcaggattatctcaaggattttggagagaagctaccttgacagcaattcacctaatcaataaaagtccatcaagagcaactgaaggtaaaactcccgaggaaaaatggtcaggaaaatctccagacctttctcttttaaaagtttttggatgtgctgcttatgcacatcagagtataggaaaagttaaacctaggactttaaagtgtgttttcttagcgtaccctgaaggggtaaaaggctatagactttgggtaaaggaaaaggggggatttaaaactatgaatagtaaagatgttatattccaagaatatatttttccttgttaacctaatgaaaagtctagtgcgagaatagaagatactaaccctgtggttacaaacctagaagttaaaacaggttcgaatcaagtgaaacaaaatggagacacaccgggaatggtttaggtggaatcaaactaaaaccagcagcccgataacaatggtcaagggagtggaactgatgctcaacaagagatcaggggatgaaaacaccgaagaggaccttacaaactatcagttgacaagggataagactaagaggactacgaagcataatcagaagtacagctacaacatatggagtgaagaactagcttatgcacttctaacaaatttggaaatggatgacatggaactgaagaattataacaaggcagcaaatggaaagaactctaaggaatggaataaatccatggatgaggagatggggtctctcaagaagaataagacctggattgtgataccaagacccgagggtaaaagtattgtgtcttgcaagtggttgttcaagcacaaggaaggaagatctaaagatgagcctataaggtacaaggctaggctagtcgctaaaggcttcacacaaaaagaatgtatcaatttcaatgagattttctctcgggtggtaaattataaaacgattagagtggtcctaagcttagctacacagtatgacatggagatagattaaatgaatgttaccaccacttttctccacgggaaattggaagaataaatatacacgacccaaccaaaagggtatgtagagaagggaaaactgaaccatatttgtaaattgatcaagtccttatatggactcaagcaatcccctatgcagtggaataaaggtttaacacctttatgatgaaacaaggtttttcaaggagctgctatggtacgtgtttctatcacaaggagacagacattaactcggtcatctacctattactttatgaagatgacatgcttattataagcaaggagagatctcaagtggatgaaatgaagaggcaactcaaggctgaatttgagatgaaagacttgggaatagcatctaaaacactgggtatcactataaaaagggacagaaagctaggcaaactgttcttgacacaagacgactacattcaaaagatcatagagaaattttcaatgaaagattcaaagaaaacttctcaaccaataactagccagtacattttaactaaggaacaatgtcctaagactgaagcagagaaagaatcaatgagtaaattctcttactcaagtgctgttgggactattatgtacttaatggtttgtacaaggccagatctggcctttgccataagtactttgagcaaatacatgtcaaaccca

SEQ ID NO: 41144 - DNA, 1413 bp, Cannabis sativa
  modified_base (1371)..(1374): a, c, t, g, unknown or other
gagagagagagagagacgagtgacggtcgttctcatggtgaagctcgtcaacgtggtcgaccatggtggagcttggatgggctttcgtctatggtggagctcgtgaaagacaaagcgagaaagagagagagcgagagatgagatacaagtgatggagcttgtggactgtcgtctatgggaaagagagagggagaactctagggagagagatcgacattttgaaaatgtatagatttaaaaaaaaattgatctaaaatgcgctatattataggccatgattttcaaccatcgacaattttcttttaaataaaaatcataattttaaggcacgcttaaaattcgtcgagaataacactataggcgatagttttaaatcatagggaatacttcatgagtgtttaaaactgtcgagaatactcaattttttttgacaattttaaacactcaatttttttagcgacgatccctaaaaaaaaatatttttaggtctgttaggaatagtgatttatgtagtagttcatgtaagccccatttagtttgttttattattttatttataaatttaatcaaattaataattataatttattattttatttaaatatattataagataatgtatttaaattaaaagataatataaaacaaaaaatataactgaattatagtatttagttatattatattattttgaattttaattttaattatcaaattagaaataatatcatcttttattttaaagggttaaaaatggctttaaaatattattatatctaaatgatatataaagtgagagtacgggaccagtggatcaaaattgaaattaggaaatggaatagaattaaaattaactttcaatctctctctctctctctcttatctctttacatgtcacacacatacaaagtgttgttgtataatttttccaatcttaggttacaatgtctcatggattgagtaaacaatataacagaaaaaattatacatcctattaaatatataagcccactcatatcttgggtgttaggttgatctaaaagatctggtgtggattcttcatcaaagccattattagattagatgattgatacattatacaaaaagattcaaagaaaccctggtaggtaacacgaggtaatttcttaatctaacaagttagatttagtttacgtaattttgtgttgagatctagggtataaggttcatatcagattcaacaaaatattaattttaaaaacaaatcatatttctacttttgctacgattctgatatgaatcttaaaaactaacagtggttgcattagccttcgctctagtcctcgttctcttcctaggaagggaagggtgttggaacttattttaccaggnnnntagatctactcacaagtatattgtttaacaccctaaata

SEQ ID NO: 41145 - DNA, 1598 bp, Cannabis sativa
taattggttttgattaactaattagaattctaaattagactatatcttatttatgaattttcactacgggagggcttaattgagaagaaaaaaggttttggattttgttaattaagagactttgtaatgtctaattaataaataagttaaatagaaattttatttgataattaattataattatcaaataaatagattttatatttaaaggtttcaaattaaaatatgaaatttatgaaagaaaaagataagttgttaaataaatggtaaaattgaaacaagtgggcctaatatatggtcggccacttaagtgaatatttagctattattttatcttttttaatttcatataatttaaaccctaaccctagaaggaatcttataaatagaatatgagaggttcataacctaacaaccattcattagtctactctgtcagaaaattaaaaataaaggctcctccctatttttcaattctttctctcttctctcttcaaattttgaatgccctatagtgatagagtaccttcccactcatacaagtcaatattcaatcatagtgtgaaagattgtgacaaattctaacttttgaaggagatccaagttcagatcttattattactctacgatagaaaggaacaagggttagagatttgaacagaaggaaccataatattctgctgcgaccaatgtaaggttttctagaactttatctgtgtttaattcattgttttaggaaattcatatttatggtgttagattatagaatataatcaaacatacattgtaatatcccagtaagctaatagttaataattagggtttatatttatattatgagttaactaggtaataattgggattatgatcctactaatctaggttaacataaaattttaaatttgatataagtggatacataaatgtaatttttaaattacggagatttatatagaatgtgtgaatgtaatatgaactatatgtggaataaaaatattttcaggtttggcgaccttagatactcgattgggggctagaaatgtcataacagacttaattgatagaattaatgggaatattatgataagttgattttagaattaccgagatattttgggatactcaaagttgaccaaattacccctagctttagaagttacttataagctaagtaaagggtaaaatagtctttcacctaactaagttgactttttttaatgtgagattctaaaataaggctaagggttaatattaatggaataattatagaaattaattgtattttccccacttgacacatccacacgtgactcacttagattcaacatatatatgtcatcatttattacataacaataaaataaaagaaactatatgtattaagttattagtaacaattacacctacaccatacactacttaatctctctctccttctaattgttcggtcgaatcaaccaaccaccaccatcatcttttttttatatatatatatatatacaccattgttacactttgaagcttggagttggatagcatatatcaccttgagagttaagctatcataaaaacagcttggtaagtgatatattgagact

SEQ ID NO: 41146 - DNA, 1346 bp, Cannabis sativa
atgctatataaatctccgtaatttataaattaggcttatttatccacttatagtaaatttaaaatttatactgaaatatactaatatgatcataatcctacttataacctgattaaccaataatataaatataaatccttattatttatcattaggcttattaggatattacaataataacttgatcctcttcatcaattttgacccctacacttaacaattgagttatgtacctattatatctatttatatgatccctaacatcttttccttcaacaaattttgaattcatataatagcttctttgaatataataaagttgttagggattttgatatataaagttaactatttctataactcagacgaacatgtttcattccatacactatactttaatttaagagtcaagcttaatagtgcttactccttttgcatataattccttccaatcttcattagtcatactctcaggcttcttttcctacagtacctttaggagcccttgttgtatcaacacatctttcactgtgctctgccataaattgaaattattcttcccatcaaaaagttcgatctcaaattttttggaagataccatctttgacattatatctgaactttggctttgataccactttttagaaaaaaacaataaacttcaagcgcagaaaaataacaaagaaacaaagtaaaacaatttactcagtttggtaaaactaacaaacccacaaagagagatatatttcacttatcactttaaaatttcgtatgctctcttgctagctcaatctctccactcgaattctaatacgctatttgtaacaccctaactaattaggcatgataacatgattttaaacgtactgtgctgctcgttgctaatcaacgagattaatgaaaaatgtgattaattaaaaatttcttatttaattaataaacttaaagtaatacatatataaaattctgggatcccgttacaaaatatatttacaaaagtttgctagtttaacgtaaaagttttgtcgcctaatgactgtcagtaaaagcattgatgtcccctaagatcgtacgcttcagacctaaccgccccgacatgtacaatcttcacctgctcgttctcacggctcctcatctttagctttgcccttacctacacatgtaaatagcaatgtgagtcaacaaactcagtaagaaaagcgtaacgtaaaacatacaaatatcccgagttataacctggcgcccatacacccgatcataaccctaatccccgtttcctacacggtactgagcctagaacgttcatacgacaatactatcgaccataatgtcagcctatactcaat

SEQ ID NO: 41147 - DNA, 1803 bp, Cannabis sativa
tttaaaacgacgtaaaatataattatctacatttagaaactgacgcaaaatatgtacttttctattttatcttctgcgtcggtttagaaataacgcaaaattataatggcaatttaaaactgtcacaaaacactaattatgtcggtttaaaaatgtcatatctattacgaaaatatttttttttttacctattgtgtcacttataaaatgaagcacaaatgtaggtaagagaaaattgtaaattttcatgtaattttccccacctgctttatcaaattttagaataattctatataatagtaaatacataatacaaaacaaaaaattaaaataacatttttaaaacttatataaaattagtaatcgattttattaactgatcacataatacaaaaattgttaatagaatcgatgctaaaactgtaccaaagttaaatcagaggcatgcattgcatgataaggcaataattatggtaatgttgtgcccattttgaaaggactccatttgaggctaaatcattttaattaagaaaagaaagtaacccttaaatgatgaaagagaaactgtaccaaattttattgaaacaaataatgcagagggtacatgataagattaagatattcaataattatatcccacgaaaaaattaaaatttttgatcttaagttccaaaatagtagccaaagttaaaagtagctgaaattacattgaaaaaagatgctatgtttggatgtcagattttagtatgaaaacattttactaaacaatagtgaaaagtatggggaaaatatgttcctataattctataataagatttcatccaatcatttctttttttgatttgttataagattttatttaaattcgaaaaaaaaaaatctatttttctaagaatataatctctcatttttcttaaaattccaaataaaataaaatgaaaggctttggaattaattcatttgttttctacctaaaatctgagttccaaactccaaagatttgaaaagattactgaaactaaaaaaaaaaaaaaatagttcatataataaaatcaattaaaataacagtccaaataaaggtaaccctgagaaaatttatctttataggaatcgtaactactattactgctgagattaaggaagggtgaacaaacgaacctgaagtgaaggataaaaggaggagccaaagttgctttattagccattgatttgtactatgatgactttgaagactactctagcaagaagtatatagtgctgtttaagacaaacagagaatgttagaagtatggagtgaaaatgatgaatgaaaaaagctacttttaatgttaagttttggttacttgagtataccaaaagttgaggcttttaaactgaaatcgaaaggtgtcaaatgggctaataacgactatatttatagatatgagctgttatatatggcctaaacggggattaagaatcattttaatctcagagaaaatggaacaaaagaaatttcagccacaagccaaaacaaattcaacaacacaccaagaacatggacttgaagaaaactaacaacacccaaaccagcaactaaaataataaacagcagctaatttactaaggtgaaaaggcttcattatgccccatatgaaaattaatttagcaatttagtaaagtggttgatagttcacagttaagtatgaatatgaatatgattatgtaagctggaacaagaatccaattaaaaaaaccctttaaacccttataaaacattacaaaagaaatcatgtttaaaatgtaatctcacaggaagcatca
